United States Patent Application Publication US 2020/0377945 A1 - sequence listing, part 45

SEQ ID NO: 10019 - DNA, 131082 bp, Unknown
  gut microbiota DNA sequence
ttgttataattattatctaaccaatagttcgttaagcagttcttcagttaaatcaagttcggtataaacggtaataccgttttgtttcaataaagcactggttacgccatcaccgttcataagtgtaccgttaaaatttccgttataaattttccctgtaccacaggaagggctgcgcgctttgagaaccgcaaattttatttgttttctgcgggcgacttccagagcagcttcagcacctttgataaaattttctgtaacattatagccagcattgtcgtatactttagcagtgccgttaagaacgtcgctgccatcaccgcctgtaatttctgctggtagacgtggtatagtaagctgtcccaggcattctggacagatcggtataaaaagaccacaatctttatatttggcaagcagtgtgcagtaattgctgctgccgttgtattttacttttgctcctaataaacaagcacttataagtaacataagcacactcctttactgattaaatattaacttaagtgtgaatttttggcaacctgaattgacagagcatgccaaaactggtaaggtaataaaagggaatggggtactccctaaatgactttagtcgtttgaaccgcttagagttgataagctgatgacttctgccgtgtaggcgaagtatcggctttttatttttttgtaaaggtggaagaaagatgcaggaattattagcagtggcgctcggcggcagtattggtgccgtaagccgttatttggttacaaattatatttttatacgctggcattgccactggccttgggctacttttattgtcaatgcggcaggctgcctggcaatgggatttttaatggtgctgattacagagaaaggtttgttgaccccttattggcgtttattattgtgcgttggttttctgggaggattgacaacattttcttcatttagctatgaatcgctgacgctgctgtcagaaggtaatctggcaggtgccggtttgaatattattggcagtgttgtcgtgggtgttgtttgtgcttggtttggtgcaatggcagcgcgctctttataaaaaacagccggcttttaaaccggctgttttttagacattgatatggtattattttacattgtttttagctgtgtttaagataaaaatagaagataggattaggatcatgccaaggattttagcaattgtcagagattctccaaaaataaaaatgccaatagcggctgcgaccagtggttctaaagtagcaagaatagatgcctgacctgcatctacatcctgaagaccgcgagtgtaaagcagatatggggccacagtacagatcaaggctatggcaatggcaccgataagagcacgcaaatctgcaagcaaggtgaaaagctgtaatggttcagccataggtaatgcggcgatggccgcaaaataaaatgtgtaagcggtaattgtaagtgtgttgtaacgccttaatgccagtttactaaaaatactgtacagggcataaccgataccagaggcaagtccgaaaccaaaggcttctaaggtcaatgtcattttgctgctgaagataccagtaataaaagtacagccgcagaaagttgacaaaagtgccagcattttgcagcgtgtaaatttttcgcgaaacaaaaatatagaaagcagcattacaaaaaccggtgctgtatataaaagcagtactgcaatagagattgaactgctttcgatagagcggaaataacagtagttgaaaaagaccaggctgaaaattcctgttccgataaaaagccagctgtcacgccagcggatttttaataacttaggatctattttaaaaataacagcagtcatcagtacagctgcaaataatacccgcagagcaactatctgcagtggcgagaaaccgcaggcggttaaaaatttgaaaaaaagagcgataagcccccataagctggcaccggagatgatcgatatataagcgctttgtaacatgctaaaccttctttttttatctaagatatttaacagtttagcatacagctgataaaaataaaagcacggcaccgtataaaagatgccgtgctttttattatagaaaggcacagtaaactctgattaatgcatcagataaaaatgggtctcaatcaaagcgttgaaaaattttttgaatgtcatgataaagtcctccttagttaagacgaaaatgtattttaatgcttcggtgaaataagctgtctgaaaattgtaaatcaaaaaatgcattaccctattaataaattataacataaaataataaaagtgcaattatttcacaaaaaaataacaattataaaaacaaaagtctttaacaagcggatagaaaagaatgcgatgaaacgtcccaaagggactataaaagtccctgtataaacaaaaaatgtatataaatttaaaacgcccgccaataatagcataattattagcgggtatacaaagcttcaataagttttcgattgtagtaaaaaaacggaatgaaacttacaataagttaaattgaaacagttgattatgatttttgttttaaagtgtcaacagtacagaagatttttttgttctttttatgagcagatggttttgatgtgaaccctttaccgaaaacgtcgttggcatcttgaatgatcataaagcagccaggatcaatatcgcgtacgatctgtttgatttttgcgacctgtgtaagtttggcaacaactaaaagaactttacgctgctgatgtgtgtaggctccttccgcataaaggtaagtaacgccgcgtccaattacttcaattatgccgttgcctatttcttcataatgttcactgatgataataatgtttttcttgtaatcaaatccatctgtaaatgcattgcaggttttaaacataacgaagaaggcaagcagagtataaagcactgcctctaaaccaaagtagaaaacgccaataaacattaaaataatattgaacataaagcctgtagtaccaatgctgatactgtaatgtttgttaataatcgcgccgatgatatcagtgccgccgctgctgccgcctactctgtacatcattgctgcaccgattccataaataacgccgcctgcaatacaggccagcatggggtcatggacataaggcgctttttcagctaagaaatggaaggcatcaagcgaaactgaaaaaacaagcataccatacagagcgctgacaatataggaccgatccatgaatttataggcagcgacaaataaaggtatatttaaaagcagactggtaatgcccattggcagaccaatgagataatatagaataacagaaacgccgccgatgccaccgctgatgagcttattgggcatataaaaggcgttaatggcaatacccataaggacgcagcctaaggtgaccataagatagcgatataagtgctgacgcataaaaaagctcctttgtgcaaattttgcgaatattgtatacatagtagcactttttagaaaaaaagcaatgttgtgggttatagaaataagtaaaatttttgaaaaaaagactgaaaacacaaataaaacagaaaaaatttataaaaatgttcgaattatcttgcgactacacgcgaagcaagataaaatatattgtatacaggaaaacaatcgaggctatattatggaaaaaatatatgaaacagcttatgcaaaaataaacttaggactggatgtgctgggcaagcgttccgatggttaccatgaagtacgaatggtgatgcagagtgttggtttgagcgatgcagtggaaattgaagaaggtgaaggacttgtggttgaaacagatcatagtggtcttgccggcggtcctgataatctggcatggaaggcagcggagcttttagcccgttgctgtggtaaaatcccgaacgttcatatcagactgaacaaaaaaatttttttagcagccggacttgccggcggtagtagtgatgcggcagcagtgatgcgtggacttagccggctctggcaactggatttgacggcgccagagctggaaaagttagcggcggagcttggttctgatattcctttttgcattacaggtggaacagctctggcagaggggcgtggtgaaatattaacggaattgccggaagcgcctgaactacttttggtattggcaaagccgaagcttgaagtagcaactggctgggtttatggtaatttccgtcagcaaaaggtcaatcaaagacctgatattgacggtattataaaagctttggagcagagtgcgacaggactgctgcttgagagttgcggtaatgttttggaaagcgttacgatacctgcgcatccggtcattgccgagattaaacagaagatgctggcggcaggagcaacgtgtgctttaatgtcaggcagtgggcctacagtttttgctgtggcggagaaaaaagagataactgagagaattttgacagagttgtcagagcttgatctggaaactgctgttactactactgtacaaaaggagaggatctgaagatgagtgggcaccttagaccgattaaactagacagttacaaacctctgcgtgaactggtatgtgaaaatatccgtcaggctatcattgatggtacttttagtcccggtgagcgtttaatggaaatccaactggccgatgaaatgggcgtcagccgcactcctgtacgcgaagctatccgtaagttagaactggaaggctttgttgtaatgatccccaggcgcggtacttatgtagcagatatttctattaaagatatcaatgaggtttatgaaattcgtacttcactggatgttttggcagcaggtcttgctgcagaacgtattaatgatgatgaattggaaacattgcagcggcttttagtagaaatcggccagcatattgaagaaaataatatggataaaatagttgaagtagatattgctttccatgatgttttatatcaggccagccgtaatgaaagactgcgtaatataattaataacctgcgtgagcagattacagttatccgcggtcgttcgatgatgtatccgggtcgtttggcggatacgatggaagaacatcgcgctctcgttgacagtattgctgcccgcgatgttgaaagagcacagaatgctgcacgtatacatctggaaaatgccgagcatactttgctcaaagacatggttgaaagtcataatgaaaagaagaataaagaataaaaccgaaagaggttaagttgtatgtataatgcggttattttggccggtgggaaaacgccgtggctgcaaaaagccgttggaactaatataagagcgctggctccattaggtggacggcggatggtagagtatattattgatgctttggatcaaagcggacagatcggcaggatcatagttgcggctgatggaagtcaatgggaggcggcagtattgccgcagcgtgctgaacttgtagccgtggaatccagttcaatgcctgaaacagctgcagctgcagctgcattattgcctgcaaacagtaaaattttatttgtttgtgacgatatacctttgctgacctctgcggccgtgcaggattttttgaagcagactgaggctgtggaagcagatgcttattatcctgtgattcctgaagctgattgtgtaaaagcttttcctggtgccgaacgtacttatgttaccttacctgaaggtagattcaccggcggcaatatgatgctgttgaatgctgatgttatttccggcggggtaataaaagccaaagatatttttgcccgccgcaaaaaaacttgggagttgtgcggttggttaggttttggttttgtgcttaaattcctgctgcacaggttgactctgtcagatatagaattgcgggcgtcagagttgttgggatttagcgggaaagctgtagtttcgcattatcccgagatcggtatggatgtggataaagaagaagactggcagctgctggaaaaatattttaagaatagcaagtagaaaagaggggcgctatggctcgagtcaaacgtatggaacgtgtagttgctttgacaaagcagctggtggaccatccgtatcaattgttttcatttacttatttttgtaaaaaatttgaggttgctaaatcgaccttaagtgaagatgttttagctgtgcgtgccggattggaagcctatgatttgggtagggttgaaactttggctggcgctgccggaggagtgcgttttattccatgtcattccgaaaaagctaatgaggaatttttaacagagctggctttgcagctggctgagccagaaagaatattgtcaggcggtatgatctatatgacagatctgctgtttaaaccgcagctggtaatgcgtttgggggagattatagctcagcgtctgcggcatttagagccggaatacattatgactgtggaaactcgtggtatacctttggcagtttttgttgctcgtgcttttaatattccggtggttatggcccgacgtgttggacagattactgaaggttctacggtaagtattaattatgtgagcggttcatccaaacagattcagacaatggctttgccgaaacgtgctttaccaagttccgcgagggttttggtgatcgatgattttatgaaggccggcggtacggcacgtggaatggcagaactggcggaagaggttggtgccaaagttgtaggaaaagcatttttcattgcgacgcaggagccggaaaagaaaatgattgatgattatacggctttgtttgttttaaaggatattgatacagaaaatcggaagatcgatatcagtccgttatgaggggatgtaaaaaatgacaaaagatcaggtaactttgaaagatgtggaagctgcttccaaacgattggcaggtgtagtgcataaaacacctttggaaagcagtcatatttttagtgaaatggcagggtatgaagtactactgaagttggaaaatatgcagcgtacaggatcgtttaaagtacgtggagcttcaaactgtattcagaccttaactaaagaacagcaagcacatggcgttattgccgcttcggcgggaaatcatgcgcagggcgtggcgttaggagctcaggctgctggtattaaagcaactattgttatgcctgaaggagcgccgctggcgaaagttgaagctacaaagggttatggcgctgaggttgtcttaaagggtggagtttatgatgaggcttctgcagaggctgtacgtctgcagaaggaaacaggtgcaactttagttcatgcttttgatgatccggcggtaattgcaggacagggaacgattggcctggagattttagaacaatgtccggatatacggtcaatagttgttcctattggcggtggaggtcttttggcgggtattgccacagcggttaaatctgtagcgccgcatgtcaaagtgtatggcgttcaagccagtggtgccccggcaatgtatttatccaagcatgctggcaagtgggtagaaactccggaagcacaaacgattgctgatggtattgctgtaaaatctcctggtaaaatcacttttgacttgattcaaaaatatgttgatgatatttttgtagttaaagacgatgatattgcggcgacgatactgctcatgatggagcgggcgaagatgatcagcgaaggtgccggtgctattggactggcagctatgctgcatggtaatattccccacgcggataaaactgcggctgttatcagcggtggtaatattgatgtaaatatgatttccaggattattgaaaacggcttggtaaaatcggggcgtcgtattaagctgttgacacatctgactgacagacccggcgaattgcgttgttttgtttcgtatatcgaagagtataaagctaatatcgtttatgtttatcatgagcatgctggacgtaacctgcctattggtcagacacaggtagaaatggatctggaaacacgtgatcacgcccatgcggaaattttggtggcggctttgcgtcgtgctggttatcgagtagaattactgtaaaaattatagttgttattttagaagcggaggtttatccatgtcagagttagtggcggttattttagcggcaggcaaaggaaccagaatgaagtccaagttgccgaaggttttacataaaattggcggaaaacctatgctgcagcatgtacttgatgctgctgatgcagcaggggctgcccggaaggtagtggtcgtgggtcatgaagcagaactggtagaagcaatggttggcgaacaggcacagatggctttgcaagctgaacagcttggtactggacatgcagtgatgcagacggaagctgttttaaaagatttttgcggtacggtaatgattatttgcggagatacgccgttattagaagcagcagagcttaaaaagttttatgaaggccatgtagcgtcacaggccgcagcaacagtattgactgctttcatggacgatccagcagggtatggacggattatacgcgatgcagacggcaacgttttgggtattgtagaagaaaaagacgctgtcttagaacaaaaagcaatcaaagaaatcaatacaggaatttattgtgtagaggcgccgttgctttttgaggtgcttgctactttaacttgtgataatgcgcagggtgaatattatctgaccgatgttctggcaaaattgaacgcaatgggtaaaaaagtcggcggtgttgctactgctgacagcgatatgatcatgggcatcaattctcgccgccaattggcagaagcagaaaacattatgcgtcagcggattctgaataaactgatggatgacggtgtaacgatcatggatcctgccagtacctttatcgaaaaaggtgttgaaataggtcaggacactgttatttatccatatacctggttggaagggactacgaagatcggtgaagattgccagattggtcctaatgttcggttgacaaatgtcagaatcgggaatactgcggaactgcaatttgtttatggacacgactgcgaagtacaggataacgttgtgatcggtccttatgtgcatttgcgccctgatactgttattggcgataatgtgaagatcggcaattttgtggaagtaaaaaattctcatgttggtactggcagcaagctgccgcatctcagttatatcggtgacagtgatatcggcagttctgtcaatattggctgtggatgtatcactgtaaattatgacgggaagaaaaaacatcgcactattattgaagataatgcgtttgtcggctgcaacagcaatatggttgctcctgttacaattggtgccggagcttatattggagcaggatctacgatcactaaggatgtaccggaagatgatttgggtattgcccgtgcgaaacagaagaatattgaaggctgggctgcaaaataccgcaacggctgattttacataaaaaaacggtttttagtacttgtggatttgtagctaatagttgtatactattaatgattaactaaaccttaaacattcttggagggatgggacaatgttgtcagatgagaataaactcagaattttttccggtaatgccaatcctgatttggcacgagagatcgccgcttatttaggtactactgttggcgatgccgttatcaaccgctttaataacggcgaagtacaagtaatgataaatgaaagcgtgcgcggcaaagatattttcatcgtgcaacctacctgtggcccgtccgttaatgataacgttatggaacttttgattatggcggatgcttttaaacgtgcttctgccagccatattacagcaatcataccttattacggttatgcacgccaggaccgtaaagcccgtgggcgtgagcctattaccgccaagttgatggctgacctgttggaatcggcaggaattacccgtgtcgtaactattgatttgcacgctgctcagattcaaggcttctttaatataccttttgaccatatgcccggcggtccgattttggcagaatatatcaaagaaaaaaatcttgacgatatgattgtggtttcccctgatcttggcggtgtcagtcgtgccagaaatatggctgaacgtctgaactgtggtctggctattattgataagcgtcgtcctgaaccgggcgtagccgaagtaatgaatctgattggttctgtagaaggtaaaactgctattttagttgatgatatggttgatacagcagggtctttgacagaaggtgcccgggctttgaagaaatttggggccaaagagatttatgcctgctgtacacatccggttcttactgatccggccttaagccgtattgcgcaatcagatattacagagttggttgttactaatactattcctctacctcctgctaagaaacatccgaaaattaaggttctttcggtggcacctattcttgcagaaactgtattacgtattttcaacgactggtctgtcagccagttatttgaaaaataagaagtttatttaagcatttaaagaggcttgtccctgcgggcaagcctctttaacataagttaggagaaggttatgcgacttatttatataataggactgctgacagttatcggtacgggtgctttatggtgcggctggtatggtatggtcaggcgcagaattgccgccatgttggcggctgtctctatacttgctggaggagtactgctgttactggcagttttacctgattatagtttttacggtacaactgtaacacataatttcgctgccggtaaaaatgtggctttaacttttgatgatggtccttatcccccttatacagatgaactgctaaaaatattggagcagcgtcaggtcaaagcgactttttttatggttgctgaaaatgctgaaaagcatcctgaactggtagcgaagattgctgcgcaggggcatgagattgctttacatgcattgaagcatcgtgactttttgaaattgagtttagcggagcagcaaaaagatattgctgcaggcaagaggattttggaaaagctgagtggacagaaaatcacattaatgcgtccgccgcatgggtttcgcgattgggctgtgatcgatacactgcagaaaaatggtctgacagcagttaactggtcagtgataccgcgtgattggacaaaccctggagtttcagttatcgttgaccggataatggaacagctgcatccgggggctatcattctgctgcatgatggtgacagtcctaaatacgttgcgtccagagaagaaacaatacaggcagtatcagtcattatcgacaaactgtgtgcggaagggtataattttgttaccgtcaatgaactgatgcaaaaaggagaatgacatgaaacttattgttggtttgggtaatatcggaaaagaatacgaagctacccgtcataatattggctttatggtgctggatgaactggcccgccgctggggtgtaaatacttggaagaatgaccgcaatgctctgtgcggggaatatcgcatacctgaaaaagtactgcttttaaagccgacgacatatatgaatctgagcggtgttgcagtaggtgcctatgcgaactttttcaatgttgatccgcaggatattgctgtggttcaggatgatcttgacttgccgacagggcaggtcagagttcgccgcaaaggaagtgctggtggacataatgggattaaatccgtgcaggaacatttaggaacaggtgaattcccgcgtttcaaaattggtatcgggcatcctgcccataataataaagctgtggtcaagcatgttttacagcgctttggtgctgaagaacaggagcttgtagcggaggcagtggggaaaatggcggatgctttagagttgtggctgcagggagatatggatgctgtaatgcaggaatataataaaaagccgcctaagcaaaaagcagagtcaaatgaaactgttaaagaataaatttggtataatttcaaatatttttctttgtctgctgacgaatcagatgtatacagaataaaaaatagcaggctctgctgttgtggttacaagtgcagcgcctgctattttcgctggccgatttattttttatgtttatggcgctcatagcgcagacgtccttcttcaaaggcgcgtttttcttcttctgtttccagagtcagttctggtactttggtgggacggccttttttatcaagcgctatcatagtgaagaatgcagtcaaagcccgttttttaccttctgtttctaggtcttcgacttctactattacgactatttccatggagctattgccgacatagactacctgtgctgtacagataaccagatcgccgataaaaatcggcaggtggaattctacttcgtctaccctggctgtaacgacattagtacgtgcatagcggcgtgccgtagcataagccgtagaatccatcagcttgatgatctcgcctccgtggatattgccggctacattggcctgatgcggcatcatgacctcgctgatgacgagtctgctttcagaggatgtttttttcaagatttagaacctgcctttcttataagtgaaaagatcaagagctgcatagctcaaactttgtttatttacgtgcacattaaaaagagtgctgcatcctgaaatgcttgctgcgcttattataacccttccgtagttgtggtgcaagcaggtaaaagtaaagtttctgaaaatagttcttgcatagctaggggtactatggtatactttataagcgttaatatagaattatgatgtatagtcatataatagttagacagtaaagtgaggtgcaatcagaatgaaacaaaacatccatccgaaatatggtgaagctaaagtaacctgcgcatgcggcaattcttttatgagcggcagcgttaatccggaattgcgtgttgacgtttgctctaaatgtcatccgttcttcaccggccaacagcgtaacttagctgctcgtggccgtattgaaaaattcaacaaacgctacaatgtagaagaaaaataattacacccacagcagagcgaaagctctgctgtgtttatatccgaaacttttagggagatattgtcatggaaaagaaacctaatgttggcggacaagctgttattgaaggcgtgatgatgaggggaaaggataaaattgctgtagctgtaaggcagccggatggggaaattgctattgatgttgggccggctaacagtattacagacaagtatccttttttgaaaaaaccattgctgcgcggcgtagtcgccctttgtgaatctttatatcacggaatgaaggcgctggcttattcggcacaggtttccggtgaagacgacgaacaacttgatagtaaggaaatggctataacgatcgcattttcgattgttttggctgtagttttgtttattatcattcctacttggtcaatgcgctttttgaatgcatggactcatgaccacatgattttgaatttagccgagggcgcattgaggatgctgatttttctcggatatataactgctatttcttcgatgaaggatattcagagagtgtttcagtaccatggtgctgagcataagacgatttatacttatgaggcaggtttaccgctggaagtagcgaatgtacgtcagttcagtacactgcatccacgctgcggcactaattttctgatgattgtaatgctgatcagtatgttcgttttcacctttttagggtggccgaatctgtttgaacgtattatgtcacggattattctgatgccggttattgctggcgtaagctatgagattattcgctatgccgggtcgcacattgattcagcctgggtgagaacagctatctttccgggcctttgtctgcagaagctgacgacacgtgagcctgacgactctcagattgaagtggcaatcgcttcgcttaaggctgtgctgccgcctgaagaattggcagaaaagcaatctacaggagaaaacaatgctggataaattacaggcaattgaagataaatatcttgatttagaggctaagatcagtgatcctgatatcatcgctgatcaaaaagaatggcagaagtgtactaaagctcatgctaagctgactgatatcgtaactgttttccgcgaatatcgtgatttggtaaaagcaaaaaatgatgcggaagagataattgttgctggcgatgacagagaactgacagaaatggcttatgatgaattgaaagagctgaagccgcagttggctgtatatgaagaacggttaactgttttactgttgccatctgatcccaacgatgataaagatgttattgtagagatacgaggcggtgccggcggtgacgaagccgctttgtttgcaggcgtactttttaggatgtatacccgttatgcagaagctaggggctggcgcattgaaattatggattccaacccgactgaattgggaggctttaaggaagttgttttccagatctgtggtgacggtgtttatggccgaatgaaattcgaaagcggcgtacatagggttcaaagagtaccggaaactgagtcacagggacgtgtgcatacttctactgttacggtggcagtactgcctgaggctgaagaggttgatgtggaaatcaatcctgccgacttaagggtggatacttatcgtgcaggcggtgcaggtgggcagtatgtcaataaaaccgaatcagcagtgcggatcacgcacttaccgacaggtatcgtagctcaatgccaggatgaaaaatcacagctcaaaaatcgtgaaaaatgcatgcgtgttctgcgtgccagaattttggagaaggcgcaggaggagcagcgggcggctacggctcaggatcgtaaaagccaggttggcacaggcgaccgcagtgaacgtatacgtacctataattatccgcagggtcgtgtgaccgatcatcgtatcgggctgactttgcataaacttgatattgtgctcaacggcgagatggacgaattactggacgcgctccttacggccaaacagagcgagcagctgcagcaggtgaaataatatggaaaataaacccttatggacgattacaagggttttggaatggacaaagcagtatttcgcaaataaagggatcgaaaatccgcgtttagatgctgaaatactgctttgtgctgttctaaaatgcgaaagaataactttatatgtacattttgatcaaccgttggatgatactgagttggctgaatatcgcagttatgttacgcggcgcgctaaccaggaaccattggcgtatattttaggaaccaaagcttttatgaagcacagctttaaagttactcctgcagtactggttccgaggcctgaaacggaattgctggtagaaagtgttgctaaggctgctgtgggagcgggtgctgaaaatttactcgacattggtacaggcagcggtgctattatagtatcattgttggatcttttgccgcagtcaaaaggtacggctgtcgatatttcagctgctgcattggttgttgctggcgaaaatgccgaaaatatcggtgtcggtgaaagattgacgttagttgaatcagatctgttcagtaagcttgattgtaataaaaaatttgatattattgtttcaaatcctccttatattccggctgcggctattgcaggtctggcagccgatgtgcagaaggaaccccttggagcgctggatgggggggctgacggacttgatttttatagaagaatcgtttccggctgtgaaatatggcttcagccggacgggttgctggcttttgaagttggcatcgatcaggcgcagtcggtttgtcagttatgccgccaggctggactaatagtaacggcagtgcgtaaggattatgcagaaatagaacgtatggtttttgcgacgagagaaggtacttattatgcagaccatttactggaatttacaagctgataatgaaacagaaattttaaaggcagcgggttgtttattaaggcagggcgaagtagttgcttttcctacggaaactgtgtatggtctgggtgctgacggactgaatggtacagctgtggctaaaatttttgcagccaaaggacgcccggttgacaaccctttgattttacatattgccagagtagaggatattttgccgctgacaagtggacttactgctaatgcccgggcattgatgcagtcattttggccaggaccgctgactttgatcgtagctaagtctgatttgatacctgacgaggtcagtgccgggttagacacagtaggtgtaagaatgccttcgcatcctatagcagcaaggcttatcaaagagacaggtcgccctatagcagctccttcagcgaatatttctggtaaaccaagtcctacggacgcttctgctgtttgggacgatatgcaggggaaaatagctggtgtaattgacggcggcagttgtggtattggtgtcgaatcgactgtagtagatacgacttcagcagtaccgatgatattacgtcctggcggaattacccgtgaaatgttggaagaagttttaggagcagtagagattgatccggcgcttgaaggaaagggtgattttaaacctaaagcacctgggatgaaatataggcactatgctccgcaggcagcaatgtatttatttgaaggtgaagctatcagcaatatgctgcctatagtgacggcgactgccgctcagggcattaaaacaggtgttttatgcagtgaaaaaattgctgttcatattcctgaaactgaaaatatcttagtaagctcgtgggggcaggatattgaaagccttgcagaaaagctttatagtctgctgcgtggtttcgataaacagaatgtacagatgatttttgctgagggtgtcagtgaagacggtttggggctggcagtaatgaacagacttcgtaaggcggcaggttatcaaattgtgaccgtagtcaacggaagtctttgttcaaaaagcggtacgcttttgcctgaatttatgttaaaataacattatgatttaatttgtttaaaacatgaaaagtgtatagaaaatatttagaggtgacttatatgaaaatcgcggttggcagtgatcatggcgggatccatttaaaaaatcatatcagggagtatctgactgctaaaggtattgaagtgcttgattgtggtacttatacggaagaatctacagattatcccgattatgcggctaaagtctgtcaggctattaatacaggcgaagccgaacggggtattttggtttgtggtactggtattggtatttctattgctgctaataaaattcacggtatcagagcggctttgtgcggcgatgtattttctgcccaaatgagccgtgagcataataatgcaaatgtgctgtgtatgggtgagcgcgttattggcgtgggactggcagaaatgataacagatacctggctgcagggtgaattcgcaggtggacgtcatgaacgtcgtgttgacaaaatagctgccctggaggcgatgcggtaatgcatactgcagaaatagctgcacaggtaacagctgcggcacaggagctgttgcaaataggtgcggtcaaagcagggcaggttttagttgttggttgcagtaccagtgaagtgattggtgataaaataggtactgctggctccatgaaagttgctgaggcgatgtttgccgcattaattaaggtgactgaggtgcatggagtttttttagcgatccagtgctgtgaacatttgaaccgtgctttggttacgacaaggtatgctgcagagaagtatggctggcaggaagttactgtgcggcctgtacagcatgcaggcggcgcaatggcgacagcagcatatgaaaattttgtggaacccattatagttgaagcaatctcggctcatgcgggccttgatatagggcagacgctgataggtatgcatcttaaaagagttgccgtacctgtacgtttgtcggaatctaagatcggcgaggctgtgctcaccgcggcatggacgcgtccgcctttaatcggtggagaacgtgccaaatacccaagataaaatattgatttggagggagtaattatgaatctggaaaaattagctgctgtcgatcctgaaattaatgctgctatttgcgaggagcttggcaggcaaagaaataaaatagaattgatcgcatccgaaaactttgtttctcctgcagtaatggaggcgatgggtactgttctgactaataaatatgctgaggggtatcccggacatcggtattatggcggctgtgaatatgtcgataaagtggaaatactggctatagaacgtgcaaagaaactattcggtgctgatcatgtcaacgtacagccacattctggcgctaatgcaaatactgctgtttattttgcctttctgaagccaggtgatactatcatgggaatgaatctgtctcagggtggacatttatcacatggatcgccagtaaatatttccggcagttattataacgtagttccttatggtgttgatcatgatactgagactattgattacgatgctttggcacaaactgctgctgaaacaaaacctaaaattatcgttgctggtgccagcgcctattcccgaatcatagattttaaacgtatgtcagagatagcgcatagtgtcggtgctttactgatggttgatattgcgcatattgccggacttgtagccgctggtttacatcccagccctgtgccttatgcggatatcgttacgacaactacacacaaaacactgcgcggtccgcgcggcggcctgattatgtgtaaggaacagtatgctaaagctattgataaggcaatattccctggtattcagggtggtcctttgatgcatattattgctgccaaggcagttgcttttggtgaagcgttaaaacctgaatttaaagtatatcagcagaatattcttgataattgcagagtattcgcggaagctttgcaggaagaaggcttccgtattgtttcaggaggtactgataatcatctgattctggttgatgtacgcggtcagaagctgactggtaagatagcagaacatttattagatgaggttggtgtaacctgcaataagaatacgattccgtttgatcctgaaagtccttttgttacaagtggtatcaggttgggtactgctgccgtcactacacgcggttttaaacaggaggatatgcgtgaggtcgccgcaatcattggtttagttttgaataatcctgaaaatgaggaaaaacataaggaagcggcagctagggtagcgggtttatgtgctaaatatcctatgtatcccggcttctaaattcaggaaggagattttaatgatgcaagttacagttgtagatcatccgcttattaaacaaaaaattactaaaatgcgtgcggaacatacttcttcacgtgattttcgtgaatgtctggatgaaatagcaatgcttatgacttatgaagtggctaggaatctgccgttgcaggaagttgaagttgccactccggtagctaaaactacagggtataaagtagccggcgatatttttgttgtgcctattttaagagctggtttaggattgctgacaggcgtattgaagatgattcctgatgcacgggtaggttttattggtttatatcgtgatgaagaaactttaaagccgattgaatattactgcaaacttcctgataataaagatggcgtgacgattgtggttgatccgatgctggcaaccggaggcagcgctgctgctgcgatttcgatgctgaaggcgcgcggtttaaaaaatattcgttttatgtgtttggtggcagctcctgaaggagtaaaggttatgaatgatgagcatcctgatgtgccagtttatactgccgccttagatgaaaaacttaatgaacatggttatatcgttcccggacttggcgatgccggtgatcgtatttttggtacacattgatgtatgataacagacctgactgggacaattattttatggagatagcccaggtagtaagcaagcgctccacttgcctgcgtcgcagcgtcggtgctgttatcgtcaagaacagacagatagtggctaccggttataacggtacgccttctaaacttgagcattgctcagtgacaggttgcctgcgtgaacaattgaaagtaccctccggacaaatgcatgaattatgccgcggtatccatgctgagcagaatgccgttgttcaggccgcttatcatggcgtatccgttaacggaggtacgttgtattgtactcatcagccgtgtgttgtctgtactaaaatattgatcaatgctggtattgagcggattgtttatgcaaatccttatcctgataaattggctgaggagatgttgaaagctgccaatatgaaggtaacgatactgcacgatgaagattaaaataaatacagcattgcagtgctttttaaaggcattggcagttgctgtatttattttttcctgaaaatgttgctttcgcaacaaaaaaatcaaagaaaaaatgttcaaaatggtatttttttgatatactattacacaagaatgacctttataagaagaatgtagaatttttaggtataaataagcggctttgaacgctatgaggtgaataattgcaagtgtatattttagcttttgtgatagctctttttaccagttggcttttgacaccttatgtcaaaaaattggcttttcgtataggtgcattagataagcctgacggaagaaaagttcataaaggcatcatgccgcgattgggtggtctggccatttatcttgggtttgtagtagctgttttatgcagcatgcatttgtctaaggatgtaatggcgcttttgcttggcggtacggtgattctgatagtcggcattattgatgatgtttatcagctgccggcaaaggttaagctgctggggcagattgctgccgcagccgtattggtgttgtttgacattcgtatcgaatggcttaataatccctggggtgggtatttttatctggagtatctgtcgataccgtttacgatcttttgggtaatcagttttaccaatgttgtcaatctgatggatggtttggatggattggcagccggagtcgctggtatcgcatcaataactgtaattctggtagctattcagcagggattttatcctgttgctgtaattacagctgccttggctggcggtattgtaggttttatgcgttataattttaatccggcaacaatttttatgggtgataccggcagtatgtttatcggctatatgttagcggctatttctatttttggcgctgttaaaagtgcggctacaatagctttgattgtgccagccatagctttaggtttgccgattatggatactgcgtttgctattgtacgtcgctacacgaatggcagaccaattttccagccggataaaggacacctgcaccatcgactgctggcaatgggaatgacgcagcgtcaggctgttttactgatgtatatcatcagtgctatacttggtattgctgcagtattgctgaccgaggttggcggttattatgcggcaataattatagcgcttattattacagccgtagttttcggtgcgaaaaagataggtattttgaacgatcgttaattattaatctcagtaagctgatttggtaatccattgcataccgtattgaatagttgggagacgaagtcgtgaaaaaaatcaagctaatgacagttttcggtacgcgtccggaagcaatcaaaatgtgtccgttagttttggaaatgcagaaataccctgattttattgaaccaatcgtagctgtgacggcgcagcaccgcgaaatgttggaccaagtgctgcagttatttgcaataaagccggattatgatttgaatatcatgaccgctggacaaactttatatgacgttactggccgggctttggcaggattaaaggacgtattggcagaggcacagcctgatatggtgctggtgcatggtgatacaactacgacctttgtcggggctttggcatctttttatgcccagattccagtggggcatgtagaagccggactgcggacaggaaacaaattttctccgtatcctgaagaaatgaatcgtaaacttaccggagccattgctgatatacattttgctcctacctctaccagtaagaataatttgctgaaagaaaatattgatccggcggcaatcgtagtgactggtaatacggtaattgatgcgttgcagactacagttaaagctgattaccgttttacggactctggattgcagaaagctcttgcaggaggaaaacgcctgattttagttacaacgcaccgccgcgaaaatttaggtgaaccgatgcggcatgtttatcaggctctgcgaaaggttttagaaaatcatcctgatgttgaagcaatttttccggtccataaaaatcctaaagtaagagaaattgttaatgaagaattgggtaagcttgcgcaggtgcatttgattgagccattggattatgaaccttttgccaatttgatggcgaaggtagatattgtgctgactgacagcggggggattcaggaagaagctcctgcccttggcaaacctgtattggttcttcgtgatactacggagcgtcctgaagcggttgatgcaggtactgtaaagcttgttggcactgcttatgatgatgtattgagagaaacaagtctgttgttggatgatagtaaatattatcaaagtatggctgaagctgctaatccgtatggtgatggcagggcctgcgagcggatcatcagaaagattttgcatgaaaatggttatgacatcaaaattttatctgaattcagtcctaattaagatagacaaaaattgtgaaaaatattaaaattattatgatttattcttgattttttccaaaatgcctattttgtttttatatttagttgaagccggacagttttatgaggtagtaaaaactgatgaaaatgattgacttcacccctttagtaacaatggggtataaaaaagttctgacaagattggctattgcatcttttgcagtagctcttgccgtgaaaatggcgggttatcaggagctggcttccgggcttgctttaggcggtgcagttgggctattggatacgttgattatgtttgtggggattcagcgttcactgccgcagggagagccagaagcggcgcttaaaaccatgaagcgctttcgttgggtcagaagaataacagccggtgctttagttattgtgatgttaaagttgaaataccatgtttttggtgtatgcatggggtttctgctgatacatatatttttaatatttaatctaatatttatcgcgtaccagctcaataaaaagcagggcgtgaagaaaggagtgtgagagaatgggaacagaagcagctgctatggctaaagaagctgagaacgcaaatgagataattcattattttgcgcaggaatgggcgccaggagttgtaatacatatgcaaaccatgtatatgacatggattacaatggcgatcgtgtttctactgttctttattgcttctagaaatccgaagctggttccaagtggcttgcaaaacggaatggagttttttattgatttcctaaacggattgatggaagagactttggggatgaagggacgcaagtatatggcgccgtttatgatcaccttgttcatgttcattttcattggcaatgaacttggtatgctgccgcaaatcggtgtacattggacttccccgaccaatgatatcaacactgtttttgcgctttctttaatggtagcctttggcggatatgcagttggtgtgcatcagcagggaataggacattttaaacattttatcagtcctaaaccaggctttttaccgatccaccttcttgatgctatcacaaagccgctgaccatggcccttcgtctatttggtaatatcctggcaggcgaaattctgttgatcgttttgtatcaactgactccgtgggtcatcccggagctttgggtaatgttcagtttgtttatcggcttcttgcaggcctttatttttacgatgcttgctttaagcagctttgccatcgcatttcatgatgagcattaagcattaatcaactctaaaatttttcttattttgaaaggatgaatgaaatgactgaaaacgcaatcattaccgctgcatctttaatcggcgcgggtcttgtttgtttaggcgctgcaaatggcgctggtactggtaacggtcacctctgcggcagaactatcgaatctatggctcgtcaaccggaagaatccggtaaattgatgactactatgctgatttgtgtaggtttggttgaatccatgcctatcttgtgctacgttatcgctatcgttctcgtatttgctaaccccttcattaaataatttcgtaatggaaaaccagaaaaggagcgtgctataattggttaattttaacgctacacttattgcgcaggtcctgaactttttgattctcgttttcattcttgcgaaatttgcttataaacccctgatgaagatcatggatgaccgcaagaataaaattgccggcgatttagctgctgctgaaactgctaaaactgatgctgaaagcattaaagcagaatatgctgctaaattagctgctgcacgtcaagaagctcaagccattatcgacaatgcgcgtaaaacagcgcaaactgcgcacgataagattcttgctgatactaaagcagaacaagatcaaattgtgaaaactgctaaagaagctattgctcttgagaaaaagcaggctctcagcgaaattcgcgcccatgttatcaatcttagcctggttgctgccagcaagattgttgaacaaaaattaggctctgaagaagacaaaaaattagcaggcgatattgttgatgctgtattgaaacaataatttgcttgttgctcaataggccggacgaaattaacaccgccctttagcgaaaggcggtaataatgagagccggtatacggaggtgattggtacaattatgaagagtgaagaaaatattgctttaattaagcaagaattgtccgacttcaaaattgatcttggttctattaaagaactcttagatgtaaaagttactacagctaaaaaattaactgtagatgagtatcaatccatttctgcaattcttaccgaaaagttaggccgcgacattttccttaataaaaatgttgatccttctattctcggtggtatcatcgttcaaattggcgacaaagtatatgatgcttccgcacttcgtaaactgaagaaaatggaagttgttatgaatggtattgacgttcatgactatgctttggaaaaaccagaagcaatgactgatgctctcagcgaaaagctggagaattacaatgtggatgttaacttagaagaggtcggtatagttgaaaaaatcggtgacggcatcgctaccgttatcggtatgaaaaacgctatggccggcgaattggttgaattgccgaataatgtttccggtatggtactgaatctgaatcctgactctgttggtatcgttttaatgggtggcgaaaccctcattaaagaaggcgatttggttcgccgtaccggcaatatcatggatgttcctgtaggcgaagctttgctgggtcgtgttgtcagtgctattggtgctcctatcgatggcaagggcgagatagcttatgcagaaaaacgccctgttgaatctcctgctcatggtattgcggatcgtgaatctgttgatactccgctgcaaactggtatcaaatgtatcgatgctctcgtccctatcggacgtggtcagcgcgaacttattatcggtgaccgtggcacaggcaaaactgctgttgctattgatactattattaaccaaaaaggcctcggtgttatctgcatttatgtagctatcggacaaaaggcttccaacgtagcacgtatcgttcgtactttggaacaacatggggctatggattatactatcatcgttgcagctactgctgctgattctgctcctttgcagtatctggctccttatgctggtgtaacaatggcagaatactttatggatcagggcaaagatgtactttgtgtatatgacgatttgtctaaacatgctgttgcttatcgtgctatgtccctgctgctccgccgtcctccaggacgtgaagcatatcccggtgatgtattctacttgcattcccgtttgttggaacgtgctgctaaattgaataaagaacttggaaatggttctatcaccgcattgcctatcatcgaaacactggctggtgacgttggcggctttattcctactaacgtaatttctattactgacggtcagatcttcctggaatctgaattattctattccggtatccgtccggcaattaactcaggtttgtccgtatcccgtgtaggcggcgcggctcaaatcaaagcaatgaaatccgtcgcaggtactctgcgtttggacttggcacaatatcgtgagcttgcagcgttcgctcagtttgcttccgatcttgataaagctaccaaagctcagctggatcgcggccaacgtttgactgaaatactgaagcaaggccagtatgtgccgttgccggtagaaaaacaagttatggctatctacctcggtactaaaggttatttagatgatgttgcagtaaaagacatcactcgcatggaaagtgaattccttgatttcatggatgcgaaccatcctgaaattggtgcttccatccgtgacgaaaagaaaatcaccgacgaaaatgaagcagctttgaaaaaagcgatcgttgagttcaaggatacctttattgtcagtgaaggtaggtgattgactgatggctactgcacgcgagattcatcgccacatgaaaggcatcaaaaatattggtcagatcactaaagctatgaaaatggttgctgccgcccgattgcgtaaagcgcaggaaaaagcaggctccagccgcccatatgctttgaagatcaaagaagtattggctaatattgtttgtgataagggcatggtggccggattagacgccaaaaagcatcctttgctgcaaaaacgcgaagtcaaaaaaatcggctatttggttgtatgttctgataaaggtcttgccggtgcttatagcagtaatgctttaaaaaaggcagttgccgagatttctgaaattgaaggagacgtagttattatcaccagtggacgcagagcaagagatttctttacgcgtcgtggttataatgttatttcttcgcatcttggcttctctgataaacccagttacaatgatgctgtggctatcgctaccgatgcggctgaacgtttcggtgatatgcagtttgatgaattgcatattgttttcactttatttaaaaccgctctgtcgcaaattccgacaagcgatatcatccttccggtagaaccaccggaaaaagaaaccggtgtaactaagaaaagtgtcgaataccttttcttacccgaagctgaagaaattttgaaggttttggcaccgcgttatcttgaaactattgtttatgccgcactggtacaatctgctgccagtgaattgggcgctagaatgaccgcgatgtcttctgctacggataatgccggcaagctggttaagaatctggaactgtcttataataaggcacgtcaggcacttattacccgtgagctcagcgaaatctgcggcggcgccgaagcattgaaacaacaataagaataattcgtagggaggctaaaaccttgaatactggtagaatagtacaagttgttggccctgttgttgacattgaattccctccgaaaagtatgcctgcaatcctgaacgctatcaaaatcgatggtacaactgacgatggtaaagtgaaaattcaccttacctgtgaagttatgcagcatatcggctacaatgtagtccgtgcggttgcaatgagttctaccgatggtcttgttcgtggaatggaagctgttgataccggtgcaccaatcagtgttccggttggtcctggtactttgggccgcatatttaacgtattgggtgaaactgttgaccacgacgagagaaaagttgatgctgccgactactggcctatccatagaccggctccgactttcgaccaacaagctacaacaactaaaattttagaaaccggcattaaagtcgttgacttgatcgctccgtatgcacttggcggtaagatcggtctgtttggcggcgcaggtgttggtaaaacagttattatcatggagctcattcataatatcgctaccgctcatggtggttattccgtatttgcaggcgttggtgaacgtacacgtgaaggcaacgacttgtggtgcgaaatgaaagaatcaggagttatcgataagaccgctcttgtttacggtcagatgaacgagcctcctggagctcgtatgcgtgtaggcttgaccggtttgactatggcggaatatttccgtgatgttggcggtcaggacgtactgctctttgttgataacattttccgctttatccaggctggttccgaagtatccgcattgcttggccgtatgccgtctgcagtaggttatcagcctactttagctaatgacatcggtgctttgcaagaacgtattacttccactaagactggatctattacctctgtacaggctgtatatgtgcctgcggatgacttgactgaccctgctcctgcaggaacattcgctcatttggacgctaccactgtactttcccgtcaaattgcagagcttggtatttatccggcagttgacccgcttgactccaccagccgtatccttgatccgctggttatcggtgaagagcactataatgtagctcgtggcgtacaagctattttgcaacgttacaaagaattgcaggatattatcgcaattcttggtatggaagaattgagcgaggacgacaagctgactgttgcccgtgctcgtaaaatccaaaaattcctcagccaagcattctttgttgctgaacaatttaccggtactcccggtcaatatgttccgctgaaagaaacaatccgcggcttcaaagaaatcctggaaggcaaacatgatgatttgccggaaggtgctttctatatggttggtaccattgatgatgccgttgctaaagctgagactatgaaggctgaataatggctaattgtatgcaattagaaattgtcactccggataaattgcttttcagctccgatgaaattgtatacctgggcctccgcactaatgatggcggtattggcatcgaggctaaccacattcctgttattgccagcttggacatcgcgccgatgaaatatcgtctggccgatggcacagaaggttatgttgcgatttgtggtggttttatggaaatgaacgctaataaatgcactattctggcgactattgctgaaatggctgacgatattgacaaagccagagcagaagcggctaaagaacgtgctgaagagcgtttgaaaaataagaccgaaaacctggatgttaaccgagctcagtactctctgagaagggctattgcccgcttgggtgcatacaataaattaggacgttgatcgcatacgacaattaaattaaaacccactgtgtaaaacagtgggttttttacttgctaaaagaacttttctatagtattctgttgataaaggaaggtgatcagaagtgtcggatccaattatggatatttcgggaaataaaatgctgcatctgaaacaagatctcgcgtttctgcgccaacgtttggctgagtgttctgaggaaagtgctaagcaaagcattcgcagggagattatggaaaaagaaacttactataatatcctggcagatcgccaaagattaagcaaataaaaaactaccaatcaaatgattggtagttttttatttgaaaattattctttaattaattttccgttttgcatcttataacagaaatttttgttttgatcccaaaaattgatacaaatagaggagccggcttgcagttcaaagcggagttcgctttcactaagcagattcttgtttatacaaaggcgggcaagtttatcaagatcagcttccggaagttcacttacaggaactaaacgatcgcgaggatatgaattattactggtactgataatgtccatataaacaattttacctgtaatataatcagaaattgctttaagcaaagcatcgatcccgtcttgattagaagggaaaaaacgtggcgttttgaagtaaattactttgaattcgtgatcaaaatcattgctgaaaatattgataggcaaaccgccgttagggttatggattgtgatcactgcttcattggcagtagggattttgaagtctatctttgcatcagggcaaatgtgcgaaagcttgttctgaagctcgcgagcttctatttctgcatttatcatagtttttcatctcctttaatcaatattataacactttgacgctgtaaacttgcgaagaaactgtgataaatgtgaaatttttcaaaaccattaaaagtcattgtacaagtacatcaaaaatgataaaatattacagtaagttttattttatggaattaacttgttttgtataaatatagaattttttagggggctatctgggtggagaatttagttgtcaaaggcggtaatcgtctgacaggctctgtgaaaactagtggagcaaaaaatgctgtattgcctattattgctgcgtcgattttgggaaataccccaagtcgtttagaggagattcctgctcttgatgatgtaagtacgatttgtgctgttttaaattgccttggtatcaaagtcgatgccagtgaaccacatgtactgaatatagatagtacggaaataacttcctgtgaagcaccttatgagttggtacgctgtatgagagcatcatttcttgtcatgggtccattgttggctcgtaaaggaaaggcgcgtatttcgcagcctggtggctgtgcgattggtacacgtccgattgatcttcatttaaaaggttttgaagctcttggcgtaaaaatagaacagggacatggctatattgaagctacggcgccgaatgggttagttggaactactatttactttgatttccccagtgttggtgctacggaaaatgtgatgatggcggccgctttggcagaaggaactactatattggaaaatcctgcggaagagcctgaaatagtagatctggctaactacctgaatcaaatgggagcaaagatccgtggcgcaggcacgaatgttatccgcattgaaggagtaaaagagcttcacggtgctgatcatacagtaattcctgatcgtattgaagctggaacatatatgattgctgctgctatgactggcggagatatcgttgtagagaatgttcttacagaacatcagaaacctttgattgccaaattgcgtgaagccggcgtaacagttgaagaagatgtcgacagagtacgtgtggtaggtggagaaaagcttaaggctattgacataaaaaccttgccttatcctggtttccctacagatatgcaggcacagatgatggcaatgatggcgatcgccgaaggtcgcagcaaagtcactgaaacagtatttgaaaatagatttatgcacgtggtggaattaaaccgtatgggagcaagtattactgccgaaggtcgcagtgcagttgttgatggtccggcaaagcttacaggctgtcaggtgcgggcaacggatctacgtgcaggggcagcaatgattttagctgggttggttgctgaagggacaaccgagatttgtgatatttatcatatcgatcgcggttatgaagaaatagtagctaaacttcagggattaggcgctgatattaaacgtgttggcgggaatgattaaaagcgggtgaaaaaatgttttttaatagtgttgatataggtattgatttggggactgccaatattttggtttttatcaaaggtaaggggatcgttttgaatgagccttctgttgtggcaattgataaagacaaaaataagattttagccgtaggtgaagaggcgcgccagatgattggacgtacgcccggcaatattgttgccattcgtcctttgaaagaaggcgttattgccaactatacaattacccaaaaaatgctggaatacgtagttaataaagttgcaggtaaaagttttttcagtaaaccgcgtattatggtatgtatccctaccggggtaacttcagttgagaaacgtgctgttttagaagctacgatgcaggctggggcttcgaaaacatatttgatagaagagcctctagcagcagctcttggagcaggtttggatattgcagctgcagctggcagtatggttgtcgatatcggcggcggaactactgatattgccgtattaagcttgggtggggttgttgttgacgcctccttgcggattggcggcgatgcttttgacgaagctattatcaggcatgtcaaacgcattcataatgttttgattggtgagcgtacagcagaggagataaaaattaatgtggcgacggtgcatactgaaggaaggcaggtagagcaggaggttcgcggacgtgatctggtgactggactgccgactactatcaaagtcacgtctgaggatggtcgtaaggctttgagagagtctgttgcatcactggttgcatcagtaagatcagttttggaaaaatgtccgcctgaattatcagcggatatagttgacaaggggatttatctgactggcggcggtgcgctgttggatggtatttcccaagtattgaaggacgaaaccggtattgatacttatgtcgctgaacaaccgcttgactgcgtcgctttggggacaggtaaggctttaatcgatttgaataaactgcgtcccggttctattgttggtaacggtagtttgtaagtgctaatacacagtccttgcggctgtgtattattttttaggaggttcgatagaatgttgcagacaaaatattttttaaaaataatattaacggcacttttgattttgcttcctgttcaggcctgggcggcgacagtaaataaaatgcgttacagcagcagccctacacgggtaaggattgtacttgatactgatgaaaaagttaagtacaaggatgagaaacagggttcatcaatagtagtgaatattgatgcagctgttgctaaagaaatgagtgaaaaggtcaaagacccaatcattaaaagcgtggttttgaaaaaagacggacgtaaggcgtctaaattggttgtgtctcttaataaagagcagcagtataaagtatttgcattgcagcagccaaaccgtattgttttagatatttaccgtatcctggtgactaaaaacacagtgaaccagggcaaaggattgcaatataccttctggcaggatgatatggaaggtctgccgattcagatgcatattttggaagtagcaccgaatagtgattataaaatactgccgttttcgggagctatagacaggaacggacgtggaaggctgctgaaagccgttaatactttaggggcgaaagcagctgtcaatgcttcatatttcgataccagcggctggattattggtaatctaaaaatcgacggcgagtggcttggtatggaggataaggcccgcagtgcgtttgttattgctgacggcaaaccgcaaattatgaaagatctggcttataacggtagtgttatgctgccggcattgggcgtaaaactgcatgttaaagggatcaacagggaacgtattgcggaggatgtcgtcatttatacacattattttggcccgtcgacacgaacaaatagttttggctgtgaggtacgtattaaagatggtaaggtcgctgaaatcagtaaagcagggaacctgcgcatagacaaaaacagtgtgatagtttccgcgcatggaactaatgccaaaatactggaacagctgcagattggcgatagagccagtgttcagcaaacattaggggatactgttgctgataaagctgaagtggttttgggtgcaggtccgatgctggtagaagacggcaaacgaaatgtgcgttctgtcagtgagcagattgccggagatattgcctatggcagagctccaagaaccgctattggggtaaaaaaagacggtactgtggtgatattggtagcagacggacgccgtactaattctgtggggatgacgttagatgaagttgctcgttatatgattaaactaggggcggtatcagcacttaattttgatggcggcgggtccagtgaaatggtactcaataataagattttaaataatccttctgacggaaacgaacgggctgtcagtgtaggcttaggcttattctctaagaagaactgacttgtcaaagctaaattagaatagtataatacaatatagggagatatgcagaaatcccgatgcttcctcttggaaggagtgagaaaaatgaaaaaaattaactggaaagttattgcagtgctgacggtactttgcattttaggcggagcttatactttggcattcgcagatacttctgtagatcagaaaactactttgaatggcgttgttttggcagatgggctggctgctgtaggaatgcaggtcagtgaaggtcaggtattggttaaagtcaaaactattgccggtcctgctcctgcagccagagctaatattgccggaaaagtaactgctgttttggttaaaccgggcgataatatcagcaacggacaaactgtggtgcgtgtagcggctaattaagaacaaaattgaaaccggcgtgctgctctgctcacgccggttttgcactattatggagagttatgaaaaaacagatatttattttaagcttaataatctggtgtctcagcagtgcgctggtttgtgcaaatgtgccgctgatgccggtagaggatattgttccgggtatgcgcggtattgcgaagaccgtcatagaaggagacactatcgaagaatttaatatagaagttttaggtgtcattggtaacgatgctatggggcataatattttgattaaagccagtggtgatgttattgatcgcagtggtggtattgctcagggcatgagcgggagtccagtctatattaatggcagacttgccggcgcggtggcattcggtaaagcttttaccgatcccaagtattgctttttaacgcctataggcaggatgctggatcttttaaatgaaccggcaccgcgtccgtcagaatttttaccgaaaaatacacctttgatggcaggcggttttacagagtcaggtgtacgttatttgagtgaaaagctggaaccgtttggactgaaagcaacaggtgtcggcggcagcggctctttttcgagcacgcagcctttacagccaggaagtgctgtaggtgtttctttaatgcgtggtgatatccagttaggggcgttgggaacagttacctgggttggcgatgacggtgaaattttggcatttggccatccttttatgcagcgcggtgattcctgttattttatgaataaggcctggattttagcttctctgcccaatttggaatcagcttataaagttggtaatataggtgaaactattggtactatcactcaggaccgcagtgctggaattgcaggtaagatcggtcagggtccgcctgttgtaccagtgtatgtttctgttactgatggagccagaggcatcaataatagctcacgtgtggaagttatagatgatgaagttttgctgccggcaatgctggatgcagtagcttataatactgttgctaaaactatggatcgtgaaggcggcggcacagcaagattttctttccgtattgatggcagaggtgatatcagcgggccgatcaatgttcagcgggaaaatatgtattatgcagcggcaggaatcggcaaactgatcaatcaggaattggtggaagcaggaacgattttaacacaaaataaatttgaaaaagttgatatttacggagtcaatatcaatattgttcttgatgataaagcagaagtagccgagattatcagtgctgcagtaagggaaaaagaggctgcacctggggatactgtccatattgatgtgcagctgcagccttacagggcgccaaaagttacgaagaccgtactgtttaagataccgaaagagcagcgggaaggtaaattgcctctgactgtccgcggcggcagctcactggcatggattcagaatctgctgaggaaacagcgtgaagagggtgtgccggcacagcagaaggataatcgtaaaactttaaatgattttataaaaagcatcaacgaagctgatcagaataatgatcttattgtggatattgccgccggccagggcgcacctaacgcagcaatgcagtcgggtggcggatttgcgtctatgcttgagggcagtccgatgaaacaaaaaactacaatgaattttattgttgacggtacaacagatattgttattgatgtagtaaaataatttgttgacagaagccataaaaaagccataaaaataaagtatatttaaaagcagggaatttgaagtaaaaaattgaattatagacaattattgttttatttgtgagagaaaggagctttcgtaatgctgcagactatatgtaacgacataggcaagattatgcttgaaggctgtgctaatgccggtcggatgatgctgctctttacggatactcttaagcgtatcagcaaggctgacgggaaggaaaccgtcagacaaatggcgaagctgggagctgattcactgccgatagttatgatgacgatactttttacaggtatggttttttctgtacagacagcgaaggaatttgtacgttttggtgcttcttcctcagttggcggtattgtagccattgcgatggggcgcgaactggtaccggtcttgacaggtgttgtcgttgctggtcgtattggtgcagccattgctgcggaaatcggcacgatgaaagtaacagagcaaatcgatgcattgaaagtaatggctacaaatcctacaacttatctggttgtgccaagatttttggcaattgttttaatgatgccggtgctgattgtttttgctaatacaattggtaatattggcggttggctggtttctcattattatgccggaattagtacttttacttatataaattctataaaaatgtttgctgagccatttgatatggttggcggtatgcttaaaagtgctgtttttggcggtattattgctattgtagcctgttataaagggctgggtgccaaacagggtgctgaaggtgttggtatcgctacgactggttcagttgttttatctatagtccttatatttataactaactactttttgtcaattttattgtatgtttaaaggaggtactgcctgtggcagaaccgattatcagttttaaaaaattaaatattacttttggtgaaaatgtggttataaataatattgatctggatatcagacaaggggagactctcgccgttttaggtccgtcgggcagtggtaaaagtactgttttacgcgcaatgataggtttgctgcaacctactgccggagaaatttttgttcagggggagcaggtaagttctctggatgaagatggctggaacaaactgcgtcaaaagatgggaatggtatttcagtattctgctttattcgattttttgacagttggtgaaaatgttgcttttggactgcgccagcatactgataaaagtgaatcagaaattcaaggcatcgttgatgagatgttagaacttgttggcttgcctcaatcaaaagaacaatatccggctgagttatcaggtggcatgaagaaaagagtcggtttagccagagctatagctaatagaccggaaatagttttatatgatgaacccacggcggggctggacccgatcatgtcaaataatatcagccgtttaatcaggaaaacgcagcagcaattgcaggtgacatcggttttagtaactcacgatatggaatcagctttttatgcggcggacaggattgctatgctttataagggaaaaatcgtcgctttgggcactgttgaagaaataagaaatggtcataatcaaattgtggacgcgtttgttcgcggtaaagaaatcagagaggaggcggtacagtaatgagttcaaacgaagtaaaagttggcgctttaactttaggcggtatcggacttttagcaggaatcattacttttttaggcgctttcagtttctctggcagcggttataaactgcagatttcttatccgcaggttggggggctgatgccgggacatgtagtaaggtatgccggcgtacaggttggcactgttaaagaagttaatgtaaatggtgacagtgttgatgtagtggctgatatcaataaagatatcaagattcctaagggggcggttttttctttggggtctgatggtattttaggggagcgttttgtagatgtgctgcctcctgtaaaaatgacaggacaatatattcatcccggcgataagctggaaggtgagcagggaacagggctggatgagtttatgaatgcttcatctaaagttctggcaaaagttgaggggattgcagaagcgctgaataacgtttttggcgatcctgaagtacagcggtcgatgcgtgacgggtttgtaaatgcccgtgatatcagtaataatatgaacacttttactaaggtcatggcagatgttgctgtagctaatcagcaggaaataaatttgatggtacagcagatgagtgaaatggccgtaagaatgaataacgctgccagccagatggaaaacatcatggttgagacaaataagggtggcgctggacagaatatggcaagaatcattgaaaatcttgctaatgccagcggcagaatcgaaaaagccacggaattattggaaaaggtcgcaacagatccgcagactgaagctgatatcaaagctactctgcataacgccagagaagcaagtgataaggctaacagaatgctgggagttttggatacggcaaaggtgcaggctgatgtaacacgcagtgtcaagggcagtgactggcgcagcaatttgggagttacctttactcctaaagaggatacattcgtttatatcggcggttatgatattggtgatgccaacaaactcgatctttccttaggaaagaattttgggtctgctgctgtaagtatgggagcgatgcagggagaatttggcgttggctttgattatagactgggaaattcttttaagctgtacagtcaggtctatgactttaacgatacgaaagtaaaagtcggcggggagttgaagctgacagataatctttcattgctgggtgagcagactgatgtgcgtaatggcaacaaaaacaatacttatgtcggattgcgcagttatttttaaaaaaaggtttgacttttgggttataaaaaaatataattttcttatactgactagccagtcagtcgattggaggtacgaaaataatgttcaattataaaaagagccgaaaggtgctggtgcttacggctgcagtaagtttattatgcagtcagtcggtttttgccgaaaccttggagcttgatttagacgatgctgtacaaagagctttgacaacaaatccggcgattaagatcgctgtatctgaaaagaaaggttccagagcggaacttaatgcagcacgtgccggacgtggtatcagtattgatgcggaacatagatctggacgtggtggatatgcagatccacagtggaatacagctactagcagttatagcaaaaatcttggtaattctcacagtaattctattaccgcttcgattcccatttatactggtggacaattatcaggaatgatagatcaggctaaggctaattacaaaagctatgctttaggtgaaaccaaggcttacatcgaaatgaaaaagacggctacagacggctatttcagcctgctgcaggctggcaatatggaaaacctctatcaggattctgttaatcagctggaagagcatctgaaaaatgtacaggcgcaatatgatgtaggcgttgtagccaaggtagatgtactgcgcagtgaggtttctttggctaatgcacagcagcagctgattcaggctactaataattatgatgtagctgaagcctcgttgaacaagattattggaacttccttagatacgaccttaaaacttaaagacagtctgcagtatactccttacgagaatgatatgcagtattgccttgattacgcttcaatgaaccgtgcggagctggaacaaagccgtttagctgtagacgcggctaaaggtgctgtcaaagtggctaaaagcggctttttgccgaaagttactgcatctgcaactgaatcttggggcggtagtggtagtaactggcctggtgatgacaaagagaactggtccgtaggcattggggcgacaatgaatatttttgactctggcgttaccttgtctaaagtacatgcggcggaagaaaaactgctgcaggcagaagaaacttatcgtgatacagtaaattctgtggaactggaagtgcgcagcaattatctgggactgcgtgaagctgagaaacgtatctctactacacaggtagcggtcgctaaggctgaagaagatttccatattgcgcaggttcgttatatggccggtgtaggtactaacctggacgttattgacgcgcaggttgcactgaccgaggcaaaaacgaattttgtcaatgctttgtatgattacaatacttcgaaaattgcattggaaacttcgatgggtgtacctgtagctgttactgcggctgcgaatacaacaaatctgccgactatgtctacagaaactgcagcagaataattataaaaatcccgctcaggcgggattttttattttataattaaaatgaaggaggtttttgttttttgtcgaagtaaaataagttgtattatgacttttactgcggaggcagaacatgaataaactatttcgttggttgctgggaattgcggcaatagtcggcatagtatattacagtataataaaatttattgtgccgggatatttggctcagattccgcctttggtgtcgaatttagctaaggattatattactggttctattgatattgcccgtgtagaatggaatggtgccttagaattgtccgtatttgatgtgcaggtgaaggacaagaagcagcagttgattgctgatttgccaaatgttaagctgcatatctcgccttggcatgctctttttaatacaaataaagctttagacagagtttctttggaaaagccgactatttatttaacactgaataaaacagagcaatggaacgtgcaggattttttgaaaccgtcagattctgatgagacaccgttctatggaatcttagatattgcaaatggacatattgtaaccaaaactccatatggggaatgggattttggtttgaatggttctgttgacggtggcggtaatccgaaatttgctattgatgcgaaactgttacatgatgaagacgatttggaactcaagggcctgattgacatgaaggctgtaggcagtttaacagtaaagagcgaccattttgctttaactgcttttgctcctttagcagaagagtttggaaaagttaaaaatttccagggtgctgttgcggatgttaatcttttgtggactaatagtggtgaagatatcgctatgtcgggcaccgttgttttggaaaaactgacaggcgttgctgtttacggagatgaggaatttcctgtaggtattgacggaaaggttgcttttaatgacaaagccgttaaatcagacaaacttttactgactgtagatggacagacggcacagcttaatggggatcttgattttaaggacaaggataacattcaggggcgcgggttactgactgccgacttactgaaaataaaaaatgaagaagttcgaaaactttctgtaccttttagaatcattgataacaaggcacagataaatactgcacgtgctgaatttggcggaggcagagttgattttctggcagaatatgatcttggaagtggaaatgtagtggcagcacttgacgtagagaatgtcaaaactgcgccgctgcatgacagaccatacgatgtttttactgtagatggcagcatggctatgaaaggcataatcaaagatgataagtttgaagtcaacctggccgcagatacggtgcgtttaggttggcgtgatttgttgctgcaaaaagtcgattttgacattgatgctgaccaaaatggccttaaaattaataatttttcggcgtttacagaaacaggagcattgttagctcaaggaacagtttccagtgcaggtgaatttaaactgcagggatccgtaacagatttcccaattgcacctgttcttgattttatgggccagcagggcagcggtctggcagcagtgcaatttgatgtttcaggaactgaggatgctgttgattttacaggtgttactcaactgaagcaggtcaatatagctggactggaaattgaagaagctcatggtggactgagtatacaggataacattgttgtcctgaaaaattacaaggtgacaatggcccaaggtgaaagtgttttaaacggcagcatcaatctccagggtgaagagcctgtttttgatttggatgttgagacagcaggagtaagagccgaacctttcatcaaggttgtagcaccggaagtgaagcttactggtaacgttaataatataatgtttgtaaaagggactttaacgatgccggatatcagcggtaagtttttgctgaccgacggcagtgctgaaggttatcttatagataagattgaaaccgactacagttatcaggccaataatttagtaatcagtgactgtgatattgttgcattatcaacagaggccaagcttaatggccgaatggatgcagaaaaaaatcttgattttaaagttgatataagagacattgatctcagtgctttaccgattaatgacgatactgttgatttagacggatatgcaaatgcacatggtaccttgactggcactttgtcgaaaccatttttccatggtgacgtcagcagtaaatctattatgattaacggcgaagaattgacggatatccaatgcaaattggatagtgacggcggaataaagaatcatttactgggatcatttaagcaggcacctaaaggtgtgctttctgcagagcttgattataaccatgagcaaaaattgctgcagggcaatatagtggctatatatggtaatgtcaggtctatacttaaaatggctaaagctgattataatgtagatggtttggctcagggcgaaattgcaattaatccgcatggtccgggatcaggtatttttgttgatgtctgggtggatgatatttctattaatgatcttaaatatgaagaaatgaagtttaaaggtcatttgcaggataaagtctggtattttgatgatgtcaaactgatggaaacaaaggacgttacagataagggaatcgttgctgtcggcggcaaggttgatctggctaatgggaagctggaacttgaggccggtgctgtagatgctaatcctgcgttggtaacagcgtttatgtcagatcctgttgaagttaccggtgatctaaatatgttcgtacagctgcatggaaccttaaaggatcctgaaggaaacggttctgtggaagtgaaaaacggcagtgtggccggcattggtttcgatgactttacagcgatgctttcgcttgcgaatgataatctgaaaatagagcaggcgatgttaaataaagatatttataaggccagtgcctatggtgatgtaccgctggatttattcagatcaaaagaacagcggcgcgatcctaacgcgcagatgaatgtacagcttaatctggacaatgcacgactgggtattttgcaggtcatttcgccaatggtggaatggggcgtaggtgaaacgcaggggcaggttaaactggcaggtacgcttgaggaacctttggtttacggtgctgtaaaaattcctgatgggtctttgaaatttaaacatgtacagactgttattgaaaatattcatacagatatagagtttgaaggcaataaagttgcgcttaaagatatttcagccaagcttggcaagggttcatttaaaggcagcggtacttatgcgctgcgctccaatgaacgtgaggcttatcagcttgacctggttgctgataacgcagaaatagcttctgatatttttacaggacgtatcaatggcaatctgacagtaacgccgcagaggttcattgtgagaccagaagcaggaagcgcacctcctcctggaaaaggtcctcgctttagttatcgaccgctgcttaaaggtgaagtgcgctttgatgacgtgctcgtcaatatgccgacaataccggagtttggcgaaggcgaaagtaatattggtcttgatgtacagataacgcttggaccgaaaatccatttgtataataaatatttatatgacttatggcttgccggaggattgcatatccagggcagtacattgtatactaatataagtggcacaatcagtgctgatcgaggttcgatcagttatttgcgcacacaatttaaagttcgctctgcttctgctgcctggcctatacctggaagcgttctgcctacagtgaatcttgaggctacagcaaagttccagcgttatgatattggaatgcgtatttctggaccgcttgaagaaatggacctacagctcaattcctcgccgccgctgaccaaagatcagatcgtgcggatgctgactctgcagcgtgaagctaccggcagtgaaggtgtcgacagcgatgatttacagaatttaatgactgccggtttggaaatggcggtatttggtgacgttgaacaaatttttaaagaggctctggggcttgatgaattcagggtttattcaggaaaactgcggtctggtatcgaaatggatacacgtcgtaaccgtgagttcacacctgatgaacgtaaccaatataatgttttattcagtaaatatttgacggataactttatggttggttatactaccagtatggataatgagcaccatagtgtattcggtcagtatgagatcagtaaacatttgaatataaattattctttaaatgaaaataatgagaattggtatggcctggaatatcggctaaccttttaaatgaaatgaaaggagggaagcagatgctgcagcaatatttaacggagttacaaaaaatcaatttgctggaacgggaagaagaacttgatttatggcgtgcctgcgctgatggtgatcaaagcgcgtacaggaaaataattactgcttatcagccattggtttttaaaatagcaatggccttccggcttactgaaacacagaccctggaattgattcaggaaggtacggtgggtttattggaagcggctgaaaaatttgattatacacgcggtgttgctttcagcatttttgcttcccaccgtatccgaggaagaatgcttgattttctgcaggctgaatatggcagccagatgttgtctttggatggagtaaattcagcaggccttgcctggtctgaatgtttggtatcaaatgaagctactccatttgagttggcagagcggcattttttaaatgataagataactcaggcgatggaaaggctcccgcaaaaagaacagcaggttttgacaggtatttatctggaaaataaaagcgctggagatttagcggcatcaatcgatgtgagcctggggcacatttatcggctgcagaaacaaggtgtacgcagagttagaggtatgctttcacgattgatgaacgaattaaataaaagctaataaaagaaaacaggcgttatttaaaacaagaattgcttatataagctttaatcgttatatatggcatatattaagaaaattcgctatgtgaaaaattttttatattagtgattatatatatatcttttattattttaaaatcgcggaagggggtttttacggtggcgaaatccatttgtgaacatattcgcaatgttaagagcagcttagaaaatgctgaaaaaagtttccgtgaaaacaacggcatgcgcggtgaattggatttgatgctggctgaagcggaaattaagcatttgcgggaaaaacgcggctgggtttctgtttggaccagacagcgtttagctttgcttgctgcggctatcgtagtattagctggctatggtggctggttatatgctggaacagtagaagaacctggggtgaagttgcaaaatcccgctgcagttatggcttcaactgagctgcagaaaaatttgcctcaaacagaggcggctcccaataaaatggtgccgacttttacagataaaccagaacaagaacagaaaacggtagtgataccgtcagagtatccgaaagagcaagtaaaagaacagcagcgtagtgtggagttgcctactgcagatatgcggcagcttgtgcgtgaagcgcgcagaactttacgggatgctaactagtttagggaggatttttggatgagaagaaaaaatatgttgcggtccttatctttgagcctggcagcgcttttgctgacgactcctgtttgggcgcaggaaaacagtgcggccgatgtcgttgaaaaccaaaccatgactatcggtgggaaagagcagattgttaccaaagctgctcttgaaaaagcacagaaagcacaaaaaggcaaaggaaaagataaaggcggactgagtaaaaaggggaaaaagatagtttattatatgcataataagccatctgaagatatttccgatcctcgctataaaggtactactgaagaacagccggctgaagctggtgatgctgaacagcaggaagaggctaaacgtcctgtaagcagacaggaagctgaaaaagaggctgccagagaagatgcggcgaagtctgctcaggaagctgttgccaatgccccgcagacaaatactacagcagtccgtgaagaagagccgccaatgcgtcctcccgcagaaatagaaaaggctgcggcaccgtattttggtcagctggtgactaaaattatggtcagcggtaataatgtgactccaactgaagagattattaatgttttaaaaactaaacctggtatgactttgacgtctgaaggtttaggtaaggatttatacgctatttataatatgggatggttctatgatctgcagcctgaatttaagcaggttccggaaggtgtgcaggttacctatcatgttatggaaaatcctatttatcagcagctggcagtagaaggaaatacaaagatttctacagaaaaaattgaaagcttactggatcttcccaaaaatcagctgatcaatatcagagaagtaaacgcaaaagtacagcgtttggaagctgaatacaataaagagggttacattttagcacgtgttgcggatatcagaatgcagcctgacggaaccctgctgttggtcgtaaatgaaggtattgttgaagactttaaaattaagggcaatactaaaactaaagattatgttattatccgtgaaatgaaactgaaaaaaggcgaaccttttaatgctaaagatgcccgccgcagtatgcagcgtatttataatctaggctattttgaagatgttaatatcaaattgaaccccggtcagcagcctaatgctgtagagattgagatttccgttgtagaaatgaataccggtacttttggtatcggtgccggctacagtgatgcggacggatttatcggtatggtatcagtcggtgataaaaatttccgtggtaccggtgataaagttaatattcgctgggaattcggcggtgcggataataagaactatgagttctcttatacaaaaccttggatcgacagtaaagaaacaagcgcaacaattactttgtacgacgttaccaacgaatatgcagactatgaccgtaacgccgacgaaattgcccgttatgacaaaaaacgtcgcgggcaggaattgacgttcagccgtaagactaataatgaatatgtcagcaattatctgacgttgaagaatcgtgacgacatttacaaaggtgctgttgatggttacagcacgcagtattatgaggattcttggggaaataacagcgattatgactctagatatgatggtcctaaatatgacggtgaatatagacgtaagaagaattttggcctgacccgcagtatcggcgtcgccagagtgtatgattcacgcgataatatttatgatccgcatgaaggcaaaagaaatgcctatacgatcgaatatgccggtttaggcggtgattttgactttacaaaatactctgttgattatcgttattactatcgtcagggcgcagaaaatgttattgccgtgcagcttggggctggttatgcttctggtaggatgccgcttagccagagattttcaatgggcggcagcgagacgttgcgtggttataaagatgaccagttcaaaggcaacagcatgctgaaaggcactgttgaatatagaatgccgatcgtgaaaaaagtgcagggtgttttgtttgtagacagcggctatgcctgggacaaagaccgtgaaacagcctttgatttgggcgagctgaaatatagttatggtgttggtttaaggatcaactcacctcttggaccggtaaagcttgattatggttatggtgatcagggcggacgtttccatttcagcttcggcggtcaattctaaaacaggcggtagtatgccgtgaagattgtaagaattttagctgtagttttattggcttgtttgctgccacgggcagcaaatgctgccattattgaaagtgtaagcgttaatgtcctggacagaggttctaccagtaaggttctgttagagcggatgtcggcaagtatgcagactgttgctgaacagctgctgcttgataaggacacagaaaaagtagaacctgtgcgcagtgaatatacaagacttctgggagaagttggggatagagtcctgaatggatatcagatggagcaggtaatgctgcagctggggacacaaacgcaggttacaatggtggtttcaccctggaatgaagtgataaatgatgtttttgttgatttacagttttcaggagtcgaagaaaatacggcggccttattgcagtcgaaactgccggaattacaaaaacagctggaggatgttttgcagggttcttctgcagatgcgtccgactgggccggtggagtattacgccggttagtaagggaaaaggttgaagctgaactgcctgaattcagagctgctgtagatgtggtgcgtgaagacaggcgaaccgttatacaggtagttgtctatcctgtagggcagctggtgcaaagtattgattatgagatggtttctcagtctatacccaatttgctgctgttaaatattaaacagcgttatgcacagaaaacacaggagttaaggggactgccggtaatatatgtcagcaggcacaaagaagagctggaaagatcactgctggcagaactcagtgcagagcctgaagtaaaaagacataatctgtgtccaagcgtagttttgacgccgggagttaattcaggggtaaggattcgtctggaatcagatgaatataaaatctggtttgaaggctacggtgacatagggcgcaatgagaacaatatttccggacgcgctcattttggcaaatacatatcaaaaagggatgagattttcggagaggtcggagtgactttggatgatgtcgactgggatttttccgccggttatgcgttgcatcacggaaaaacgacagtcagttatatgcgacgtagtccgctgggagaaaatgtctatcgcttggaacaggatataacgccgaaatggcgtttgcgagcagaatatttttctggcagcgatactactgaaattggagtcagataccggatacacgaattcctgagcgcggaatatgtttattcaaatgataaaccatacttcaggattgttggaaatttgtgataaaggttgaaagaaaagattttgactgatataattatttagtataattacaactgaaagcagggatttttattatgatgcaaaaattacgtgatccgaaaaatgtgaaaatgatatctttgttcgtagcagctatctttgttttaggctgttttgctttaacacttacccaaagtggtgttaacagcgtggcatcagctgcttccagtgaatcggctattggtgttgtcaattatcagatgctgctttctcaagtgcctgatttgcagaatgtacagacaagtatgaagcaggaaatcgataatgcccagaaggattttgatgaaaaaagtaaaaccatgaatgatactgaaaaacagcgttattatcagcagttgcaggaacggttatccaataaagaaaaggaattaatggatcctgttttgaaaaagattgaaacaacaatcaaaaaagttgctgataaaaaaggtttgtccgtagttgttgacaaaaataccgttgtatacggcggtctcgatattactgatgaggtatccaaggctttgcaaagcggtaaataatgtcggacaaggccctttttacaaaagggccttgtttctgtttaactgcaggaggtaaagtatgcgctggttaacgccgataattttgatagtcgtattacttactgctgcctgtggtcatgatccgggcggcaaggataaaattgccgttattgattgggataaggcattcagtgctcatcctaaacagactgttcttaaacagggtgaagctgaattgcagaaattactgcgttatcgtgaggagcaggcagaaatagccaaaactcagattgctggtttaaccagactgcagcagctgaaacaaaacagtaaagctaattttatggatgccgggtttcagacacaaatgtatgctgctgaagcaaaagaacggaaaaaacttttagatgcttatgatgcagcagtaaaagaagctgatgctgctttagccgaacaggaaaaggaactggaggatgcgtaccagctaaaaattttaaatttgagattgcggctggaagctataaaaatgcgtcctgcagaacgtgaggttgttcaaaatgaattaaaccaggttcagtctgaacgggaacagcaaagacagcagattttagcagcaaaaaataaaattattggtactaaaatggagcctttggtggctgaaacgcaggccagattaaaacagcatgcggagcagctgcagcaggaaatgcagggagatatgtctggggtattatcaaaagaccagtctgatttggcgaaagttccggaagctttgactaaagcaatggctgccatcgataagcaggctgataaactgcaggaaagtaatgaaaagcttagagcaggtattcgtaacgatattgaaagcaatgtgataaaacttgctcacgagcggcagtatacaatcgtctttcatagtgttaaagttaatatcaaagcggatgacattactgatgatgttgtgaaggctttgcagaatatgaaataacaggagcgataaattatgaaaaaacaagtagtagcaggattaatggtggcagttgcaatgttgtcttttggctgcagtgggcgtaatgctgagtttggtgtggttgatatgaaagctgttgaaagcaaagctgaaatagtaaaaacggtgaaagaagaggttgccaccaagggcaaaactttgcaggaagaaatgactaaagagatggaaggtaaatctcaggaagaacagaaaaaaattgttgaagataaaactgctgagatgcagttggtgcaatcagaagcgcaaaacaaattaaaagcaagtttggattccgcattgaatgcagttgctaaagaaaaaggcttgggagctgtgctgattaaagatgctgttcctcagggtggtgtggatgtaactgattcggtaattgaaaaaatgaaataaaaggtggcgggcggttgatctgcccgcttttttaaaacagcgggaggcagagttatggaaaagactttgagggaattggcagaatatttgcatgggacacttgaaaatgaagatcagaagctgatcgttacaggagtgaatgggctggttgaggccggaccgcaggatatttcttttgctgtgccgccgcatgtggaacattgtcatctcagtaaggccggtgtaatggttttagcaccggaagacccaaaacttgacaggcctgtgatcagagttaaagatccgcgtgcagcttttgcggccttgttggagctttttcgtgccagggaggatgttgagcgtgtcgtaagtcctttggcatctgttgccgcaagtgctaagattggtaaaaatgttgctatacagccttttgctgtaattgaggaagatgttgaaattggtgatggcagtataatttatccgcatgtttatgttggtaagcatgttaaaataggcaaagcttgtactttttatcctcaggttacaataagagaaaattgtgttattggaaataatgtcgtgctgcagtctggatgtgttatcggcggcgatggttttggttatattacagataaaaagactggcagacacagcagtgtactgcaggctggtaatgtggttttagaggatgaagttgaaataggaaacaatacctgtattgacagagctactgcaggcagtacgattgttggtgcgggaacaaaaatagataatcttgtacatttaggtcataatgatgttttagggaaaaattgtctggtcgtagctcatgtaggtatcagcggcagcgtgactgttggcgataatgttacgtttgcaggacaggttggtactgttggacatattacaattggtgacaattgtgtttttggcgggaaaacaggtattactaataatgtaccctctaattcgttttatgcagggttcccggcacggcctcataaggaatggcttaaacaggaagctaatctcagaaaaataggcgatttgctgaaaaaggttaaagtgttggaagaaactgtagcaaaattggaaaaataagaaacaaggcggtgcaaaagcagtgcttgcttattatgtagttaagtttttcagctggcttatgtgcgtagttcctaaatgcttacgtaatttaacagcagcgatattaggcggaattgcggttgtagctactcccaaatggcggctgcagatggctgcagctaatattcaggagtgccttggcgcggataaggtaagagcgcagcagatagcagagaaaagtttgcgcagatttggtagaatgatagtagaagtaatgcgctttcctttgttaaataaggatagcataagacagcttgttaatgttgaaggactggaatatttagaagaagcctataaacagaataaaggtgtcattattgcaacaggtcattttggcaactgggagcttttaggagcaacgattgctttgcatgggtatcctatgctttcgataacgagaaaacagaataataaatatatggatcgttttattaatgaatatcgtgaaatggtggggcaaaaggttgcctacaaccgtggcgaacatggtttgctggctatcagcagaatgctgaaggagaaaaaactccttgggattttatatgatcaggatactaatgacgatggtgttgacttaaaactttttgggaaagacagtatcattcctttaggagcagctgccttatcgcgtatttacggatctcctgttttaccgtgttttattcataataatgaagagggcggctgcacggttaaaatatatccgccgctttatactcctaagagcaaggacagggaacaggatttttatgatgtgactcaggagctggttgtgattttggagcatgagatcatcactcatccggagatgtggttttgggtacatgaccgctggaaagacggtcgtgagagatttgcagtcaggaaataaccggggaaaggcaggagggaattttgaaagaaataatgcagcaaacattggcagctcctattgcttattctggcatagggttgcactcaggaaaagaagttgcaatgaaattattgccgggaaaagagaatacgggtattgtttttgtacgtacagatctctcggggcatcctgaaatacaggctttagcggagaatgtaagttctacggttaaagctactactgtcagtgaaaatgggaccgaggtatttacagttgaacatttaatggcggcattttcaatgatgggcattgataattgccgcattgagatgtctgcgccggaacctccagtaactgacggcagtgctgctgtattttgtgagctgattttacaggcgggcagaataaggcagtcggagccaagaaagatatatgctgttgacagggctttttctgtttatgaagatgataaatatatcacgattcaaccgtatgatggttacaggatttcttttgtatctgttaacgcgcatcctgctttagggacacagtattttgatatcgagctgacagaagaaaagttcctgcaggagatcgctgctgccagaactgttggctttatgagtgaaattaagcaaatgcagcagatggggctggggcttggcggcagtattgaaaatgttgttatttttgatgatgataaaattttatcagagacaagatttgataatgaactgatcagacataaaattttagatgtgattggagatttatatttattagggcatcttcgtgggcatataattgctgtgaagtcaggacatgcatttaattcttgtttagcaaagcaaattcaagcctataggatcaaggaggagaaatgatgattactttagacgctattgaaattcaaaaaattattccgcatcgttacccaatgcttttggtagatcgcattttagagttggaaccgatgaaaagggctgtcggtgtcaaaaatattaccatgaacgaattgcagttcttaggtcatttccctggtgaaccgattatgcctggtgtgctcttaattgaggcaatggctcaggtcggcggcgtggcaatgctgtatccggaagaaaaccgtggcaaaattgcggtctttggtaagatcgataacgtacgttttcgtcgtcaggtagtaccgggggatcaggttattactacaactgaagttgtaaagatacgtggaaatatgggcgttattcattgtgaaggcaaggttgatggtcaggtggcctgtgagtgtgattgtacttttgcgattatggatccaaaaaaatcttaataaatgaaaaaacgttaaaatttgcagtaaaatgatgaaataggaagttttttgtacgtaatcagttaaaacaaccgaattcagcgtgcgaaaaagtaaaagctttggcagaatatagataatatagtataaagctgtttaattgtttgattaaaattgaggagtgaaggaaatgagttcggttgttattcctatgcctaaaatccatgaaacagcaatcatccatcccaatgctgttttaggaaaaaatgttgaaataggcccttatgctgtaatcgatgaagaagtagtcatcggcgacaattgtaaaataggagcccatgcggtgattcataaatatactacagttggtaaaaattgtaaatttttcccgggttgttctataggtgctgatccgcaggatttaaaatttgaagacgagaaaacatcgacggttatcggtgatggctgtgtttttcgtgaatgtactaccgtcaacagagctactggtgaaggaaataaaactattattggtaataatatactgatgatggcttatacgcatgtcgcacataattgcattgttggtaataatgttattatgtccaatgttgcaacacttgccggacatgttattgttgaagacagggctgttatcggcggattatcagcagtgcatcagttttgcaagatcggccgtaatgctatgattggcggtatggcacgtgttgctcaggatgtgcctccttttatgattgttgcaggtgatccggcctttgtatcggggttgaacagtgttggattggccagagccggtatggctcaggaaatacgcagtcagctgaaaaaagcttttcggattttatacagatccggattgccattacaggaggctgttgctacaatggagcaggagcttgacagcagcgagcctgttgagcatttgatgcgctttttgcgtaatgtagaacgtggtattattcgtacccgcagagattaaggtggtgacctggtggagactataggcttattgtcgggaatcggccatttgccggtggatgtagctttatcagccaagtctatgggttatagagttatagctgttggagttgtccctgatatagatccggagttagcagaggctgttgatgcttattatgacattcatatagggaaaattggtaagatcatcagtactctgaagaaaaatgatgtaaaaacagtgacaatgataggaaaagttacaaaagagcttttatataaagcaggagctgttgttcctgaccttagggcaataaaaatactggcttccgtacctgaccgtaaagatgataccatcatgaacgctattgtcaaggagctgaaaggtgaaggcatcaaagtgatggatcagacacttttgattcagccgttattgccaccgcctggcgttttgacccaaagaatgccaacagaagcggaagtggctgatatggattttggctttgcaatggcgaaagaaattggtcgtttggatattgggcagacggtggtggtaaaagatcgtgctttaatggccgttgaagctattgaaggaactgatgcctgcattttacgagggggaacacttggcaaaggtgttattgtcgcaaaaacggcaaaaccggcgcaggataacaggtttgatatgccaagcattggcacaaagaccatggaatcaatgatagcagccggagcgaccggcttggtaattgaggccggcagaacgctgcttgtagaaaaagaaaaaactctggctttggcagatgctcacaatattactattgtagcaagataaatgaaaaataattgctaattatgcaggctgagcgatacgttcagtctgtttttgtgttataatataaaatgaattgttgtgtaataaaataagaactagaaaactttttaaagtgttttgatagctggaagggagcgtttatggctagaatattgatttctgccggagaagcttcgggagatattcatgctgctgcggtgacaagagaattaaaaaatattgctcctgatactgaagttttcggtatgggcggtgattgcctgcgtgaagctggcggcgaagtgttatttgatattaaagaacatggggtaatggggtttgcggagattgtttgcaaattaccagcgttgtttaaattgaaaaaagcttttgccaaagtaattgaagaaagaaaaccggactgtctggtggttgttgattatccggggtttaatatgcgtttggcaaaacttgcaaaagcaaaaggcattcctgtagtttcttacatcagcccttctgcttgggcctggcataaaagccgtgcgaagagcgttgctcagattgtcaataaagttgctgccattttcccgtttgaatatgaagtttataaaaatgcgggggctgataccgaatttgttggacatcctttagtggatatagtgaaaccgcatcttagcaaagaagctgcctggaaaaaagcaggaaagaatgctgacagggatttgattttattacttccgggaagccggttgatggaaatacaaaaaatgctgccaacgatgttacaggccgcaaaattaattttaaaaaaacgtcccgatacagattttactatgccgcgggccaaaacaattcctctgaaaatgctggaagatatggtaaaagctgcaggagtaccggtcaaaataatagaaggtgacaactacgatgtgatgttcagtgctgatctggcactggctacaagcggaacagtgactttagaggcggcgctgtgcggattggggtccgttatcgtttataaaacctcgcctattaccgcttttattgcacgcagagttatcaatatacctaacatcggcttgccaaatattgttgcaggcaaacgtattttacctgaattgctgcaggaagaattcactccggaacgtttgcagcaggaggctctggcacttttggagccggagcggaacacgcagatgaaaaaagatttggcttatgtcagtgagcgtctgggagagcccggtgctgtacatagagttgcagaattggttctgcgtattgctgaggagaaacaatgacattatatttacgaattttgagttatataaaaccatatatgcacagactgatttttgctatgttttgtactattatggcagcagcggggaatttatatattccctggattatcaaagatatgattgatgaagttttggctgataagaatggcacaatgctgaattggattgctgccagcattatagctattttcgtcgtacgcggtttgttctggtatggtcagaattatttgatgagctacgttgggcagagcgtaattattgatattcgggcagctgtttttaaaaaattacagcgtctcagcgtatctttttatgacaagaacaaaacgggtacgatcatgagttatgttactaatgatgtcaatgcgttgcaatcagctatggttgagaataccattgagatgattacagaaggttttattttgattggttctgtagtagcgatgatctatctggattggcgtcttacgctttttacagtctgcactttcccggtggtcttatggtttatggaattttttgggaaaaaaattcgcaaaaccggcggcagaatccaggaatgtactgcggatattacttcggttctgcaggagtctgtggcttctgccagagttatcaaatcatttgtcagggaagattacgaggttgatcgttttgacgtagaaaatagagcaaatttccgtgctaatatgaaaaatgcgcaattgatggcaaccttgactcctgttgtagaacttgttgcagcaattggcgtgacgatgattatctggtacggcggtaataatgttattaatggcacgattactgctggctctctggtcgcttttttgacctatgccgtaaatatttctaatccgattaaacgtttaaccagagttattggtaatatccagaaggcgctggctgcagcacagcgtgtatttatgattatcgacatgccggaagaaatagcagaaagcagggatgctaagcaattgccggaagtcagtggtaaagtggaatttcaaaatgtttcttttgcctatgatgataaaggcaatgtaattacggatctttctttcagtgtaaaaccgggtgaggtaatagcaatcgttggtccgtccggtgcaggaaaatccacaattgccaatttactgccgcgtttttatgatgtaaacaagggtgatatcaaaattgatggtcacagtgtcagagaggttacgttagattctctgcgtgaacaggttggtattgttccgcaggaaacaatgctctttaatggttctgtttataataatattctttatggacgtctggatgcgactaaagaagagattgaagccgctgctaaagcggccaacgcacatgattttatcatgcagcttactgatggttatgaaactaagcttggtgaccgaggggttaatctttccggcgggcagcggcagcgtatagctattgcccgggcaatattgaaaaatccacggattctgattttagacgaagcgacttcggctcttgatacagaaagtgaaagagtggtgcaggaagcactggacagattgatggtaggcaggacttcttttgttatagcacataggttatcaacagttaaaaacgcagataaaattttagtgctggaaaaaggtaatttagtcgaatcaggaacacatgatgagcttttggccttagatgggctgtacgcacatttatataaaattcagtatcgcaacaaagaagcgaagtgaggttaaagaatgtatattatttataattttttggttttgtgcgtgtgctgtttgttcgtactgccttactttctttatcgttgtatctgtgaagcaggttttactaccagaatgcggcaaagtctgggagggctgcgagatgaagaaattgcttctgtggctcagaaggactgtatttggattcatggcgcttctgtcggtgaaattgttgcgacaagtccattagttaaagaaatacgcaaagcatatcctgattctccaatactggtctctgctgtaactgtaggcggttataatatggctaaacagataattcaggaagctgatgctattatctattttcctttggatatgccgtttgtttctgaatcttttgttaaacgtattcagccgaggatattcatgccggtagaaactgagttgtggcctaattttttgcgggctattcgtgaaagaaatattccggtaatgatggttaatggccgtatttcagagaaatcagtaaaaacgtatcgttatttatatggcatttgggatgatatgctgaatacagtcagcagattctgcatgcagtcaagtattgacgctgattatatcagtcatttaggcgcagatcccaaaaagatttatgttacaggtaatacgaagtttgatcagacttatgcggaagtgacaccagaggacctggaaaactataaaaaagaattaggaattgaaaatgcttatcctgtaattgtggcagggtctacacatcctactgaagaaaaagttttatttgatgtgtttaatgaaattattaaaagctatcctgaggcccgtttggttatcgcacctcgcaaaccgggacgtgccgatgaaatcagtaaactggcgaaacagtatcattgggaaagcggatttagatcaaaactcctggaaatcaaaggtgctcggtctaaatatcctgttttactgatagatactattggtgaattaggtcgtatttattctgttggtgatgtggtgtttgttggtggttctttgataaaacatggcggacataacgtgctggaaccggcagcgcatgccaaaccgattttagttgggccaaatatgcagaattttaaagattcatatgctttattgagtaaggtcggtgcctgcaagatgatcaataacagtgcagagcttactaaagaagttttagatattgttggaaacgatgaacgacgtttgcaaatgggagcagcatcattgcaggttattaaagaaaatcgcggtgctgctgtacgcagtattgaatatctgcaggatctgctgacattaacgactgttgacagtaaggttgaagcatcctatcctacaaatatcagaaatctgcatgatgaaggcggcgggcgtctgcgccatggagatgcggtgattcaatatttataccagctggcacatggtcctaacaccccattttttggttggattttattggggattttaaggatgttttcctatgtatatgaatttggtgtttgctgtaaattagacttttataaatccggattattgaaacagaaaaaattagattgctgtgtcatttctatagggaatattactgttggtggtacaggaaaaactcctaccgcgcaaaaagttgctgttattattaaaaatatgggttatcgtgtcgtgatcctgaatcgtggttatcgttcgcactgggatcaggagatgggcgttgtcagtgatggtaagaagatttttatgactgcctatgaggccggtgatgaagcttatttaatggcgaaaaccttaccgggtgtgccggtaattattggtaaaaacagagccttaacaggtcagtttgctgtggataaaatgaatgctgaggttatcatcatggacgatggttatcagcattggcacttatatcgtgatctggacgtagttttagttgatacatttaatatgttcggcaatggctgtcttctgccgcgcgggaccttgcgcgaaccgttgagtcatttggacagggcgggcttgttcctgctgactaaaacagatcaaagttctcagttcagccgtcaggaattacgcgatactttggataagtacaacggagatgctcctattattgagagtatccatcatcccaaaaattttgtggaaattgctgactggtataaaggcatacatgaaaatgcgaaagatctttctgagctgcagggtaaaaaagttatggtcttttctgcgatcggcaatccttcatcgtttgagcagactctggcctgcatcggcattgatataattgaagctatacgatatcctgaccatcatgattacggaatgctggaaatgcagtatatcagtgaaagagccatcagcaaagaagttgtagctatggtaacaactggtaaggacgctgttaaaataccaacggaattcatttattttaatagagaaatgccgttgtatattttaaatatggatataaaaattactgaaggacgtgaagtatttgagaaaacaattctgaacgccattcagaaggagacgaacgagtaatgaaagttttgtgtgtgatacctgcacgttacgcttctacacgacttccgggaaagcctttggcacttattgcaggaaagcctatgatacaacatgtctatatgaaagcctgtgaggccaaactgcctgatgatgttattgtggccacggataatgagaaagtttttgaaacggttcatggttttggtggtagagcgatcatgacatctccggatcatcccagtggtactgacaggttagcagaggtcgctcttaattttccagatgtagatgttattgtcaatgtacagggcgatgaacccatgataccgccggagattattgaccggctggcaaaagctttcgaagctgaatctgatttaaaaatggctacgatgaaagtattgatgcgggaagaagattataataatccggcggcagttaaagttgttaccgacaataatggttatgccctttatttttcgcgcagcctaatgccatatccccgtaataaaactgaacactataaggtctataagcatgttggtatttatgcttatagacgtgatttccttttgcaatacgctgctttggcacccactgaattggaaaaaacagaaagtttggagcagttgagagttttggaaaacggatataagataaaagtactggaaagtgattttcaaggtattggagtagatactccggaagatttggcagcggtaaatgagctgttaagtaaataagcggttttattccagaaggaggtcggacatgaacattgtaaaagttggtgattatgaagttggacaggggcatccgctgctattgatggcaggaccctgcgttttagagggttatgagcacagtttgatgatcggtaaggaagttaaaaaaattgctgataaattaggtgtgccttatgttttcaaggcatcctatgacaaagccaatcgttcttcttacagctctttccgtggaccgggattagaagaagggttgaagattttagcacagattaaaaaagatttaggtgtgcctgttgtcagtgatattcatgaaactattcaggtggaaaaagctgctgaagttttagatattctgcaaataccggcgtttctttgccgtcaaacggatttagtttacgaagcagcaaaaacaggacgtgtagttaatattaaaaaaggccagttcctcgcaccctgggacatgaaaaatgtactgaaaaaagctgaggaggcaggcaatcataatattatgctgactgaacgcggtgccagctttggttacaatgctttggttactgacatgcgcagcttggcaattatgcgtgagttggggtatccggtagtgatggatgctactcatagcgttcagattccaggcggtcagggaacgacttccggaggtcaaagccagtatgtgcctcatatggccagatctgctgcggctgtaggcattgacgctctttttcttgaggtacatgataatccggaagaagcgttgtctgatggacccaatatggttcgtttggacaagttagagaaacttttaacagatgttttggctattgataaaatagtacgcggttagatctggtaagtgagagggagttggagcatggaacaaatgttagagcaggcgcgcaatactttgcaaatggaggctgacgctattttagagctcgtacctcgcgttgacgagcatttttctgcagcagtggctatgattttagactgtccaggacgagttgtcatcactggtatgggtaaatcaggtatcattggacgaaaaatggcggctacgtttgccagtacaggtacaccatcgttttatctccatcctgccgaaggtattcacggtgatttgggtatggtaaccgaaagcgatgtcgtgatcgctctgtctaatagcggcgaaacgggagaggtactgcatatactgccatccttaaggcgtataggggcaaaattgattgctatggttgggaatgctgagtcttctttagcaaaaaattctgatattactttagatgttggtgtttcgcaggaagcatgtccgttagggctggctcctacatccagtactactgccgcattagcttatggtgatgcgcttgctttggctttgttgtccaaacgtaaatttactgccagccagtttgctgttttccatcctggtggttcgttgggacgcaagctgctcttaactgttgaggacatcatgcatagtggtgctgataatcctgttgttaatggtgcaacaactgttcaggatgctttattcgtaattactgataaagggcttggcgctgtttctgtagttgatgataatgaaattatgattggcgttctgactgatggagatattcgccgtgggctgagtaaggggattgattttctgcagcgtcctgttactgaactgatgaccagggcccctaaaactattactaaagataaactggcggctcaggcattgcatctgatggaaagcaacagtcctaagcctattacagtgctgcctgttattgacgaggagcgtcgtgttattggattattgcatatgactgacttggtacgtcagggtgtggtataatgaaaaacatagaaaaagtagctcagataattaaattgctggtgttggatgtcgatggtgttatgacagacggttcgatttatcttgatgctgagcaggaacttttcaagagctttaatgctaaagatggtatgggaatcagctgcgctataagatgcggactgcaggttgcgattattaccgggcgctgcagtccaattattcgcagaagggccagagaattagggatcgtcgaagtttgtgaaaatgttaaagagaaaagaagtgctttagcggagctgctgcaaaaatataatttgtctttaaatgaaacggcttatgtcggcgatgacctaaatgatttgccagtgcttacacaggttggtctggcctgtgctccggcagatgctgtagaagaagtaaaacaggtatgtcattttgtagcagaaaaaaaaggcggctgcggagcagtgcgtcaaattacagagtttattttaaatgctcgtggtgactgggataaaattgtaaacagttatttacaagagggacagggagacgctcaataatgtggctttactatttactgaaaacaatcagtaccttggtatcatggctgccttataagctggtggtgaacattggtatcggcatagggcacctttatcatacaattgcaaaaaaacagaggatccgtgcagaggaaactatcaaggaaagacttggttattctgatgaagaagctaaatgcacgataaagtcattgtttgtgaaattaggcataacttttatggaaataatgtatatgccagcactcaataaagataatattcgtggtttggttacttttgatcgtccggatgtgttatgggaagcgttgaatgaaggtcatggtgtagttatgctggcttgccatatggataattgggaatggctgggtgctgctttatctttgtatggatttcctataagtgcagttgaaaaaccacagcctaatagagtctacagtgattttatgaacgaactgcgcaaaagcgtaggtcaggaaatattttctcgtggtacaagtgaaattcttggttgtgccagagcaatgaaaaaaggccgcatgctgggcttgattgcagatcaggatggcggatatgacggtatttttgtaccgttttttggaaaaatggcagctacaccctctggaccggcatatttttccagaaaatttaaagctcctattatacctatttttattgtacgtaaagaaggttattatgggcatcaggcaatcgtcaaagatcctatttactatgaagataccggcgataggcagttggatgactatcgcgttacattaaaaatgaccagaattgtcgaagaagttatcagggaatatcctgataactggttatggttccagcatcgctggaatacgccatacacacctacaggaaaggagcaggagcatgttgagaaataaaggcttccagatgatcgtgggtgcaatagttataacaggcgtcattattgcctggcttatgctcggcggtgaggctccttccaacaatccagttcagaaagaaagctctggggcgaatgctaaagtaaggaatagtactttggccagagaagtggacggtaagaaagtctgggaatttactgttgaagaagttgaacagatcaaaagcagcggtgaggctgttttaaaaggtgttaaaggtaaaatttaccgtgaagacggcagtgttttagaggttgtggccggtggcggtaaagtaaaaaatgaggcaaaggattttgaactgaatgataaagtggtagcagttctatccagtggcggtaagctgactgccgaaagcatacgttggcagcagactgaagatgttattacagcttcggggaatgtaaggctgcttaaagatgataccttggcgacaggagacaaagctgttaccagtagtgcatttgaaagactgaaattagaagggcatgcggaagttcagagaggcggcgattataatgaataaactgaaaatgactatcgttatgatgatagggatattttttatggtgggcatgcttgggactgcttgcgctcaaggctcgaatttcagtgtgaaggctgatactattgaatatgatatgcagtctggggacggtatggccaagggaaatgtagtattgaaacaagatggcggtactgcaactgctgctaatgctgaatttaacagcaaaacaaaatccggcaggctgactggcggtgttgttgctgatcgtgatgactcgcatgttgtttgttatacatttgtaatgcataatgaagattattcttcggcgataggtgatgctcgtctgactaaaggtgataaaactttagcatctgaacgtgttgattattataaaaatcgtgaatatgctgagactgttggtagttgggcacgtttgtccatggctgatggaagcattctggatgcagtgaaaattacttatgatggaaaagttggtgtggcaaatgcgaccggtggtgtagctatttccagcccgcctcgtgatttgacagcttctgcagataccgctgtttatgaaacaaataatagcggttatatagaactgattggtaacgcaaaagcgacacaggatgggaatacagtagaaggaaatcgcctgcgtctgaacaatacctctaataaggcagaagccagtggaaatgtaaaaattgtttatgttcctaagcctgtggagaagaaagaaaatgtaactgcagatgaaaatgcggcattacaaatggccaaagcacctgtggaggtcgcctagtgattatagaaacgaaagatcttgtaaaagaatattcaggacggcgcgttgttaatcgggtcagcatcacagtagagcagggaagtgtcgtcgggttactggggcctaatggtgccggtaagactacgacattttatatgattgtaggcattgaacgtcctgatgaaggtgtagttactttagatggagatgatatatcatctttggcaatgtatgaacgggccagggctggcatcggttatttgccgcaggaagcatcgatttttcgaaaaatgacagttgaagaaaatattttagcgattttagaaacgactgttctgactgaggaagaacgtgtgaacaaaatgaattctttaatcgaagaatttcgtattgaacacataagaaaaagcaaaggaacagagctttccggtggtgagcgcagacgtgttgaaatcgccagggctttggctacggatcctgcttttattctgttagatgaaccttttgctggaatcgatcctattgctgtatcagatatccagggaatgatagcacatttagcaaagcgcggaattggtatcctgataacagaccataatgtgagagaaactttaagtattgttgataaagcatatatccttgccaacggtgaaattttaattcatggtgacagcgaaaccatcgctaacgatccaacggcacgtaaatattatcttggcgaaaactttagcatgtaggaggaatagggatgcgtttacgcttactggatcgttatgttttaagtgaattgctgtacccttttatttttggtatcgcttcgttttccagtatttttattgccagctccatgctttttaagctgacacaatacatgactaaatacggggcctcgggagaaactattgccagattatttatgtatagtttaccagaagtagtaaattatacctttccaatgtcgatgctgctggcttcgctgatggcatttggtaaattgtcaggcagcagcgagattgtggcaatgaaatcagggggtatcagttattaccgtattgttgcacctgtactgatcgtagctttttttgtcagcatgttttctgttgtttgggcagagaaggtagtgccggcggcaaaagtacagtatggcaggattttagaatatgagattaaaaagaatactaaaccgagaacccaggatcatgttatcattaaaactttgagtggcagtactcagagaattacttatgcccgccgttttgatgaagaaaaaggtttaatggaaaatattacgatcgaagagtttgaaaaatctcatctggcgagaattcaaacagctaaacaagcttactgggaaaatggatcctggcgtctggaagatggtactgtttatacaatgaacgaagcggaaggcattaaaagcactgctaaatttaaagagcagatcatcccgcttgatgtaactccaagagagatttcctgggaacaaaaagaacctgaagaaatgacaatcagggaattgcgtgaatatatttctgttttagaaagacagcatcagccgacagcacgccagtggtgtgaaatctatatgcggatttcgattccgttagccagctttttctttgctatgatcggtgctccgttaggcactcagaaacaaagaacaagttcttctattggccttggtatcagtattatcgtaatctttatttattatgcgataatgacacttactacaggtcttggtaaaggcggggtgatgaatcctctgctggcatgtattattcccaatctgatttgtttgggagccggtgtatttttactgcagaagaaaaacgcttgatttaaaaaatatattttgaagtaaaggaggtgtattcatgttcggattacggttgattttaattctggcagtagttggcggtttgattgcttttattggtgataaactgggaagtaagatcggcaagaaaaaactttctgtttttggtttaaggccctatcatacttctgtgttgatgaccgttataaccggaattttgatcgcctctattactttggtaacaatggctgttgcttctgacagtgccagaaccgcaatgtttggaatggaaaagcttcagaatgaattagcggccttgaacagagaaaaagatcaggcgtctgtggcgttggcaaaggctcaggctgatgttgctgaaaagaataaggcaattctggctttggatgaacagataaaagccagcgcggctgaaaaagcggcgattgagaatcagttagttgttgctcgtcagaattatgaggaagccaaaggccagcttcagcaggctcagtcggctgtgggagaattgtcacaggctaagcagtctcttgaaggggaagtaactaatctggaacagatgacagaacgtctgcggcgaggaattttggctattcgtgaaggtcaggttgtttttcgaagcggcgaagttgtttatgcaggcgttttaaaaggaagtttaaatgacgaagaaaatagtcggcaaatgcagttgtttttagctacggctaatgaagtgaccctgcatcgtatgggaatagaagcagaagaacctgtgcaggccatatggatgcctaatgaggtaattgaagaggctttgacgcgcattaaagctgcacaggggaatatttttgtcagagtaaggactgttgctaatattattgctggagaaccggctgtatgtacgttggaattggcagcggacaatcgtatttataaaaataacgagctgatttttagtaaagaaatagaccttgaacaaagtgagagcagtatgaatggtgaaatattagagtttctgtctgatattaaccgtgtagctgttgctgccggagtcataccagacccgcttacaggtaaggttggtaatatggatgctggaacaatggtcgaaacaggtgagaaaatggctaagtatggcgggaaagttatacttaaggcctatgctaaaggtgacattaacgcttctggaccggttttactgcgcttagaggtggaaaatgccggaaaataaagtatggtacttaggcgttgatcctggtagtgctaaaactggatttgcatgggtagaggcagatggaagaataaaaaaggttgtagtactggcaacagaaactttaccagaagtgctgccgcaaatattaggatctgctccagctgctgtgattttggggaacggcactaactgtgacagcataaaaaaaatgctgatggaagtaactaatgtaattaagatattaatgatagaagaaggctacagtacggaagaggccagaaaattgtattggcaggaaaaccctccgcagggctggcgccgtttacttcctttgggtctgcaagttccgcctgttaatttagacggttacgcagcggctgttttggtacgtcgttatttgaaaaaataaatacagtataataaaaagcacaggaatttttccctgtgcttttttagcagggaaaatattgggcagcggcgaataaaatcaaggcagtttaaaatgggggtggaaaaatgatcaggctgaaaaaatgtagtctgatatggttaacactactgttattgttgattgcaacggccgtaaatgcggcagaaaaaaactttgtcgaaatagatatttacagtgtgaatgatttccatgggcacctgcgtgctgaagctgctgatcctggaattgctgttttgtcaggagtaattaacgaactgatgaagcaaaatcctgtaggatccttacttttgggcggtggtgatatgttttctggaacaattgatgccaatgagtatcagggactgccagttgtgacagcgatgaataagatgggttttagtgcaaatacagcaggcaatcatatttttgactatcctttggacgtaataaagaggcaggctgccgcaacaaatttccctattttgggagcaaatattgttgaggctgcaggtgatagagttgcggaaccttttaaaccatatgtaatgttgcagaggaatggtttgacaattggtatattgggtcttactacggttgaaactaaggaaaaagcatcgcagtttaatttgcagaaggtaaaaattttaccgccggaacagattgcacaggtatatgttgatgagttgagaaggcaaggggcacaaattattgttctactgacacatattggcagcagtcaaggggagaacaatggtattacaggggagatagtaccgattttgcaaaaaattcatggagtagatgccgttgtcacaggacattcacatttgtgtgtcagcgggatatatggagatattccggtaatccaggccggatgctatggggaggcagttggcagaatcaatttgttatattccatggcagctcagaaggttgtttctgcaaattcgcgtgtttataaattaagcgaattaccgagagtacaggataatgcaatggaaaggtttttggaaccaatatttaaaaacatagattctaaatataatgagattttagctgtcaatagccaggtgctgacaaatgaccgtaatggagaatcaagagtcggagacttttttatggatgttttgaaaaacggctttaaggctgatgttgctttatataacggtggagctatacgtgatactttgccgtctggaagggtaacggttcgtgatttattgaaaatctttccctttgacagtaccatatatacagcagaagtaaaaggcagtgatctgaggcaggttctggaacatggtattggcaacccggatatcagcaggctgcgtttttcaggtttgcagatcagtgctgatatcagaagggaggaaggacagagaattagcagtgttactttgtctgatggcagcacattagcggatgaaaaatattataaggtcataagtaatgattttatgttcagtggcggcgatggtttttacagcctgcaaaatgcacggcatttgagggattgtggtaaggataagactttttttgcttttgcgctgcgaagcttgaaaatggttgactatcctgctcatgatgagcgattacaaataaaaaaacagggagtctaaaatgaacgattttatgaaacttaactgtgatgaatttttagaaagacttgcatctaaagaacctgtaccaggaggtggaggtgccgctgcattaggtggagccataggtgcggcgttaacttcaatggttgccaatcttactgtgggaaaagaaaaatttttatcggtagaaggtgaaatgattaggttggcagccgcaagtaaatatttgcgaaaagaattgcttcagttggtacaagaggatgccagcgtttttgaagcatttatgaaatgttataaaatgccgaaagcaacagatttggaaaaagaactgcgccaaataaaaattcaggaagctgctaaaatggcagcagagatacctttgaaaatcggtgaaaaagctctggcagttttacttttggcggcagaagcggcagaattaggtaatccagccgtaattacagatgctgctgtagcggcattgatggccagggcagctgtacgtagcgcagtttataatgtaaaaataaatcttaatctgattagcgatcaggattattgctcagttcttgtcgaaagaattgcagcattggagcaagaagccttatcagcagaaaaaaatattttggagcatactgataaagttctgtcataaagtaaaatttgtcaatattgagcgaagcaggatgaattgcctgaaaattcacaaacagttcactttttagcccaacttaggacaaaggcttttggtatcctataactgtaagccaagcactgagaaaagcgaaggtgatataaatgcatataaaggttttagggcctatgacgaaacaatgcgaattgttattgcaaaatgcagccatcgcggctaaaaaactcaaatgtcatgctgagtttgaacgtgttaatgatttacggcgtgtagtcgcttacggagttatggccttaccagctttggttattgatgaaaaagttgttgcaggcggcagtgtgctgcctgttgaagaaataatggagattatcagacatttgaattaaatggcattagagtgagctgcttgagtatacaaatgttatattgattttttaccccatatcattttgatatggggatttttttgttgctgcataaaagtcccgccgggacagtaaaataagacactgcggaaaagtttttttcttgtaagctcgttgtaaaatctagtataataaaagtcaagtacaaaataaaaaggtgagaactgggggcaattatggtatatttctttggctttctaggtggtctggcattgtttttatatggcatgcaattgatgggtgatggtctgcagcgtgctgctggtgaaaaattgcagaaaatactggaagcattgaccggggttttgattgtcggagtagcgttgggtgcagctgtaactgctgttttgcagtccagcagtgcaacaacagtcatgactgttggtttggtaaatgccgggctgatgacactgaaacaggcgttcggcatcgttatgggtgctaatattggtaccactattaccgcccagttgattgcatttaaacttactgattatgttactttgattttggcaatagggtttgcaatgcagttgcttgctaaacgccgccgtgggaaatatctggggcaggtacttcttgggtttggtatcctgatgctgggcatgagtatgatgggacaatctgttttacccctgcgcgagtatcagggctttgttgattttattggcaaattttctcataatccgattctaggtattggcgtaggtattgtaatgacagtacttattcaatccagctccgctactattggtattttgattgcaatggcaagccaggggttgatacctttagaaggtgcaattcctgtacttctgggcgataatattggtacctgcattacagcaatcatggcggcttggcgtgcaaatgttacggcaaaacgtgttgcattagcgcatgtgttgttcaatctgattggcagcattcttttcgtgacctttatgggattgttcataaaacttgttttggcagtatcacctgctcatgatatagcgcgtcagatcgctaatgcgcatacagcctttaatattatcaatacacttatttttctgccttttgctgctccttttatcaagcttgtggaacggttactgcctggcagtgacggtgtcatttcgcgcaaaccgatatatttggatgtgaatatgcttaaaaccccgtctatcgctatgactctggctggcaaagaggttgtgcgcatgggaaccatggctcgtcataatgttgaactgagcatagcggcaatggaagacatggacagcaggaaaatcgcttatgttttagaacatgaaccagtgatagatgcattggaagaagaagttaccaaatatttgacgcaaatgagtgaaacgcagatgagcagggaattatcagcccggcatacaggtcttttacacgcctgtaacgatattgagcgtattggtgaccatggtgaaactttagcgaaaaaagtacggatgatttacgaagataatgtaaaattttcagatgaggctaaagccgagctgcacactttagggcagatggtgctagaagccagcggcaaagctttggaagccttggaaaaagacgataagaaactggctgaagaagcctgggcattgtgccgtcaggttaaacagtatcagaaagagattcgtaaaaatcatatcgtacgattgaatgaaaaacgttgtgatccggttgctggctttgtaatgctggaattattaataaatatgaaacgcgtttccgatcattcaaaaaatatcagccagttagttttgggaattttttaaaagtaaaaaaatatagaaatttttcaaaaaaatgttgacaaagatggcgttctgttctaaaatacatcttgttgctaatcaatgcggaaatagctcagtggtagagcacctccttgccaaggagggggtcgcgagttcgaatctcgttttccgctccacttgaatattggcccggcagaaacctgccgggttttttgttgcttcttgtcaactttagatccttgtgatatgatattatgagcgatttatgtcagtatcttttgatattggccttgaacaagctgttaattttgtacacatataaaacctaagggaggattttttaatgaacgtatctgttgaaagagttgtgaatgacgcaaccctcaaaattactttacccgctgaggaagtgaataaaggctttaaaaaagctataagcaaaatcgctaacagcgtaaacattcccggtttccgtaaaggcaaagcaccccgcaacattattgaaatgcactatggcaaagatgccattaaacaagaagcattcgaaatcgttgctaatgattgctatactaaagcacttgatcaggagagcctgattcctgtgtccgaccccaaagttgaagaatctgtttttgaagaaaataaagatatggaactgactatcaaagtcactttgaaacctgaaatagaactgggtgaatacaaaggcttgtctgtagagaaaaaagaagctgttgttgaagatgcagatgttgacgctgcagtagaagaactgcgcagccgtcaggccaaaatggtaattgctgaagaaggtacaattattgaaaaaggtgattttgcaattattgatttcgccggtactgtagacggtgaagctttcagcggcggtgaaggtaaaggctatcctctggaagttggttctaactcctttatccctggttttgaagatcagctggttggcctaaaaaaaggcgatgctactgatgtagaagtaactttccctgaagattatttcgttaaagaactggctggtaaagaagctgtgttcaaagttaacgttcaagatgtaaaacgcaaagagctgcctgagctgaatgacgaatatgttgcagctaacagtgaatataaaactgttgctgaactgaaagcttcgtacaaagaacgtatgcagcagaatgctgaaaacaatgcgaaggttgaatatgaaaaagcattgattgatgctgctgttgccaatgctaaatttgaagttcctgagattatggtcgaagaccgcatcagccaaatggttgacgaaatgcgtatgagtctggaaagccgtaaaatgactttagaaatgtatatgcagtatactggtatggatatggctaagatccgcgaaaaccagcgtgcgactgccgctgaaaacgtaaaaactgatttggttctggatgctattgccaaagcagaaaacattcaggtatctatggaagacgttgatgctgaattatctgctattgctgctcaacatggtgctacgctggacgaagtaaagaatatcattaaatccaatggtaacatgggacttttgcttgcaaatattctgcgtcgcaaagctgctcacgttgttattgacaacgcaaaataatggcattttgccgccggcgctttaagctccggcggcagatgtgactttattaaaaaatataaccttaaagaaaaggggtgtaagacatgaactatgtgcctatcgttgtagagcaatccagcaggggtgagcgctcttatgacatttattcccgcttattgaaagacagaatcgtttttgtgaccggccctattgacgacgcgatggcaaatgtcgttatcgcccagctgctcttcctggaatccgaagatcctaataaagatatacatctttatatcaatagtcctggcggcagtgtaagtgccggcttggctatttatgacacgatgcagtatatcaaacctgatgtttctaccatctgcatgggtatggcggccagtatggcatctgtacttttagctgcaggaactccgggaaaacgttacgcgctcccttattcccgcgtgatgattcatcaaccgctgggaggggctcagggtcaagctacagaaattgagattcatgcgcgcgaaattctgcgtatccgtgaagagatgaatggtattttagctaaacatacaggtcagtcgaaagaaaaaatcgcacaggatactgaacgcgattattacctgaccagcgaagaagctaaagcttatgggcttattgatgaagttgtaacccgtaaggcagcagctgaagaagcgaaatgatgcatactaaggagataacaatatgaactttggcgaggggaacgacagcaatataacttgttccttctgtggaaaaagagaaggccaggtccgcaagctgattgccggtcataacgtctatatctgcgacgaatgtatcgaactttgcaatgaaatgctgacagaagacctgaaagaaacaaatgctgctgttgtcagtgtaaacgaactgccgaagccgaaagaaattaaaaatattcttgacgagtatgttattggtcaggaagaagcaaaaaaaactttggctgtagcggtttataaccactataaacgtattaactatgaattaaataatcctgcgaaggataaagaagtagaactgcaaaaatcaaatattctaatgctgggacctaccggcagcggtaaaactttgctggcacagacgttggcaaagattttgcaggtgccttttgcaatcgctgatgctactgctttgacagaagctggttatgtaggtgaggatgttgaaaatatcctgctgaaattgatccagaacgctgattttgatattgagcgtgctcaaagaggcattatttatattgatgagatcgataagatttctcgtaaatcagaaaatccttctattacacgtgatgtatcaggtgaaggtgtgcagcaggcacttctgaaaattttggaaggtacagtcgccagcgttccgccgcaaggaggacgcaaacatccgcatcaggagtttattcagatcgatactactaatattttatttatctgtggcggtgcttttgccggacttgaaaatattatcggtgcacgtatcggcaaaaagaatcttggttttggtgctgatatcaaaacaaaagaagaagcaaaagctgatacgatctttaaaaaagttttgcctgaagatttaatgaaattcggtttgattcctgaatttgcaggtcgtctgcctgttgttgtgacactggattctttggataaagacgctttgatcaaaatcctgcaagagcctaaaaatgctttgattaaacaatatcagcatttcctggctatggataatgtagaactggaattcgaagacggtgctttagtggctattgcagaagaagctcttaaacgtaatgccggcgcccgcggtctgcgttctatcatcgaagaggtaatgcgtaatgtgatgtatgaagtgccttcacgtatcgacgttgtaaaatgtgtagttacagaagcggcaatcagagaacacatggaaccgaaaatggtggttgctagttaagcaattaaaaaaagaaggggaaggggcatagccttttcccctttttatgttaaaataaagttgagtaatgaaaatgctttaaaaatatcgtttgctgcagttaatactgttggcaaaggagggtaatatatggaaacaaaaccacgtttaatgccgttgcttcctttaagaggaatgctggtatttccaggtatgattataaatcttgatgtaggcagggagcgttctattcatgcagtagaagctgcgatgacttccgataagcagatacttctggtatcacagaaggaagccgtaacgatggaacccgggcagaaggatttatttaaatatggtgtcatagcagaaatcaaacaattattgaaattgccaagtggagctttgcggatacttgtagaaggattagcccgagccaaagtagaaactattatcgaagctccggctgtcgatacatatttccaggctaatgcactgccgatggattctgttgtcagtgaagataatgaagtggaagcgctgcgcaggatgctgattgaaacgtttgagcaatggattattgccagcaaaaaagttaacagtgaagtgctgctgacctttaaggaccaaactgacccaggacgggttgcggatatgattgccggttatctgtcgataaatatcgaagaaaaagagcagctgttagaagcggttgatgttaaagaacgtatgaataaactctatacgtatttatgcaaagaactggaaattgccggtctggaaaaaaatatttcacagcaggtgcgtaaacagatagaacagaaccaaaaagaatattatctgcgtgaacagatgaaagccattaataaagaacttggcgaaggtgatgaacgtcaggccgaaatagacgaatataagaagcagatgtcagagcttgatctgccggctgaagttgttgaaaaaatcaataaagaacttgaccgtctttataaaatgccgccgatgatggctgaaagcgccgtaatccgcaattatatcgatgtgcttttaagtttgccctggggtaagtttacagaagataattttgaccttgaagtggctgctaaagtactggataaagaccattacggtttggaaaaagtaaaagaacgtattttagagtatttggcagtacgtgctttgaccaaacaaagtaagggaccgattttatgtttagtcggacctcctggtgtgggtaaaacttctctggcacattcggttgccagagcgatcgagcgtaaatttacccgtgtttctttaggtggcgttcgtgatgaagcagaaatccgcggtcatcgtcgtacatatatcggcgcaatgccaggcaggattattcatggtatgcaaaccagcggttgcatgaatcctgtttttcttctggatgagattgataaaatggcttctgattttcggggggatccggcttcggctttgctggaggtattagacccggaacaaaacaacactttcagtgaccattatattgaattcccttttgatttgtcacatgttttctggattgtaacggctaatacggtagaaactatccctcctgctctattagacaggatggaagtgattcaacttaccagttacactgaggacgagaaagtgaaaatcggcgaattgcatttattgccgaaggaacgccaggcacatggcttgactgcaaaaactttgaatattacagaaacagctctgcgtcatgttatacgcgaatatacacgtgaggccggtgtacgtaatttagaacggaaaatagcggcgatctgccgtaaaacagcacatcgtattgtgacgaaacaggtaaaaagtgctaaagttaccgaaaaaaatctgactaaatatttaggaccggttatttttctggaaagcgatctgactgccaaggcagaaataggtatctgcacaggtttggcctggaccagtgttggaggtgaattactgaaggtagaagtactggctactaacggtaaaggcggtctggtattgactgggcagttgggtgatgttatgaaagaatctgctcaggccggttacacttatattcgttcccgtgccaaagagctgcatttggatgaaaagttttatgaaacaactgatatccacattcatttaccggaaggagcaatcccaaaagatggtccttccgccggcattactatggtgacggctatggtttcagcactgactaaacgttgcataaaagcgggtattgccatgactggagagatcactctttctggcaaagtgcttccggtaggaggaattaaagaaaaaatgctggcggcgcatcgttatggtgtaaaaaccattctgcttccagaacagaatatgcaggatctggaagaacttcctgtcaatgtgcgtgcggcaataaaattcattcctgttaatcatatggatcaagtgttgaaattagctttggaggagtaagatgaataaaggaacctgggatattattcatgcccaatatatcacatctgctgtcagagcagaccaatatccgacaccaccgttgatagaggctgcttttatagggcgttctaatgttggcaaatcatcactgatcaattcgctctgcagacgtaacggcttggcaagagtgagctcgactccaggcaaaacacagactataaatttttatggtttgcaggctaaacgcactactgaagggcaggaagaacgtgctgatttttatttagtagatttaccaggttatggttttgccaaaacagctaaaacgaacaaagataaatggtcaggatttatcagtaaatatctttccggatctgataatctaggactggtctgtcagcttattgatatcaggcataagcctttggacagcgatattgaaagctatcactggttactggaatgtggactgcaggttcaggttattttgaccaaagcagataaattgtcgaaaaatgcagcgatggctcaaaaagcattattcaaacgggaactgggactggatgacagccgtattatgacctattctgtaactcagaatacaatgcgcagtgaattgatagggcggatcatgacggcactggaagggcattattaagcgagggaaatatgttgaatcgtttgctgctgtttgttatggcagcctgtttaggaacgttatttttaaaaatggaattgcctataccatatcttttaggcggcatttttgctgcagtagcctgtaagatagctggttcgcctgttacctggcctaagaattggcgtgaattgggtttgcttgtagctgggtatggtattggccgtaattttacagctgatacatgggagaaaatgacgcatcagacctttggggtactggaagccacgctgatagctgtagctgttgctgttttaattgcctggtggacagccaggcatacctcggctaatcttatcagttgtgtgatgggtattatgcctggcgggctgacgcaaatgatgctgatgtcggaggatgatccaagggcggatgccaatgttgttgtcgttatgcagactctgaggctggtaggcgttattgtagcagtaccctttttggtaatccatggtttaggcgcacaggttatgcaaaacaatgctattgttcagacaacagacggtacgcattggcttattcttgtcccattgtcgtttttaggcgcttttgttgcgactaagttaaaggtgccaacaccgcgtttgctggggccgattctggcaacagcggcagggtcgtatttttggggaagtttacagcctgtgcctggtttgcttatgatgctggcacaggtaagtattggattatacatgggcgtaatgctggatcccaaaaaactttcggctactaaggaattgatgccttatatttttagtggtatcgttttgatgattggtgtcagtgttgttgttgcctggtccctgtcagaacggtatgggttttctttagtaaccgcttttttagcaatggctcccggcggaattgcggaaatgtgtctggctggaatgagtatgggagaagatgtttcaatcattcttacttaccaattagtacggttattgtttttgaatatctgcgttcctttgggaatcactatgtattttaaaaataaaagtcttgattagcagtatcgtagcttactgaataaaacagtaagctacgatactgttttatttgcgaaaaataatatatgaaaaaatatattaaaagacttgacaaaagaaatagtaataaatataattaagctaacaaatgaatattgtaagctaaaggtgctctacggagcttaatagagaagtcggtgcaattccgacgcggtcccgccgctgtaacgaggagtaaacttcaaatgccactggtagtaataccgggaaggtgaagtgagctatgaatcggagtcagaagaactgccttagctacatcgctgattgacctgcgagagacggggaggagatgctgcagagttcgtattttgggtgaatacgaagtgcgaatcttttgctatgaatttctgaccgtttttcttaatattattttaagaaaacggttttctgtttttctgtgcttttgtaagcgcgttgaggtcgaagtgtgatggctagacctcggaaataaggtcagccatcagtgtatatatttatttgtgacaggcctagacaacctgtcaggtttattgccattctcaagttctctttgtgcaagaaccttcttctcaattgcctgcgtaggggtgcgcggcaagagcaaccatcacattttttgtgatggttgctttttttgagaagggacttatagaggcagtctcggtaggagatactcgaaccattctgcgatacataagtaagcaaagtacaggaggtgaacatttactaccccggcacagaaaataattaatgaaaggatgccgtatatggaacaagataaaaaccttacagcagagattcagcaggaagaaactttagagggagctattcccccggttactttcgatgaatttacgccgccgtcctatgaggagtggaagcaagaagtagtgactgcgcttaaaggcggttcttttgaaaagagtatgttcactaaaacttatgagggtatcaccctgaatcctatttatagattagaggatcaggagaaaatcactcacaataaaacctatcccggcatggaaagcaacctgcgcggtgctaatgcaggaggttatatccataaagtatggactattgctcaggagtgtgatggaaaaactcctgccgaagccaatgaaatggtcaaatacgagcttttgaaaggaactaccgccgccagcgtcgttttagatactgcgacacgcaaaggctgcgaccctgataaggcagatgtaaaagatgttgccgatataggcgtatctttggctaccgtagctgacgtagaaaaactgctggatggcgtagatctggaaaaatttgaaatcgatatttatgccggcgcttccaacatcgctcttttggctgctgtgatcactgcctgcgagaaaaaaggcctggccctcgaaaaattacatggcgctattaccgccgatccgattggcgaacttgctttggacggcgaattagttcgtccgctggatgaatattatgacgaaatggcacatagtattgcctgggctgaaaaaaatgcgccgcagcttaaaacagtagttgtcaataccgatgtttatcataatggcggtgctaacgacgttcaggaagtagcgtatgctatgaatgaagctgtaacttatatgcgcgctatggaacgccgtggtattgatgtcaataccttctgtcgtcacctgcgttttcatttcagtatcggagctaatttctttatggaaattgctaaactgcgcagtctgaaaatggtttgggcgcaaatcgttaaaaattgcggtggggatgaagaagcacaaaagatcaatctttatgtcagcacttctaccttctgccagacgaaatacgatccttatgtaaatctgctgcgtgcggcaacacaatccttctctgcggttgttggcggtatggacggcatgtatgtcaaaccttttgatcattgcattcgtcccagtgatgtattttcccgccgtattgcccgtaatatccagatcatggaacagcatgaattcaactttattcagccgatcgatccttccggcggcagctggtatattgaaccgctgacagaagaatttacggaaaaaacctgggctaagttccaggaaatcgaaagccatggcggcttactggcagcacttgaaagcggcaaagtacaggcagctgttaaagctattttagaagaacgttttaaaaatcttgctaccagaaaagatcgtgccgttggcaataacatgtacccgaacatgactgaagaacttttggaagtgcctgaagtcgatttcgcaggaatccttaaagcacgcaaaactgatttggaagtcaatgtaaaagtacgcgacaatgcttatgtagaagctgtactcagcgaccttggcaaacgtgatgccagcgagttgggttctttgatcgctgatgctgaaaaagcattactggccggagcaactatgggcgaaatttcagcagctcttaccggcagcgctcagggcgaaaaggttgaagctattgcaccgcatcgctggactgaacgctatgaagaactgcgtatgcgtacggaaaattttgttgctaaaaccggtgcaaacgttaaaatcttcctggccaatatgggaccgatcccgcagcataaagcacgtgccgatttcgttacctctttcatgcaggttgctgcctttgaggttatgacaaataatggcttccccactgtcgaagaggctgttaaagcagcgcttgagtccggtgccgatgcaaccatcgtctgctcgactgacgctacttatccggaactggccccagccgttacgaaaggcatcaaagctgtaaatccggaaatgaaggtattcctggcaggtgctcccagcgcagaactgaaagagatctgtgatgccgcaggtatggatgattacatcagcgtcaaatccaactgctatgaaaccttgctccgtatgcaaaaagaaagggggatgttctgataatgtccagaattcctgattttagtcaaattccctttcagcaggcacccgcacaaggcgacgccgagtttgctgcctggaaggaaaaattaaaaactgaaaccggtaaatcctttgaagaaaatttttaccgtacaatggaacaaatcaacgtagctcctttatatgatgtgaatgcctataaagactgcgaacatctgcattatatggcaggtattccgccatttttgcgtgggccttattcaacgatgtatgtaaccaaaccctggacagtacgtcaatatgcaggcttctctactgcagaagaatcaaatgctttctatcgccgtaacctggcggcagggcaaaaaggtctgtctatcgcatttgaccttgcaactcaccgcggttatgactcagatcatccgcgcgttgtcggtgacgtaggtaaagccggtgttgccgttgactccattttggatatggagattcttttctccggcattcctctggatcaaatgtctgtatcaatgacaatgaacggcgcagtgctgcctgtattggccttctatatcctggctggtgaagaacagggcgtagacaaatcagttatggcaggtacgatccaaaacgacattctgaaagaattcatggttcgtaatacctatatctatccgcctacagcttccatgcgcatcatcggtgatattttcgaatatacctccgcttatatgcccaaattcaacagtatctcgatttccggttatcatatgcaggaagcaggcgctactgctgatatcgaacttggctatacattagccgacggtctcgaatatctgcgtacaggtactgagcatggtcttactattgaccagtttgcaccgcgtttgtccttcttttgggcaatgggtaaaaactactttatggaaattgctaaaatgcgtgcaggacgtatgctgtgggcgaaaatcgttaattccttcggcccgaaaaaaaccaaatctatggctttgcgtacacattcgcaaacttccggctggagcctgacagagcaagatccgttcaacaatattacgcgtacctgtatcgaggctatggcagcagctttggggcatacccagtcgctgcatactaacgctttggacgaagctatcgcgttgccgacagatttctcggctcgtattgctcgtaatactcaattgtacattcaggacgaaaccaaagtctgcaaagttattgatccgtggggcggttcctattatgtagaggcactgaccaatcagctgatccaaaaagcctgggcacatatccaggaaatcgaacagctcggcggtatgtccaaagctattgataccggtcttcctaaaatgcgtatcgaagaagcggcagcacgtcgtcaggctcatatcgattccggcgccgaaaaaattgtcggcgtaaacgattaccgtctggaaaaagaagatccgcttgatattctggaagtcgacaacactgcagttcgtttggcgcagatcgaacgtctgaaaaaattgcgtgctaaccgtgacaacgatgaagttcgccgttgtttggacgctatcacccattccatggaaaccggcgaaggcaacttgctggagctggcagttaacgcagctcgtgcgcgcgcttccaaaggcgagatttctgacgctgtcgaaaaagtctgcggccgtcataaagctatcatccgttcaatttccggtgtctacagcagcgaatttgctgacgaagatgttatcaaggaagttcgtcagatgacagatgactttgaacagcgcgaaggccgtcgtccccgtatctatattgctaaaatgggacaagacggacatgatcgcggggcgaaagttattgctaccgctttcgcagatatgggctacgacgtagatatcggccctctgttccaaactccggaagaagctgcgcaggatgcagtagataatgatgttcatatcgttggtatgagctcattggcagcaggtcataaaaccttgatgccgcaactggtagaagaacttaaaaaacgcggacgtgaggatatcatggtcgttatcggcggcgtaattcctgcccaggactatgattatctctacgaacacggtgcagcagctatttttggacccggcaccattatacctgtctgcgctaaaaaagtactggaagagctgaacagacgcttggcggattaagccatgacagatacttataaaccttcgtgggtgcctgaagaagaaaacgataaatttgcctgccgggtaatgtacggtgttacaggcggtcatgaaggaactccaggtgtaacagtagataaaaaagacaaagtagctccggctatcaaacgccgtaagctggaagtcgacgattacgtcgaaggtgtcctcaaatgtgaccgcgcaattttatcacgcgccatcactttggttgaaagtaatgctgccgctcattttgagacggcacagcaggttatccaaaaactgctgccttacactggtaaatcgacacgcgttgggatcaccggtgtgcctggtgcaggtaaatccacctttattgaggctcttggcacaaacctgtgtcgtggcggacataaagtcgcagtactggcggtcgatccctccagtactgttaccaaaggcagtatcctgggcgataaaacacgtatggaacagctttcacgcgaaccgaatgcttttatccgtccgtctccttcgggaggaactttgggcggtctgactcgtaaaagccgtgaaacactgcttttgtgcgaagctgccggctatgacaccattttagtcgagaccgtaggcgtagggcagagtgaaactaccgtacgttcgatggtagatttctttctgctggtcgtattgacaggtgccggcgacgaattgcaggggatgaaaaaaggcgtaatggaactcgccgatgcaatcgtcgtcaataaagctgatggtgataataaacagcgggcaatggttaccagagcggagtatgaacgtatcctgcaatttttacgtcaggctaccgaaaactggacgactcatgcctatacctgctctgcttatacaggagcgggaattatggaactgtggaatgatgttatcgaagcctttatgaaacaaggctggggaaatggcgtgttagctgaacgcaggaaacagcagacgctttcctgggtatataccatggttgaagaacatctgcataatctgttttatcgttcgccagccattattggctgcaaagaagagatcgagcgtgaagtagtgggcggaaaaatttcggctactatggcggttcaagatctcatcaacagatttgccgctgctgagctgagcggtgttaatgttaaagacagctcgccttttgaaataaaataatttttagattctccattggggcgcggccacctgtgggccgcgccattttttaaggaggcaatacatatgaatgataacccggctattaaaggcctgatagaattaatcgaaaaacgttatggattggaagttctcgactctcactacgttctggttgatgaaaaatttaaacaatataatatgatgctgtatgtcaaattaccaaaacagatgcttgacgaatttaaacgcttatattcgaataaaaccagcgccatgcatgttgcgtggagcattgacgataaagataacattagattccacgctgctattggcaacaatatccttttgcttttagattctctgctgtcaaaagaataaaagaggtgagcaaatatgactgaagactttgtcggtacgagtggaaaactggaagaagaattcgtttatgcacctaataacaacctgaggacagaagtgtttgttcgctttgaacaacgggccgctcaggaaaaaccgttgcttcttccaggcttgatggcattaaaagagaaaatgggtacttatgattttgataaatatatcaacagtctcgaaaatgtcaatgtcagtggtaagtcaatgatcatgctgaccggtgatgaaaaaacacgtactattttggtaagccggtggcttccgcaaatcagggacgcctttggagtagatagtgtacgtattgtcggtggtggacgcggcggcattgatgcttattaaaaaatacgcttatcccattaaaactggataagcgtatttttttaattgacatataccctatagggggataaaataaaaaaaggaggcattgcaatggaacttactcataaaagatatttgaagatcacgtttcctttcatgctttcttctgttgcagttcctgttattggcgccgttgatacggcagttgttggcaggctgggttcacctgactatattagcgctgtagctttaggggcagttattttcagtacgatttattggcttttgggatttttacgtattactaccgcaggaatgacagcgcaggcagtaggtagagaagataaagaagaagttttcctcatattactgcgggcactgctgttggctgctttaatagggttgcttttgtttgcttttcatagatttatttttgctgcagcacagttggtttttcaaccggaagcagtagtagctttactgatgaaacggtactttgacattctggtttggggatttgttccttttttactctatcaggtcttagctgggtggattactggtattttacagattaaaactgtagtggtactggagcttggtacaagtttggttaattttattttagatctttgttttgttaatctatggaatttgaatatcgatggagttgcttatgcgtctcttttggcgcaattggttggcttcattgtagccgtatgctatattttgtgcaggcagaaatgctatttggcaatagttcgctggaatagtttttttgataagggtgcctgtctgaaacttactggctgttgtacgcatttgatgatcagaactatatgtatgctttttatgatcaatacatttatgagacaaagcgctgcttttggcagtaatattttggcagccaattcaattttatttcagattcagtacattataggcgatatctttgccggcctgtcacaatcagctgctctgtatgccggcgttgccgtaggcgaaaaaaatagccgtttattttttgataatctgaaaataaacggcttgtggtcgttgctgatgggtggattactatcgtttggttattacctgctgcgtgagcctattttatattgctttactgatttgcctgatgtattggctgctgcttatgaatatgatatatatattgtttttttttccttcattgccgcacttggcatcgtttattatggaattttcaatggtgcgcttataacagctcctatctgctattctatgttgctcacagtgatagcgtttctgatatctaaaacagccctgataccgattttcggcaatgcagggctgtggcagtcatttttaattttttatttaggcagaacaatttttttattgattttcttaccttttctatatagaaaacttggttttaaaagatctgggaagattttttaacgcaaataacggtcaatagcaatttctaaatcagataaagcttcggcatcacggccgtttcttacagcatgtaaaatgcaatgctccaaatggcctttaagaattattttggcgcagttgtctaaagccttacgtactgccgcaatttgaatcagtacttcagggcagtcacggtcgtcttcaatcatctttttcactgcgtgtatatgcccttcaatacgggcaagtctgttggtgactgcttttttatttttatggatatgtatagatgccgttgtcatattatcacctcatttgcattataactgttagcggtttataatgcaaatttacattttgattacttattagtaacatatataatcaaaattatttagataattttttactaaaagcattgacaatataattagtaatgcttataattaatacaacaaatcaatatttcatataggtgttctacgaacttaaatgtcgatcggtgcaaatccgatgcgatcccgtcaccgtaacaggtcagtccccgcacaagccgaggtaatacctgaagccggacagcagcctatataagcatcactgcttgacctgcgagagacaggaaggagatgtttttaaccactgaggttctgtttatgtgagagtggcagaaccgctttgactgataacatttgaccgtcttcgcgccttgagaagacggtcttttcttatgattgtcgtatgcttgccggtcgaaatattgattgttctacagagtaaaaatgccggacacattttcactctgtccggcagatatattctgatttatttgctgttttcaaggctttcttaaaagaatagaaaatcctttctctcctccttcgttggcaggcgtaggggtgcgcctgccaaaaccatcacttgaacagtggtggtttttttatttagtcatggtgtacttcgctgcatgggtttacatggaccatgcaatgttttacctccgaaaaattactttcaattgctttatgaatattttcggcgatagtatgcgcttccagtaaagtcaggtcgtcgtcagcgcttacttcgacatctacatagatgcggcagccaaattttctggtttgcagtacgtctatgtggtcaacgcctttttgagcgcttatcagagctgtcatcgtattgatagtggcttcgtcacaggagcggtcgaccatcttgtctatggcatctttaaaaatttcgtatgatgcgtaaacgatcatcaggcaaatgactacactggcaagaggatctaaaacaggatagcccatacgggcgcctaaaatgccgataaagctgcctattgaggacaatgcgtcactgcggtgatgccaggcatctgccattaaagcactggaatttattttggcagctgcttttttagtgtaccagaacataccttctttaacgataatggaaattactgcagcgatcaaagcaaggctgcccggtattttcaaatcttcagctgaagcgtgaagtattttttctaaacctgcgtaacctataccaatacctgtcagtgctaaaactatcgctaaaatgatggcggcgacacattccaaacgttcgtgtccgtattgatgttctgcatcagaagctttattggatatcttgacgccggccataacgataaaggtactgaagacgtcggaagcggaatgaatggcatcagaaatcattgcggcagaattagccagtatccctgctgctaatttaccaactgaaagaatcagatttacgatgatactgttaatagaaacctgcatagccagacgctcggactggataattttatcttgcatggtggataacctccctggtgttactcttgcagcggaacagatataataaaaacatctgcggaactactactgtcccgcagatgtttatttacgaatctgctgcccgatgggcccggccgctaaaaccaaaggtttaccgcctgttcagtttgtactgtagcgatatgcagtgcaaagagattactttgattttaattggttagctgggggtttgtcaagcaacattattttaattattccggatttgaccataggttactaaaattgtgcctttaggagctgatagagcagggcattgatagagaataatgccatcttgttcggcattatagacagtaatggtattgccaaaaagatcagtcaggcagccaagtttatcgcctttttttattttgtcgccgcaatgaaagcagggaaaccaacagccggtgttgttcgtttcaagataaataacgtctgtaacgtctatcggtgtatgtttgcgcggtaacggtgcgctgtttgtgaataaccccagcttgcaaagtatgttatgaagatcttttttataggcgtcgatgtcttcgcgcaagcataatcctgctccgccgcgttcgatgagaatagaggggacgccggaaatagcggcataattataggcgcctgttgtggcagttgaacgaaccataaattccatatccagaaccatggctgcttcgcgcgcttttgcagaaatttcagcgtttggaagcccgggataatagacataaggataaagttcttcgtggatggcaccactgtgcagatctgcgtaaaaatcggctaaagggaaaaaatactgactaagcagccaggctgttttttgggaaagtgtaccattggcattaccgggaaattcacggttcaggtttctgccgtcatcgggtgtcacaaaagcactgcgagcccagaaactttgaatgttggctggatgtattatgatcaggcagcccgagattgattcaggttctgtgtcccggccgagttccatggcagccgcgatgccaggatattcaccgccgtggatacctgctgttattaaaagagtagggccgtcattttgaccgttaatgatagtgataggtatttccgtattagtgtccaggacaggaagataagtttgcagtttttgtcctcgttctgcttttaaacctcgaatatacagagtatctgacatttttacaactcctttgcttagctaaatcttattttgtaaaatttgatacgattattttcattttattcttgctaatcagtataacatatgataatatgttcatacaatagctattatcaattaatctcaaaaacattttagaataacagctgaaatactaagctgtatcagtgaaggggaagtacaggtgcggacaaatgttttgacagacagagaatatttgggaattacgataccttttatgctttcaacgatgacacagccattgatgggggctgttaatactgctgttatggggcagcttcctgatcctaagtatatagcagctgtagccttgggagcaatccttttcaataacatttactggttttttggctttctgcgtgtcagtacttcgggctatgccgcgcaggcgctgggatctggctgcagagaagaaggattgctggcttttttaaggcctctttttgttgcgctgatagtcggttgtggatgcattatttttcagaagcctattttaactgcttatctggctttagtagctcctgctgccgatgtagccgagctctgcgcagcttattataatattttgatttggggagctccgctggtgttattcaactatgtatcattgggttggctgatgggacagaccagagttcgtgcttcggtgtttatgcaggtttcaagtaatgtattgaatatgatcttaagtatgtggtttgtgtttgtgctgcacttcggtattgagggagtggcctgggcgacactgctaagtcagctctatggcgctgcagttggctgctggcttatgtatctttatggtaactttgactataaaaacttggattacagaacagtcgtagaacccgaaactttgttgaaaatgctttcggtaaatgctaatttaatgattcgtacggtctgtctgctgacagtaaataatgttattgccgctgccggtgcagcattggggacagtggtattggcagcaaatgccgtattattccaactgaaggatattatgtcgtttttggtagatggcatggctaacggcgcctctattttctcaggaagagcactgggccaaaagagcagtgctttattttggcagacgctgcggatgacctataaatggctgtttgtattgatagtgctgctggtagttgggttcttttttggcagtacatttttaattaattgctttacagatttgcaagaggttgctgtattagcggcagcttacagaaattatgttcttgtctatcctgtaatagcaggtttagggttagcgctttatgggatgtttacaggtgctacttatactgctcctatacgtaatatgatgctgattgctttagctgtattttggcctgtggagagactgttagtacctttacttggcaatgatggcttatggatatcgtttttaatatttgttgggattcagtctttaatattattttattcattgagaaagcttggagaaaagatttataagattaaataaaagtgtttactaagtatatggtttgtgctaatattaatacaacttaataattttatcaaaggtgcctcaaggttaaattagggaagtccggtgtaaatccggcacggtcacgccactgtaagcgcatattgcgtaagtcagatcgcagcctttgatttttgccatatccgcgggtgacggatcagcagctagttcctgaaatttgacttaaataggcagtcttgcctgtttaaacaatattttatgatctcctgcatccgtggttcatggctgcaggagatttttttgtaaggagatgggaagctttgaaaaacaaacagatttggggcaggatcgggcaaatcgtattggtgctattagggatcagtttcgttacatttgctttggtaatgctgtcgccaggtgacccggtcagacaaatgattgccggcaatgaggatattgttgtcagtcaggtggagattgatgctttaaggcatgaactgggattggacaagccctttgttttccagtatttagattggcttggaagggctgtacagggaaactttggattttcatatatggttaaaaagcctgtggtggaagagttgatgcagtcgttgcctgccacattgatattagcgttggcgtctaccttttttatgctgattttttcgctgccgttaggcatttattctgcggtgaagcgcaacagtatttttgactatgccgttaggggactgacgtttttcggagtttcgatacctaatttttggatgggtttaatgctgctttggatttttggtttaaaattaggctggctgccaattgtcggtggcagagtaagtctggagaccctgattttaccagctacgacgttgggtatagttatggcggcaaaatatacacgtcaggtaaggacgacggttttggaggaactcaatcaggattatgttgtcggtgccagagccaggggaatgagtgaaagctatattctctggcgggaagtattgccgaatgcgatgctgcctttgattacactgctgggcctgtccttcggcagtctgctgggcggcacggcagtagtagagatcgttttttcctggccggggcttggttatttagctgttcagtctatcatctatcgagactttcagcttgtacaggggattgttttgtggatagcccttatgtatatggtcatcaatttagttgttgatatttcttacaaccggcttgatccgcgcctgcgaaaggaaggtagatagcatggagaatcttattaacggattaaagaataatcgtgcttttgccttttccagttttttagtgctgctgctgataggtattgctttagcggcgccgctgctagctccttatgatccgttggaagctacgatgaaaaatgcttatctgccgccttcgagtgaacatctttttggaactgataagctggggcgggataatttcagtcgggttttgtatggtgccagctattctctgagcagtgttttgctgttggtagcggtcatttttgcagtaggtacttcgctgggtgttctggccggttattttggcggaaaggtagatacggttattatgcgtatttctgatatgatgatttcctttcccggaatgatactggccattgctattgccggtatccttggcggcagtctgatcaatgcgattatagctttgactatcgttacctggactaaatacgctcgtttggcacgtagtatggtattaaagataaaaaagcgtgattttgtcgaagcggcagttgtcaacggcggcaaaccgacacatattttgtggaaacatatcgtgcctaatattttaccgttaatgattattacagcagcttcggatatcggcgctatgatgatggaactggcagggctttcatttttaggcttcggttcgcagccgccggctcctgaatggggattgatgctcaatgaaggacgtcagcagctgcagacggctccctggctgatgtttttccctggtctggctatttttctgacggtagtagtctttaacctatggggcgacagtttgcgtgatgtgcttgacccgcgtcaggaagattaagttcagctattgaataaatttttatatacagtcaataaaataaaaaggatttgaaagggagatgtatgatgaaaaaaactattaaatttacagcagccgttgcaatgataggtttgctggcatttacttcagccggttgtggcggcgatgacaaaaaagctgcggcagccaaagacactttgaaatttggcgttactaattttgccgacagtctggaaccaacagataactactttggctggattgttatgcgttacggcttaggtgaatgtctggtaaaatttgatgaaaaaatgaattctactccttggctggctgaaagctggcaggtcagcgacgataaacttacctggacttttaaaatcaatgataaagcgaaattttcaaatgggaataaggtgactgctgagtctgtaaaaaaatctattgagcgtacatttgaaaaagctgcccgtgccagagcaatgtttgaatatgacaatatcagtgctgacggacagactttgaccatcaaaacccatacgcctgttgctacattaccgggaatgcttggtgatccgctttttattattattgacaccagtgtaactgaccgtgattatgctaagcaagggcccatctgtaccggtccgtatatggtcaatacgtacagtaaagctaaagctgttatggatgctaatcctaattactgggatggcgaagtaccgtttaagcatgttgagatcccgactattgatgatcccaatacacgcgctatggccctgcagtctggtgagattgatatggcgatcaatatcgctcccggggacatgtcgttgttcagcaacaaagataagtacaatatcagcactattgcttccctgcgtgacgtattggcacgtatgaatgttaaggaaggcaagccgatgtatgataaacgtgttcgcgaagctttgctgtcatctttggaccgtgaaacctactgtaaggttttactgaaggacacatttactcctggcggaccgttgatgccgccttctgtcgattatggatttgatcagttaaaagatcctaatacctataatgtagaacgtgctaagaaactgttggaagaggctggctggaaagataccaatggtgatggctatgttgataaagacggtaaaaatctggagatggactttattttctacagcggtcgtgcagaattgcctttatttgctgaagctacccagtccgatgctaaaaaggttggtatcaaggttaacctgaaaaatgttgattacaatgttttggacgggattggtgtgcgaggtgaatatgacttgctgatttccaatattcttactctgcaggcaggcgaccccgaggtctttatcaatcagtactggaaaacaaatgttaacggtaataatccgcagaacggcagcggttacagcaatcctgcctatgatgctctgagcgataagctggcagtagaatttgacccggcgaaacgtcgtcaattagtaatcgatatgcagaaaattattcttgatgatgcggcaacgattatttttggttatccgcagacaaacatgatcagtaatacttctattgccaatgcagaaattttaccgtgtgattattactggctgacgaaggagatcaagcctgcccagaaataatctgtgggaagaagggacactgtaatgcttttaaaagttacagatttggatatcagttacggcagcaaggctaccgtaactggtgccaatatagaattgaaaaagggtgagattttatctatcgttggcgagagcggcagcggtaaaacaacggtgatacgtgctattatgggctgtttgccgggtaatggacatgtaagcggcggcaatatcatttttgacggcagaaacctgctggataatacgccgcagcaatggcgtgaaatgtgtgggactgagatttctatgatttttcaggacagcggtaatatgatcaaccctatccgccgtatcggcgaacagtttattgattatattctgactcatgcgccgcagatttccagacgggaagcctatgatctggctgttaagatgcttgatgatgtaaggatgcccaatcctgacaatgtaatgcgcagttatccgttcgaattatcaggggggatgcgccagcgtgtaggtatagctctggcgatgaccttcagcccgaagctgcttttggctgatgagcctacaagcgcgcttgatgtcacaacgcaggcgcagatcatcaggcagatcgttgatgttcgtgacgaatacaatgccgcggtgatcatagttactcataatttgggtgtagcttcgtatatgtcaaataaaatcgttgtgatgcagaatggtatggttgtggagagcggactgcgggaagagattatcggcaatccacagcatgcatatactaaggaactgctggcggctgttccggttgtgggaggtaagcgttattatgcctgagaacgtaaaattacacccgcatgagaactgtaactgcgcccatgatggagttgcgttaccgcaagaaatagtattggaagtaaaaaatctgacgaaaaagtttcaggtagatggcggcaaggttctcactgcctgtgataaagtaaatttaaatgcttataagggacagactcttggcattattggtgaaagcggctgcggcaaaagtactttggtcagaacgattttacagatccatccggcgacggagggtgaagtaatatttgaaggacagaacattttggaattgaagggagaagagcttcgccagaaccgccgaaaaatacaaatggtttttcaggatcctacagcggcttttaatccgaaaatgcgggtaaaagatattttatgcgaacctttattgaattttgggttgctgaaaaattctgaagttgacgcaaaagctgcagagttattgcaaatggtggagctgccggtggaatttaaagaccgttttcctcatagcatgagcggaggtcagcgccagcgtttgggtatagccagggcactttctctggaaccgcagatcattgtctgcgatgaagccacttcagcgctggatgtttctgtacaggaaaaaatttgtgaattgctggtacggctgcagcgggaaaaagatattacatatctttttatctgtcatgatattggtctggttgatttgatgagccatcaggtcgcggtcatgtatcttggtaatgtagtagaaagattggaagggtgtaggttatcgacaggcagcgctcatccttatacaaaggctttgatcaagtctatttttaaggtagattttaaacccggtgagaggatccagccattggaaggagatatccccagtcctctggatctgccgcaggggtgcccgtttcaaagccgctgcgggcaatgccgggaaatatgccgtcaggaaaaaccgccgttgcgtgaaattcattcggggcattttgtagcctgtcatttcgttaaataatttttgggtatattgcagcagtcttattgagtgctgcaatataaaaacttcttaaagtgaataaatacttatttgttcatatttaaacacggttaaattaagtacacttttaaaaatataaaatcggtaaaagtgtacttagcatatatttttttaggagttgattatgatgaaaaaaactttggtgcttgctatggcaatggcgctgggagtgactgcttcagcgtatgccgctaatcctttttctgatgttccggccgggcattgggcttatgatgctgttaacagactggcggcagccggaattgttgatggttatggcgacggtaattttggcggcgaacgtctgatgacacgttatgaaatggcacaaattgtagcaaaagctatggctaaaggcgctaatgttgaccgcctggctgcagaattcgccgatgaactggacagcttgggagtacgcgtggcagctttagagaaaaaagcggataatgtgaagattacaggacaaatccgttatgaatatgcagggcgtgacggagattttaagaaaactaaaggcagtgttgcaaaaaatcgtctgcgcactcgtttatttgtaaatggcagtgtaaatgaagactggacttatacggcccgtattcaaaatgaccagaatcttgctaatgattcaggtgatgaagataccaaactcaatcaagcctatgttacaggtaaattgggtggatttaatgttatggcgggtaaagcacctgtatttttagctaatggcaacctttatgacgatactgcagaagttattcagttaacatatggtaaaaatgtaaaaattagcggttattgggggcaaattactgaaaaagattccggttatacggcagataaggcctatggagccagtttatctggtaaaatcggccgcttggatttagctgccggttatgataaatttgaagatttagatgccgggtttacgaaaatttctaataacgcggtctggaatgcaggggcaaattataattttggtgactttattttaggggcgatgtatcttaattctgatatttctgataaagctgttgaaaaaggtgctgatacggacggctttgtcatcagtgctgcttacaagggtgccaaggctgccaaacaggggacctggggactttggggaaattattatgatcagggggcaggtacatttattgctcatacgatgaaagctggtgactggggatacttcactaaagaaggctttaaaggttatggtgttggtataaattatactttggccaagaatatggtttataatttggattactatgatttggaaggtaaagaaagcggacgtgattctcagattatttggaatcgtttacaggtaaccttctaaatttgcagtaactgaagcaggtattttgagaaagattaaggctattttaacaggcagtttccatattaaattaatggaagctgcctgtattatttttctcaaaaatttcgtaaaattttttaaaaaactatatatgaatatttgctcatgtgttataataagattacagtaaaagtaaggaggctggaaaatgagcaaaacacagcatgctttagaaaatttacatgaacataacagtcagggctgcggacatgatcatcatcacgaagatgaaagcggccataacgataattcagcctgtggctgcggacacgaacattatcacaaaggagaaagcggccatgaccatgatgcagcctgtggctgtgggcatgatcatcatgtgcccgggcatgcagatgactgtcaatgtgagctctgccatccacatgaggaatattgcgatgtttgtggtgaaagcttggaaaattgtatctgcagaatgcctgatgctgattgtataaaacgagtttatgctttaaaaaatctgggttgtgccaactgtgccgccaaaatggaatataagattaaagaattgcctggagtagaatatgcttcagtaagttttgtaacaaaacagctgcgtctatcggccaaaaatcacgaggtattgctgccggccattcgtgaaatctgtgcttctatagaatcggatgtagaagttgtgccacgcagtgggatgatgccgttcaactttgaaagcaaggtatacctgttagagaacctgggctgtgccaattgtgccgcaaaaatggagaaggctatcaatgatttgccggatgtttctgctgcaacgataacttatgctacgaaacaactgcggctgacagcgaagaatcacgcacaattgctgccacaggtccaggcaatttgcagtacgatcgaagcaggtgtaaaagtagttgaacgtataggcaagccggtattggctgaaaatattaatcagcgtaaaaaaagcggtggaatactttcaatgtcggatgaacagcgttcactggcagaaatagtgtttggcggaattttgtttataatcagcgaaattaccggactcgtgccggaagcttatcatatttactgtcttgttgccgcatatattctcttgggcggaaggattgttttaaccgctttaaaaaatagtacgaagggacaggtttttgatgaaaacttcctgatgacagtagctactttaggtgcttttgctatcaatcaatatgaagaagctgttggagttatgctgttttatcgtatcggagaatattttgagcatcgtgcggttgaaaaaagtcgtggtcagattatggaagctgtcgatatgcgtccggaagtagttaatttgctgattggtgaagatgtgcgtgttatcccggcagaggaagccaatgttggtgacattttactggtacgtgccggtgatcgtattcctttggatggagtagttatagaaggtgaaagcctgcttgatacttctccggtgacaggagaacctgtgccggtaaaacgcagttttggcgatgaagttatttctggttgtattaatacgtcagggatgctgaaaatcagagtagaaaaagtcctggctgaatctatggtcaccaaaattttagactctgtagaaaatgctgctgccagcaaaccacagttagacaggtttataacacgttttgcgcgtatctatactccgtttgttgtggcagtagctgttttaactgctgtgatacccggctttataacaggaaattgggaatattggacttatacagccttaacatttctggttatcagctgcccatgtgcactggtgctgagcgtgcctttggcgtttttttcaggcattggagccggctcgaaatatggaattctttttaagggcggcgttacaatagaagccctgaaaaatgttaaagcagtggttatggataaaacaggtactgtgaccaaagggaattttgttgttcaaaagctggttccggtaagtggcatggaagaagatgagctgttgaagctttgtgcctccgcagaacttgtttccagtcatccgattgctacaagtatagtaaatgcggccaaagaatgtgagttgaaactcgaacggccgcaaacatttgaagaaattgccggtgaaggattagttgtcgaggtttcagatggaaaaattttgtgtggcaataaaaaattgttagaacggtttgaaattgatttttctgttagggaagaagataattatggtacggaagtgctggttgccagagccggaaagtatttaggacaaataattattgatgatacattgaaagaggatgcggtagctgctgttacctcccttaaaaagatgaatttaactacagccatgcttacaggtgatgcggcagaaagcgcacaggcagtggcacgtgctgctggaattgacgaagtaagagctaagcttctgccgcaggataaactcaatgagttgggccgcttacgcaaacaatatggtggagtgatgtttgtcggtgatggtataaatgacgctcccgttttagcaggcgccgatgttggcgctgccatgggcagtggtgctgatgctgctattgaggcagcagatgttgtatttatgaactcggaaatgcaggctattcctcaggcaattgccctagcgaaggaaacaaccagaattgcctggcagaatgtattttttgctttggcaattaagattattatcatggctgctgggttggcaggctatgcgtctatgtgggcggctgtcttcgccgacactggtgtttccatactctgcgttttgaattccattcgtattttgtataaaaaaatataaatattattattcaatcattataaggacagcagattaaaacatgctgtcctgtttttttgaaaaaactttaaatttaaaagtttaaagggataataaaatcattgtacaggtaaataattttgttgaaatattgtgaaaatatcagaagcaataaattgttgttgacaaaataagttagcagtagtaaactttaagaggttagcgaaagctaactttttaaaagcgggctagttagcgtaagctaatgtgaggagggcaaaagtatgatgacattaaaagaagttcctatcggttctaccgtaactatcaaaaaagtttgtgccaccggacctttgaaacgcagaattgttgatatgggtttgacaaaggggacaccggtgaccgtcagaagagtcgcgccactgggagatccattggaagtaactgtacgcagctatgagctttcgctgcgcaaagcagatgcgcagaacattctggtggaataaattttgatttaaagttagtgaaagttgattcgaggagggactattttgagtaagacattagcactagtgggcaatccaaacagcggtaaaaccacactatttaataatcttacaggcagtaaacaatacgttggaaactggcctggtgtaaccgttgaacgtaagggcggcaaacttaaaaaacatgatggctttgaggtcatggatctgccgggtatttattctttatctccgtattctccggaggaagtaataacccgtaattatcttttggaagaaaatcctgatgttatagttaatatagttgatggatcgaacctggaacgtaatctgtatttaacgatgcagcttttggaaatgggctgtaaagttgtagttgcgctcaatatgatggatcttgtcagagctaacggtgatgtactggacacggagctgctctctaaagagttagggtgcccggttgtgccgattacagctaccagcggtgaaggtgtggaacagctcgtggcaagggcggtgcagattgctcaaacacaatgtgacagaaaagaccccaacagcttttcagaagaagttgaacgcgtattgcaggaaattggcgaaatggtagcgcctatgccgcatatagaacgccgctggcaattagtcaaggtattggaacgtgatgggcagctgcttgaaaaactgaaattatctcaaggtgtgtttgacaaactagaggtcttgattacccgttttgaacagcaggctgatgatgatgcggcaagtatcatcgcttccggacgttatcagaaaatagactcaatgctgcgcagctgttataaaagtgccaatgttgattatgcaaatactgtttcagaaaaaatagatcgtattgtaactaaccgtgttttgggattacctatatttttaggcatcatgtgggctgtttattatatttgtatccagaccttgggcgatgaaactatcggctggatggaagaattatttgaaggcatcagtgaatacgcaggtgctttgctggaagcagctggcgcttctgaagttatgtcagggctcgtacttgatggaatcattggcggtgttggcgccgtacttggctttgtaccgcagatttgccttttgttcttatttttgtctttcctggaagactgtggctatatggcacgtgttgcttttattatggatcgtattttcaggcaattcgggctttcaggcaagtcgtttattccgatgttgatcggtaccggctgcagtgttcccggtatcatggcagcacgtacgattgaaaatgaacgtgatcgtaaactgacgattatgctgacgccgtttattccttgtaatgctaaacttccggtgtttgctctgtttgcggcagctttttttccagagcagtcttgggtcggtccttcgatgtatctctggggtatagtgatggttgtagtttcaggtattctgttgaaaaaaaccaaggcttttgccggtgaaccggcgaactttgttatggaattgcctgcatatcactggccgcgggcaaaagatattcttattcatacttgggaacgtgcccgcggttttattgttaaagccggcacgataattttcctggcctctggattggtgtggttattgcaatcctttgatttttcgtttgaaatggttgatgctcaggacagtatgatggctgttatcggtcattatctggcacctgtgtttgctccacttggctttgacagctggcagactgctttcgcagcaattacgggcttcttagctaaagaagtagttgtttctacatttggtatcttggctggagttgctgaagctaccgaagaagatccgactttgattaccactattcaaagcatgttcacgcctgccagtgcgtatgcatttatgatttttacattgctggcatctccgtgttttgctgctattggcgcgatcaggcgcgagatgggcagctggcattggactttctttgccctcctatatcaaacaggcttggcatattgcatggctttgctgatataccagatcggcagcagaatgtaatgactgtgctgtagtttgatgtttactttaaaaacgcaggcttttgcctgcgtttttatttttcatattgttcacaaatatggcagatgtgttggcaatggcatgtttactgaattttttatagcgtttttatataaaaaatttttaaaggtatagtatttttatggctgatgtgagaaaataatatatgtttgagtttaaaagtttgaagttgtcagggatcaaaggagcgcagaatattggaaccgataaagagacaaagaaaagagtctgattcagtatatacgattatgttgatacctcataaagggcacgaacccaggagtatccattttcgcctcagcctgctgaaaaaggttggtattgtttgcggtttgctctgtttacttggtgcaggtgttctttttcagtcttcgcatattttgtacaaggcacatcaggatcaacaggaactgttgacctacaggagtgaaaaagctgttcaggaacagaaaataggtcagcttttgcaggaaaatgaagctattgaaaaagaaatggcagagctttccaaactggaagaggcggttcggcgagagcttggtgaaggcgcagtgcagccttcacgttccgggatcgaccgcagtcagtatcttggacaaggcggacctcaggcggctaaagtagaagctgttgatatctatgttgcgcagaacaaggtgctgcaggaaaaggtcaaagatagaaaagctacgttgaatgatttacttggcagattacgcgagttgaaccagcgcaaagcagcgctgccgacactttggccaactaatggagggactattacttcatattttggcggacgcagcgatcctttcggtaatcgttcttatgactggcatccgggagttgatattgccaatgactatggagctccggtttatgccagcgcgtctggcactattgaagaggctggctgggtgtccggttatggccgttatgtaaggattcagcatggatatggttacgaaacagcttatggtcatatgagtaaattggcagttcaggcagggcaaagcgtaagtaaaggtgatgtcatcggttatgttggcagcagcgggtatagtactgggccgcatgtgcattttgaagtgttggtcaacgggcagacaacagatccgttggaattagtaagataataaaaggagaaaactatgtttgggaaaaataaaaaagatgtagtagcagtaagcactttgcctttggaagaatttgagtttttgcttggaagaaattcgatcctgtgcggcaatttgcagactaagggcgcatcgcgtattgatggtcactttaaaggcattattgtttcggagaacgatgttttaatcggacccaacggtgtgatagaagcgaatatttttggggaaaatgttactgtggccgggaatgttacaggtaatatagtggcccgcggcactttagagattttagcctctggagttttaaacggtgatattaaagcgggaagtttagttgttgagccgggggccgttctgcgtggcaacataggcggtatcgaaggtattgaaaaccctgagctgtctcaggctggcgtttctgagtaataatagaattttgtttttacaaatagctgattcgagaagaaatgcttgacactgtaagcggcaattgataatattatagctatctaaatttatatttaaaatgacgatgaccggaagtagtaaaagtacagagctcacagagagggtatgccaggctgcaacgtacctagctttatggctttgaagtcgtccgtgagtcggtagactgaaatcaaagtaggtttatccgttagcgcacgttacgcgtttcaagtgtccggactaaactttgatttaagtctgggaaaataggtggtaccgcggagtttttcgtcctgttcttaatttggaacaggactttatttatttttaggaggcagtaaaatggcagaagaacacaatattcctaaagtttatgatccggcttcggttgagaaaaaatggtataaatattgggaagaacaccgttatttccatgctgaggtagaagcagataaaaagccgttcagtattgttatccccccaccgaatattaccggtcagctgcatatgggacatgcgttagataatactttacaggatattttgattcgctggcataggatgatgggcgataatactttatggatgcccggttatgatcatgcggggttggctactcagatcaaagtagaggaagttttaaaaaaagaagaaggaaagaccaggtatgacttgggccgtgaagaatttattaaacgtgtctgggaatggaaagataaatatggtgaccgtatcatcgagcagttaaaaagcctgggtgtttcctgcgactgggaacgcaaacgtttcactatggatgagggctgttcacaggcagttcgtgaggtttttgtttctttgtacgaaaaagggcttatttatcagggcagccgtattactaactggtgtgttaactgcaatactgctttaagtgatattgaagttgaacatgaagatgatgccggaaatttgtggtatgtccgctatcctgttgttggtgagatggaaacttatcttacgatagccactacacggcctgaaacgatgctgggtgatactgctgttgcagtcaatcctgaagatccgcgctatggtcatctggtcggtaaaatgctgcagctgcccttaaccgaacgtcagatccccattattgctgacagttatgtcgatttagaatttggtacaggtgctgtaaaaattactcctgctcatgatcctaatgattttgaaatgggtatgcgtcataatttagagagtatcgtagttatcggtatggatggctatatgactgaagaggccggcaaatttgcaggccaggaacgttatgaatgtcgtaaaaatctggtacacgaactgcaggaaaaaggttacttagtaaaaatagaagagcataatcatgctgtaggccattgtcagcgctgtcgcagtgtaatagagccgttggtttccaaacagtggtttgtaaaaatggagccgttggtaaaggcggctgtagattgtgttgaagacggcagaacacagtttgttccagaacggtttaccaaaacttataccggctggatggaaaacattcgtgattggtgtatttcccgtcagatttggtgggggcaccggattcctgtgtggtattgtgatgcttgcggcgaagttattgcatcgcgcgttgatattgataaatgtccgaaatgcggtggtgcggtacatcaggatgaagatgctttggacacatggttcagttcagctttatggccgttctctactatgggctggcctgaaaaaacagatttgttaaagcaattttatccaaccagtgttttggtgacaggttatgatatcattttcttctgggttgcgagaatgctgattatgggtatggagtttatgaaggatattccttttgataaagcctttattcatggtttagtgcgtgacagccagggacgtaaaatgagtaaatcactcggcaatggtatcgatccgctggaagttattgaaaagtacggcgctgatactttaaggtttatgctgatcacaggcaatactcctggtaatgatatgcgtttttactgggaacgcgtagaagcaacacgcaattttgctaataagatctggaacgcatcacgttttgctttgatgaatatggaaggttatgatgcagaagccaagcaggctccatatacacttgctgatcaatggatactttcgcggctgcagcatacggttaaagatgttactgaacttttgggccgatttgagctgggtgaagcagggcgtcttatttatgattttatctggagtgaagtttgtgactggtacattgaactggctaagccgcggctttataataaggaagatcctgaggcaagagctacggcacagcatgtcctggcagaggtgctgacatcggctatgaagttactgcatccgtacatgccgtttatcactgaagaaatctatcagtgtctgccgcacgaaagtaacagtatcatgattgcaccgtggcctattgttgatgagagattgtttgatgataaagcagaaactggtatgacggcaattatggaaagcattaaagctattcgtaatatgcgtgcggaagtcaatgctgctccaggcaaaaaggtgccggctattttgttagtgaatgcagaactgcgtgagatcgttgaagccaataaaaattatatcaatttgatgggcagtatcgatgagcttataattgatgatattggggctggcaagcctgaaaatgctatggccgctgttattgccggaatcgaggtatatttgcctctggcaggattgatcgatgtagaaaaagaaacccagcgtcttaataaagaactggaaagtatggataaagaaatcaaacgtgttaccggtaagctaaataatgcaggctttttggcaaaggctccggctgatgtagttgaaaaggaaaaggctaaagcagaggaactgagtggtaaaatggaagctgtgaaagaacgtctgacttatttggcaactttaaagtaacagccgaagcggcgcggatactccgcgccgctttttgtgtttttactgtcgtaattaattggaggttaaaatgaattatcaggagacattggcatatctggatagtttggggaaatttggcattcgtttgggaatggaacgtattgaaggattattgcgggaattagggaatcctgaaagaaaaataaagaccattcatgttacaggaacaaatggcaaaggttctgtcagcagtatgatagcgaatattttgcttgctgctgatttgaaaacaggtaaatttacgtcaccgcatttggtaaagtataatgaaagacttgttatcaacgggcaggatattgatgattatagttttgcagttctgattactattgtgaaaaaggcggcagacagtgtggtggcaaagggcatttgtgagcagccgacacagtttgaggttttgactgctgctgcttttatgtattttgctttggaaaatgtagattatgcagtcattgaagttggaatggggggactttgggattcaactaatgttatcattccggtagtttctgttattactaatgtcagtttggatcacactgatcgctgcggtgcgactgtagaacggattgcgatgcagaaagcaggaattattaaggaaaatgttccggtagtaacggccgcagatggagatgatgcattgggaccgattaaagctgtcgcgatgttcaagcagtccaaattgtatatttatggcagtgctttttggggcacagaagtgaaaagcactatggaggggcagacttttactttgcatgcaggtgagtattatagttctgactacaatattaatttgcctggcgaacatcaaatagcgaatacatctttagctgtagttgctgctaaacttgtctccaaacaggatgacaggatcaatgaattagctttgcatattggtgttgctaacactatttggccaggcagactagagcgtatttatcaaaatcctgacgtgattttggatggagctcataacccggctggagcagatgctttaagaaatgctctcgataaatattatccgcagcagaaaaggacgtttgtttttgggatgatgggtgataaggatatgaaaagcgtcatagggaagcttttcagacctatggatacagtttatacggtaaaggcagacgaaggtggcagagcagcatctgctgaagaattggccagccttattggaaatcaggctgaagctatgaacagtttggcatctgcgtatgaagccgctgtaaccggagctgatgcagacagtgtaatatgtgtatgcggttccctttatttggtagggaattttaagaatatgcttttgaaagcgaaagctgggtgtcattgatgactgctgcggccgtaaaatatgccaatttagaaaaatatgtatattggctgttgttggcgacaatagctgttatcccgctgcagcaggaagtttcttcggcaatggtggcagtcactggcttcagtggctttattgttgcgtttttgcggcgccatgaaaaaaggaagcctgttttaccacgttttgtacagattttattatggttactgttattacttggttattggtcgctgcataattcagctgatgaggtattgtctacctacaattttatttatgttgtcggtcaatacgcgctattggtctggctgattttgcattatgctgttgataaaaaaacatctgcagctagtgacttggatttgcacaagtggcatgagtggcccaggcctctgcaaataataagtgtgtttttgggaatgtcattgtttgtttcggtatatggcattgtacagcattttactggggttgtacctactgaggcctgggttgataatgatgcttttccggaattgaaaacacgtgttatttccactctggtcaatccgaatattttgggcggatatcttgtactggttatttcattgattacaggattgcttagtacaagtaaagaaaaaatgtggcagctggtacttggcagcggaattttaatagccgggctttgtttgctttacacatattcacgtgggaattgggttgctttagctgttggattattgttgttttgcgtatgcttttgccgtcgggctttattgcctctcataggcattggtattttgggaatgtggtttgcccgtggcgcagtatggcataggataatttctatttttgggactgaagatacttctgttgctcttagatttgcctatctggaaagtacgttatttattattaaagaacatccgtggggtgttggctggtatggatatcagtttatttatccggaatatgatttttatcttaacaatcctgacgtcattatgtatcattgtcataatttattactgaatattacggcagaactgggttggcatggattggcagtattcttgcttttatggttctgtattatctggaaagctgctgaattggcccgttttggtaaaagcagatggcttcagggttttggcagaggttatttaatggcgtctgcaggtattttagtgggcggtttgactgaccatgtttattttaatatgcaaatggggcttttgttttggctttttgcaattttaataatggtctgttcagaatttaacagaaaattaacaaaagcataaccataagaggaagatttagatttagctttacaggaaaaacttggcaagttacaataaattcagggaaatatggaatcgtagggggagcggaatgaatttaaatgacgtgcgaaaacttttagacgctaaaatctgcgtaggtgaagaatatcttggtcggcaggttgaaacctgttgcgggtctgaccttatgagcgatgtcttagcctttacaaaatgtaaaactctgctttgcacagggttggctaatatgcaggttataagaacagcggatatgactgatttatgcggtgtgattttggtaagagggaaactgcccggagaagatatgctgaaagaagctgcccaaaacaaactcccgattatgtcgacagaatatacattgtttgaagcctgcgggattctttatagtaatggcttgagaggctgttccagaaaggcggaagagcaatgagtgattctaaatcagtaaaaatgcattatgatgttgccggtgacgattttgacagggctggcgaagcttctgccggattaaagcggttgctgcagaaaattggcgttccggcagatataatcagacgtattgctattggaacctatgaagctgagatgaatgtaatcattcatgccggcggtggtcaggttgatgctgaaatttttcctgaagagacggttgtatatattgctgatcagggaccgggaatccctgacattaaactggcaatgcaggaaggctggtctacagcaccggatcatgtaagacaaatggggtttggcgccggtatgggtctgccgaatatgatgaagtgttcagatgattttgatatccaatcgacagttggctcaggtactaatataaagatgaaattcaaacatatcagtgaagacttataagaggggtgatacgatggctggaggatattttcattccatacgccttttacggtctcagtgtcaaggctgtgtaacgtgcgttaaagcttgtccgaccgaggccatccgtgtccgcaatggtaaagcagaacttatagaagcacgttgtattgactgcggcgagtgtttacggcgttgtggctatcatgctatcgtggcggaaacggataaactggaagaaactgaacaatttaaatataatatcgctttgcctcctccttctttatatgcgcagtttccgcctgaaacaagtgcggcggctatttgggaagggttacatagactgggatttgatgaaatttttgatgtagcagtagcttctgaatatatttctttggaaatagctgcttacctgaaaaattataacggtggcagaaaacctttgatttcctgcacttgtccggcggttttaaggctgattcaggtcaaatttccggaactcatcaaacaggtagtgcctgtacttcctccaacagaagctgcggctatttatgtaaaaaatgaagttatgcagcgtaccggcttaaagtctgaagaaataggtgtctggtttattgcaccttgcccttctaaaaatgctaatatcaggcagtctgttgatgtccggcatacacaaatcaacggcagtttaagtatttcagagatttatggaaaaatattaaaaatcatgggcggagagattcagccggataaaaaggtgactgctggatcttcttatggtatgagttggggcagttatggtggggaactggaagctgcaggaattgaaaacggtctggctgtacacggtattaatgacgtgtacgacgtgctggagcaaatttccttgaataagatgcgcgatgtcgattatgtagagtgttctgcctgcagtggcggctgcattggcgggccgctgactgctgagaataaatttgttgctgagaaaaatttgaagctaaggctgagtattatgaggcagaatgaacctgatgatcgtctggctaccatggcccagagtatgatatgtgaggattttcccaaatcggcttcctatgtaaaaaaattaatcccgcggccgatgatgcaattagatgacgatattttagaggctatgaaaaagtttgaaaagatggaggaggtcctcagatctttgccggggcttgattgtggagcatgcggagcaccaagctgtcaatgcctggcggaagacatcgttcaggggaaagccaatgaaattgactgtatttttaaattaaggagcagtgtaaaacgcctggcacatggtatgcttgaactggcaaagcagatacctatagccagcgagccggaagaagaactgcgggaggatggtgaaagcgatgcaagtacgtgaagttattgaaactttagggttaaagctgatgacacatgaggttcctgtggatgtggatgttattggtggctatgcctctgatcttttgagtaatgttatggggcaggcggctcccggtatgatttgggtgacaatgcaggggcatcagaatatagcggcagtagcttctttgattggtctgtcggcagttattgtggcaggcgatgcgcctatagaagaggataccctgaaaaaagcagaacagaacgacgttttgatattggctacatctttacctgcttatgatgtcattggaaagctttatgaacttggtatcaggaatgtaaaatgaaaaccgttatcggagattttcatgtccataccttgctttccccgtgtgctgaaatcgaaatgacgccgcatcatatagtgatgcaggctgctgaatatggtatacagctgttggcggttactgaccataatgcttcggctaatgctgtggcggcgattcaggctggtgaacgttatggtattaaggtgttcccgggaatggaagttgaatgcagggaagaagcgcatatagtggttttgtttgacaatttgaaacagctgcggcggtggcagaaaatagtcgatttttcaatgcgtggcctcaaaaacattcctgaacggtttggagcgcaatttgtcgttgatgatgatgataattttgttgcagaagaggaaagaatgcttttaggaccattgcagctatctgcgcaggaggttgtacgaaaagtaaacgaaattggcgggctgtgtttagctgcccatatagatagaccggcatatagtttgcttgtacagctgggatttattcctaatgatatgggcttgcaaggagtagagataagccgtaacagtttagcagagttggagcagctgaaattgaaaagattatctgggaatttaccttatgtcactaattctgatgctcacagaatgcttgaatttttggaaggccccaagaataaaattaccattgaagaagcgactatttcagaattaaaacttgcacttgcaggaaaagacgggcgtagttggtttccgggttattttattaatgatcttgaatattagttacactaaaagtataaagtatacactattcatgcttgaaaatcataaatagtgttgattatatacgttttttttgctatagtagtattcgtacattaaagtttagggaaatggagagtgtactatgaatatggttgacaaaagatgcagttgctgcggcggagaaaatcctgaaaaggtgcagattgatgctattctggctagatatcagggtaaaaaaggatctttgatcccgattttgcaggaagtacaggctctgtacaattatttgcccaaagatgctttagagtacattgctgccagtacaggaacacccattgctcaaatttatggtgttgttactttttattcccagtttcaccttaatccgcgcgggcgtaatattatccgcgtttgtcagggaactgcctgccatgtacgtggtggtaaagtaattttgcagactatcgaaaaagagcttggaattaaggccggacatactacggaagatctgcgttttacccttgagactgttgcctgtatcggcgcttgtggtttagcaccggttatgcaggttaatgaagatactcatggtcgtttgactccggacaaactgtcggctattttagctaaatatcaataaaaatcatgcgtgaattgtctttgcatatccttgatttagcgcagaattccatagaggcaggagctcataatgtaataatagaaataaatgagaatgaaaatggattttttgtttttcgtatcagtgatgatggacatggcatgagtgaggaaatggtgcagaaaattcgcgatccctttgtgactacgcggactacacgtaaagtaggtatgggaataccttttatggacatggtcactaaacaatgcggaggacatttgttaatacaatctcgtaagggtaaaggtactgtcgtagaagctgcttttgcaaaggataatattgatcgcccgcctttgggtgatattgtatcaagtattaaagtgctgctggtaggcacgccgtatctggagctgaagtttatctataagataggtacatcgggatttgatattgatacgagggttatcagatctctccttggtgatgaagcagattttaccagacctgaagtttatacatggcttgaagaatatttaaagcaggaaatatcgcagttgaggtgtgagcaggaggtataaaatgaaaacgttggaagatttgaaggccctacgtgaaaaattaaaggcagacatgaaagttcgtcagaatgacggcactaaaataatcataggtatgggtacatgtggtattgctgcaggcgcgcgcgaagtgatgtctgccgttttgaatgagcttgcagtgcgtaaacttaatgatgttcaggtacagcagacgggctgtatcggtatgtgtgagaaagaagtcctggtagatattgtccgtcctggagaacctcgtattacttatggtaaagtaaaacctgaggacgtgaaaaagatcattgcagagcatgttgtcaatggccgtattgttgaagaaatggttgtaggcaaaattatgcaagactgatttgataaaatttggagggaaatcatatgcagcacattagagcacacgtcctgatttgcggaggaacaggatgtaaatctgccggttcaaaggaagtacagcttgcttttagtcgggctattgaagctaaaggcctgagcgacgaggttatggtagtagaaacaggctgccatggtttctgtgaacatggtccgctggttatagtgtatcctgaaggtactttttattgccaggtaaaagctgaggatgtagaagaaatagttgaaagccatttatttaagggccgtattgttgaacggttgctttatcatgaaccgcttactcatgaaagtatacctaattattcggaaataaatttttataagaaacagcatcggttagttttagaaaattgcggcgctatcaatcctgaacaaattgaagaatatattgctgtcggaggttatgaagctttagctaaagctgtaactaccatgagtcctgaagatgttattgaagaaataaaaaaatcaggtctgcgtggacgtggcggcggcggatttcctacaggaatgaaatggcagtttgctaaagcgtctgtaagtgataaaaaatatgttatctgtaatgcagatgaaggtgatcctggtgcatttatggacaggagcgtcttagaaggcgatccgcataagatattagaaggtatggctgtctgtggttatgctataggtgcagatgaaggctatatttatgtacgtgcggaatatccgctggccattaaacgtctgcgcatagctattgaacaggctgaagctatggggttgttaggtgaaaatatttttggttccgggttcagcttcaaactgcatatcaaggaaggtgccggtgcgttcgtttgcggtgaggaaactgcattgatggcatcaatagaaggtaaacgcggtatgccgcggccaagaccgccatttccagcagttgccggactttggggaaagccgacaaatatcaataatgttgaaacttttggtaatgtagctgcaattattactaatggcgctgactggtatgctggttttggtactgaaaagtcaaaaggaactaaagtatttgcgctgactggtaaaataaataacacaggtctggccgaagttcctatgggtattactatgcgcgaaattatttatgatatcggcggtggtattaacggaggtaagaaatttaaagcagttcaaataggcggtccatctggtggctgcctgcctgaatcaatgcttgatctgtctatagattatgattcgttaacagcggcaggtgctatgatgggttctggcggattggtagttatggatgaagatacctgcatggtagatgttgcaaaatttttcctgaattttactcaatctgaatcctgtggcaaatgtactccctgtcgtgaggggactaagcgtatgctggaagtcctgacacgtattactgaagggcaggggagagaaggcgatatagagctgttagaagaactggccagaaatattaaagagactgctttatgtggattgggacaaactgctcctaatcctgtattgagtactttaaaatatttccgtcatgaatatgaagctcatatcaaagaaaaacgctgtcctgccggtgcctgtgaaaagcttgccaattatgaaattactgatgcatgcaaaggctgtgggttatgtgcacgccagtgcccggttaatgccatttccggagaagtgaaaaagaaacatgttatcgatgtaactaaatgtataaaatgcggtgcctgcatggcggcttgtccgtttaaggccattactaagggttaagggaggattatatagatatggaaatgattaccttaacgatcaatgggcagactgtacaggcccctaaaaatgctactattcttgaagccgcgcgttctgccggcattcatattcctacgttgtgctatcattctgaacttgctccggaaggggcctgcagattgtgtgtcgtagaagctaccggagcgcgtacgcttgtagcctcctgtgtctatcctgttgcagaaggtatggtagtgaaaacgaatacggataaagtccgcgcagcaagacgaatggtcgtagaattgctgttggccaatcatcccaaggactgccttgcgtgccaaaaaagcggtgactgtgaattgcagaatatagctgctgatttgggattgcgcaagatcagatttgaaggcggagcccgtaaagcacatactattgacgccagtaacccctgcttagtgcgcgatcaggaaaaatgtattttgtgcggacgttgtatacgtgtttgtcgtgatgtgcagggaatgagcgtctacagctttgctgagcgcggctttgacacaattgtttctactgcttttgaacaggatcttggaaaagtagaatgttcttactgtggacaatgtgcgagtgtttgtcctactggagctatagtggaaaaagatgatacggaaaaagtatggtcggctatcaatgatcctgataagattgttatagttcaaacagctccggcagtacgcgtggctttgggtgaagaattgggtatggaaccaggttctatcgttacagggaaaatggttgcagcattgcgcaatctagggttcgataagatattcgatactaatttttcggctgatttgacgattatggaagaagggcatgagttcctccatcgtttgactaacggaggtgtattgccgatgataacctcctgcagtcctggctgggtaaatatgatagagctcaaatatcctgatttgttaccacatctttcttctgcgaaatcaccccagcaaatgtttggcgctattgctaaaacctattatgctgaaaaagctggtattgatccggcaaaaatagtcagcgtttcggtgatgccgtgtactgctaagaaggcggaagcagcacgtccggagatgaatgcttccggatatcgtgatgtagatgttgttattacgaccagagaacttggccgtatgatacgggaagcaggactggattttaaacatttgcctgaagacagctatgattctccgctgggtacaggtacaggtgctgctgttatttttggtactaccggtggcgtaatggaagctgctctgcgtactgtagctgaggttttaacaggtgaaaatttgcagactgttgattacaatgatgtgcgggggatggaacagacccgcgaggcggaactgactattgcaggaaatactgtaaaaatagcagttgttcatactcttgcttctgcacgcaagatattagagcgtatcagagccggtgaggcagattatcagtttattgaagttatggcttgccctggtggctgtattggcggcggcggtcaaccgattcccgttaatgcagaaattagaagagcccgtagagaagggttgtttgattgtgatagtgccaatgagttacgaaaatcacatgaaaatccggaaattaaagagctttatgatacttggttaggtaaacctctcggagaaaaagctcatagtctactgcatacgcactatcaccaacagacacgttgaaagtactaatttgataccacaaaacacctcttgagtagttttgctcaaggggtgtttctttgtaaattgtaaagaaaatgcttgccatgttacagttttactgatatcatatgtagtatagcgttttaaagaaaaaatgtttaaaaactaaaaaaagtagtgattttgcctaaaatttactgcttctttatgtgttataatagagctggacacaaaaagttcaaaaagaaatcacaattaaagttttttttgaaggattttttgttggaatgtcgaagtaaattaagcagaactaaatatcttggatatgttttagcggttggtagacagaagaacgaagaagttcaactgaaagctttacctgctgacagtttgcgattcagagcgtagccactttggatagaagtaagctggcacttggctatgttttgttttagtaaatcaaaacttctaagtgctccttttttatgggtaaaatcttattcggcaaataatactttatgcttttatagttggtatttagccgactaagtgtatttttactagtgaagttaatagacttcgctggcattagccacaatttgttttatttacaaggaggaaggtaaacatgatcgacattaaagatcgcgtatgcgaagcagtagccggcaaaattatgagcgccgaagcagctgcagaatttgtaaaggatggcgacaacgtaggtaccagtggttttactccgtctggttatcctaaagctgtgcctcttgctctggcagaaaaaggcaaaaaaactcctttccaaatcaacgtttggaccggtgcttctgtaggtcctgaaatggataccgcaatgactcaagctggtatcgttgctcgtcgtatgccttaccaaactaacaatgatctgcgtaaagctatcaacaacggttccgtaaaatatactgacctgcatttgagccatgttgctcaaatgactcgctatggtttcatggaaaaccgcagatgtgtagacgtcgctatcgtcgaagcctgcaaaatcattgaccttggcaatggccaggttggtttgattcctacaacttccatgggcaattcttcttcttatgttcaatgtgctgaaaaagttattgttgaagtaaatacttctcaaccagtagaattggaaggcatgcatgactcctatgtgcctttggatcctccgaatcgtaaagctattcctgttgaaaaaccggaagatgtaatcggcactccttatattccttgcgatttggacagactcgttgcagtagttccctgcgatattactgataaagttcgtccgttgggcgaaatcgacgaagatgctcaaaaaatgggtaaaaacttggttgaattctttaaatctgaagttgctgcaggtcgtttgcccgctaatctgttgccgctgcagtctggtgtaggttctgttgctaacgcagttatcaacggtttggttaactctgattttgaagatttgactgtatataccgaagttattcaagacggtatgttcgacttgatcgatgctggcaaactccgcgtttgctctggtaccgctttgagcccatcccctgattgcctcaaaaaattctatgacaatgtagaaaaatataaaaaatatatcattctgcgtccgcaagaagttgcaaacagcccggaagttgctcgtcgtatcggtgtcattgcaatgaacactgctattgaggttgacatctatggtaatgttaactccactcatatttgcggtactaagattatgaatggtatcggcggttccggcgactatgctcgtaatggttatctgaccgtattcttcactacatctcttgcaaaaggcggagctatcagctctgtagttcctttctgctctcatgttgaccatactgaacatgacgttgatgttatcgtttccgaacgcggcgtagctgaccttcgtggtttgtctccaaaagaacgcgctttggttatcattgataaagttgctaatccgaaatatcaaccgctgcttcttgattacttcaagagagcttgcgaagcttgtggtaatagccaaactccgcatattatggatgaagctttctccttccatgatcgtttcgtaaaaaccggcaccatggaaaaataattcttagtcaagacgattgactgagattgttgtctgaaatattttgccggcagatagctagttctgccggcaaactttacagcttatctgtaaataaattctgttgacgaggccttcgggctttgccatatacaccgtctatgacggacactctcaccataattcggtcagtccaaaccggattgtgcaaaaacaatattcttaaggaggatttgagaatggcaaatgaaactctgaaagctggatttgacaagtacatggctggcgtagaagctaaacttgctaaaaatcccgaacgtgcaaaccttgagcccaacaggctctacacccctctcgacatcgaaggcttcgactatgagaaggatcttggcttccctggtgaatatccttacactcgtggtgtacaacctactatgtatcgtggccgtttctggaccatgcgtatgtatgctggtttctccactgcggaagaatccaacaaacgttatcgttacctcttggctaacggtggcagcggcttgtcctgcgcattcgaccttccgacccaaatcggttatgattctaccgatccgatggctgaaggcgaagttggtaaagttggcgtagctatcgactccttggctgatatggaaatcttatttgaccaaatttctttggatcaagtttccacttccatgaccatcaacgctcctgcatccgtacttctttgcatgtacatcgcagttgctgagaaacaaggcgtttccgctgacaaactgcgcggtactattcaaaatgatattttgaaagagtatgctgctcgcggaacttacattttcccgccgaaaccctccatgcgtttgatcaccaatattttcgaatattgctccaaaaacgtaccgctgtggaataccatctccatttccggttatcatatccgtgaagctggttccaccgcttctcaagaaatcgctttcaccatcgctgacggtatcgcttatgttgaagcagctatcaaagctggtatgaacgttgacgattttgctggtcgtctgtccttcttctggaacgctcataacaacgtactcgaagaagttgctaaattccgcgcttcccgtcgtgtatgggctaaagttatgaaagaaagattcggcgctcaaaaaccgaaatctcaaatgctccgcgtacatactcaaactgcaggttccatgctgactgcacaacaaccgaacaacaatatcgttcgtgttgctctgcaaactgctgctgctgtaatgggtggtactcaatctttgcacactaactccaaagacgaagctttggcattgccgaccactgagtctgtaaccatcgctctccgtactcaacaaatcgttgcttacgaatccggcttggctgacaccgttgatccgttgggtggttcctactatgttgaagctttgactaacaaaatcgaagcagaagcttgggaatatatcaaaaagattgacgaaattggcggcgctcctgaagctatcgctaaaggttatatccaaaaagaaatccaagactccgcttacaaatggcaaatggacattgaaaaaggcgaccgtattattgttggcgtaaacaaattccaacaagaagaagaaccgccgaaaaacttgctgcgtgttgacggctccgttggcaaattgcaagctgataagattgctgcccttaaagctcgtcgtgacaatgctaaagttgaagaaactttagctgctctggaaaaaggctgtgctgacgaatccgttaacctgatgcctttgattcttgacgctgtacgtgcttatgcaactgaaggcgaaatctgcggcgtaatgagaaaagtattcggcgaatatcaatctcatactgctctgtaatttagagccaacaataatagggaggtaagaaataatgtctaatattagagttttagtagcaaaaccgggtctggacggccatgaccgcggtgctaaagttgtagctcgtgcattgcgcgacgctggttttgaagttatttacaccggtattcgtctgactccggaacaaatcgctgaagctgctctgcaagacgacgttaaagttgttgctttgagcctgctttccggcgcacacaacacccttttcccgaaagtagttgaactgctgaaagaaaaaggtttgactgatgttctggttatcggcggcggcgttattcctgacgctgacattcctggtttgaaagctgctggcattgccgaagtattcactcctggcactccgactggcaacattgttgaattcatcaacgctaacgtaaaataattaaggttctcaaaaattttgcaggccgggcttgtcccggcttgcataatacaatttttattggacctcaacaaggcggtgtgatcattgaatattgttgaaggcgtattaaaccattctcgtttagcattagcgaaagctattactgccgtagagaacgagtatgataacgctgttgaaataatgacagccatttatccccacaccggtaatgcttatgtcatcggaataaccggacctccgggcgctggcaaaagtactttgaccgacaagcttgctaaagaatatcgtaaacgcggtaaaacagttggtattatcgcaattgatcctacaagtcctttctccggcggtgcaattttaggcgaccgtatcagaatgttggaccttactgccgatgaaggcatttttgttcgttccatggctactcgcggtagtttgggtggattatcccaaaaagcgggcgatgctgttaaattgatggatgcatatggttttgatgttattattgttgaaactgttggcgttggtcaatctgaagtagatattgttaaaactgctgatactacaatggttgttgttattcctggtatgggcgatgacattcaggctattaaagcaggtatacttgagatcggtgaccttttcacgatcaataaagctgaccgtgaaggtacggacaagctgaacattgagattgaaatgatgttggaattaaatcccgaacatgttggctggcgtcctccgatcaatcggaccattgccagcaagggtgaaggtatagaagctgttgttgactctattgaagagcacaaagcatatttgattgaatctgatcaattgagcaaaatacgcaaagctcgtattaaaaacgaggttactgctatgcttaatgacagggtcaaccgttatatcgacaagaatgttgtagctacttccgaatttgatattttagttgaaaaacttcaaattcgtgaaattgagccgtattctgttgtcgctgacattgttggtaaagttttaagataaaacaaccaaaattacttttaggaggaatttgaaatgtttaaaacaatttgtgttgaccatgtaggtattgcttgcaaagacttggatctttccaagaaattctacactgaagttcttggcttgagctgcactggtgaagaagctgttcctgagcaaggtgtaaaaaccgtatttattccctgtggcgaaactttgcttgagctccttgttgatatcactgaaaatggcgatggccctatcggcaaatacatcgctaaaaatggacaaggtatccaacatatcgctgttcgcgttgatgatgttcaagcagctattgataccactattgaaaaaggtgctgctatgatcgacaaagctcctcgtggcggtgctggcggaatggatatcgctttcgttcatccgaaatccgtaggtattttgcttgagtattgcgctccggcaaaaaaataattccgtaaaatacggaattacaaaaatcttttgaagattttattttaagttgttacatactacacggatgcggaccaaagagtctgcatccgcgtagatgtatataaaataaggttctcccaataatgatggaggtgtaagatttgtctactcaagcaaaaattgagaaaatgctcaaaaagtccgaagtaattctggctgcaggcggcgaaaaa

SEQ ID NO: 10020 - DNA, 469 bp, Unknown
  gut microbiota DNA sequence
tcagctcctttaggagcattatacaggaggcaaaaatgaactgggaatcttttaaatttgcggctatcggagctgctcaaactttagcacaaggctggtcgtataaagccgtaatagcggcaatgttggctatgattttgcataagcacgctatattgttttatagctttgcttttttagtatttattgattgttttacaaaatgggtatcgatatcctatctgcatctaaaagatagtggtattgaaaatccgactattctagaatctattaaaggaataacaaaggccagagctgccaaaaagataaaaagtgaagttatgaaacaccgttttcttgggaaaatcggtgtttatttaatttgtgcattatcttcagctgtcgttgatgtagttatgagagttttagataaacctacttgggcagttatgacggttattggatatcttgttgtaactgagctgcttag

SEQ ID NO: 10021 - DNA, 1306 bp, Unknown
  gut microbiota DNA sequence
atccggcagttcaataatagtacctgctttataaacaaccccattgcggcgcaaggaaaatttctttatcaatacttgttgcatttacaaacctccttatttaactttcaaggtcgcccaatcatccaaaaactccggacatactacacagcggctggacatagccagagtagtcgtatcgctttcggtattaccggtaactttcggaatgtacgcgccttcataagtacgaaattgtttgtcgtcttcaagctgcgttactgcgccaaagagacgtttaccacgaccgggcacaccaataatcatatgatcatcagggatatactgggcaaggttgccatcgtcaccctcgtacacaccatcataagcgtaaatttccagattaagggattcaatataaccaactcgcagcaattccggtcttaccagcttcggctgaatgctcatcagtgctaaattttcacggctgggcaccaacaaatatttataaagctgttcgttattgagcaggtaggatactacattctgtgaacacagggccactgtagggatcatacccgcgttgcggcggatcttctgagatgcgtcacccatgacatcataaattttggcgcttgcattatcccatgtgtccgatccggacagagttgttttattgtcaaattcagaaaatgtaatcgtatcaaccacaacagtttcaccatcgtcggcatagcctttgcattcgtattcaccgttgatcaaaagctgtgcagccatccactcctgacgacggacgcaggcatcaatcaattctgccatgtcataagcgcgcaattcttgcgcacgttctgccggagtgcgagtgctgtagatatcttccccaaaaccacgacgctcaatatcagacgcttcgatagtccgtttagggcgcatcagcggagctttataagacctgatctgcgaaccgttacggctcatatttacacccttgctgcccggtaccacaaacggtgccattctgcgaccgcctttgcggtattccatatctacggtattcgtcaaaaaggttttaaccgcagggaaaaaggtatcaatcaaagtcgtagtcggcggattggtgcgctcaattgcctgcagcaaagttctggtatcatcaatattaataggcattatcttcatcctccttatttcacgctggtcaaatagatattgaccgcacgcagttcttcttcatgagcagtagcgttgtcagcggtttgtgccacaataagtttttcgcgattgaattggccgctgatataaactgtgacaacaacgtcagctc

SEQ ID NO: 10022 - DNA, 4463 bp, Unknown
  gut microbiota DNA sequence
ggttgcttgcttccttaccgtacatgagcatttacacatcaattgtcactataaaagcagcaggcagtgtttgtgcactgcctgctgcttttgttaaaaggttctggtataggttattttccagttatatggtaaatcaaggttgccatatctgttggaatagttatccttgtcaagcaggttattcatcgtcagggttatgttatcattcttagtcaaatcatacgaggtattccaggtcagtcggcttcttgacggtacgtcatgcccgccgtaatattcacggtcacccaaatatttataggtaagaccgcttgtcagcttactgatagaataaaacaccgaagccgatgcatctatcctgccgtcatcctgcacccattttgggttggcggctgagggatcttttacctcggggttgccatagccaatccctaatgaatagcgccatttatcatttacattatgggtaaattctgcttcgataccagtgtttctaaagtcgcctttgttgatggcgtactgttcaccggtaccggggtctttatcactccagcctattttattttcaaaatccatatggaagactgcaagcttgatacttttgttgtcgtagatttttttgatacctgtttcataggtccagccttcttcaggctttaatgtaccggcagcggcttttttgccatagtacgaatctactgttggcatttggaaggctttgccgatgtttatataccacgaggtagtatcgtttattttatacagggtttggaactgcgggttcagtatattttcgctttttaccgggtcgtcgattatttcaccgcgtaaccccagggtagcgctgaatttatcgctgaacacgttgttatacgaaaggtagatggcattactggttctatgagctttattggctttggtgaccagattttcatagttttcacgccttaggctatagccggttatgagggtatttttacccagattccaagtcttttgcacgtctccgatatagcttgataaatcggctgatgagcttacaggacccggtgttgctgcggcaaagtcgtagccttcagtacggcggtagttataacctaccagggctttgatgccgttatatttgccattgtaggtcagtcctgtagtaatacgtttatcgtcataacgataattatattttttatagactgagcctacttttttggcatcattattactgccacgagtaatattgccgtcctgatagataaaagtaaaaccgatctcatctgtcagcgcggcggagatccctgctctgtttttctgccctttgcccacccaccagtcggtagacgaaccttccggataagcattgctgtgggtaagcttgttagaatattctttagatgcggttacgataagtttttcgcccgcataggtaacgccgtaatctttataatagttgcctacagtgccttttactttgacctgagttttgcctcctggacgtttggtgatgacgtttactacgccgcccatagcttcacttccgtacagggttccggcagcacctttaatgatttctatttgctgtaccatatctatgggtataccgtctaaggaattatagtttttcaggttcatggggataccgtctaccataaccagggtaccacggtcgtagccgcgaataacggtacggcccgaactgaaaccaaaatcttgaccggcatcgccgtaaccggtgcttgttaatcctacttgatgctctattgcatcaaaaacgttcttatagccggcttctttaatattttgttcggtaatgatattagtagttgccggtgtgtccaggtctctggtttctgttctttgggcagttacgatcatcggatcgagcgtaaaagcctgatttggatcttcagcatatgctgtagtgcccctccagatgacagtggtagttagaagcgccactaccagtgcacttttgctcaaattcttttttagcatactcaacttcctttcactacatttttattattgaaataaaggcgtttcctgtactcattctttatgaccgcacattatttacctttacttgcaatcccccaaaaataaaaaataccttctgcgctaaggcaaaaggtattaaacagcttaattaaaaataaaagaagccaacaacattacctaactgtctcacgcagtagtaaagtaattatcaggcagttcttctgactcaagttcatcattcatccaagccttcccagacaaataccagtggcatattttggacgaactcacttttacagcgacgggatcgtgcgggctttgcacccggcttctctattaagacctacgtcacctgataatatcaatatgcatttattttgcaagtatactacaaataattctacaatgcaatcttttatttatatttattatttaattttctttgttggcaattcttttattgcataaaaataacccgcacaagatatcttgcgcgggttatgaaagtattccatattttattttaaaacttcagcgattacatccccagtcaaatccttcccgccatataacattgcgctgctgtcaacaacgctgttgataccggcacgtttggctacagttgcaatggctttctgaacttttttctgaatcggtcccatcagatcttgttcacgttttgccacctgctgcgaaagtttttcacccaaggcctgcttgccgctgtcatctaaagaagctgctttactttcaaattcctgctgcgctttttggcgttccagatcaacggcgctcatggtagttttaatatcaggatagctttggaatacttgctgaacgtttacataccctacaacattaccagcttctgctgccgatactgcaccgcagatccccaaagccatgacaaccgtcaaaataaaggtcataatttgttttttcatcgtttacaacactccttaatttttgtttataataaatttaatactaccgtttttcatcccgacaagctgtaataaatctagccgcagcaatatcggttaacccataatcggcaaatttcagcaccagatctcgtaccagatgtttttgttcttccatactgtgtgcttttatgtatctgatgatccgattgtttcttttcttatactcaaggtaaagttctattcctttatcaaaaagctcattaccggttataaaccgctgccgtttgagtaaaactctgcaatagcatttttcgtaaatacctaaaagtaccggccatgtatcaagaatggcaacactcccatccgcttccagaagatgaaattttatccggcctgaatagcctgactgttccaaaaacgccagtaaagttattatatttactgtacagaacatatcatagtcgaaatataaatataaaacaggataatccttcaagcggttctgcataaaacttcctggagacttttgcagatagtcttctaactcaacaccataagccgctgccctcaatcgataaaattcatctgtaaatatttcgatatggacttctccttcgcacatagcttcgttgaaaggaagaatttcttcctgaggaagcagctctcgtagtgcatttgcagtcatttctccgcttgtaatatgcaggatattttcagtacaaactggtttattgttctgcatctgtatcatttacccgcaccttaaatattttattatattgcatcattttacgcacgtagtctattataaactgtttacagccgccagtcaataatcattgctatttatactattatgttatttaattgacatttcacctgattggcagtattttataattagaagtatcataattaaggttgcctattttaaattagaggaggcttatctatgtctgattttgtccatgattctatttttaaagatgcatttttgagggcatctcaccattatatagatgctctagaactgccggacatccatacgaggcgctcttctgatacgcaggagctcgctgattcggctgcttgcataaacaatagaatgctgcagagttttgctgctgatttaaccgaacagcaaagaagtgatgttttgaattcaactttattggcgcagctggcggcagacaaagcttatcctaaagatgcagctggccgttatgacgttaaaggctggtacagtaaattttcagaagtactgcttaatttaggctgggtaagccaaaacactgctttctggcaatataaaatacacggggaaagttttacagctgacaaggctatcttggaaatcatcaacggcttactgcaaaacaacgccctgcttttagcgcaagctactattaacgctttaaaaaatttgcctgaaaatgattctaaacttactctgtttaaattcaatacctgttctgatcaaatgggtaatatcagccttggagtctgtactcaaaaaaacggcttgattgaatataattttgc

SEQ ID NO: 10023 - DNA, 223 bp, Unknown
  gut microbiota DNA sequence
tcggtattactaaaggtaaatggggcactttgatcgataccttgatcaaatttaaagaagactatgacaacaacactgctttggaagaagtattacctgatgttgttaaagcagctccgcagcgttatacaggtatgggcctgcgcgacttgtgcgaggaaatgtttgcagcaatgaaagagctcaaaacgacagaatttatgtccgaaggtttcgctgtatt

SEQ ID NO: 10024 - DNA, 1329 bp, Unknown
  gut microbiota DNA sequence
tttgatgatttagtatattcgattagatatgaattagatgcaatgcaggaaaatctgaataacacagatgatttggacggaagcgaagctaaagtaaatgttttgctgaaatggattaaaaacagtgcaaatacgattgaaaataaaattgaagattggggcgtgtaaatatgaaactttatgaaattaatcaacaattagagcggttgctagaacttgatactgaaagaatggtagatactgaaacaggtgaaatattgactgccgaggatatagatcagttgaagattgatagagtagaaaagattgaaggctgccttgtggtttacaaaaacaaaatggcagaaacagcagccattgaagaagaaattaaaaggctgacggaaagaaaagctaccttaaaaaataaggcggagtggttaaaaggttatgtagcctacgctttaaagggtgaaaaatttgagactcccaaaggcgcagtcagctacaaaaaaagtgagacagtggaaattaccgataaggagaagctgccgacagaatttttgagagttgttacatcaacatcacctgacaaagcggctatcaaggctgcgatcaaagctggcagtaagattgatggggcacaggtagtagagcatcagaatgtgcagataaagtgaggtggaggacatgattgatatatatacaaacttagcaaccccgcctacagatgctttgaaaacaatccaatcaggtaatctaaggggaaaaagtgatataaacccacaatggaagattgaagctattactgctcagtttggattgtgtggtattggatggaaatttgaaattttagataagactatatatccattagaggataagcaaatattactgtatatgacggtagctttgtttatcaaaaacggtgatagttggagcgagcctatcattggttgtggaggcgacttcattgttcaaaaatataaaactggacttacagcaaatgatgaagcctttaagatgtgtcttactgacgcacttggtaacgctatgaaaaacattggcgttgcagcagatgtgtacagggggttttgcgatggtaaatatagcgttcgagaagaacggcaatctgttgaaccatcaaccactaaaacatcaaataaagcagaactgcctacacctataaaccaaactaagcctgcgtttcctgacgaaaatactggaccacaatttttgatgtgtcaagaatgtacagttgaaatcagccaaagagttcacgattacagcgtgcagaaatttggcaggcctctttgtatgaactgtcaaaaggcagtagcaaaatgaagt

SEQ ID NO: 10025 - DNA, 18839 bp, Unknown
  gut microbiota DNA sequence
gtgctatgagcgcaagctaaattttgcacaaatggaggaaaactgtgattattttcgttgtcaactgcggtagctcctcaattaaatatcagcttcttaatatgaacggcgagcaggtgctggccaaaggtctgatcgaacggatcggtatggaaggttctgttctcaaacacacgcctacgggcaaatacacagtagatatcagcgccgagatacctgaccattccgttggcatccagatggcgctggatgctctgactaatgaagaatatggcgttattgacagtatggatgaaatcgatgctgttggccaccgtgtagtgcacggcggcgaacgctttaccgattcggtactgatcagcgatgatgttttgaacgggatcgaggcctgcgctgagattgcgccgctgcacaatccgccgaacctgtatggtatcaaagcctgtatgcgcctgatgtataatactcctcaggtagctgtttttgatacggcgttccatcagactatgccaaaggttgcctatttgtatggcctgccttacgaaatgtatgtcaaatacggactgcgccgctatggcttccatggaacttcccataaatatgtagcccagcaggcggccgaaatgatgggcgagcatatgagcgacctgcgttttattacctgtcatttgggtaatggcgccagcattgctgcgatcaaatatggtaaatccattgataccagcatggggtacacaccgttggaaggacttgtcatgggtacacgttccggcgagatcgaccctgctatcattccttttttgatggaaaaagaaaatatgaatgcacagcagatcgacgattatctgaatcgtcgcagcggtattttaggtatctcagggctatccagtgatttccgtgatctggaaagtgccgctaaccgcggtgatgaacgcagtcagcttgctatagacatttttgcttataaggtcaaaaaatatattggcggttatgttgctgccatgggtggcgttgatgccatcatctttacagcaggtctgggtgaaaactctccgtttatgcgtgataagatctgtaatggtctggaatatcttggtacgcgtattgatccggaacttaacaagctgcgcggtaaacagatggaaatcagtatcaaaagggcgcgggtcaagatctttgtgattcccacgaatgaagaactggtcattgcccgtgatacactgaatatctgccgccgcatcattaaattataataaaagttacgcttttttcttgacaaagatttagagcatagctataattgatacgattggtgaaatatgataaagataaatgtcgcagaaatcaagaaaagactggtcggtaaaaaagacttttcctatgaactgaaaccagcagaattgaacattaccgaagcggatcttccgctgacaggaacggtgaccgtaaaaggcacgatatccaatgcaggtgatgttttgcttttggaagctatggttgaagccatggtcaacaggacctgcggacgctgccttaaagcctttacaggtaagagtacggctgaagtattggaaaaattctatccggcaagtgctgagaatatcgaaaatgatgcttttatttatgaatctgatatcgtcgatctgacggaaccgattcgtgaaagtctcctgctggcagagccccttcaagctttgtgcaggatcgattgtcagggcttgtgtccggtctgcggcgccgatagaaataaaggcgactgcggctgtgatactaccacagtcgatcccaggttggcggcattaaagcaattcatcaaaaattaaattcacattcattagcttgaggaggtgtatcaaagatggcagtaccaaagagaaaaatgtccaaagctcgccgcgattcccgtcgtgcgaactggaaacttacagttcctggcttagtcgaatgtccgcaatgtcatgagatgaaaatgccgcatcgcgtttgtcccgaatgtggttattacaacggcaaacaagttatcgttaaagaacaataatcttgcagctttaaatccccgtaccttaacggtacggggatttttgctttttattggctggtactaaagtgatacaggcagagtaaaaaaagctgtttgaaaaccgtcgggcatttgattgtgactaacttgtgaattattaggaaaattaagcatggaattaaaatttttacttgctttttttattgtgagcttttataatacctctagatattaatagttggtactaaagtcgggtgataaaatgaattcttccaaaaaaataatacggcaggaaaatctgtccaagatgttggaacgcaatccatttttgacagacgagcagcttgctaaagcacttgaagtcagtatccagacaatccgtttggatcgcctgcgaatgaatattccggaagtacgtgaacgtacacgtcagatggccgaaaatgcgcagacaaaattgaaagccatcgacaaaaaagatattgtcggcgatcttattgatctggaattgaataagatcggtatttcgatgctgaaaataactccggaaatggtgctggaaaaaacaggcgtcgcacgcggttactatatgtttgcgatggccaataccctggctctggctgtagtcgatgcagatgcggccttgacaggggtgggtaatgttaagtataaagtaccggtctatgccggtgcaaccttagtcgctaaggcggaggtgatccgccgtgagcatgataaatatgttatctgggtcaaagttcgcaacaataacgaagaagtgtttcgtgctaaattcattattgtatcactgcccaacgaaaggatcgagaaatagtgaaaattgcggttgatgtgatgggaactgactatggacctcaagaactggttttgggagctgtccaggctgtcagagcgtatgactgtgaagtcgttctcgtaggcgactccgaaattataaaaaaactgctggaggaatataatgctgctgatgaacgaaaaatcacagtacatcattccagcgaagttattaatatggatgaacatccaggtatagcagtaaaaactaaaaaagatgcgtctatcgtcgttgctacgaagctgctgcgtgataaagagtgtgatgcgctggtatcgtccggaagcacaggggcggcagtagccgcagcattgtttggactgggacgcatcaggggcatcgaacgtccggctatcgcgactcctatcccaagtcttaccgggacgacagtagttttagacagcggtgctaaagtcgacgccaaacccgaacatatggtgcaaagtgctatcatgggcagcgtttatgctgagttgatgctgaaaataaaaaatccgcgcgtcgggcttttgaatatcggtgaagaagaaacaaaaggtaacgagcaggctcttgctacttatcctctgctcaaggctgaagaacatatcaactttgtcggtaatgtagaaggccgtgacattaacaaaggcactgttgacgtagtcgtctgcgacgggtttgtcggcaatgtagtcctgaagtttgcagaaggtcttgcaagtgctataatgaagttaatgaaagaagctattttgaatggcggttttctggccaagctgggcggacttttgatcaaaccggctatgaaggggcttgccaagcggcttgatccggctgaatacggcggtgcgctgcttttgggtgtcaaggcaccttttattatctgtcatggcagcagtaaagcaaaggctatcaaaaatgcaatcggcgtggctatagattttgctgagcgtgatgtagttgaacatatcgccggcaatatcgtgaaatcaagaaaaggaaacgaggaaatataaatggaaaaagcagttggtattttaggtctgggctgctatgtgcctgaaaaggtgctgaccaaccatgatcttgaaaaaatagtagaaaccagcgacgagtggatcgttgaacgtacaggcattaaaaacaggcatattgccgctgaaggcgaagctacatccgatatgtccgttattgcggcagaacgtgctttggctgacgcaggcgtaagccctgaagaaatcgaactggtcatcgtagcaactgcttctgctgaccatgcttttccctctactgcttgtctggtacaggaccgtatcggcgctaaaaacgcagctgcattcgatctgtccgcaggctgctccggctttgtttacagtctgggcgtagcaagccagatggtaaaatccggtttgtacaaaaaagcgctcatcatcggtgctgaaactttaagccgcattatgaactgggaagaccgcaatacctgcgttctttttggtgacggtgcaggagcggcggtcattggtgaagtcgaggatggtcttggtgttttgggtatcgatctcggtagcgacggcagcggcggaaaatatctgttccagccggctggaggcagccgcagaccggcttctcacgaaacagtagatgcaagagagcattttatccatatgaacggcaatgaagtatttaaatttgcaatccagatcatgggcaaaacggctaaacgagctttagctaaagcaggtcttgaaccggctgatgtcgatcttctggttccgcatcaggctaatatccgcattattaacagtgctgctaaacgtttgaaaatgccaatggaaaaagtttgggtaaatgtcgataaatacggcaatacttccgctgcttccattcccattgccctgtgcgaggcgcaggagcagggcgtacttaaaaaaggcggtacagtactgttggttggtttcggtgctggcctcacatggtcttccattgtgcttaaatggagtaaataaacctgcaagaacaattgagcaaaagacgaaagagaggttttcccaatgagcaaaattgcatttgtattcccgggacaaggttcccaaactgtaggtatgtgtaaagatctttatgataactatacttgcgctcgcaaggtttttgaagctgctgacgaagctttgggtttctccatcagcgatatgtgttttaatggtccggaagatcagctgcgtctgacctttaatactcaaccggctatcctgactgccagcgtagcctgtgccgaggtgctgaaagaaaacggactgagctgcgaagttgctgctggccatagcctgggtgaatattctgctttggttttggcaggtgctttggactttgctgatgctgtccgtatcgttcgtaaacgtggccagttcatgcaggaagctgttcctgttggcgaaggcagcatggccgctgtcttaggtcttgaaagcgataaaatcattgatatctgccgtactgttgaagctgaatgcggtgaagctgtacaggcagtaaacttcaactgccctggccaggtcgttattgcaggctctgtaggcgcagtggataaagctttggcggcgttgaaagaagccggcgccaaacgcgctgttcttcttcccgtaagcgcacctttccacagcactcttatgcagccggcttccaaacgtctggctgaagtttttgaaactattaccttccacgacgctaagattcctgtcgtcgctaatgtaactgcaactgaagttaccaaaggagaagaaatcaaagaatctctgatccgtcaggctgctatgcctgtactttgggaaacctctgtcaaccatatgatcgcaggcggcgtcgatacttttgtcgaagtcggcccaggcaaggttctgtccggttttactaaaaaaattgccaagggtatggctgctttgaacgtcgaagatgaagcaagccttgaaaaaacacttgcttattttaaggaggttcgttaaaatgcagttagaaggtaaaatcgcactggttacaggtgcttcccgcggtatcggtaaagctatcgcagtggcgctggcagctgcaggagctgatgtcgctgtcaattatgccggtaacaaagctgctgctgaagcagtggctgctgaaatcgaagctatgggacgcaaagttctgctgctgcagggtgacgttgcccagcttgaagtctgcactgaaatgatcgatgccgttatcaaagaattcggccgtatcgacattttagtcaataatgcaggcatcactcgtgacaatctactgatgcgtatgaaggaagaagattgggacgcagtgctgaacactaacctcaaaggtgttttcaactgcactaaagcagctgtcaaatacatgatgaaacaaagagcgggccgtatcgtcaacatcacctctgtcgtaggtgtaatgggcaatgccggtcaggccaactatgctgcagcaaaagcaggctgcatcggtttcaccaaatctgtagctaaagaagttgctgcccgtggcatcactgttaacggtgtggcacctggttttatcaaaactgatatgaccagcgttttaccagaaaaagtagtagccgatatggaagccggtatcccgctggcgcgtcttggcgaacctgaagatattgccaaggcagtattgttccttgtaagtgacgatgctgcttacataaccggtcagactttacatgttgacggtggtatggtaatgtaattatgcaattcttaaaaaaagacctttggaaggaggtgaatcgtaaatgagcactttcgaaaaagtaagagacattactgtcgagcaattgagcgttgacgctgatgaagtaaagatggaatcatccttcatcgatgatctgggcgctgactccctcgacatcgttgaattaatcatggctttcgaagaggaatttgaagttgaaatccctgacgaaaaagctgaaaaaatccgcaccgtggctgatgcagtcaaaatgttggatgaagaaaaataatcttttagcagctcaagggaaagctcttaggagctttccctgacagttgcagtagtcctgaaatgggggatatttgttgaaactaccagtacttaaaataggtgatttgacagccgaagtaccgatcatacaaggcggaatggctatcagactgtctaccgcgcgtttggcggcagccgttgcgcaggaaggcggaataggactcatcgcagcgtccggcatggcgtttgacgagctgcgtaaagagatccggctggccagaaagcttaccggcgggaaaggcatcatcggcattaatgcaatggttgcggcccgcgaatttcttgggctaattaacactgctgccgaagaaaaaattgacctgatcgttgccggtgccggtttttcaagagatattttcgccgtggggcgtgaacataacgtagccgtagtgcccatcgtttcctctgtcaaactagctaaaatatctgaaaagctcggtgcagccgctattgtagtggaaggaacagaggcgggaggacatcttgggactcaacagtccatcaaagatattctgcctgatattgtcaaggcggtcaatattccggttatcgccgccggcggagctactgacggtgcagctgtagcggagcttcttaaattaggggccagcggtgtgcagatgggcagtcgttttgccgccagcgaagaatccaacggtgctccggcgctgaaagaattatatctcaaaatgaccaaagaggacgttgtacagatcgacagtcccgttggctataaaggcagggcgatccttaatccttttgccaaacaggttctggaaggtacgcagccgcgtccccgcacctgtgataactgccttaaacaatgttcccgcagcttctgcatcatccgcgcgctcaccagagctcaacagggcgatgttgaaaccggccttgtttttacaggtgccaatatgtggaagatcaaagaaattttacccgtgaaagaaattttcagaagactgaaagaagaaatagcaaaaatttaatttgaggtgatttattttgaaaagacgagtcgttattaccggtgttggcccgattactccaatcggcatcggcaaagatgaattttggggcaatctgatcgctggtaaatccggtatcggtctcattacccagtttgatgcttctgatcctggcttcaccactaaaattgcaggcgaagttaaagattttgatttcgctaactatggcgataaaaaagaaagcaaacgtatggatcgtgtgacccagtttgctgtagcggctgctaaactggcagtggaagatgctgaactcgatctggaaaaaattgatcccgttcgtgccggcgtttgcgttggcagcggcattggcggcatccataccttcctcgagcagtctttaaaatatggcgaaaaaggtccaggcaaaatcagtccgttcttcattccgatggagatcccgaatatgcctgccggccagatttctattgctttaggctttaaaggccctaataccgctatcatcacagcttgtgctaccggtactaactgtatcggcgacgctctgcgtactattcaatatggcgatgccgatattatgatcgcaggcggcacagaagctgctgtttctcctgttgctatagcaggcttcggtaacatgaaagctctttccaccaacaacgaacatcctgaaaaggcttcctgtccgttcgataaaaaacgcgacggttttgttatgggtgaaggtgccggcgtagtagttatggaagagctggaacatgctttggcacgtggagctcatatctatgctgaagtagtaggctttggcatgaatgccgacgcttatcacatcactgctcctgatccgagcggtgaaatgcctgccctgtgcatgcagcaggctatcgacgatgctggtatgaaaccggaagacgttgattacatcaacgctcatggtacttctacccatcgtaatgatttgaatgagactttagctgctaaaaaggtttttggcgatcatgcttataaaatgactatcagctccaacaaatccatgacaggacatttgctgggcgctgcaggcggcgtagaagcaattgctaccgtcatgaccattgagaatggtattatccctccgacgatcaactatgaagaccctgatttagaagaaggtctggacctcgactatgttcctaacgtagcccgtaaagcagaagtaagagcggctctgtccaataacttcggctttggcggccataatgccaccattctcttcaaaaaatatcaagcttaattgagaatagagtgatttaaatgcaagacacgcgcaaagagcagctgctgaagttctgtcaaagccttggcatcgaaatgcacaagctggaacttctaaacagcgctctgacgcatacatcatacgctcacgaatctaaagaattaccgcgtccggaacataacgaacgcgtagaatttttaggcgactccgtgctcagcgttatcgtcagtacatatatgtactgcactttccccaaccttaacgaaggagaacttaccaagctcagggcccatatcgtctgcgaagcatctctggctgaatatgcccgtaaaataaatcttggtgattacctgcttttaggaaagggagaaggtttgtcgggaggacgcgaacgcgcttctatcctggccgacgcttttgaatctgtacttggggcttattatttagaccagggtatggaagcagcccgtgtatttttactggggttaatgaaagccgagctggattttatctgtacgcacggcatttgcagtgattttaaaacaaggctgcaggaagttgcgcagcaggatggcgatgttgatatcgtctacgagctgatcggttccaaaggtcctgaacacaacaaacattttgccaccattgtttccgttaacggcaaacatatcggttcaggcgaaggcaggacgaaaaaggaagcggaacagcaggctgctaaaagcgctcttgaaaaaatgggcgcgcctttgacaggctttcctaaataaaataaacccttgccggtttaccggcaagggttttctttgtctgctgttcagctcagtgtgaaggtccatacaggttcagcagaactacgccgctgacgaccaaagccataccgacggcgccgatggcgttgatgctttcgtgaaagaccagcattgaaatgatggctgcggcaacgacaccgatgcctgcccaggttgcatacgcaatgttcaaatcaataaactgcagtgaacgggacagaaaataaaaagcgcctgtgtaagctgcaactactaccagcgaaggtgacagcttagtaaagcccagtgtgtatttcaaaaatgttgtgcccagtaattccaaaacaatagctaaacctaaatatacaaatcccatgatatcctcctaatcatctatggcgtcacgtaaagccttcatccaggcaaagccgccttccagcagtgcgttgcgctgggcgtcagtcatattacgcagcgcccgttcttcaaaatcatccattttttgtaaaagcccgtcggcataagcagcaccctgactggtaaaaaccaacagcttgacgcgtttatcagtagggctgattattttttcgacgaagcctttctcttccaatccggacagaatactgttgaccgtctgtttgggcagcatcagtttttcgcagatcagatgctgggtacagtcatttggaaattccttcagcaaatacagggtcagcagtaaattgttattgagtccgtgtgatttggcccagcgttcatagacggcgtttgtgccgaaccaaaggtcgtagtagccgtggcgtatccgttgcagctctttatgcataagcgccctccttttttaataaagtccgaaatcggactaattgaattataacaacattttctaaaaaaggcaagtaaaattttgtgaatgacaccagggcggatggctggcattgaccgggagcggtgatacgggtataatgcaattatcaagcatgttgataaaaatgcaggcgcactaataagccgcattataataaacgtttaatgcaaggaggcagggcagtggcaatcatacctgtgtttataccgcatgcgggctgtccgcaccagtgcgtgttctgtaatcaaaaaactatcagcggtcagcagactgcgtcgtcgagagacgtagagcagcagctcgaacgctatctgcaatggatcaaaccgggcccttccaacgaagcggctttttacggcggctcgtttacaggtttgccggccgacttgcagacagaacttttccgacctgtagataaacttttggcggaaggtgttattggcagtgttcgcttatctacccgaccagattatattgatgccgcccggttagagctgctgcaggcacacggcgtaaaaacggtagaactgggtgtgcagtcgctggacgataatgttctggcagcggcagagcgggggcatcaggccaccgatgtttataaggctgtttctttgctgaaacagtatggctttgagatcggtctgcagttaatggtaggtatgcctggtcaaagctttgacagcgtcaaagctacggttgagcaggtgctcaggctcggtccttcttttgcccgtatttatcccttgctggtaataaaaggcacgccgcttgagcatatttacgaacgtggtgaatttgagcctctgacactggaagcagcagttgagcaaagtgcttatgtatacagcaaattaaccctggcggggatcaaagtcattcgtgttggcttgcaggccgatgaagagttgtgcagtgaaggtaatattgttgctggaccgttccacccatcttttggtgaacttgtgcaaagctttttgctctatgccgaactgactccgcagctgcagaggctgttttgccaaggcgcgggaaacatagtaataacctgcccgagcaagctggaatcaaagctgcgcgggctgaaaaacaataatctgcggcgctggcagcagcttgcaggaccggttcctgtaaatatcaaggccgggcctgatgcagaacgtattatgataagctggaggttggacgatgagtgaatgtcagagctttgacccggtcgctgacacagacagcaggctgctcattctcggttccatgcccggtgttcgttccttgcagatgcagcagtattacggccatccgcagaatcgtttttggccgttggtgacgatgcttttaggctatgctgaggttcctttggattatgcggataaaaagcagatgcttttagataaccgtatagctctttgggacgtactgggttactgcgaacgtgaaggcagtcttgattcggatattacctgcgagcagcctaacgatctggccggatttttgcagaatcatccgcagatacatactatctgctgtaatggaggcaaagctgccgccgcctttaaaaaatataccagacagctcgatctgcagaggattactgtgcatttcctgccttctaccagcccggccaatgcccgctggagcctgactaagcttttggaagcgtggcaggttatcaataccgaccgttaaaaaataaaaaagccttgaatactttttgtattcaaggcttttactttagttatcagttagtttttcctggatatgccttcagtgcttcaccaaggatataaattgcctttttcaaatcatcacaattgagaacataggccagcctagcctcattaacccccaactcagggtcgctgtagaaaccgttgccgggagcgaacataacagtttcgttatcaatagcaaaattttccaaagtccagatagcaaacttttcagcatcgtctacgggcagctgcaccataatataaaaggctcccttcggatcggaagcaactacgccaggcagctctttaagggcggcaacgatcgtatcgcggcgttttttgtactcttgattcacttcctccagatagctgacgggagtagtatataaagcggctgcgccgacctgttccagaatcgggctgcacagacggccctggcagcatttgataatctgcttggcaagctctttgtttttgctaattatgcagccgatacgggcgccgcaggcactgtagcgtttagaaaccgaatcaatgatgatcaggttgtcggcaagctcgggcattgtgccaaagctgcggtaagcgccgtcataaacaaattcacggtatacctcgtcagcgatcaaagccaggtcatatttgcggacgattgctgaaatcatatccatttcttcctgtgtataaacaacaccggtcggattaccgggattagtcagtaaaacagcttttgttctgggcgtgatctgcgcttcgatagcagcagcgtcaggcagatggtaaccgtcagtcacatttgtctgtacagcgttgattttagcgccgaactctctggcaaaagtagtatagttagcataaaacggctcgaataccatgatctcgtctcctggatcacataaggccatgacagcaaaaatcaaagcttcgctgccgccgttggtaataaaaatatcatcggcagcaaaatccatacctttttcggcatagtatttgcgtatcgcttcgatcagaaaaccttcgcctttggaattgccataagcaattacctgctcgtcataagtgcggatgctttccataaactggtcaggagttttgatatcgggctgtccgatattcagatggtagatttttttacccttcgctttagctgcatctgcatacggcgacagctttctgataggtgaagaagtcaaactttggatacgtgctgaaagtttcatgtaaaatcccctcactgctgataaattttgtccgggcgccaggacccggggttattatggcacttggcagcatttctgctgtcttgccaagtgttcatattatatcataattaaatcgttatttttagcatcaggataaaaaaatgtaaaaatattttacaaaacggcctgaaatacagcaaaagtgtttcaaaaaatactttttacttctcaagcataacggcagcatttgattaaaaaagtgcgttgagtcatataattgtatgaaaccttcatctatggtaaaatatactgatagaatattgcagattgggtgattttgtgcatttaaagtcattttcgacttatggattcaaatcctttgcagataaaattgaattaagcttcggttcgggcattacggcaatcgttggaccaaacggcagcggcaagagcaacatttctgatgcgatccgctgggtactgggcgagcaaagcgccaaatatctgcgcggcagcaaaatggaagatgttattttttccggcagcggcaagcgcaggcctttgggtgttgccgaagtgacgctggtttttgacaacagcgaccatcgcctcagccttgattttgatgaagtaagcattacccgccgcgtttttcgcagcggtgacagcgaatactccatcaataaaaagaactgccgtttaaaagacattcttgaccttttggcagatactggtctgggacgtggttctatgtctattatcggtcagaataagatcgatgaaatactgaacagccgtcctgaagaacgccgcgctttatttgaagaagccgctggtattgccaagttcaggatgcgtaaaaaagaagctatgcggcgtctggacgataccgctgccaacctgacccgcatcaacgacatcaaagccgaagtcgaaggtcaggtcgagcctctgcgccttgctgcagaacaaacacgcaaattcaatctgctggataaagaactgcgtgcctgcaaactgacccaatttgtgcacaagatagaaaatattgaaaatattcggcagaagctgaacacacaggatgccgaacttgaaaataaagtactggaacgcgctactgccgtcagcacacaggaagctgaatgcagtgccttacaaatggagctggataagctcagtgaagcctataaccgtattcaggacgatatcaaagaaaaagaaacagctctggaaaaactgcgtggtcaggaagctgtgttggcagagcgtgttcggcaaagcgaaaaatcaggactgcgtttggaagagcagggcaaaaagctgcaggaacagatcgcagctttggatactcagctcaaaacgatggtcgtggattatgaccgtttagaagcgcagcaggctgccgcacagcttttggtaagcaggctgaccggagaacaggcagaaaaagaaacacgtatcagagaagctgaagcggcaatggaagatatgaaaacagctgctttcgataatatgcgtacaatggtcaatctgcggaatgagatccgtagactggagcaggagcaggaacagcggatgcgtaagcgtgatgcccttaaaaagagcatcgccgaagcagaaaccgcaggcgaagaactgcagacccgttaccgtaatatgaacgatgagcagagcaatgtagaaaactctttggagcttattaaacgcgatggcagggaagtgagtgctaaagctgccgaagaaaccgaagcgctgaataaagttctgtcgcagcataaagactgtcaaaacaggatcacagcgctggaaagccgtttgaacctgctgcagaatatgcagaaaagctatgaaggctttggctatgggatcaaaacagtgctgcagtcgcaggaaccctggcgcagtgacgttatcggtgttgccgccgaactgatcgaagtgcagcctgaatatgtagttgcaatagaaactgcattaggaggagcggcgcagaaccttgttatgggcagttcggaagccgccaaaaaggccatctcctatcttaaacagcgtcaggccggccgggcgaccttcctgccgcttgatactatcaaatattatgaacgccgcagtgaagaagaggcactggcaaaactgccgggtattcggggatttgctgccgatctgatcggctatgatataaaactggcgccgatctttaaatttttgctgggtcgggtgctggtagcggacaatatggatgccgctttggcagccgccaaaaaaagcagctttcgtaccagagtcgttactttggcgggagatgtcgtcaatgccggcggttcgctgaccggcggcagcaggcagcagaaggaagccggttttctgtcgcgcggcaaagagatcgacgaacaggaacaaaaggcgggtgtcttgcgccgtgagctgttgggatatcaggagctgcttgaagaacacgaaggcaccttaaaagtttataacaacaaactggtggaactgcgccaggacctgcaacagaaggaaatccgcaaagctgagctgggcgtagctctggagcgtttaagcgcagagcagcgtcaggctgcggaacggctggagcttctgctggatgaccgtaatcaggtttctcaggaatatatggcagctcgccagcagcttaccgacctgcgcccgcagctaacggctctggaagccgaagacgcacagggcaaacagctgctggatgatctgcagaaacaaacggccgcagaccacagcgctctggcatctatccgcaatcgtctgcaggatgccagggtcgaactggaatcgactgccgcacggactacgatgatggccgagcggatgcagcagcttgatgccgatatggggcgtatgcagcaggaactcgctgctaatgaagacgagcaaaagcatttgcttgacgtgataacggccagcaaaaccagcactgaacagctggctgccagcagtaccgcattactggccgaattacagaccgttgtcggcggtaaagatgaattcggggccaaacgtattgccattactgaaaagcaggcagtggcaggcgagaggctggattctttgaaaaaagaactgactgttgctgaaaccaggcgcaatcaggcagcgatggaaatggtacgtcaaaacagcgactatgaccatgctctggaacagctggcgactgaataccgtattactctggacgaagcacgtgccagcggtgatctgctggatgaaagcgatgcggctttacgtcggcgtgaactgcgtctggagcgtgaaattgaaaccttaggctcggtaaatcctgcggcaatcgaacaatatgaagctgtcagcgaacgctacgaatttttacagcgtcaatacagcgatctttcagaggccaaagccaatctggaagcagttatcagcgaaatcaattccggtatggccaaacgcttcaaagaggccttcggaaaaataaacgaatatttttccgattgttatgtgcgtttattcggcggcggtactgctgctttaaaacttactgaccctaatgatgttttaggcagcggcatcgatatcgaagtgcagcctcccggtaaaaaactgcagagcctcttcctgctatcaggcggcgagcgggccctgacggttatcgccctgctgttcgctctgctcagctatcagccttcgcccttctgtattcttgacgaaatagatgcggcgcttgacgaagctaacgttgaccgctttgcgaaattcttggcagcctatgccgaaagcacgcagtttattgttatcacacaccgcaaaggcactatggaagccgcgcatgttctgcacggcgttaccatggaagaatccggtgtttctaaattactatctgtcaaattgagcgaaaaggagtgagaacatgggatttttagaacgactgaaagacggactcagcaagacccgccgcaactttactgaccgcatcgaagaacttgtaggtatgtcggctaaagtcgatgaagactttctggaagaactggaaatgatccttctgagcggtgatgttggtgtcaaaaccacagaaaagcttatcgatgctgttcgtcaggctgctaaaaagaaagaaatcgaggggacggagcaggttatgccgttcctcaaaaaatatattgccgaaatgctgcaggacgaaggacagcgtacccgtatcggtgccaaacctacggttattcttgtcgtgggcgtcaatggtgttggtaaaaccactactatcggcaagctggccaactattttcatctgttcaaatacaaagtcatgctggctgccggcgataccttccgtgccgccgctgccgaacagctgcagatttggggcgagcgtgccggctgcgaagttatccgtcacgaagaaggcgctgacccggctgccgtggtttttgacgctgtcaaagccgctattgcccgcaatgtcgacgtactttttattgacactgccggacggctgcataataaaaccaatctgatgaacgagttggagaaagtacaccgcatcatcaaacgcgagataccagaagctccgcatgaaacctttctcgtgctggatgcaacgacagggcagaacgctatcaatcaggccaaagtctttatggaaaccgccaacgtcaccggtgttgtgctgaccaagctcgacggtacggctaaaggcggtgtcgttattgctatcaaagaagaacttggcttgcctgttaagtggatcggtgtcggcgaaggcattatggatttccggccctttgaagccgataaatttgtcgacgccttgtttgatggtgacaagtaaaaatgcttgacagcctctgcgattttcgatataataccaaagtcggataaaatatgtaaagattttggtgattgaaatgcaggaaaacagtttggagcaaagagtacggttaggacgtttgttcgatgcctacggctgcctgctcaccgaaaaacagcaaaaatgtctggagctgtatttctgcgacgacctttcgctggctgagatagccgatgaacttgaagtatcaagacaagcgatacatgaccttatcaaacgggtagagcatactctggaacgctatgaaagcaaactggcgctgctggcccgc

SEQ ID NO: 10026 - DNA, 1970 bp, Unknown
  gut microbiota DNA sequence
atgatttctatatccttcatcgtagccttattggcttcagtaacttcttcggccaggacggtgaagtctgcccatttgccggtctcgatcgaaccgagcctgtcttccagatgcagcagccaggcggcatttaaggtgatgcagcgcattgcttcatcggcggtcaggcactggtcttcaccataaactttaccgctgatgccggatttgcggttgcaggcgcaccaggcggaaaagagcggattgacctctgtgatcgggtcgtcggaatgcacgccgaagcggacgccgtggttgacagcgctgcgcatcggctccatgcgtttggcctcgtaaggccctacggtgtattcagcatggacgtcgccccagtaatacagatggttggcgaagaaattagcgccgatattcagttcatgcaggcgtgccagctggttttcagttgccaactgcacatgctccacagtatggcggtagatgctggttgggttttcttcccgcaggcgttttactacgcgcagtacctgctcggtagcgccgttgccgttagtatggatagagaccgagtagccgtgttcctcacattccttcaggatatcgaacatggtatcgtcgtcgtagatcagcttgccgtttctggcgccgctgtaatattccttattcagtaaattggcagtatagccctggatcgaaccgtcagccagaatcttggcgtggttaaaaatgaaacggtcattttcgatctgctgacgcagctgctgcaggccattccagccgccgaagacaccatccatatttttactgtagaaaggttccacaacaaaacgtacaggcagctgttcttttttcagagcgttagtataaccgtcaatagccttcggggtcaggataaagccgaaagccttatcagcgatcgtggtgcagccgttgtgtttggccagcttggcgatataacgggtcgctttttcggcggtttccgcagcgtcgccgctgatccgcataccgcctgcctttaaaacataggacataaattcgggttcggcaacgttgccgttgcagctgccgtccggataacggccgatattgtcgtcgtggacagcatcgatgccggacagctcgatcgcacgggtattgacggtcatcaaatggccggaagcatggttcaggcagatgggtacagtgctggaaacctggtcgagccatttgctgttgatgttttccagcttggcgtcgcccaagatcagcggatcgataccataagtactgagccagttctgatcgttatatttaccggggttcttttctattacctcacgcagcttggcaatgatctcgtccggcgttttgcagcctctggaaatctcgccgtcagcagtatgccggtcaaagtagccgatataaacataattcatattatacaggccgctttgctgagcgtgcatatgggcttcgataaaaccgggataaataacattgttgataaacgtatcattgatctgataagaagcagcatgcgctttaaaataagcctccatatcgataaaatcaccgactgcgataatagtgccgccggcaacggcaacacattctgcccacggcatctgcgggttcatggtcactaccttctgcgcgcggtagatagtaacctgagcgttctgaaagactaccggatcggaaatcacctgaaaatttgcggacatatacataagatcacctcattataaatttactgattaacagttaaaatcatttagttattttttcattgggcagcggtccggtgctgagccagaacagagcgcaaatgaagcccaggacatacaggcccagctgagtggaattttggcgggtgctgcggttgatagcggtcaagacagcggcgtcatcggcatttgccgctttatccgcaatatattttgcgaaagcagcgtccggcataaagccgatggaagcctgctcgctgataacgg

SEQ ID NO: 10027 - DNA, 135027 bp, Unknown
  gut microbiota DNA sequence
gagcgtcgcgggcattgactgcccctgcgatgatattggaagactgtgaagcaacaaagccctgcccggcgccgaagaagaacaggcccacatacatcagccagttaactccgtaaggatttaaggacaacgccatcgggatcgtcgaaagggcaaccatagcgatacccgtgcggcagatctttttcggcgaagcatcgggactgaacttggggatacccatagagaacacgatcatcgggatcgccatagcgctcatggctataccggtcataatggcgctgaaaccggcgaccagctgcagataagtgatgaccaggaagaacgacccgccgaagcagaggaacagcatcgctgtaagatacagtccactgcgtacctgcggcgtcgttaagaaggaggaaggaataagacaggaaccataggttttttcaacattacgttcgatacggaccaggagcaccagagtgataagccccagcagcgcgataaacaaagccggtgacataccgaacaaaactaacggactgccgccgataacaggcggcgcgatcggatcgatcaggccccagactgggatcttgctgataccgatgatcagtaaaaacaggccggcaacggcaacgaccgtacctttcaggtcaaaacgcactttttgttcgggcagcggaacatcgcctaccagcagcgaacctacaaaaacgatagtaaaataaacggccatgcagctaaaggctatgcgccagtcaaaagtatcgatcaaaaaaccggcggcgatagggccgaggcaggaagcgatacctgtagcagcgccgatagccccgaaagcgaaagcgcggtcattgccctgatacaaaccggggatcagcccgaggacagaagggataaggaaactggcgccgataccgaccagcagacggccgccccaggtgaacataaaaatgttgccggagaaagctacgacaagttcgccgacggcgcacatcgcagcgccgatgcggaaagtttttttccagccgacgatcaggccgaccataccgccgacgatcatcaggcagccggcgcacaaagaataaataatgttggccagctggatgtctgacattgtcgcattaagactggccagcagggaagctgtagccacggtaagcaccgaattatcgccggaagtgccgatctgggccatgaccagaggaaagagaccgagaaacttgtatttactgagagcagagctagtagacataatgacctccccaaaactttagaatttaaatatcttgcaagatttcttcttgtctttattgtaaaacctggggtagaataagtataatactagttattgtatgtactcataagttatttgttatgaaaggtgacggtcatggatctattacagctcaaatattttaaagtagtcgccgaacaggaacacatcaccaaatcagccaagctgctgatggtatcgcagccctacctgagcgctatcgttgcccggctggaagaagaaatgggcgggcagctgtttgaccgcgacggacgtaacgtagtgctgaacgaatacggcaagatcctgctgcatcacgccaacgaagccctgcagcatctggaggacgccaaaaaggaaatcgccgacatgcgctcgcgcgatactaaatacattcgtctgggcagcagcagtaccatgctctccaaacgctggctggtggatttccttaaagaacataacgatatcaggctggcgcatctgctggcagcgcataacgagatcatggacggacttctgagcggccgctttgactttgggctgacaactggcaggctcgatcatcctaaaatcatttcagtgccgctgtggaaagaccgttatacactgctggtcggagccaggcaccctatggcccgccgccggaagatctatctgcaggatatccaaaacgaaaagatctgcgccctgccggaggatcaaagcaagctgaggatcgttgacgagctgtgtaaaaaagccggcttcgagccggactttgtcctggaaggcaatgttgagctgctgagcgactatatgcgcgaagggctgggcgtttctttcggactggcgagcgtcagagatgcttaccgtgatatccgttccataccgctggctgacgagataggtgaagccagtatttacctgtcgtggtgcggtgagcgttatctcaccaattccatgctgacgctgcaaagctatctgcgggacgtaggcaaacagatagaagctgaaaggtaaattgctgcatagtataaaaaaataacgtataaataaaaagactgagcttaagctcagtctttttatttatattgccaggcaaggcaggaaagcgcagacgccgatagttgtaaagccgctggcgcaatgcgccgggcaagactcgcagacgttttacacatgctcaaagtaagtgccttgcgggggggtacaaacgtgctataataactgtaattattataatgggtaaagtttttgatgtaaaacaaaagaagaaatgttttggtttcgatattttgaactaaaacactaatatttcgaaaactgaggtgaagtatgtatatcacagacaaaatagctttactgccacatccgtaaacaggacaagaacaagaaatataaataaaaaagaaaaagggtgaaaagcgatgagaagaaaagtcaaaaataagcttttctgcaacaggattctggcggcagtaatggcagggggcatattgagcagctgctgcgctgcgcctgtatgggcggctggaacaacaggcggctcgtcttttactatgggtgcatcagagttttacggtgttttgagtgtcgagggttcggacgtcattggttctaatgtgatttttgatgatagtaactctggtattaatatttgtggtggatatggtgatggcagtgctttagtagcagaaaatacggtgacgataacagggaatagtgttatctttgaggtctatggaggttatagtgatagatcagatactggtacagttaaaaacaatcacgtcataattgaaagcggagcggtgatagatggctatgtagaaggaggggccgtcactggcagcggcattgttgaagggaatattgtaattgttgatggtgctgatgtgatgggaggagttaaaggcggaaacggatctagtgaaggtggtgacattgtcagaaatagagttacgctgcgaaatgcgcatgtagtagagaatgttaccggcgggtcaagttatggcaagggtatggctgcctataatgaagtgataatcagcggcaatagcaaattagatttttttgttattgggggcagctgtagcggcactggagaggtttcccagaatacagttacgatgagcggaggtaatgttaaatatgatattaatggaggctatagtagtcaaaatgccactgttacaggtaaccatgtaataatcagtggcggttcaataggcagatatgttttgggcggttacagtatcaagggtgatgctacgggcaacacagttttgatcagtggcggtgagtttaaaggaaatatttttggcggtcgtgtggatagtgccggtaacgccacaggcaatacggtgacgataacaagggacagcggtgctaatcctattataggcggtgcgatttatggcggttatggaaacaatgcagtcgacaattatactggcaatacatttaatatttatactaaaggtttagaagctaaagacataaaaaactttgaaaatttaaatttttacctgcctgaggataccgtgaatggcgataccgtactgacactgactaatgcaggcggcacagatatttctggcagcaaggtcagcgtaggtctgtcaggctcgtccagtgttttgcaggccggcgataaggtcaatctgctgactaacagcaacggaataaaagctgatgatgttatttatggcagacttcaacagggcgtcagtatcgaatacgaatttacaactgagctgagcggcaacagcgtcgtcgccacccttaacggtgaggatgagaagccggcaggtaaaacgacagaacagagcaaatcgccggtggaaacacaggctgcggcagccgcttttgtcaatagcggcgctgatacagttgcgggcagcggtatggccagcgcggtacagttggctggaaacggcagtgcggaaatgtttggcactatgggcggcggcagtatgaaatataaaagcggttcctatactgatatgcgtggttataatctggcactgggttttgcgaagtctgttgccaataacgccggcaagctgacctgcgggccgcttctggaatacggatggggcaactatacaagccatctggacagcggcatccgtgctgacggtaataccaaatactatggcatcggcgcgctgatccgtcaggataacaacagcggtatgtattacgaaggcagtgtgcgttacggacgaatggacgctgattatgccagtagcgatatgatcggtgccggaggcgaaaaagtatatgccagttacgacagcagcagcagttactatggggcgcatctgggtatcggtaagatcaacaaattgaatgacagcgttaaagcagatctttatgccaagctgttttatactcgtcaaagcggcgacagtgttattttaggcggcgccggcaatggcgaggagtatacttttgacgcagttgacagcatccgcgccagatttggcgcacggttgagtaaagactgcggcagcggcagcggctatgcagggttggcttacgagtacgaatttgacggcgaagcaagagcgacggtcaaaggcttgagtacaccgtcacccagtatcaagggcagcagcggtatgctggagcttggttatatcctgcgtcccggcggcagtaatggtactgccgttgatataggtttgcagaattggttggggaaaaaacagggtatcagtgccagtgtcaacgtgctttttaagttttaaataggtaataacgctgataggcataacaaaagttttgattataaacaaaagagaagttgcttttggttattattttaaagtcaaaatttgatgattttgaaaggtttgggtgaagtatgtacgatgaaagctgcctgccgcgtatcggcagtaatatcaagattctgcgcaactcctgccggctcaaccagtatcagtttgccgaacatatcggcataagtcagacgcatctgagcaatatcgaacataacaatgtgcaggtgagcctgaagttgctggtgcgcagcgccaatgtttttggctgcaatttggaaacactgttggataaaaaagcggcgtccgagtgggtggaagtacagtacagagaggaaaaggtgcaggatgacagcggtgagtgcggcagtgagaacgcagctgcggcagctgaaacacaggaactgtattcgctggaggaagtgcacctgctgttgaaggtgctgcaaaagaaaacgatataattttttcttgaaacgaggcttttgccgcgcagtagataaaattatcagcactgactgctgtaaagatgaatgggagtattgaaaagatgtcaaagaacacaaatttgagcagaaaagtactgcggacgttgctgacaatgtcgctggtatattcgggaggtatgtttgtcgctgaaaatttggcggcagcggcgacgatcacagaacctatcaacagtagtggtaatagaactactgttactgatgatgtagagatcgctttaaatgatggttcaggtactgataaagccgtagcgatcatatccagtgcgtcctcttatagtgataatgtagtagacctgaagggcaatgtcagggtcgatgcctggggaaagtatgctttatacgcagagcacaccggtagcggcggctttgtaggtatagaagtcaaccagtccggtgataaaactgtccggttactgggtgatgttggtctggggggagggaacactaactacgttgaattagatttgaataattctgaatcctacctggcaggcgattttaaacatgtaaccggagatttagaaaaatcttcggtaacctttggcctgcataacggcgcagtctggtatcctgctgaagctgaatatactaacagtacagatttagagcatcagttagtcgaatttaagcttgacggaggcgttatcgatatttatcacagtcagccggaactggtacgtgatgatgctgatacggacagaacttttaccctgaaaaatatcaatgatgctgtcagcgggacagacggcgttactttccgtatcggcagcgatcttgcggacgtcgataattcagggatggctgatgctgataagatcgtactggaaggagtcagcggcggtatttataagatccaagtcgtcggtgatgccagccttacgggcagcagcagccagttgggtacttccgtcaccagtgtcgatggtgtagtagtagcaacggtggacggcagtaatcttactgccggtaatacgattatcagcggggaagcctacactgcagcagaaacagaaatggatgccggtttgacaaaagttaaagatttcagcattacgcctaccataagcaatgatggtggtaacgactggaaactgacgcagatcgatattgggggtgaaatagtgccggaaagcaaaggctcggctgctgtttttgccgagaccggggccgctttcgtccagaatattgtcgccgcctggcgtgctgataataacgaccttgtgcgccggatgggcgaactgcggaacaatcttgacaatacaggagcctggatccgcgtctacggtggtgaaaacgaagtcagcggcaacagcagctccaatatgaaatataaagcgactcagggcggttacgactggacgcagcgtttaaaaagcggcaaacttgttacagggcttgctgtatcttatttaaaaggtgacgctgaccttgccggcggcagcggtgatataacgtcgaccatgttcggggtttacggcagttacattggtgataaaggacattttgctgatgttattgccaaatacgggcgttccaagagcgaattcagcagtgtcagcgaactaaacagctacgatgccgactatgccagcaacggcttcagtatcagtgccgaatatggctatcgccgtcagcttgtcaataattattttattgaaccgcaggccgagctgacttacggatatttaagcggaagtgattacacgatgcagatgaacggcacagacggagcaagtgtccataacgacgcttataagtcgttgatcggacgtctgggcttcaacatcggccgtcagaacaatgataataatatttacctgaaatgttcgctggcgcatgaattcagcggcgatgtgggcgtaacggcaacatacggagatgtcagcagaaattcgaccgtagaaaccaaagatacctggctggaatatggtatcggcttcaatacaaaagtaggtaaggacttgaatctgtacggcgaagtagaacgtactaccggcagtgaagtaaaaaccaaatggcgcggcaacctgggtgtacgctgcagcttttaaagacgggcttagtgggggcaggcgtcatacctgcaaaagttattggccgtcagatcggttcaatatatagcgggggagtaacaatgagtgaacaggtttatgatttcggcttcggtgtagatgccaattatgtcaaatatgccggggtgctgatgactaatctggtattgcagcacccgggcagacagctgcatttccatttggcgtgtgatggtatcaacgaggaagatcggcagcgtctggatacttttataaagttataccgcaatgtggagctgtatatttacgacttgacgaaagtattggatcagttgaatccggtctgcaaagatacgccgaagcggctgaaccgttcggtattgttgaagatattgttgccggcatatgtgcctcaggagatcgagcggctggtatatatggatgtagacgttatttgctgccgtcgtttggatgagctttttagcatggatctgcagggtaaagtgatagcggcagtgctggataccaacagcagaaaaaatgctgcggcgttggggctaaaacacagtcgttactatttttccggtatgatggtgtttgacctgcctgcgtggaacgggcggcagaccacagggcgcattaccgactattaccagcagcacagcgaaagattgatatttttagaacaggacgcattgaatgctgttgttaacggagcgtttgcagatttggataaacgctataactttctgatagaagtgaataatccgctgatgataaaatatccggaaaatgtggcggtgctgcattgcgtcaatgaagcgaaagcctggactaagggctgcctgccggaaatccgcgagctgtactggcgtatgtacggcagtcgctgtggaacgatttgcagcctgttgaaccgactacagtcaaagcggcatttttagcagcggccacagcggagctgcagggtgactatgaacaggcacacaggtattatgtgcaagtcatcaacggatttacagagtattacaagaataagtcgccagtacttttgcaggttgtcaggcaggaatgcctgaaagcagcagcggctgagaagcagggaaagacggcacaggtgatagtggcttatggagcagctgctcaacgttttacagagcagtatctgaatgataacccggagtttctgaacaggtaaaaagtggtacttagggtgaatgttataaataaaaatcagcgatatgaagtaagtttcatatcgctgatttggtttgttattttctgcttatgatgcaggccaaaaggcgtaaccagtgcaggagctttgtgtatttgatattgatgtcgtacctcgtttctctgtttgttttacagttctctgtgtttactgatgatggcccggctcagttcgttcaggcagctggtcagcacgcctgctttgatgatcttggctgctgctgcctgtgcttcggctaaggtaacgtcttcacgcgggcagcgagtgcagcgcaatccaaatcttaacagcgctgaaagttctttgttgactttctttcaagaaagtctaaagcgatttttggcgaacattgcaagaaagtctaaaaaagataaaaaagctaaagaaaaataaaaaagattgaagaaaacattaaaagaaaacatcgtgttctttaaaaagcagcccttttaatcaagggggctgctttttgcataccacagggccttgcccctgatgacctgcccgccggggttcattgccccgtcgccgggtgaatagcgcagataccataagtcccagcgggtttcggcatcgccgctgtacggtccgtcagcagcggtgctgatgatgtttgcatttgcatagtagagatgctccttttagatttgattggcaagggggtaaaaccctcacgctatatatagggcagcgagagggataaaagtttacatcggtttgaaattttttttgcaaggtggtttttaacagcagctcataacattttagtgatatttgtgaacaatatgtgaaattgcattttggcatgtaaacttttccggtgttcgctgccctatatatagtgacagtattcagtactgaatttgttagcagagtttttaagacttatagggttttactgcttatgactttgaacttgaatctaacaaagaaatacttacagcaaagtaaagcaatacttatttagtaagtactgaatactgccataaatacttgcacgacgagcagcagaacatgcagagaagtccgttccaggccagccggtggatcatgaagctaataaaaaacgtctgcagaatcttataaaaatattgtctagaagaatataaaataaaaatatggcagattaatgttgtatttgatgatataaattcgtttgtgggcaaaagaagttgttgcaaaaactaattgtttgtagtattattttataaaatagaataatatataataatcaaatcagaaaaaataagtaaaacaaaagtagttggtccggtagttgaaacgattatatgggtaagagtggtgtagagggtaaaatgaaaaaacagcgttatgatctaaatgatttaggtagtaatgtgaagatgatgcggaaggcaagaaaaatttcgcaggtgaaattatcggaagccctgcagatgtcgcagccgcatctaagtaatctggagtgcggcaggacgttgatcagtctggagatacttgtcaaactggctgacgtgtttgattgttcggtagaagatattctattgtgcagtcaggaaaaagttaaagcagtaaattaaaagggtcagaacaaaataaaagcaacagcttaaacagctgttgcttttttatatgtgtattcattgtttttacagcatctgcccaaaggtataaagcagtttgagggcgtaaacaaaaataacggcgccgcagatgcggttgatccattgcagatggctggggcgcagattttggcagcaggttttgaagatgcctgtaagcccgaagaaccacaggcaggaggctgctgctacgccgctgataaagagtgaggcagtatcggcaggcagtgatgagcgaaaggcgcccagcatcagcgtaccgtcgataacggcctgcgggttgaaccaggtaacggtaaaggccagcgtggccgtttgccacagcgtcggctggctgtaagcagaggtgtctgtctgcacctgcgcatgcagcagctgccaggccagatagatcaagatcagtccgccgccgccgagcagtgctttttgcagcagcagactgtgttcgatcacaaggccgatgccccaaaagcaggccagcgccaggctgatgtcaaagaaggcgacgatgcctgcagtgacgagggcaatgcctaaaggcgcggtgagcgccgtattgatgacaaaaagattttgggcgccgatgggggcaagataggccagccccatggtaagaccctgtaaaaaaatttccaaagcagattcctctcgatactgaaggctgtgccgattgatcagagtacggcctgcagcagtgcaaagacggcggcgccgctgactatcgccagccccagtgattttgttttatagaccagcgggaagatgatgacggtcgaccacaggtacaggttgttcagtcccagatccaggctgcctgcgggcagaaagacgtcgggcaggaccagcgcgccgaaaatagctgtcggcacataggtgagccaggttttgaaccagcgtggtacaggtttgccggccagcagcaaaaaaggtatgatacgggaaatataggtgacgcccatcataatgaaaatggcgccccaaacgtattcagcggacattatcagcacctcccgcatggcgttcggtgatatagcaggcggcgccggaggcggccagagttgccagcacgatatgcagcttatagggaacgatctgcgaaagcaggatcgccagaagccctgataccagcccggtgatgatcattttccggtcggtgagatagttgacccagatgccgaggaacatggcgatcagcagataggagaccagctcggtaggcgggttgagataagcggcggcatagcagccgagggcattgctgagcgaccagacggcgcaggaggtgatgttgagccccagggcttcttcgcacgtccagcggggatctgtttctgtttcaaaggcgttcaggttgacggcaaaggtctcgtcggtgatgccgtgggcatagccgataagaaagtttttgctgcggccgttaaaaaaattcatcagcgtggagctgaataaaagatgacgcaggttgacgataaaaatagtgagtccgatagaaacgagggccgcaccctgggccatcatggcgatgccgatgaactgaccggagccggcgaaaacgagcacgctcatccccagggcttcaagcggtgtgagaccggcctgctgtgccagaataccgcaggcgatgccaagggccagatagccgatggcgatgggaataagcttttgcaggacacgtcggttgactgttatagatgacacggatggacactccccttatttaaaacgacttcctctattataacttattttggatggataagaaacctggaaaagtgttatatttattacgccgcaggaaaatattttttacagcgctggtgtttgctgcggcgacgcttgcgttttagcagagaactgagtaaaataatatagataaggactaatttgattttaacatgtgtttgtatatacatacgacgctggaggaggttttttagatgacacagatcagaccgttctgcgggctgcgtccggtgccggaatatgcggcagagatcgctgctttgccttatgacgtgatggataccgaagaggcgcggcagatacttaataagaacccgctgagctttttgcgggtgacaaaatcggaagcgacgatgtcggattgtatcgatccgcacagccaggcagtttataagatggcgaaaacaaatctcgacaggtatctgtccgacgggcagatgaaaaaagatacgacgccctgctactatatttaccgtcagcagatggggcagcatatccagatcggccttgtggccgctgcttcagtggaggaataccgcgagaacattatcaagaagcacgagctgaccaggcatgataaagagcaggaccgggtcaatcatattctggcgacagaagcacagaccggcgctgtttttttaacttataagggcaagcccgagatcaatacttatgttttgagcctgatgggagccaaaaagccggtatatgattttacgtcggaggacggcgtgcagcacacactgtatgtggtggagaacctgatggagatcgccgagctgacccgtttgtttgaggacgtgcctgtaatgtatattgccgacggccatcaccgcagtgctgcggctatgcgtgtggctgacgagcttggcaaaacgccgaggcatggttctaacgaagaatataacacttttttagcggtcatttttcccgataatatgatgcagatcatggattataaccgtttggtcaaagacctgaacggtttgtcgatggaagaatttttaagcagagtcggagaaaagtttgagatcagcgagctggaaaacggcccgaagccggaagcacggcatcagttcagtatgtatctgaccggaaaatggcgccgcctgacagcgaaggaaggtacctttgccgcggatgatgtgatcgggtcactggacgtttcgatcttgcaggataatctgctggcaccgatcctgggcatcaaagacccgcgtacggatgagcgcattaattttatgggcggtatccgcgggttggatgctttggcggctaaagtagacgcaggggcctacagtgtggcttttgccatgtatccgacgtcgatggaggagctgatcaaggtagctgatgccggtaagatcatgccgccgaaatcgacctggtttgaacctaagctgcgcgatgcgatggtcgtgcatttgatcggagaagatgaataatgaaacgtatttataattttaatgccggtccggccatgctgccgctggaagtgctgcaggaggtacagtccgagctgctggatctgcagggcagcggtatgtcgatttttgaaatgagccaccgcgcgccgatttatgaaaaaatcaatgctgaggcggaagcagacatcaaggagcttttgggtctgggcgacgattattgcgtgctctttatgggaggcggcgccagcctgcagttttcgatggtgccgatgaattttttgggggctggacaaacggcggcttatgccgtgaccagtaatttttcggataaagctgtaaaagaggcggaaaaggtaggcaaggtcgttatccctttcagcagtaaggctgaaaagtatgacagggtgccgcagccgggtgagatcaggctgccggaaaactgcgcttatctgcatatcacggctaataatacgatcgaaggcacagaatacagcgtttatcctgaaaccggtgctgtaccgctgatcgcggatatgtcttcggatattttgagtaaaccgatcccggctgagaagttttcgctgatttatgccggggtacagaaaaatatcgggcctgccggcgcggtagcagtcattgcccgtaaaaaatttattgaggggcgttctaaagctctgcacagtatgctgaattacgaaactcatcttgataacggttcgctgtataatacgccgccggcttttgcggtctatatcgtcggcaaggttgccaagtggctgaaggcgcagggcggactggtgatgatggagcagcgcaatgcggctaaggccaagatagtttatgatgtgatcgatatgtatcctgattttttccgcggctttgccaaaactgacagccgttcgctgatgaacgtgacttttggactgccgaccgaagcgctggagaagcgttttgcggccgaggctgaggagctggggatgggtggactgaagggacaccgcagtgttggcggactgcgggcctcgatttacaatgcgatgccgctggcaggctgcgagaagctggctgagtttatggaagctttttataaaatgcataaataatattgaccgggaaatagctaacgctgcttgcgcaaaaacaggcagcgttgctttttacctgaactggtttgagggaggggcagcaaatgcaatatgatttactgatcaaaaacgggtatgtggtcgattatgcgtcggcacgggaaggatattttgatgtcgctgtgcagaacggtatgattgcggcggtggaaagcagtatcggcggcagcgccgtgcaggagctggatgcgtccggcaagctggtactgcctggcttggtcgattcgcatgtacatgcttcggcctggctgggaggcagctacgcccacacgatgctggtaaaggctggtgtgaccagtgctttggatatgtcggggccggggaccagtgtactggagctggcgcgtgaatatgggaccggtctcaatctggctacgatcgaatatgtgcggccgggacatacggtcagcagtgacgatccttcgtcagcagagctgcagcagctgataacgaaagtgcagaggcaggggtcgttaggcatcaagctgctgggcgggcattatccgctgacggtggcagcaacggccagagcgatcagggctgcggcagagctgggagcttatacggcttttcacgccgggacagccgctcatggttccaatatcgaaggcatgctggaggcggtggagctggccgacggcaaccctctgcatttagcgcatatcaatgcttactgccgtggtacggtactgccggaggcggaagaaacggagctggcccttaaagctttggcggccaatcctaatatttcctgcgagtcttatttatcaccgctcaacggtacaagcgctgaaatcattgacggtctgccgggcagtatggttacccgccgctgcctgaaaaccggcggctttacggaggatgaggcgggcatggaggaggcgcttttgtctggctgggcgcaggtcaattatccgcagggacaggaaatgactttgctgacaggtgaggcggccagggattattggcgcgggcagcaaacgctggtttccgtcagttttgcggtcaatcctgttgggccgcgggtgcggctggcaacggcgaaaaaggctgacggcagttttgctgtagacgctgtcagtactgacggcggcggtattccacgcaatgtactgctgcctgctggtctggctttggtcgatctgggcgggctgtcgctgcaggagctggtggcgaagatcagctatcagccggcgcggctgcttggtcttgcaaataagggcagcctgacagcagggcgggatgccgatattacgatcgtcgacaggctgcagcgcagcgcgtttgccacgatcatcggcgggcaggtctgttatatggacggtaaggttttagggcgcggcggcaggatcattactactgccgcaggggcggactatgtactcagccaggggctggagccgctggtcgttgacctggctgacagcagtttgatgcagaagacgcaaaaaagatgacaataaaaataaaccacctgatcgctcttgcagtcaggtggtttatttattagactggggttactttgtatggccgccataaattatacaggggcagcagataaagataaaaggcaaacaggatcgaagcgttgccggcgcctacggtggcgagcggtacagcgcaggcgatcgaccaggggatgagcgccgctactacgatagtgctgttttccaggtccagggccagctgctgcatattgtcagcgctgtccttgtgcagctgataggtgaggatgctgctgagggtctggttgcaggttgccatacttgtgatggtggctgtaagcaaaatgctgccgtacggcgttattttttctccaagctgtgcaaggcgggcctgcgtagtattcaaaaagcctgttgcttcaaaaatcccggcgtaagcggaggaaaggataattatgacgctgacggtgaacatggaaatgataccgccgccgctgaggatctgggccagctgctgatcagcagggtaaaagccgtagaacatgatcgagccaagttgggcgggagtgatatcctgaaggaaaaggcagagcagactgccggtaatgatgctggctgccatcgtcagcctgacattgaccttgtacaatgaaagaacgatgatcagcagcgctggaatagtggtagtccagtgcagatcgaagttttgcggaaagagtgagtacaggtcggctgtgccggtgttgccggtaccggaaaatcccagcagggcgtaaagctggcaggtgactgaaaaaggcagcagcgttgatttgaacatatttttgatattacagtaaatatcagtctgcgtcagttcgctgatcagaagggcgctggtcgacatcggtgaacagcggtcgccgaaatagatgcctgataagatagcgccgccggtaaaggtgggatcgataccattggctttggcgatagacatacagatgatgccgatcgtggccgcagtaccgaaagaggttcctgttaaaagtgaaatgaaacaacagagcagaaaaactatcaaaatgaataccgatggtatgagcaggcccgacatatggtaaataatgaacggtatcgtgccgcaggcccgccagacggcggtgatcataccgataaggataaagatgaagaggatatttttgatcgtgcggattcctcgtccggacattgtcagtacctgtaccggcgtatgtccctgccggagggcgtaaccgaaaaacatcagatagccgaaaagcagggcccagagaatggagtagcctgccagaatgcagctgagcagtataaaggaaaagatcacgatgataatagcttccataaaatttctcctgcggcagaacgccgtaattttttagaggtcagtcagtaataatactattatcatactgcttgctgcgctgcttgtctaataataaataaggcgcctggcaaatatttgcccggcgccttatttattattattatatttcttccagaatctgaccgccggtgctgatggtgacgacctgccaggggatgattttaccgctttgctgcagcgctgttctgaccgcctgttccataccgccgcagcagggtacttccatgcggacgacggtaacgcttttgatatcgtttgcaagcaggatctcagtcagcttgcggctgtaatcttcgttgtccagcttgggacagccgataagcgtgatatggttttttatgaatttacggtggaaatcgccgtatgcgaaggcggtacagtcggcggcaaccagcagcctgctgttttgcaggtagggtgcgtgcgggttgaccagcttgatctggacaggccattgctgcagctcgctgttttggggcgtggctgcctgctgcgctggtgcaggttcctgctgatgcagtaaacgggcctgtgtgccggggcagccgcagggaagttcagcttcctggctggctttattggccaaaacggcagcttcgtcataggctgcggcttcacgtacttcaaaggttatggcattggtagggcaaacgggcaggcagtcgcccaggccgtcgcagtaatcgtctcgcagcagggctgccttgccgtccaccatgcctatggcctgttcgtggcaggcctgggcgcagagaccgcagccgttacatttttcctgatctatagtgattattttgcgtaacatgatgaacctcctgttgtctttctgtttttattatagtacgatagtaggaagaaagctgttgtttttacaacggaggtaaagaagaatggataaatatttgcagatcatagcgtcggcatctttgttccgcggtattgcgaaaacagagatcgcggcagtgctgcagaatctggatgcgcagctgagggtctatccccggaacagctttatctggcagctgggcgagcaggtaacgacagctggttttgtcgttgccggcagcgtgcatatcctgcgcgaggattactgggggcggcagaatattctggcgcagctgggctgcgggcatctgttcggcgaggtctatgcctgtctgcggcaggtgccgctgacggtgagtgtggccgcgcctaatggagctacggtgatttttctggacattaaacgtctgctggcgggttcggctcgcagcgaagctgaaaacaggctactgcataatctgcttctgctgatggcggagcgcaatctgtttctgactcagaaaatggaatatctgacgaagcggacgacgcgggaaaagctgctggcgtacctttcagaacaggcgcgcctgcagcagagcaataagctgacgataccctttaacaggcagcagctggccgattttctggcggtagaccgcagcgcgatgtcaggtgagctcagtaagatgcaggcggacggactgatcaggtataaaaagaataattttgagcttttacaaaaataaaaccagccgcttcaagcggctggttttgcttatactgttattacatataaaggaattgcagacaggtggcaaataaagctgccgttaaaatcttgatgactgcgccgataatggctgccgtcatggcctcgcgttcggtaaggtcggtacagccgctccagatagcggggatctgcccgaagatgacctgcagcgggaagccggaggaagccaggatatacgagccgacgaccagcggcggggtgattgtggcggcaatttccttcagctgggccattgccagcgacccgccgactaaaatagaaacggaaccggtttcggcatggatgttgaaggcattgagcatggtattgataccggcctgaatgccggtccacagaccgaaatggtctaaagcgccgattgccgcaaaaactacggcacaggagggaatgatgagcaaaaacaacagctcagcgccttccttggccgcattgaagatggtcggcagaaaaccggtttcaggtgtgaagcggggcaagtcttcaagcgagacagctttggtgtcgcgccagatagtgagccgcagaagcagcggcgtcaaaagcaccggcaggaacaccgccagaaaaacgacgacccagacggaaaccttggcggcgttcaaagcaatcaggccgaaaacgaagatcgcaaaggaggactgcgactgcatcatggtagcgatagcgattttctgctcgtctttggtggctttggattttttgaggatcgggccgccgatacggccggcagcgttgatatcgccgagaatattatatacggacggtacggctacagcggcgttgacaccgatgaccttcatcaggggcacgaaaatacgcatcagggcgtcggtaaagccaaggcgttccagcaggcgtcccatggtaacgctgatgatgatcgcgataccgatggaacctgtgatatagaccttgatgataataggggcggcatggttgaacatattgttgaacaggttcccgataccgccggggttaactaccagcatcaaaaaggaaaaggcgactaaaaacaggcctacgtattcgatcagttcgatctttctttttccaccattcatcataaacccctccgttattctgtttttggcttaggcagataattgcgcgccatggtttcgccgtagttttcgatgtgggtgcagccgcagtggtccagcggcaggcttaccatacgttcgcggaagatgtggatatccagctcggggatctgcagacgcagggcccaggccagggggattccgttttctaagatctccagcgcgtgagagttgcctgcgatcaggttcaggcccagttcttcggcttttttgaccagcgggtcgccgggcagcggtctgctgatcgtgcagactacggtgttggcttcggggtattcggcgtaggctttttcaaggtcctcggccgagaaaccggtatgcgggaaaacagtgatggttttgcccagcttgttgtcggggctgccgacaaagattttggcgcgggctgcgatcgaggtttcgtggatctcggtacagccgcggatctgacgttcagaggtgagcacgcgtgattcgatatcagtgcccatgatcgtgtcgatacggttgagcaggtcgcccagtgtttctacttccggcagggcgttgccataccagacgatcttaccggggacaccgccaaagcggatgttgacgtgtttggcgcagctgccgtggatccaggcgataccgggatgcaggccgtgaaaggcttcgtgcagctcaaaaacagccagatgatacagattaaagtaatctctggcggtaacgccgccggtattggagccttccgcgattgggtgatgggcgataaggcagtcgatgcctgttgcgccggccagttcaatggcgctttcagtcagggtcatcataaccgctacttttttgacgggcatatctggatcgccccagacgagaccgggcagttcggtcacagctttgccggggataccggaggtcttggtaactacaaaggggttagcgccgccgtaaccgaaggagtcggtgatgacgcggccgccggtaataacgtcgagggctttgaggatatcgcgtacagttgccatcagattatcacatctttcttataagtttgagaaaatattggtgcagcctgccgcttcgacacgggccttgatagcgtcatcgtcggtgctgtaaagatttttggcctgcattcgttcaaaataaactgagccggagaaggtgtattttttattgcgtgtctcggcgtccaacatttgcttgacaacgtagccgataaattcgccgatagctgtggtttcaggcaggatgactggcgccagaccgttggcggctctggcggcgttatgcccggccagcgagccgctgacgatagcttccgtatggcctaccattgctccggcacgttcgccgccacagaaaaggttggttttgccgtcagcctttaaggaagcatcgacatgggcgaaattaaagtaacgcatagagttgcctttgccgccggacagtgggtcttcgaagcgggcccgttcaaagccggggatcatacgcagctcttccagcggataataaggcgtcatcagcttggctgagccggtgtccagcagaacgatgttgtcggcataagcgtcgagcgcatactgctggcaggctttcatagccagcttttctttatgctttttgattgcttcggggatcgggactacgcagcagcctgtcttttccagctcggtaacgatctcaggggccagtgattctttgaacagcttacaggagccgctcatggcgccgagaccggtaggcttttctgctgtccattcttccacgccggactgggtggtgacgctgacgcgggggccgaagctgtggcagcgcaggatacacatggcgcagccgttgccgtgtttattgcagttgagcggcatagccgaagaaccgctgacatctacgaaagcgtcggcagtaaggcgcaggccgcttttggtaataacggcggtgatcgtgtcgccttcgtattccgttttaacggccggatcagccatcagtagcttgatgccgcggctcaggagcagttttttgaccgcgggctcgattttatagatattgtaaagagtagcgtgtttatgaccgggaaaatccatgtttttgtgagttgcaacggcttccataactgtaaacaggtcgcctgcgcccatggcgatacattcttcggcggcagtatagcggccgttgttgcggaaaatcccgccgaccagccctgtgcctaaaagcatatcggtacgctcgagcagagttacgtcggcaccggctttttcagcagtaagagctgcggcacagccggcccagcctccgccgataacgacggtttttttcttggtcatcctgattcctccaaacggggtagatttttatttaattatacccctttagtataacaaattaataattaaagagtaaagcacataaagtatgtatacatataaaaaattgcaggctgtactggcgcggccggttgtggtaaaataaacgaataaaaacagttcttgctggtggagggatcaaggtgaccaagtataagaaaaatggtaaaaaactgggtgtgctgggaggaatggggcctgctgcggcggcagagttcctgcggcagctggcggcaaagtgtccggcggcaacagatcaggagcaccctgtggtatatatgatcggggattgtgagatacctgaccgcagcacagcgatcttcggcaaaggcgaaagtccggcgccggttctggaagcgcggctgcgccagctgtgtgatatgggggcagaggtactggcggtgccctgcaatacggcccattattttattgatgattttaaagctgctctgccgcagccgttagtgcatatcattgaagaaactgtcctggcggcccagcggctcaatcctgaaggcgcctggatgctgtcgacgcatggtacgcgcgccagcggtctgtatcagaaatatgccgataaacacggttataccttatatctgcccaatgaggagcaggctgaaaaagcgcagcaggctatcttttatgtcaaagccggcgagcttgaccgggcaggcgctgtgactaaagctctcgtagaagaactgtggcgcgagcgtgaccttccggtgatgacggcctgtaccgagctgccgttaggatacgcggcttccggcctgccgctggacagagaggtttccagtatcggggctctggtcgatgcctgcatcaggatgctgtatgatgaagtaaaataagcataaagaaaaggactatctcgatgagatagtcctttatttttgttttaccagcgcctgctggaaccgccgccgccgccggagcctcctccgaaaccgccgccaccgcctccgcgtcctccgccgcgcaaaagtgcgagcaggatgaactgagtgatgatgccgccgaagaacatatggtcaacgatgacgagtacgatcaggccgactgcgatcagtgccttcatccagccaggcatcggcgtatcgcctgtgccctgctgggcgccgccgttataacgcacaccttccagcttgacatcataacttttggctacggtagttgcgacagtcagatagccctgcacgatgcctttttcgtactggccctgtttaaagtagggcagcatctgctggtcctggatccgtcccgtcaggccgtcgggcagaacgccttccaaaccgtaaccgacttcgatccgcgattgtctgtcatcgacagctactaagatcagcgcgccgttattcttttctttattaccaagtccccattgccgcagcagtgtcagtccatattcgtcaatgggctggccgtcaagtgttttcaccgtaactacggcgacctgtgcggtggttttattatccagatcctgtccgatggcattaagggcctgacgggtctgcggtgataaaacaccggcatagtcctgcacgtagatgccggaggacacgcttggcttaggtggtacctggatcgccgcttctgccccgacggcaaagaccgcctggatcagaagcatcaaaaggacgagccaacgtttcataatcagtgagctccgttatcggttaaaattgtacttgcggaacagtttttgcgctttcgtctgctttaaagtaatcacgtgcgtcaaaaccgaacataccggcataaagaacagtcgggaaggatttgatcttggcgttgaagccctgaactgcgccgttgtaatccatacgggctacggcaatgcggttttccgtaccggccagctcgtcctgcagctgcaggaagttggtgttggctttcaggtcaggatagttttctgcgatcatcagcaggcgggaaagagcgctgctcaattcgccgttggcctggctggtttcggcaaccgtcttggcgccgcctaatttagcgcgggcatcggatacagctttaaaaacgtcgctttcgtgggcagcatagcctttaacggtattgaccagattggggatcaggtcgttacggcgctggagctggttttcgacctgcgaccatttgccgttgacgttttcattcatggaaacaaggctgttgtagccgctcataataatgccggcgaaaataacaacgacggcgataataatcattaaagttttgttcattttttattctgcctccaaagttttttttacttaatgcttatcttccattgtaactaaagcgggggctgctgtcaaatagcgcagcgcctgaaaatgtaaaatatctgtgttattatgtatttgttttataatattgccgtggatataattaaagcagagagtttgcccgcatattccttgtgatataatgttgttagcagatcattaaagaaggcggtgttgacgtgggtgcacttgacggtatcaggatcctggatttgtcgcggcttttgccgggaccgtattgcagtatgcttttggcggacttcggagcggaagtaataaaaatcgaagagccggggcgcggcgattattcgcgcagcttcccgccatttcaaaacgggttcgggtactggcatttgcagctgaaccgcaataaaaaaagcgttgcgctggatttaaaaagcgacgccggcagagcggcctttttaaaattggtgcagacggcggacgtagtcttggaaagctatcggcccggcgttttaaagcgtttaggtattgattatgagaccgtgagcaggctgaatcccaaaatagtttattgcgcgatcacaggctatggcaagcgggggcctttggtcgaccaggctgaccacgatatcggctatgtgagcctggcgggcatcacgtcgatgagcggcgaacccggaggcaggccggcgataccgggtattctgatggcggatatgaatgcggcgctgatggcgggcatgagtatcctgatggctgtgcgccatgccgagcagaccgggaccggacaggaaatagacatctcgctgtataatacggcgctgaccctgatgcccggcgccgccagtttatatttcggcagcggtttcgttgccgaacgcggcaataactggctgaccggtgcatatgccaactataatatctacgaaacgcgggacggccgttatgtttcggtagggtgcctggagaaaaaattctggagcaacctttgccgggccttagaccgcgccgaccttatcgatgccctggacgatgaagcgcagcatgagcgcgttaaggacgagctgaccgggattttcaggactaaaaccatgcaggagtggacggcttgtttggaggggaaggatacctgcgtaacgccggtactgaattttgacgaagccttggctgcggagcagaccagtgcgaatgcaatggtgctgacggtagaagatgaagagatcggcacttataagcagctgggctttgccatgaaaatgtcggcaacgccgggaacgctgcaaaaacgggcgcccaggctgggcgaggatacggaagccgttttgcgcggctgcggtttgagcgaggctgagctggaaatgctgacaaaagaataaaggcagaaaaaactaattttttatttatgaaggatttatgttctatatataatatatgttataatattatatatagaatattttttttgcttaaaaatatcgttcgctatgtaataacatagtggcttttatttttgttcaccaaaagacagtcgttgtaattattttggcgccatgatcaaagcggagcggggatcagccttcgtatatatatggcagtaagtcactaaggagctgagctaaaatgccgtggaaaaggtctttaaacagtttggcaatgctgatgcttatgagcagcagcattgccaacgcgcaaagtgccgacagttttaaaacagctgaatataatgagatgggctataatgtgctggatgcagtgaatgcggcgtcggcttatgccaatggctatacaggaaaaggcgttattgtgggtgtctgtgatgatcctattaattttttggttcctgaatttgatttaaaacaaaattctgagatgatcaatgttgctggtgccggagtatataattgggcgaattttactcatggtactcatgtggctggtgtcgtggccgcatctaaaaacggcctgggtatgcatggcattgcttttgatgccgagatcaagggctctactgccggtaggatttattacagtgacggttcgtttgagagccgcaaggacctttatgtttattatgtgcagcatccggaaatcaaggttatcaataattcctggggaactgggtgctatttgacgaacatcgatgataatcaggcttatgagctggtgcagagtggcgttcttactcctacaggcaacccggaatggcaggattatctttataataataccatacagttcagagaagcggttgcccatgataagcttttagtatgggctgctggcaacaacggtcacactatggcgagtatagaaaataccagccctgtttttgaccgaagcctgagcaacaattttattactgttaccgcaggcgatgctgcggcgctgcaccgtaataagacgggcggttttgacgcagactgcaacgctatcgcaattttctctgatctggctcaatatagagaggactgtgttttaaacgcaccgggtgttgcgattgtttccgctaatgctgactttgcggctgctggtcaaatggatgtgattaggtatggtacgtctcaggccgctccgctggtaacaggtgtgggagctttagtccagcaggcgtttccctatcttggcggcaaacagataggggatgtgctgttgagcacggcaaataatcagattgtggtgacggatggttttttcataaatgtacaggaggatccaggagaaggagataataagtcagagctcaaaataaatatttttgttcctcctggtggagccgcgccggatattgctgaagcattagatacagcctacaaaaaaaacgaagatcttttttggggattttatggtataaaattatcagatgataaaacagatggtaaaaaaaagctgcacagtgaactggatgcaaatgtggaaattgatgtttttaaagatgtaccggtggaggcactgttcggacagggcatagttgatgccgggaaagctgttggaggacttggggcgatcaatgtcaggcggctgagtgccggcgatatcagcgatgcttatacggtacgtggaaaagctgaaaagcaggccttatacagcgtgaatactcagggctatgattctgtctggagtaatgatatcaaagaaatacgcgcaggttatattgccgctgatccgctcggttcaggaaaatctgctgattcaacaggagctgacagcgatgtcaaagatctgtacgatcgctggctgtactatcaaaccaactggctgaaaaatcccgaaggtgttaaagacaacaacagttatatggttgagcgatatatcacagatttcaacaagcaaattgcagacaccgaactggtaggattgcacgccgggctgataaaacagggggagggtattctgaatctgaccggcagcaatacctatcagggcagttctatcgcagtacagggcacgctgcaaatagacggttctgtggccggcgatgcttatagtacaggcagtggtacgattacaggcaaaggcacggtcaatggcagcttgtataacgatggcagagtgcaggccggcagttatggaagcatcgaaaatatgcaagttaggggcggcttcaacggcagtggtacgatattgctcaatacagacggtaaaaaatataattgtcttaatgtagacggcgatgcccatatcgaccggatggaggttaaagcggctaatagtgctgcccccgaagtcagcggcatatttattactgcgaatagcatagtttcagggagcagtacagaacaggagttttccgggatgctggatgcccaaatagtagtcgataataaagagggcaagcttactacttttgtcagtaataataccggcggcaacagcgctacctttgctgctttgaataatatgtatttttcgctggatagtgaccggcaaaaacagatgtacaggctgtatgccctggataaaactaatgctgcagccgctttttcgcaaatagaaaatgggatgctgctggatctggcccatgatgccatgaaaaacggctctgtaatgagagcggtatatgagcagccggcattggcgcggcaggacggattgtggatgctgaataacaagcgctggggacgcattggcggcgtaaatgggcacggctataatttgaccattggcaaggattttctttccgatgaacatggatattatggtctgttgtttgattacggcagcaatactgtcagcggagctgcgggaagtggcgaatatgacagttattcattgggcttatatgctggaaataaaaacaaacccggcagtataacaggctttgtcagctatggtttacaggccaataagggtaccgcgtatctgccggtactggggcagaccgctgaaagcggctatgacagtaaaacgttggggataggcgttgagtatgcctatgatctggattatggaaagccggaagaattgtggcatgtcagtccttatgccaggatcaattttacccattataggcagaaggcctttagagagcatggtgcaggtgtttttgaccgcagttttggcagttatagtgataattatgccgaaggggagctgggcttatcctttgaccgcagtgagggtacgggcggttatggcattcgcctgggttataagcgtatcctgactggcgagcggcagcttatggaagtctgctttgctgaagatgaatgcgggtccctgctgccggtacgcagttggggagagggcaggaaccattttgtggcggcggcttatgtcaggcatgatttcagccgaaaatggtcggctggcggcagccttagcggggactggtctaatggtggacgggagatcggggcccggcttgacttggcttatcatttttgatttcttaataataaaaaagacaaagccactgtcacacttatcacagtgcggcagtggctttgttgcgtgagcaatcggcacatttacagtgcattttggggggatggctcagcgaacttggtatttaagttctttttccatcagagcgccgttttcagggttgaatttcatttcgccgcgtaattcgggtgtatagaatttcaactcatattcataaaggccgtcgtcgctgtcaagttttactttagtgaaggttgcgttggggaattctttgcgaacgaggtcctggacatcagcggcagatagtactactctggggctgccgagaactgtttgggaatccattttgaattcttttacagcgccgccgtttttgagcacttcaacttcatattcggtgttggtagcgttgtcgtagaattttacttcgtaataagctgcgtatttgtggctttcgtctttagttatcagatgagtgctgccggcaggtacccattgtgcagcgatgctgcgtgcctgatcggcgttgatgaactcagcggcaaaagcggttgctgtgattgctaatgtacagattgcggcggcgatgatcgccaggatttttctagtcatgttttttacctccttgcgccgttttctttattcggcgttttctttgtctttattataacgcggaaagattaaaagaagattaaaagaaaatttaataaaaatttattttaaaaacttattcgttaatttgcttttttattgtaaaattctagtagaaggcttattgaaaaataggaaagacaaggtctttttatgaaagaaaataaaaactggaaaaaacagatcgccttattcctgatcagccagaatctgtcgatgttcggttcgtcagtagtgggcttttcgatcgtctggtatattaccgtaacgactgagtccggattctggataacgctgtcgacgctggcaacgctgattcctcaggtgctggtttcattgtgggcgggagtatttgcggacagatataataaaaaaacgatcatcatgctggcggacggttttactgctttggcgacacttctggcttttgtggcttttcattatggttttgcaaatttaagctttttgatctttatcgcctgtctgcgttctgtcggcggcgggtttcaggctccggcagtcaacgcgctctatccggagattgtgccgcgggagcatctgctccggatcaacggtatcaaccagatggcgaataatgtgctgctgttgctttctccggcagccggcggcgctattttgggtatgtttgggatgcagtggacttttttagtagatctgctgacggcagttattgccattgccatcatgttcaggctgaaaatagtaacaagagcagcggacagatctgatagttcggtactgaaggaactgagggaaggtgtacgttacacctggtcacagccgctgttaagagtaatgctggtctgctatgcggtaacttttgttctgatcactccggcggcgtttttgtcaccgctgatggtagtaaggagcttcggcagtgaagtttggaaactgacggccaatgaaatgctgtggtcgctgggcgctcttttgggcggcgcgtttgtcgcctggaaaggcgagttcaaaaacaagattacgatgatagcggtctcgttggcagtgtttggctgcacctttgcgctgatgggactgtcgcgggtcttttgggtgtatctgatctttgattgcatctgcgggatgtttgtaccggtactgatagcgtctgagacagttttgatccagactaatacggaaaagggttatatggggcgtgtttttgcattgctgcagtttgtttcgcaggggatgatgccgattgctattcttggcttcggaccgctgagcgatcttgtcaggatagagtcgatcatgatcggctgcggcctgctgctgatatgttggagcctgtattttaaaaaggcggctggccgggcgctgtgcagtatttgactgttggcagggaaacagccttaggcttgtgctataataaaaataattgaggaggttgcggctatgagacttttatttgtggaagatgagcctgacctgcgtgaggtgctgaaaaagcagctgcagggaagcggttacagcgtcgatgcctgcggcgatggtctggaagctcttgattatttacagcttacagcctatgatgccgttattttagatattatgctgcccggagtcgatgggctgtcggtactgaaaaaaatgcgtgctgccggcgataaaacgccggtattgctgctgacggcgcggggcagtgttgaagaccgcgtcgccggtcttgatctgggggctgatgattatttagtcaaaccatttgcttttgatgagttggtggcgcgtttacgggtgctgctgcgccgcagcaatggacaggtgtcgaacgtgctgcagtgcggtggtctggaaatggatctgaacagccgccgcgtcagcagagacgggcgcgaattgcagctttccgctaaagaatttgctgttctggagtatttgctgcgcaatcagggcgtagtcttagcacgcgaaacaatcgaaaaccatgtttgggactatgattttgagggcggttccaatgtagtcgacgtatatatccgctatctgcggaaaaaagtagatgacgggtttgagaaaaaacttatccagacagtgcgcggcgccggctatgtgctgaaggagactttatgaaaaagctgtctgttaaaatgaaaataaccctgtggtatacagggttgatcgtgataattttgagtgctatttttacggctgttttgctggcaacagacaaggtgttgctgttgggtgtacagaacaagctggaagaagaggtatatgattttgccgaagaactgaagatcgacagcaatggccgtctgcgtctggagaaactggattttttaaaggacggggtcaggcttgctgtatatcacgagaatggtcagatgatcacgggccttgtggccagcggtctgccggaaacaccctttgcagacgagctgctgcagaaggctggaagtgaccagcaaaactggtttgtatatgacttttattttaaaccgcgtcatgctgataatttttactgggtacgtggaacggtaccgcttagttctgcatatgcggaacgggataagattttgcggcagtgcgcattgttttttccgctgctgatcctactggctgccctgggcggctactggatcactaaaaaggcttttcgtccggtaacacggatcacggaagcagccgcgcagatcagcagcggcagtgatctgtccaaaaggatcgaactggaaggcgctgatgatgagatcgatacgctggcgaaaacctttgacgggatgtttgccagacttgaggatgcttttgaagccgagcgacagtttaccgacgatgcttcccacgaattgcgaacaccgacctcggtgatcatcgcgcaggctgaatgtggtttacagtcgcctgatctggaaagcaagcagcaggcactgcagggagtgctgcagcaggccgggaaaatgtcgaagctggtcaatcagctgttgcagctgtctcgggcggacaggcataaagaaagcctgcatttggaagaatttgatttaagcgaactgaccgagatggtggcagaggaagcccaggggctggcagaatccaaagcggtcacgctgacggcagagatcgaaccgggaatcttagttaaagctgatcagactctgatgatgcgtatctggcttaacctgctgactaatgcggtaaagtatggcaggcagcaggggcagatctggcttactttaaagagtgacggtaaaaatgcggtcggtactgttcgcgatgatggcattgggatcagcgcagccgagctgccaaaaatctggaaacgtttttacagagtcaataccgcccgcagcagtggtgacgacagcggtaccggtttagggctggcgatggtgaaatggatggtcgaaagtcatggaggaacagtaagcgctgtcagtaccttaggggcaggcagtactttcagctttacgatcccgctgcggcctttgtaaaataaataggcaaacaaaaaagctcacttcgcaagaagtgagctttaatttctggtggccccggcaggattcgaacctgcgaccttttgattcgtagtcaaacgctctatccaactgagctacggagtcattgagattgcctaaatctttgggcaacgatgatattatatctgattgcagtgctgttgtcaacaacttttgttaaatttactgacaccatttttgcaggatgctatgaaactgctctaaatcgatcggtttactgagatgttcattcattcctgcctgcaaggtggcggcaatatcttcaggaaaagcgttggccgtcatcgcgacgataggcacagtttgggcatctttaacaggcagggcgcggatcgctttagccgcttccaggccattcataacgggcatttggatatccatcaatatcagggcataggtcccgggaggtgcggctttaaatttatccagcccttccagaccgtttttggcggtggtgatattcagtccggcatattttaatagttctacagctatttccagattaagttcattgtcttcaacaaggaggacttgtttgccacggcagcttatttcctgcagactgtcgatgccggcggcaggcgctgaagccttgctgctgcgtatttgctggtgcgggcgcaggtaaaccgtagccttaaaggccgagcctttgcctaaggtgctttggacatcgattgtgccgttcatcatacgggcgatgttgagggcgatggtcattcccagccctgtaccttctatttcgctggttcgcgaatcggacgcacgggcgaatggttcaaaaattttggcggcgaattcagagtccataccgatgccgttatctgtaataataaattcgtagccaatagtatcgtggagccgggagtgtgtttcgcgtacctctaaagaaatactgccatatggaggcgtatatttgatggcattggctaagatattgagcagcagctgtttcaagcgcagcttatcgcccagaacattatcgcgcagttccggtgccttagtcagagtgaaatgatgttttttaactaaaagctgcggattgatcaaatcaagcaattcctgcagcattgcactgatagaaaaatgttcctccagaagattgagcttgccgctttcgattttagccatatcaagcacttcgttgatcaggttcaaaagatgattgctggcagtagttattttggcaagacaatcctggatacggtctttgtcgtccagatatttaccagcaatggcagtcatccccataatggcgttcatcggggtacggatatcatggctcatacgcgaaagaaattcatttttagccatattggcagctttagcggcgtcaaaggcctcctgcaaagcctgctgttcccgcagttccttcaatttatcctcgtggatatcgcgcagggtaagaatgatctgatgataaccgtcactttgagccagcaaggtcgaattaaaggcggtccagcgatattcggaaccaaaaaggcggctgcggcattccagggcaaaatcgatatgacggtcctttttttgcctgcgcagaccggacagagagaaatgttctagaatcttggcgctgtcatcaggatgaaaatggctgcgcaccagcggttcgatatcatacaggccgttggtactgtagcttgtaaaaacagcgcactctgtttccggcaggcgcagagggataccggaaccgtcttcaagattaacaagatatatgaaatagtaattagagttgatgcttgaaagcaggtcataatactgctgtttggtgcggcgttcgtgattcagctcgctttggcgggcttcttcatcttttgttatatccagataaatactgttgatgatcgtattgccctcaggagtttttgttttacggccgctgtccatgacccatttcaggctgccgtctttacagggcacgcggtattttgtcgagtaagtaggatttccgtccttaaaacattcgttgcagtcagccaaagccctgggcagatccggcggatagaccattcccatagcgttgttgccggtaaattttttgaattcttccatagtataaccaaacataccaggcagctcttcgctgatataggcataagaataggtatcgtcgtcattgctggatttgacgccgccgttgacagaatgcagtacgacttccatttgctgctgcttttgctgcagttgttctttggctttgttaagctctgcttccatatatttataagtctgcgagcctacctgaaaaggaaagttttctgtaccctgcaattcctgatagggatgggaaagattgatgtagacatagctgaaatcactgcccagatcgcgtatgacgatcgttgcccgctgatgtgtctgaacgagcagctgctgatcctcgtcggaggtaagataatgacgcccttgggcaagatagaggccttgtgccagcgggaggatagtccattcttcattcaataattcacaggcgggaatctgcccttccagtgaaagaataaaatctttggctgcctgtggtgtatcataataattgtgctcagcggcaccgataccgattagctgcgggtcgagatgagcgaggataaagggaatgtcctgctgacaaagcagcttaaagatatattggtgtgcaaaattttttattgctgtaagtttttcctgaggtatattcaacataatgccctccgcttatttacggtccagtctttaggataaaatagatatttaattttattatagcattattttcaagctttaatattaaaaatattaaagaaaagcaaaaatgggagcgggaaagttgctggtatcggacaggcatgtcggtgccagaaggcaataaaaaaacgcattccggaaaggaatgcgtcaatggcaatggtggccccggcaggattcgaacctgcgaccttttgattcgtagtcaaacgctctatccaactgagctacggagtcattgaagctgcttggattactaagcaacgatattattatatatgattctggaaaaatgtcaactgctttttttaatattgtcagaggcgtttatcaggggcgaaggcctttaaaagcaacgcgcagccttttttgcagactgctttctgaggaaacgtcaataagttttagtttatccatcagcggttcgtttttatgctgctgtaagatattatttttgataattatcggctggatcagtatactctgcaaagtcgtgtagatttcataactgttcatatcgctgcagatatcgccttcacgctgggcctgttcgataagtgtgcggacgaagataaaatgctggacgcggtagtttgtgaaataggaggcagctttgctgtgatataaggcttcagtcagaaagtttgccgtattgaagttttcgataaaatattttgtcatacggtagaagatctgctgcagctggatagcggctttggcatccttttcaggataatcctgcaatttggaaagataatcttcgtaaattttttgaaaaaggactttcatatattcttctttaaaaccaaagtagtaaacaaacataccctggttaacgtttgctaaagtacaaatagcgcgtacagtcgggtcgtaattaccctgagcaattaattctatgcccgccttaattaaggcctgatctgtgttgcgtgatttcctgccgatgataatcatctcccttaggttctaatattcacaaataaattgttaaaattaataattataatcaaagacacagtaaaacaaacacaattaattatatcactgtataaattattgtgcaaggattcttttatatgaaaaagcaataggtgttgtctacaaaaacaaatgtgcatattatattcctgtacagcagttttgtgtgaaattgtgtaagttctgcttgactttaatgtaaactttgcgtacaataaagttactctttggccgtccacaatagcgggcgttttttattgccgaaaaatcgggagggatatttttatgtcagtttctttagcgatactgatactttacatcatagcattgttcggtatcagttggtttgctaaaaagcgcagcgaaggcaatgcggaaaattatgcgctggcaggccgcagattatcggcgccgcttatcgcggtcacgatcatcggtctggctgttggcggggcttcgacgatcggtgtttcagagcatgctttcagggtcggtttatctgccggctggtatactattgcctgggcaataggcgctatcgtgatgggtatttttatggcgaagaaataccgcgagcaaaacatcactactatttctgaacttatcgaacgacatcatggcacgaatgccgttattttgggcgtgttctgccaaatcgttatccaattggtaattatttcactgcaatatatcgccggcggcagtatcctgcatgctatcatgccagaggtttttgattttaaaacaggtatgctggtcagcgcgattacttttatcagtatcacctttatcggcggtatgtggtcggcttcattgacaaatgttctaaacattattttgatttattttgggatcgtggcagctacctttatccagctggataaggttggcggcattgatactctggccaagacactgcccgctaacgtcccttggttcagctttaccgaaggggttgggctgaaaacgattgccagctgggtaattactttggttacagtgaatttgtcgctgcagagtattctgcagatttcactgggtgctaaagatgccgctactgcaagaaaaggctttgtctggggcggtattatcatgcttccggtaggcgttttggcggcactgctgggtatttgtgccaaatccatgtatcctgacgctcaggcagctttggctttgccgcaggtcattgtcgggctgcagcctgtactggcgggcgttactctggctgctttgtgggcggccgatgtttcaactgcctgtaacctgctgctttcagcgggtactctgttttccaacgatatttataaacgttttatcaaccctaaatgttcagatgccaagcagctgacgatgatgcgtctgtgcattgtgatctccggcgtactgacgctgggtatggcgatgggtgtttccagcattttgggaacgatcatgattggtctcagcctgacggctgctttcagtgttattgttattgtggcgttgtttttcccgcagtacagctgtaaggctgccggtttctggacactgctggtcggttttatcatgctggtattgtggcagtttgtaccggcagtacgtattttcccgaatgttatttatatggaatggtttgcctgcattttgacttacgccgttgtagctgtgctgcagccgggtaaaaagcttgcggcagatacagccgaataattttttaaaaaaggacgctgcggcgtcctttttttttgcaggatttatcgcaaattcagctaattttaatatgggtatggtataagttgccagagaggtgaacgcaatgaaaatactgttagctgaagatgataaaaatctgggacgactactgcagaatctgctgaaaaaggaaaatatcaaaactgactgggtggaagacggcgaggctgcttatgagcagtgttatcgtgacggctatgatgttttgattttggattggatgatgccgaagcttgatggcatagctttgtgtaaacgtctgcgtgcagaagaataccagggcaaaattttgctgctgacagctcgtgacagtgtggaagataaggtggccggccttaacgaaggcgccgatgattatttggtcaagccgtttgaaatggccgagctgttggccaggctgcatgccttggtgcgccgtcagggcagctacaagcaggaggattatgtctgtaaaggtgttaccttagccgttaaagactatactgtaggctataaaaacaagaagatacagctgcgcccacgtgagtttaagctgatggaactgttattgatcaatgcagggcagattttgccgagggagctgcttttggaacgtgtctggggtatagacggcgatgttaccgaaaataatctggatgtgcatatccgttcgctgcgattgaaattggcgtctatcggagcagaaagcctgatcaagactgttcgtggtgtcggttatatgttagaggtagaggatgtttgataaattacgtttaaagctcaccattatttatacaggtattttttccctgctagtagtaatgatcgttacaggctgcattattctgttgggtcattctgtgctgacgcatgaaaagcaggagatgcgcgaactgatcatccatgaaggtgaggagtttgtagcaagcggtgaattgccggtgtccaagcactctattgaagtcggcagggaattggcttatatgctgcagccgggttcggatgtgctgctgcacgatcaggtcagcggcagtcccgttggtcaacaattactggcactgcgcagtgagtggccgcagcatgacagaaaagtaaaatgggtaactttgcgcgatgcaaatgaccggctgtggatctaccttattgggagggatcagatactggacggaaatgccagtgttgcaactttatatatgtttaaggatttgagcgactattattatgaagaaaagggcgagatcctctggcttgttctgatgagcctgttttttatctgctgcggagccggcgtcggttattacctggcagggcgtagtattaagccgatcagggaaatgtttaaacgtcagcgtgaatttgttgccgatgcttcacatgaactgcggactccgcttacagtaatggggatagccgcagagggtatggaaggggatacggacagtaattttagtgaatttactgtcgatactctgaaaacaatgcgcatagaaataaaacggatgaataatctggttgcagcgttgctgtcactggcccgcaatgacgctggcgccggtgatcttaaactggagcaggtcaattttaacgtgctgtttgagcagacacttggtactttaagtatgctggcagaacagaagggcttaaagctggagcagcggctggcacaggaacgtttgatcatttggggcgaccggatgcgtttggaacagctgctgacgattttagttgataatgctatcaagtattcggctagagggacggtcacagtcagtgcactgcggcaaaaccgccagcttgttatcatggtcgaggatgaaggcattggcattgatacccaagatatcgagcggatttttgaaagattttaccgggtcgataaagcaaggacgcgtgctgaaggcggttttggcttaggattgccgattgccaagctgatcgttgagcagcatcatgggacgattgaagttgagagtaaaaaaaatggcggcagcagctttattgtcaagctgccattaacggtacaatattaaaaataacaactccttgtttcaggttattttcagccgcattttttatgataaggctgaaataaaggcaaggagttgttttttatgagcaggaaaagttggactgttttttggctggctgcattattgctattatttgtgtttaacggatctttactgatcacagactcggtagagtcaaattacgcgctgaccgctaaggagatggtggtatcgggagactggctgtcgccgcagatttacggacaatattggtttgataaaccggtgtttttttactggctgacggcattggggttcaaaatattcggctttaccgaattcgctgcccgtttctttccgtcctgttttggtttggcaggtctggggctgcttatctggggcgcaaaaaaactttttgatgataaaactgctttttacagtggtttagtgcttttaacatcagttgaatttttcctgatcagcaaatcagtcatcactgatgcgatcttatttttctttttcagcgcggtcttgcttttcttttatttgggctacagtacgccgcagaaaaagtattattacgtgatgtatgccggcgccgctttggcaacgctgaccaaagggccaatcggttttttgctgccggggcttatcatatttctgtttctggctgttactaaaagctggcaggaattgaaacaaatgaagctctgcagcggtactttgctgtttctgatcatagggctgccctggtatctggccatgatcagtttacatggcgatgcttttacaaaaacttttttgggaacgcataacttgctgcgggctactgtttccgaacacccccgtgacaatgtcatttattattatactcttgtaaatattctggctttgtttccctggagcgggtttctgccgcagtgtctgtggcagaaattcagaaaacagggaagctggcagcggcctgatgatttaactgtgtttctgttgctctgggcggctatagtgtttgttttttttcagaatatggctacaaagtatatcacttatacatacccgcttttgtttccggcagcgttactgttaggccgttacttggcggtcaaaggttccagagtgttcagccgcggctatttgctgttccacggattattttacgctgttttagccggagcagtttattggtgccgttttaagggcatagctccggtacaggatgaatttttagtgttgctgacagcactggcaggccttgggctggtgtatgctgttaaaagctgtaataaaaaatatctgacggcagctgttgccgcaatggctctgtttttcaatctggcgctgattcccacggtggcagtgccgttgagcggcctgcgttcaggcaagcagctggcactgcagctgcagaacaagtatcctgagaaggctgaaatcggattgtatggcgaatatccgacatcagcggtattttattccgggaagaaactggtaaaattattgccgcaggacgagatcgaaggcttcaaacctaaagccttcagctggagcagtaaaaacgttatgccctatgccgagctgaaaagctatgcaggggtaaaagataacgtggtcgttgtgcagagaaaagccttacagggctttatggacaatgccgatacctatttgctgctggccggagaaaataaaggctggtatattgtgcagggatagaatattttgtactctggctgaggccagagtatttttttgtaaaaaaattaccgctacggcagggaaaagagtttttgtggctaatatagtatttagtggaattataagcatttccgaaaagaaggtgcggattatgtcaaaaaaagcaaatcaaaaagcaaagttgctgtatctgcagcagattctgcttgaagaaactgacgaaaagcatgtacttacagtacagcagctgatcgaaagattggcagagctggaaatacctgccgaacggaaaagcttgtatgacgatatcgctacactgcaggcttttggcttggatgttattgctacacgcagcagagccaatatttatagaattggcagcaggctttttacgctgtctgagctgcagctgctggcagaagcagtggttaaatcttctgctattacccaaaataaggcccagaagctggtagacaagctggctcggttagccagcatgtatcaggccgaaacattgagagaaaacttgaaagcacagaaatatgatgatgctgagttgttatgtcccgttgaattacgctgcagtaacgaaatagtgccggtcgtgctggaatatctggctgacagtaaagtgaaaaaaagtaaggaagaaacaagtgtcatcgaaggtactgccgttgttgaccaggctttttacggctggatgttcggctttggaaataaagttaaagtgacggagcctgcaaatgtcaaaaaagattttgtcaaatattgtaaaaaagttctgaatcaatacaaataatctaggagtgtattatgcaagcaataaaattccctgttcccaatagaagtgaatatatcccttccccctacgaaccggatgctgacggtgtgcttgatatcggctattacaaaggctcgatcattggcggcaggccctacgtcctggaatgctggcagatggacgagctggtagtagcgacagtctttttttcagacgaggggctggatgcctatagtcgtgaggatttggttctgcttttggaattggaagatatcattaaatttattggcgggaagcggttgtttcagtgtacgcatactgaggatgatgctggaatgcctatgtgggctgttaacattactctgcagaatgccaagggtaaatatgcagaggttctgtgtcctttacgcagatatagataaatcagtatcaggggaggtatgaaaatggtgaattgcaacgaagccaactgtacctgtaaaatggtgaactgtgtgcgtcatggcaagtgctgcgagtgtatcaatcatcatcgtgaaaaaggatctttggtagcctgtatgaaagccgttgctgaagccgtaaaaaaataaagtcgtgctatacggcacgactttattttcagtgttctgcggacaaagagaaaaccgttcgctggggatggtagcgaacggtttctccataggaaagctgtttatgatgaatttgatgggaagggtgtagcaagttcatcacttgctatgctttaagtatacaacagacatttgacagaaaaagggcaaacctttgaacagtttgtgaaatgtaaaaatgaccggaggaagcggcaaatgaatgattttgtagcaagtttttttaagtttcaggagcgtaaaaccacttggcagcgtgagacgatcggaggaattacgtcctttgtgacgatggcgtatatcattttcgtcaatccgcagatcatggctgctgccggtatggataaaggtacggtaatgctggccacctgcctggctgcggctgcaggtacactgctgatggccttatatgccaatgctccttttgggttggctccgggaatggggattaatgccttctttgcctatactttatgcggggccatgggttatacctgggagcagggcttgggagcggtactgctgtcaggtattatttttgttgtggtttctgttaccggactgcgcagcaggatcatttcggaaataccgatgcatttgaaaaaagcgatcggcatcggtatagggatgttcattttgtacatcggtttaaaaaatgcatccttgcttagcttttcagccaatccgggaagttttatcccgttgggtgacagcatgaaactggacagcagtatcattcctgcgctgacttttgccaatgattcagcgaagctggcattggtaggtatttttctgaatatcggttttttactgcgcgggacaagaggcgggatgctgctcagtattattattacttcgatattgggttgttatctgcagtttttcagcgactggcagttggggctgcatctgccaggtacaatgcctgttggtgatttgagtgaaacttttggcaagtgtctgagcggttttgtgcagctgttcgatatttctaagggagtcggagttatgattttttcattgttttcagtgatgatcacaatgacgatcgccgatatgtttgacacgatcggtactgtgctggcgactgcttcaagggctaatcttgttgatgaggatggcaatatcatcaatggcgaacggattttattggcagatgcgactgctaccgtgatgggagccttttttggaacatcgacggtaacgacttatgtcgagtctagcacaggtgtggcggcaggcgccaggacaggctttgcttctgttgtaacggcattattatttctgctgagcgtatctctggcgccgctgctgggtatggtgcctgctgcggctactgctccggtgctgatcatggtcggtattatgatggcatcggatattggcgatattgactggcggaatctggaagttgccgtgcctgcgtattttacaatgatgattatgtgtttcggttataatatcgccgatggtattgcgatcggttttattatgttcagctttgttaaattggcagtaggcaaatggtcagaggtttcctggttggtgcgtggtttgagcgcgatgttcctgctgcgttttgtttttatgttattctattaaacaaaagaggccggctatatgccggcctctttttaatatgtgcatttttattttttactgcgttttttattagttatctgcggtacagcttcagtgtgtttttcacgccagccaaaatagaggaagaagcctaaagcgataaggaaaaaacaaaggctggtagcctgggccgattttaaaccaaataagaagggctcgacataatcgccgcgcagcatttccagaccaaagcgtacagctgaatacagcattacatacagacacatggcctgccctttagcgtgatcagtagtgcggaataaaagcaggagcgcgaagataacgatatccagctggccttcccaaacctcggctggccataaaggaacggcgccataggttttaaaagccagcgtaccttccggatataaaagaccaaaattaccgcctgtaggcgttccgaaagcatcgccgttcagcaggttggccatacggccgattgcctgaccgatcaaaattgcgggacagacgatatcggctaaagcgagccagtcgatctgatgccgtttacagtaccagatgcctgccagaacgccggcgatgacgcctccctgtattgccatgccgccttgccagacaaaaggtatctccagcagatgatgctggtaataatcccagtcgaaaaagaatacatcccagaggcgtccgccgatcaaaccggcaaagccgccgtaaataccaatgtccaggatatgctgctgccagcggccatcctgtttggccagaaagtaagcaacaccagttgctaaaaaaatgctcatacagagaactaaaccgtacatacggataggaaaatcgccgatgtgaaataaatactgatgcatagaacctccacgtgcctgcctgtaaatttatagtttgagttgccggatagtactgcccaaatgtttgaataagattattctaacacagtaagtctgaaaattctatcttgcgcaggaagtgtgatgatttaattcctacaattagagtatggtttttgccggcattgtatgttataataaatcagtaaaaatttcggaaagagggatacaattatgctgaaaatagaaaatctgtctgttgccgtacaaggcagacagattcttcacgatattaacctgcacattaaaccgggtgaggtccatgttttattcgggcctaacggtaccggtaaatctactttgatcgggacgatcatgggctttgaacgttatgaggtattaagcggtaaaatctattttaaaggttatgatattaccgaagctccttgttatgagcgggctcgtttaggtgtaggcgtaatgatccagcgtccgccgacgatccgcggcttgtcgctgcgccatatgattgagatctgtggagctacgcctcaggaaacggagcaaatggcaagatggatgggtttggctgattttctcgaccgcagtgtcaatgaaggtttcagcggtggtgaactgaaacgttccgagcttctgcagctgatggcgcaaaaacctgatctgctgcttttagatgaacctgaatcaggtgtcgacgtggaaaatatcgcacttgtaggacgagctgccaactacattctgcataacgagccctgtggcggcaccggctgtgataaaccctgctgtgctcataatcttgactgtgacacttataatccgctcagcagtcagcgcagcggtttgattattactcatgtcgggcatattttgaagtatgtgccggcttcgcatgctcatattttgtatcagggcactttaagctgtaccagcggcgatcctttggatgtattgagctgtatcagcaagaccggttatgagaaatgtgtgaatggcggctgcaggaggggaatgaaatgagtgaacaggtaaatctgcaggaagcgctggttaaaaaagctgcttttggcaatgatatcgatttggaaaaatttgatgataataatgaacagcatgtgcaaagtaccgccgagctttcagcagcagggaaagaacggctggagcatgttggtatcgatctggagcgggagaatcgcagcgccagctttattcaggtcgacaatgcgcctattgaggccgaagtaaagccgcagctgccgctggaattgatgaataccggcgccgccgctaaaaaatatcctgaacttgtcaaaaaatactggtggaatgccgtgaaggcagatactgataaatatactgctaaaactgcattggagcaggaacagggatattttatcagagtcaaagccgggcagaagatagaagctccgctgcaggcctgcgtttttatcggtcacgaggagcagctgcagcgtgttcataacattgttattgtagaagaaggcgctgagcttaatatcatctctggctgtgccagtgatcccggtgttgaaaaaggcgtgcatatcggtatcagtgaattttatgttgaaaaaaatgctaagctgacctttaccatgatccacagctggggcgaaaacattgctgtgcgtcctcgcagcgtaacgatcatcgaagaaggcggccagtttatttctaattatgtctgcatggaaaaagtaaaagatgtgcagatgtatcctactaccaagctggtaggcgaaggcgctgtggcacgcttaaattctattttagtggcaccggaggggtcgcatcttgatatcggcggcaaggcgctgttagaggtgcctggtacccgtgccgaaatcgtgacccgtactatttctaccggcggtgagatcatcaaccgcggcaatcttacaggtcgtgccgaaggcattcgtgcccatttggaatgtaatggcttgatgctcagtaataaaggttatatttctgccatacctgagctggatgcatttacaggtaatgccgagctcagccacgaggctgctgtgggccgcatcgctcctgaagagatcgagtatctgatggcgcgaggaatggacgaagaagaagctactgctactatcgtccgcggcttcctcaacgtcaatattgaaggactgccggaatctttggctaaaaagatcaatgaaactctggatacgttcacttataataagggaatgtaagaaaaagtaaaaaaagtacttgtcaatcgcggcaaagtgagttataataacccttgtgttcaacacaattccgggatggtgtaatggtagcacaggtgattctggatcatcttgtctgggttcgagccctagtcccggagccaatggcgccatggtcaagcggctaagacgtcgccctctcaaggcgaaatcacgagttcgattctcgttggcgctaccaaactgacagtaaaccctctgacttaggtcagagggtttttattttggaataggtttttcataaactgtattgttacaatacaccctaaactattatataatataaaaaaatggggtgaggtggtcttgatgagcacttatatttctataagcgaaatggcaaaactgcacggaattaccagacagacccttattcattatgataatatcgatttatttaagccggcgaaggtcgataccaacggttaccgttattattgtaaacaccagataccatatttacgcgagatttgtttccttaaatcgttgggaatcagtctgaaagatatccaacagcattttcaggaacggacgccggaaaacgaaatgtatcttttggagaaacaaaaacagtatattatgaatcaaattgccaagctcaatactttgcgcgaatacctcaatcaaaggatcgatttgtatgaagaagctgtagatgcagggatgatgaggatgtcgctgccttttgtacgctatatagatgcacgtcaggcgatttttaaagagtggctgcagcctattgataaagataacctgcacacgacattaatggatttgtggcagcgtatctttgaacgtgaaatggttccgtcaggcggttttggttctatcatcaaaaagtctggtgtggaaaaaaataagtggcttcagggagccgggtcctgtatatttttgccggtatggaacaaggagcacgaaaatacacttacgatcccggccggagaatatgtgtgcatgtataagtatggtatgccttatgatactgagcatctggaaaagctgatgcagtggctggctaaaaataattatgaactggcaggggatatcatcgacgtgtgtctgcttgatactaccttttataagcaggaaacaggcgtagatttctgtatgctgcaggctcctgttaccttaaaaaaataaataaaaatttttttaaaaacctcttgactgtattgttacaccacaatctattatcaaattgtgaggtaacactcaacaaaaagtcaggaggttatttttatgactaaagaagttattgatttaagatctgcgttggaattactggaaagcattcccggacaaatggtacatactgatgtagaggttgacccttctgcagaactggctggcgtttatcgttatgtgggtgcaggcggcactgttgcccgtcctactaaaacagggccggctatgacttttgaaaatgtgaaaggacacccaggtgcaaaagtagttattggtttattagccagccgtaaacgtgtaggctatcttttgaatagtaaacctgaaaaattaggttttatgatgcgtgacgctgtaaaaaatgccattgctccagtggtcgttgataaagcgaaagctcaatgtcaggaagtcgtgcatctggctactgacgaaggctttgatatccgtaaattgatcccggctcctaccaatactccggaagatgcaggaccgtatgtaactttaggtatgtgctatgcttccgatgtcgaaaccggtgaatctgacgttacgatccatagactttgcctgcagagcaaagacgaaatttccatgtttttcacaccgggggcccggcatttgggcgctttccgtgaaaaggccgaagctttaagcaaaccgttgccaatttccatcagtatcggtgtcgatccggctattgagatcgcttcctgctttgagccgccgacaactccgcttggcttcaatgaattatctattgctggagcaatccgcggtaaggctgttgaattagctccctgtgtgacgatcgatgaaaaatgtatcgccaacgccgaatacgtcattgaaggcgagcttttggtaggcgcgcgcgttcgcgaggaccagaattccaataccggtaaagcgatgccggaatttcccggttataccgggcctgccaatgcagaattacctgttatcaaagtaaaagctgttactcacagagtaaatccgattatgcaaacctgcattggaccttccgaagagcatgtaagcatgaccggtatcccgactgaggcgtcgatccttgatatggtggaaagagctatgccgggccgtgtacaaaatgtttatgcacattcctccggcggcggtaaatttattgccgttatccagttcaaaaagaccgttcccagtgacgagggtcgtcagcgtcaggctgcgctgcttgctttctctgctttcccggaattgaagcaggtgattttagttgatgaagatgtcgatatttttgatactaacgatgtgctatgggcgatgactaccagaatgcaggccgatgtcgatatcgtaacaatccccggcgtacgctgccatccgcttgatccgtctaatgatcctgcctgcagctggtcgatccgcgatcatggtattgcctgcaaaactatttatgacgcgacagttccgtttaatcagaaagcaagattccaacgcgcaaaatttatggaagtcgatgtaaaaaaattcttgcctgattttaccgtacaggattgaatgattctgctggttaaggcgttttaaacgccttaaccacattatctgactttgattggatatttttaaggaggacaattatgggaaagaataaaccgattataggttttattttaggtatcatcgtagctgtggtcatcttttttgctaacattcccggcttggaacgcacaggacagatgtgtatggccttttctctgatgacagtgattttctgggcttttggtattgctcagcccggttatgtctcaggtctgtatcttttgcttttagcagtttttaaagttgcgccaacaacattgattttttctacctggactacttctatgatgtatctgatcatcggcgcttatcttattgcggtggcggtgaaagaatcaggtttaggtgagaggatcgcttataagttcatcgtaaaatatgtttcgtcttttaaaagtattatcgtttctatctttgctctgacgttcattctggccttattgattccgcatccctggccgcgcgcttttctcattatgtcggtcatggctgttgtggtaaaaagcgcggacattccccgtgaagacgcggttaagatcggttttactgtttttacggcttctatcccggtttccatgatctttctgactggtgatgcgtcgatcaatccgctggcggctgccagctgtgacccggaaccggtaggctggctcaaatggttcgaagttatgggtctgccaatgatcgttaccagtatcattacaatggttatgattctgtttatgttcaagccaaccaaagaggtcaatgtcaataaaactgaaattttagagaagctggaagctatgggaccgatgagcggcaaagaattacgtactgccgtttgggtaatactggctattatcctctggatgactgacacgctgcatggcattgatattggctgggtaacgttatttattgctatggggatggcaatgcctaagatcggcggcattttgactccgcaaagctggagtggtgtaccggtacaaacactgatctttttgacagctgctgtcgctattggccgtgtgggcggtgctacaggcatgaatacatggatagcgcaaactgtattgccaagcagtgtgccggaaaatatgttcatcctggccgcatttattacagccgtttctattgctatccatatgctgttcggcagcgttatcgcagttatggggatcgttatcccggcgatgctggcctttacgggctcaatgggtatcagtacgatcattactgttatgattgcctatattgctatcaacgctcactttatactgccattccataatctggcgattttggtcggcgtaggtgaagacaacggtatgtatacggaaaaagaaacgatcaaattcggtgtaccgtttacgatcgtgctgttcattattactgtcggcgttgctgtaccctggtggaaagtaatcggtctgtggtgatttgtcttaaaaagtaagtttaagaaaggttggttattatgcgcttgattgtaggaatttccggtgccagcggtgtcattatgggttatcagatgctcaaggctctaaagcagctgcctgatatggaagtacatctgataattacggaaggtgctgttaagaattttgaatgtgaaactaatatagaaatcagcagacttgcagaactggccgattttactcacagtaataaaaatctggcagcaagtatttccagcggttcttttgttacggatggtatgataattattcccgccagtatgaaaaccgttgccgggatagcctcagggtttgcagaaaatctgctgctgcgtgcggctgatgtctgtcttaaagaaaaccgtaaggtggttttagtaccgcgcgagctgccgttgagccgcatccatctgcgcaatataaaagaatgtgctgataacggctgcgctatagtaccgccgatgcttactttttataatggctccaattcactggaacagcagatcgatcatattatcggtaagattttgatgcagtttgggatcgagtatcagaaatttgtcgcatggcagggagaagacatatgcagacagtaacgttaagcgagggggataaaccttatacagttacggcatgtgtggttttatgcggtaaagatatcgcagtagtgattggcggaggagaggcttcgcatattggtgctgcagccttggcttctcccaggccgagtttgaaaaatactgctgagatttccgccagtgcctctgttttatgccgtctgggacataaggatgatttgcctgccagagaggcggctttgcgcctggcgagtaaatttaatactaatgttgccgtaacgacaggcttgcatatagatgatgcggactctgacgatatcgcaaaactgcagcataactttcagcaaattttggaagcaatagaagcatggcttctgacaatagatatatagatattttgatcctcccattgagtttggacacttacacatcaacacaaaaagctctgactaatgtcagagctttttgtgttgattgaagcagccgttaaagttgtggagcagcagtaacgtcagtcaaacctgctaaagccaaaagcagcagcagtgatttttgctcacatacatatactccggctgggtcaaaccattcgtctacggtatgggtaccatattcagcgccgccgcgtcctaaggtaacagccggaatgccgactgcgatcggcatattgctgttggtgcagccgcctaaacgcggctgcggcgtgatgccgcaggctaaggttgccagcttggccgcctggaccatacggcagttttcggattggctgccggcggggacgtccatgattttactgaaagtaacttttacagcgccgggtttctgccagcgggcattttctgcgtcggcaccctgctggaaaatcgcgagtgcctgctgttccatttgcgccagaacttcagcgctgtcggaacgcatattgattttaaaattagcgctttgagcaatgccgtggatggcctgcccgccgttggcaaggctgactgtaaaagtagttttaggagtttcaggcacctgcatatcgcttaaagcggcgatggctcgtcccatagcctgcactgcgctgggagtaccgaaagccagataagcatgaccgccgggacctgtataggtgacgtcataattgatcatgcccgtagcattaaaatacattacatcattactgggaccgtcaatcgaaatggctgcgagtatttcttcagctttattattaaccaaatatttcatgccgctcatagctcccaggccttcttctgccgcagtgcctgcaatcataatatcatgatgtgggcgcaggccgctgttgaccaaagccctgataactgaaagatttgccgctaaagctctggtatcatcgcaaatacctggagcataaagcttgccgtctttttcgataacatctgtaacggtaccaaaggagaacactgtatctaagtgcccttcaagaagaacgcttttaccggttttaccactgccgtagatttttccgtaaacattaaatttttcatctatggtcacatcctgcagaccggcagctttcagcatttgagagtagtgtaggctgcgttgtttttcctgaaatgttggcgcttctatgactaccagttctttttgctgtgcgatagtattgggcgcatcctgttttaaaaaatctaaagcttgtttaacttgtcggtcagaagtcagtttttgaaaaataagttccaggtctttatcgaaagctgttgtcatgggtgatgcctccttaacgatattgactagattatagcaaagaaactttggcgagggaaatgctttttataattcttttaataattacttataatgtatttttttactgctgaaagtgtaatttttgaacattatttttaagaaacatcagaatatgattaaggtgtataataaaaatatgaaaataatatgtgtgagtgaaagaaggtcgtcgtatgcaaaaaactgcgttggaacatgatctgcagaaactggttgaaaaagctttggctttaggtgcttcaggcgcaaaaacagttgacgttgccagtatcaggactggggcctggacacgctggaagtgccagtttggttgccctaattatggaaaaacattgtgctgcccgccatttgttcctgattatgcggcaacgcagaggtttttacaggaatttatcagagggattatcattcagtacacttttcctttgaatggggtggcggttgaaaattttgctgcggccgatctgtcaatgagtaatgggctgctggagattttattaaacctggaacgggaagcctttctgcagaatcattataaagcttttgctttaaaggcgggacgctgtcgtttgtgcaaagaatgtaatttaaagcagtgtgtaaatccaacaaaagcaagaccctcgctggaagcatgcggaattgatgttatggctttggctaatgataatggttatcaggcggaaattctgcaggcggcggttcctgaactgaaaatatatggccttttactggttgagtaaaattatctgcagacagttctgtttttttatagcataaattatttgtggtgtattatgatgtgtctgagcttgacccccttttgtaaaagggttataatcaaattagtaagaaaagtgcgaaaattaagaacaaaattaactcaaaggacaagaatggagggtttttatgaaaaagtcaactaaaatcatttcagcagttttagcatcactgatgcttgttgcggcaggctgcggcagtgacaaaccggcagagaaaaaagccggaggaccggaggaaaaagtactgacagtttattctgcccgcagcgagcagctgaataatgcagttatccctcaatttgaaaaagatacaggtataaaggttaatcttgttgtagcaggtaccggtgaagtccttaaacgtgctaaatctgaaaaagataatccgctgggtgatattttgtgggcggccgacgaaacgatgctgtcctcttctaaagatctgtttatggaatatacttccaatgaaaacgataaaatgatggatggctttaaaaataaagcaggtgtttttacaccggcctttgctgatccaacagttatgatcgttaatactgagcttgctaacggcatgaaaattgacggtttcgaagatttactcaatccggctttaaaaggaaaaatcgctttcggcgatcctgtcaactccagctcggccttccaaagcttgatggcaatgctgtatgggatgggaaaaaacggcgacccgatgtctccggaagcgtgggattatgttgataaatttatcgctaatctgggcggtaaaatgtgcaacagctccagtcaggtctacaaaggcgttgccggcggcgaatatgtcgttggtcttacctgggaagacccggcagccaatcttgtgaaaaatggcgctaaggtaaaagtagtattcccggtagagggtgctattttccccggagaatccgtacagatcctgaaaaactgtaagcatccggaaaatgctaagaaatttgtcgattatatgctttccgaaaaagtgcagaatgctgtcggtatgaatctgacagtacgtccgctgcgtaaaggcgccaccttggctgattatatgactcctaatgataaaatcaaattagctcctaactatgatgaaaaatgggtttccgaaaataaagccaagattactaaaatgttcagcgagcatatggaaaaatctatgtaagcaagtgtaaatgttataaatggcaaaggggactcgcagagtccccttttgtcttactaaaataaaaaggcggttattttatgagtgtagcgattactatcgataatgtcgttaagcggtttggcaaggatactattatcaacggtttgtcagtagatgtccggcccggagaattttttacgttgttgggaccttccggctgtggcaaaactacgttgctgagaatgattatcggctttaactctatcgaaggcggtacgatcaaaatagatgaccagatcattaatgatatacccacgcatttgcgtaatatgggcatggtctttcagaactatgctgtttttccgcatatgtcagttaaagataatgttgctttcgggctgaaaaaccgtaaggtagccaaagaaaaaatgaatgcattagtcgatgaaatcctggaaacagtaaagattgctcatctgaaagaccggatgccgacgcagctttccggtggtcagcagcagcgggttgctttggctcgggctattgttattcacccgcaggtattgctgatggacgaaccgctgtccaatcttgacgccaagctcagagtcgagatgcgtaatgccatcaagcttattcagcagaaaataggtattactacagtttatgtaacgcatgatcaggaagaggcgctggccgtttctgatcggatcgcgattatgaataacggtatcattcagcagataggtacgccaaaagaaatttatcaacgtccgaactgtgtatttgtggctacatttataggtctttctaatattctggaagcgaaagtcaaaattacaggcgctgctaaaatacttgattttggtgcttatgaagtgccgatggataatttaattccggaaatatccgcaggcagcaaagtgctggtttctgtgcgcccggaggagtttgagatctgtcttaaagggtctgatgggctgactgccgtagtcgagcacagcgtctttttaggtgttaccacgcattattttatgcgtttggaaaatgggcaggaaatagaagtaattcaaaattcaggcgttgaagatactatccccaacaagaccacggtacgtttgctggtacagccggttaagatcaatgtttttacggaggatgggaatactcccctgatagttagggggaaccgctgatgaatattgccaaaaaatttaatctttggatgggcatcgccctgcttattctgtgtttctttattatctttgttgtttatccgctgattttaatattatataaaagcgtgatagatccggaatcatcaaaactgacgctggactattttactaaattttttgcacggaaatattactggagtacattagtcaacagtttttatgtaaccgtatgctctacgattattgcttctgttatcggcttaccgatggcttatgtgctgcgcagcgtcaaaatccccggcagtaaataccttaatatactgatcgttatttcgtatttgtcaccgccttttattggagcctatgcatggattcagcttttaggacgtaacggttttgtaacacagattattaattcgatttttggcgttaaacttgacggtatctatgggtttgcagggatcgttcttgtttttgctctgcagtcgttccctctgatttatatgtatgtatctggggctttgaagaatctggataattcgctgaatgaggcggctgaaagcctgggactgaccgcttttcagcgtgtgcgtcagattattctgccgttagttatgccgtcgcttttagcaggttcgttactggtatttatgcgtgttttttctgactttggtacgccgatgctgattggggaagggtttaaaacctttccggtattgatttatactcagtttatgggcgaagtcagcaccgatgaccattttgctgcatccttgtgtgtgatcgttattgttatcactttactgctgtttttcctccagcgttatatcgccgggcactattcctattcgatgacagctttgaagccaatggaagctgtagaggccaaaggcagcaaaaaaatttttgcctatctttttgtttatggcgttacttttttggcaatgctgcctcaactgacggttatttttacatctttccttgaggtcagcggcggtgctgtgtacacaggtaatttttctctgcagaattatatgaataccttatttgctaaagacaataattcgattaccaatacttatctttttggtatctgcgcgatctttatcgttgtttttatgggtatttttatttcttatcttacagtgaggaagcgttcctacgttacggaagtgttggatacggtaacgatgttcccgtatattattcccggatcggttttaggtatctcgttcctgtatgcctttaacaagcagccgcttattttaagcggtacggcgctgatcattattatttccctggctatacgccggatgccgtatacgattcgttccagtacggctatcattacacagatcagtcccagtatcgaggaagcagcgatcagtctgggcgcgacagaatttaaatccttctggaaagtaaccgtgccgatgatgcttccgggagttttagccggagcgattatgagctggatcaccctgatcagtgaactcagttcttcgatcattctctatacaagtaaaaccagtacgctgacggtagcaatctataccgaggttattcgcagtaactttggtaatgcggcagcttactcaacagtacttactttaacgtcaattatttcactgttaatcttctttaagcttactcataataaagacatcagtgtctgacaactatataaaacagtcaggtggttagactgactgtggaataagtgttggccccggtttccgtttgcagcggaaaccggggctttaagtactacattttaatatataaagtaattttgcaaggataaaaggctaatattatctgttttaccagcaagacacaaatgggtttatttacacgaaaaagtaaatgtcttgcgggggaatatggagaaattatattcatgaaatttgtttaaactaaaagtgcagaccatattggtctgcacttttagttttataagaattattttaaggtgattttatgtatttattcaaatattgcttctgttttaaaggctgtgccaaagtcagtaaagttcatgctggcgcctttaaaatcggtttgatcaagcactgctttgtccagcatagcattattaagattggcgttctgtagcagagcctgactcaatgtagcaccggtaagattggcattgctcagattagcattgttcattttggcgttgaaaagattggcgtagaccaaaacggcttcgtgcagattggtgttgtaaagccaggcataagataaattagcctgtgtaagatcggcttccagacaattactgctgtcaagtgttgcttcctgaagatttgtcagataaaagacggcaaattgtaaatcgcagttggcgaatttagctctgaaagcattggcttgtgtaaaatctgctgtttttaagtcactgccgctgaaatttgtatagttcagctgtgctgctttgaaactggtattggcaagttcagcatcggtcagcacagttttggtcagtactgctttatcgaaaacagctcctgctaattttgttttaatcagcctggcacctgtcaaattactgccggtgagatttgctccggtaagatccaggctgcttagatcagcacccgataaatcaccgtaggcgcagctgccgctgctcatgagctggttaaggtcagaactgttataggcagctgccggcgttgtagtaaatagtaaagtcagcagcagtccgtagaaaagatttttcatagttatctccttaaaatacatgttagtttttgtcaagtaaagctgcaaaatccctggggtcatcaggcaattcagggatgatttgccaagggttgtaacttttcagctcctctgtgttatacgtagaaccggcaaggattattaaactgcgtgcttttatggcttgagcacaaagaatatcgttaggagtatcacctacaatgataacgttgtctggtgtaaggtcaggttcgagcaaataaagtctttgataggctgtttttgcaagctcacagcggtcttcactcaactcaccgcaggcgctgtaacggctgtcgaagtattgcgcgatcccgtaatgccgcagtttggcaaaggcaccggccctagtattaccagtgagcagacatgttttatagttcgtctgctgcttggaaaaatactgcagagtttctttgacgttaggcatcaggctgccgtgatgcgagggcaaatatttttccagcagctgatgataatggatcaaaaggcctgcggcgtcggcggcattgcagctgcccttgatatcctttattgtttgtttaaagataaaggagtctgtcattccggccagcggatgagagaattgaaaattttcgatgccaaagcggcatttgattgcatcgcgcaaagcgtcgacaccagctaatcctgttttcaaaagcgtaccgtctatgtcccaaaaaatatatttcatagtttactccaaaatagtttaattatatatttacctattattttaacagagaatttgctctaggaacagaaaaaaagaaaaaagctgcctgaaggcagcttttacattgaacgtggtttcatcataagtttagaaagtttattaccgatagtacgggcacggcgtatagttttgatgttggatttacggcgtggtttcatatcgctttcactgccgaaatcaccgcggtcaaggtaagtgatcttcgatttgtcaggatcaaaataattacgcaggaaacgcgctaatccgtctgggtcggcatctttgaaacaggtgaaaacatcaatagtgacaaagccaagatccggatatagatgcagggtcacatgaccttgcttgcaatgtgaaaaaacagaatattcgttgatgccttcttcgcagttgatataggtttcccgcggctgcatggcgaaatctgcggctgcgctttgaatggttgcctgaacgccggaagcgtcgcttaaaagcagatcgctgcagttatacatatctatagctatttgtgttccaattgatttcaaggtagttctcctttcaaagaggcgagctttaatttttaaaataaaatgttggttggagtataaacaacttaatatattatagctaaaaaatagcttgctgtcaaagtttattcatggttacaggtgtgaaaagaatatggccaaaagttttgttttatttgaaaacgtgttataataaacgagaacatttgttttgtacggtggtggaataatgcaagaattgcagggcgttattgataatatagtttttcaaagtgaagataaccagttcagtgttttcagggtgaaaactgaccatgaaggtaaggtaagtgtcgtttaccggggaccggctccttttttgggagagtcggtagagctcagcggcagctggggcgaacacgccaagttcggcagacagtttcgtgctgaggtctgccaggctataaaaccttcaactaccgatggtgtggagcgttttttggcttcaggtgcggtcaggggcattggtaaaactatggccgcccgtatcgttgagcattttggctcagatacgctggatgttttatctttatcaccgcatcggctgaccgagatttcaggtatcggcagaaagaaggccgaagctattgggatgtcttatgcagagttgtcggatatgcgggaattgatggtgtatttggaatcgcacggcgtcagtgctaattatgcaccgaagctgcaggcgcaatatggagctacggcgatgaaaaggattcaggagaatccatatagcctggctagtgatattaccggtatcggttttagaactgcagataagattgccttggcgaccgggatggacggcgcctgtgaggaacggattaaagccggggtggaatatgcactaaatcaggctgcttcagcagggcatacctgtgtacctgaggagttactgctgcgcgaaacagtgaggctactgcaggtcagcagcagcgttgtcaatgatgtttttcaaaagcttttggcagaggacatgctgcgtacggaagaagttggcggtttacggctgatctatcctgagtatttgtatcaggcggaagttcagacttctaaaaggctgcttaaattacgcgatctggctgatgcgttggaaaaagtcaatgttgataagattattgggcaatgggagtctgaagccggtattgtattggctgaggcacagaaagaagctattcatgcttctttaaaatatggtgtgtttgttcttacaggcgggcctggtacaggtaaaacgactgtaatcaaggggattttggcagtgctggaaaaagctggctgtcggatactcctggcagcgcctacgggacgcgctgccaggaggttggccgattcatccgggcatcctgcggtaacagtacataggttactggaatatacgccgaatggcggcggctttaactttggcaagaatgacggtgatcctctggatgccgatgcaattataatcgacgaagcttcgatgctggatattacgcttacttatcatctgctgaaagcggttcagggcggctgtcggctgatttttgtcggcgatgtcgaccagcttccgtctgttggtgccggatctgttttaaaggatattatccgttcgcagaaaatgcctgttgtaagattagaaaatgtttttcgtcaggctgagataagccccattgtgcgtaatgcacataggataaaccgcgggcagatgcctgagtgggagccgagcagcgattttacttttgtagagatcgagaatgaatttgatgcggcggaatatgtggctaatatttatgccagattgacgcagcaaagtgactggcagtccgtacaggtcttatcgcctatgcataagaatccctgtggcgttcagaaccttaaccatttgcttcagcagcggatcaatcctccggagctgaataaaagtgaggtcaatacgcctggaaatgttctgcgggccggtgataaggtgatgcagattcgcaataactatgagaaagaggttttcaatggtgatattggcaggatcgtgtatataaatggccgcaatgttactgttgattatcctgagcgtgctgatggtgagtatgtaacttatacacctaatgaaattgatgaattgcagcttgcatacgcgatgagtgtacataaatcgcaggggagcgagtatccgacggttattttgctgatggttccagggcactatatcatgctgcagcggaatttgctgtatacagcagtaacgcgtgcacggcagaaggttattttagtaggaacgaaagcggcggtacagactgcggtggataatgacagaacgagaaaacgttattcgctgttggcggaacgactgcaggagcagggagatattttttaaggacgttataaatttagggaaaggtgatgcataatcacccatgtttatacggttgataaaaaaatggtatgcgctgttactatcggtattttgggcacgaaagtgcgccggctgcggtcagatctctgaagacggtttgttttgcagtgtttgcagagaagtgttattgcagcctttgtggctgtcgggtcgtgaagctttagatggtgtggggatgttgttcaggtataacggcgctttaaaaacggcattacaaaatgtaaagtttaagaaccgcagggatattttggagctgttggcagaagaatgctgccggattagtgttgacggctggccggaatttctgcggaatattttaagtaagcgtgatgtaatgattgtaccaataccaacgtcaaggcaaaggacaagagcgaggggattcgagatcccgctggttttatttaaaaatactgatgccgaatattgtttgactccggctctgacgagaaggcgtgaaactgtgccccagtatgatttaagcccgcaggaacgaaaaatgaatttagaagattgttttgctgttacacaaaatgttaccggtaaaactgtgattgttgtagatgatatttttactactggagcgacaatggaagaggctgcccaaactttgaaaaatgctggagctgtagaagtttatggacttgccttttgcggcagtatcgaaaattatggacaaatacaataaaaaacttgctgccagtgtctgacagcaagtacaagtagtcgatattattattttttttgtttgataattttactgggaataactgattgcatgaacgcttttacaacattagggtcaaaatcaagccctgctttgttttgcagttcgataattgcttcgctgtgtgttttctgccattgctgggtgcagggattaataaatttatcatagtggtctgctacagaaataattctggctcccagaggaatgtttacgcctttaaggcgtttgggatatccggtgccgtcccatttttcatggtgggcatgaatgatggggataatatggctgaaaccttggatattttcaagcatgcttgcgccagcctggcaatgccgtttgtagatagacatttcgcgggtgctcaggtaaggggctttcataaggatcatgttgggcacggaaagactgcctatatcgtgcagcaatgctgcggttttgatacaggaaacttctgccggcggtaatcccagcttggcggcgatgctggcagcatagttggcgacctgctggctgtgcatataaagcgccttattcttatgttgtagcattttcaaaaagaattcgcagatttccgaagtttgtccgtcgtcaggaaaatctaagaattggggtatggcaatcataaacaatccgtcctcattcacatggtgataatagtatactacgaaaaagttgattagcaaagacacttgcaaaaatttttgcttaatgtataattataaatacaactcaggtctgtggttgcaagtcgaggccagttgcgggcaaaacgatccacgtaagcaatcaaagtattgtgagcacggcgcagcttagaagtaagtcctgccgcaaaggcgagaggggtagtagtggggagctctgaaaagcttatgagcgaaccctccagcaggcgagtgtgggggcgaaaaccaggtcagctgagttgtctgtgaaatttgtaccgttattaaaaataacggtatttttttattgcctgccgtgatatttagtactataataagaaaatattataaatagaagcggttggaaagctgctgaattgatttggaggggtaaaaatgaaaaagattggatttttaatgatggctttattggcaatgcttgcattgctggctgccggctgtggcggttcacaggaagctcccaagaaggcagaaacggaaaaggtattaagggttggtaccgaaccggcttttgcaccatttgagtttcaaaaagaaggctcggatgaatttactggctttgatatggatcttattcgtgctattggtacgaagcttggttataaagtagagatttcttctatgggctttgatgctttgatcccggcgttgaattcaggaaatattgatgttgcgatcgctgggatgagtattactgatgaacgtaaaaaagtagtggtgttttctgacccatactatacttctggcctgatcgtaatggtaaaaaaagatgatgatacaatcaaaggcttcagtgatttggaaggaaaacgaattgctgtgcagatcgggaccacaggagctaataaagcaggcgaagttaaaaatgccaaggtaaccgcgtttaacgacaatactgctgctgctatggaactgaaaaacggcggtgccgacgctgtaattaatgacagccctgttttgaagtattatttgcagcagggggggagcgctgacgcaaaggttgtcggtgcggtcatgaattcggaggactatggtattgcagtaaaaaagggcaatgataagctggctgctgaaattaataaagctttagccgaaatgaaacaaaatggagaatatgataaattatataaaacatggtttggtgaagaaaagaaataatattcgtataactttaggttgcgccaggccgtttttagttatataattaacaaatataaagggctgcgtgttgagtgcagtccagatatttttctggaggttgtaaaatgaaaaaatatttacttatggcaatggctgttttagcagctttgtccttaatggtagccggttgcggcggcaaagaagaagctaaaaaagctgaacctgcaaaagttctgcgtgtgggcactgaacctacttttgcaccgtttgaattccaaaaagaaggctctaaagaatatactggttttgatatggaccttatccgggccattggcaaacagatgggttacaaggttgaaatcatgaatatggggtttgatgcgttgatccctgcattgagttccggtaatattgataccgtaattgctggtatgagtattactcctgagcgtcaggaggcagtactgttctccgccccttattacagatccggtttggtagttatggtacagaagaacaatgataccattaaaggtatcgaggatttggtaggtaaaagaattgctgtccaaatcggtactaccggcgcagctaaagcagaaagcgtaaaagatgccaaagtaacggcattcaacacgaatacagaagctgctatggaattaaagaatggcggcgtggatgctgttatcaacgacagcccggtagttggctattatttggcacaaggcggtagtgctgatgccaaaactgtaggcgatgtgcttgaagctgaggaatacggcattgcagttaaaaaaggcaatgataaattagctgctgaaatcgataaagctctggccgaattgaagaaaaacggcgagtatgacaagatttacaaaacctggtttggtgaagtaaagaaataatatggtcatatctggatgcggagtacatcaacggtgacggtggtgtgctccgtattttctttggtgaattttaaagagctgacaatgaaagggagacaaactgcatggatattaatttcagcttgatttgggatgccttgcccttgctgctggctggtgccggtattacgatcgaaataacggctttaagcgtaggctttggccttttgataggtatgacagtcggtatagcacgtcttgccagtataaaaccggtgcgttattttgctaattgttatgtggattttattcgtggaacgccgcttctggtacagatatttttggtttatttcgctttgccgggaattattgggcaccgcgtggatccctattttgcagcaatttctgcctgttctatcaatagtggtgcttatattgcggaaattttccgtgccggtatccaatcaattgataagggtcaaatggaagctggccgttctttaggaatgagctgggcgcagactatgcgttatgttattatgccgcaggcctttaaacgcattattccgcctttgggcaacgagtttattgcaatgttgaaggattcttcattggtttctgttattgggtttgaagaacttacgcgtcgtggtcagttgattatcgcccgtacatatgcatccttcgaaatttggatggctgtagctgttatttatttgattatgacttttacggttgcccgtctcgtagggatgttggaacggaggtatgatacgaaatgaatgaagcaatgattaaaataactgatctgcgaaaaagttatggtaatctagatgttttaaagggtattgatttgacaattgctgaacgcgaagttgtggtaattattggaccatctggcagtggtaaaagtactttactgcgttgtataaattatttggaagaaccgacaggcggcagtatagttattgacggtataccgttgacaggggaagcaaatattaatgaaatacgtaaagaagtcgggatggtattccagcgttttaatctgttcccgcatatgactgttcttgaaaatttagtgctggcgccaatgaaggtgcgtggtatcagccgcagtgaggcagaacaaacggcacaggaactgttgataaaagttggcttggatgataaagcaaatgcttatcctgatcagctttccggtggacagcagcagcgtgtagcgattgcaagggctttggcaatgaaacctaaagcattgttgtttgatgaacccacttctgctctcgatccggaaatgatcaatgaagtattggatgtcatgaaaagcctggccaaagaaggtatgacaatggcagtggtaactcatgagatggggtttgcccgtgaagtcggtgacagggtcatttttgtagatggcggagttatcgtagagcagggagaaccagaagaggtttttttgcatgcgaaagaagaacgcacgcgcagctttttatccaaaatattataagtgttactaaggttaattgggtgttttattacccgaagtgttacattagtatcaattgtaaactcgcatgtgaaatttttgagacatgcgagttttttgttactttatcagcaggagatttgcggagcgcggcgaattactatattaaagcaagcagagagcttgcgatcccatcaccttggggaattcaaggaggtatgaattatgaacgtaaacgtacgtggtaaaaacattgatgtaactccggcattaaaagattatgtcgaaaaaaagattacgaaagtaacgaaacagtttaaaactgtcggtgatatttcagcagttttgaaagtggaaaaaggtaatcatattgtggaaattactgtaccggcgagtgggatcttgctgagagcacaggaaacgaccaaagatatgtattcctccattgatttggtaatagaaaaaatcgaacgccagatccacaaatataaaacccgcctgatgaagagaaaatacaataacttccaggatgccgtggtcccagcttctgtagaaacagttgcagaagatgatggtgaattcaagattattaagaataaatcttttgctatgcatccaatgactgcagaagaagctattttacaaatgaaccttttgaatcatgatttcttcgttttttatgatcctgattttggtggcgtgaacgtggtttatcgtcgtaaagatggtaattacggtttgttggctccggaattaaaataagcggcaatattaaataggaaaataatttactgaaagttcacaaaaagcctggggttgaagccccgggctttttgacttttgcaggcttttctgctaaaattttaagttaggtatagtgttttttattgtaaaaatttaaggagtgattattttgctcgaaggtttgttgaaaaaaatttttggtgacccgaatgaaaaagaattaaaagagatcggagtcattgtcgataaaatcaacgcattagaaaaagatatggtaggcttaagctctgcaaatctggccgctaagacagctgattttaaagtacggttatctaaaggtgaaacattagatgatattttacctgaagcattcgcagttgtccgtgaagcggccaaacgtgtcttaggcatgcgccattttgatgtgcagcttattggcggttgtgttctgcatcgtggtaaaattgctgaaatgcgcactggtgaaggtaaaactctggtagctactttgccggcatacttgaatgcgttgacaggaaagggcgttcatgtcgttacggtcaatgaatatctggctcgccgtgacagtgaggatatggggcgtgtttttaaatttttaggcctttccgtaggtcttattgcgcatgcgcttgattatccggaccgcaaagctgcttatgctgctgatattacctatggcactaataacgagttcggttttgattatctgcgtgataatatggtcgttgacgaagatcaaatggtacaacggcctttaaattattgtattgtcgatgaagttgacagtattttgattgatgaagcgagaactccgcttattatctccggacctggcgaaaaatctactgatttgtataaagttttggctcaggtagttgctaaaatggatgaaggggaagattatactgttgatgaaaagctgaaaacagttgcccctactgaaattggtattgctaaagctgaaaaaatgctgggcatagaaaatatgtatgatactgaacacggcgttgatttttcacatcagctgatgtgtgctttgaaggccaaagctattatgcaccgtgataaagattatgttgtaaaagacggcgaagttatcattgttgatgaatttacaggccggttaatgtttggccgtcgtttttcggaaggcttgcatcaggctattgaagctaaagaaggtgttaaagttgagcgtgaaagtcagactttggcgactattaccttccagaactatttccgtatgtatgaaaaactttccggtatgactggtactgctaaaacagaagaacaggaattccagaaaatttacggacttgacgttgttgttattcctaccaataaacctatggtcaggattgattatcctgatgttattttgaaaacgaaacgcgctaaatataaagccgctgttaatgagattgaagaatgccataagtctggacgaccggtactggtgggtactacttccatcgctcagtcagaagaattatcggcgatgctgaaacggcgcgggattccgcataatgttttgaatgctaaatatcatgaaaaagaagctgaaataatttccggagccggtcaatatggcgctgttaccattgctacgaatatggctggccgtggtacggatattgtcttgggtgaaggcgttccagaattaggaggtcttcacatcattggtacggaaaggcatgaaagccgccgtattgataatcagctgcgtggccgctgcgctcgtcaaggtgatcctggttcttcaaaatttttcttgtctttggaagatgacctgatgcgtttgttcggttctgataatatttccagtattatggacaaactggggatggaggaagatgaaccgattgaacataagcttgttacccgttctatcgaatcggctcagaaaaaagttgaagccagaaactttgctattcgtaaacaggttttggaatatgacgatgttatgaatcagcagcgtgaggttatttacgcccagcgtaaaaagatcctgcagcaggcaaatctgcgtgatactattatggatatgatacataaagttgtagaccgtacgatggcgatgtatgcgccgccggaagtttattcagaggattgggatttgcaggcattaattgcttatgctgaggagttctatgctccggctgatttgctgcagattgattatctgcaaaacctcagtcgtgaagagctggaagaatatctgcataaagttgccgatgaacattacgctgaacgcgaggatgctattacacctgaattaatgcgcgaactggaaaatcttgtaatgcttaaagttgtcgataaccattggatggagcatctggattctatggatttgctgcgtgaaggtgtaggtctgcgggcttatggacagaaagatccgttggttgaatataaatttgaagcctatgatatgttccaggcgatgattgacgctattcaagacgatgtagtacgctatatttaccgtgtaaatgttgtggcgcagcctaaggttgaaaatcggttggaaaacgcatccactaacaacccgggggaaggcgatgatattaaaaaacagcctctggtaaaaggtgaaacgaccggacgaaatgatctttgtccctgtggcagcggtaaaaaatataaaaattgctgcgggcaggataagtaagatttacagaaatttatagttggttttagttacagtaaagttgaagcggtaagtttcaactttactggtgttattaagagaggatgtgaagttagtgttgattgaggaatataaaccggagattgcagcattaaaacagaaactagaggaaatgaggggatctctttgacgtagttgtcaaagaggaccgtattgcagaattagaacataaaatgggtgcacctggattttgggatgaacctgaaacggcgcagaaaactgctcaggctgtaacgcagttgaaagaagaggtagaaacatttcgttctttggaaaccagagtagaggacatggaagttttgtgcgaactggcgctggaagaagatgacgaaagtctgttacctgaaatggaagaaacgctggtttctattcgtactgatgttgaacatttagaattaggcatgcttttgaatggcgagtacgacgccaataatgctattcttacattacatgccggtgccggcggaacagaagcgcaggattggacttctatgctgctgcgtatgttttcccgctttgctgaacgtgaaggctatgaagtggaaatgctcgattatcttccgggagatgaagctggtgttaaaagtgctacgcttcagattaatggacataatgcttacggatatttgagaagtgaaaagggtgtacatcgtctggtgcgtatttctccgtttgatgcgaatgcccgccggcatacttctttcgccgcggtggatgttatgccggaactggatgacagcgttgcaattgacatcaatcctgcagatttgaaagttgatacctatcgagctagtggtgctggtggacagcatgtaaataaaacgagctctgctgtgcgtatgacgcatcttcctactggaataatagtacagtgccagacgcaaagatcacagatccagaaccgggaacggtgtttgcagcttcttcgtgcaaagctatatgaatatgaacgagctaagcaggatgctttaaaaagcgatatcgccggtgactatcaggacatagaatggggcagtcagatccgttcatatgtattccagccttataaactggttaaagatcatcgtactaatgctgaaacaggtaatgtgcaggctgtcatggacggtggtttggaaatgtttgttgaagcgtatctgcgcagccagcaaaagaaactgtaattattgaaaaagaaattttgaattaggtggagatcagctgatgaaaagccgttataacccggtacttattgcgataatagctataggactgatagtttcattatggttgaactatcagcgtcatgaaattgagcagcgcaacgatactgtcgaaatggcaatggaatatgaagggctggaacatatagcgaactgggaaggcttgtctttaaatgacgtgctggcaggatttaaaaaggccggagttacaagtctggtagtgtttgatactaccttagagaagcttaacaacaacggttctattgtagctgttactggggaggagctgctaaaaggctctgctttgggcggcgatggtggtaaatttgctcctgtactttccgaaggtattgtagtgcctaatgctgtctatgtgactgtcgggacgtcatatgatgttttgacagaagtggtggaggatctgtatctgcgttatggcaaggaccgtttgcggatagtaaacaacgaaccgcagataattgagattttaggtaatccaatggtcattacagaagaaaattatgacagcaagcctggcgttatgcaagctcctttaggcctttcgacagaagaaatgcgcaaagcaaaagctttcggctttaatgttatcgtcagaccaatgaattatttgcctaatgattatgataaaatcaggagtatttttcgtaggatcgataagtctggtgccaatgtaaccgggtatataggctgtggtcgtgaagtagttggttatccggattacattgcctatatggctcataagttaaagaaacagaatatgacttttggaatggtagaacattatacacagctgcagtttgctgcaatggacggactccttccgttagctgagcatatggattatcgtgttgcacgtacatatattattgacaaagccgagcagagaaaactgaaaatgccagaagctttgagacgttgggctcttacagatgaagaacgtaatatccgtatcaactatatcaaaccgtttatgatccctcaggaaggcagggatattttagagcttaatttagattatgtttcgaaaattgccgacgatgtgcaggcaagaggatataagcttggaccggcaggagttttttctaaaaatactgctgacggtaagtttgctccatatttcccagaacgggcctggctagtgccgctggcatttgctattctggccggtgggattatgtatttaacattgctgtttaatttcagtaaaaaaatacagtatatgttattgctgactggcggtattgttgccagtgtaactttgctgaaatttggcggaatccttacacgtcagttactggctctgattgcggcaactgttttcccagtattatcgatgacagttattgtcgaactttgggagtcctgcaaaaaaaataccccaaacacgctgaagattattatcagtgctacatggcagctggctttggctgtgatactttctttaattggagcatcttttgtagcggctgttttaggcgacagcaggtttttcctggaaattgatatttataaaggggtaaaattaacgtttattttacctgtgctgttgatttctctatggtatatgcagcgatttaatgttctcagcaaaggccagattggaaatattgctgtgcacctgaaaaattttttcagtaccaggataacagtaaaacatgttgcatttttgggtgtattggcttttgtagcatatatttttgttggtcgcagcggtcataccgctggggttccggttccggctcttgaaattaaaatgcgtctgttccttgagcagatgatgtatgcacgcccgcgtgaaaaagaatttatgattggacatcccgcgttttatttagcggcatttgcggcatataaacaggcaccgcgtttatggcagatgctgttagtggttggagctactattgggcaggggtctttagtgcagacttttgcacatatgcgtacccctgttatcatgagttatattcgtgccgtcgacggctatgctctgggtgctgtattaggtatcattgctgttatcgccgtttctattttgctgccttatgtgcagaaatggcaaaggagattcttagagcatgagtaaaattttgatttccggttactacgggtttgctaatgccggtgacgaagccatgcttactgctattatagaatcgttgcggcaagtggagaaaaacgtagaactgaccgtgttgtcaggcaatccggaagacactgcggctaaacaccaggtttgcagtgtatatcgcttcaatccattagggattattcgggcgatgaaagattctgaattgattatttcaggaggcggaagcctgcttcaggacgtgaccagtaaacgaagtttattatattatcttagcattattggattgggaaaattttttgggaaaaaagtaatgctttttgctcaaggcattggacctattagagccaaatgggctcgaaaattgacaagtttggtttgcaatgaggcagatttgattacagtaagagatagtgagtctgcagcggaacttattgaaatgggcgtaaaacccgagaagataacggttacggctgattcagtactttcgcttaatcccgtaactaaagaatgcgggcagtacctgctgcaggaggctggtgtagatttaaccaagcccgtcataggtatttctgtacgtccttggtctggtgacagtcaatgttttcaggttttggctgaagctgcttccaaattgcagcagagctatggggcgcagctgattttgttgccgctgcagtattctgttgatgtaaaagcctgtgagaaactgcgtaaagctttggtttgccaaaaggatatatttttattgaatgaaaaatataatactgaggaatttctttctatcataggaaattttgaccttttgattggaatgcggctgcatgcactggtttttgctgctgtaatgcaaacgccgctgctggcaatatcttatgaccctaaagtagatagctttgtaaacgctattggtgaaaaacctattggaacggttgaaaaaattgatagagatacgattgttcaggctgctgtagctggttggcagaaaactccgcttgaacaaaataagaatattgaaattttgcggcataaagcgcagatcaactctgataaagcttttgctttgctaaaaaaggttgaagaaaaacgatgaattgggatttgtcgtgatgataaagactgacgtaattgtttgagtgttgaagagaagggagctttcaccatgcttttaatgaccgatgtcagtaaaacatatccaagcggttcagtagctttgcgtgatgtcaatatccatatccagcctggcgaatttgtttttgttgtcgggccgagcggtgccggaaaatccacttttattaagatgctttttcgtgaggtaataccaactactggcaatatatatgtaaatggtgtggatctattggagcttaaagaaaaggaaattccttatttgcgcagacagttagggattatttttcaagattacaggttacttcctgatcgcactgtttatgacaatgttgcttttgctatgcaggttatagagactccctatcgtaaaatcaagcgccgcgtgatgagtgtgctggatttagttggattgcgtaaacgggccaattcttatccaacggaattatcaggtggcgaacagcagcgtgtagcgatcgcacgtgcgattgttaatgatccgctgcttgtaattgctgatgagccgacaggtaaccttgatccggaaacaagctgggatataatgcgtattttcagtgaaatcaatgaaagtggaactactatcgtgatggcgacacatgataaagaaatcgttgataatatggaaaaacgagttattgccattgaaaaagggtcgattgttcgtgatgatttaaaaggggtatacggttatgagtcttagtacaaaagaatattttatccgggaaacctataaatctatcaaacgtaacggcttgatgagccttgcttcggtgtctactgtggcactttcattacttgttttaggtatgtttctgctgatttttatcaataccaataatttagcgcaatatctcgaaagtcaagtgcagattactgtttatatggaagattctgttgaagcccctgggctaagcgatatgaagcagacactggagaatttgcccggtgttctaagcgtgacagaggtcagtaagcaagaagctctttccagatttaaggaacggttggggcagcaggaaaagttgctgcattcattaggaactgataatccttttcctaattcatttgaagtgcaggtagacagacctgatagaattaatgaactggcgccgcagatacacgaaatggaaggcgtagaaacagctaaattcggtcaggaaatagtagaacatatttttcagatgacgaaaatactgcgtattggcggtgttgttctggtaattttactggctcttgcaacattgtttattattgctaatactattaggttaactgtttttgccaggagaaaagaggtcaatattatgaaatatgttggcgctaccgactggtttatcaggtggccttttattctggaaggtatgacgcttggtttttttggggcgttgattgctaattttgttattaacggtacctatgcggcgcttttgtctcgtatttatgcgacactggcttttttaccaatggttccggcatatccaatgctcacctatgtcgatatttctattattttagccggaacggcaattggtgctgcaggaagttatatttccttgcgcaagtttttaaaagtttaacagcggaggccgattatgccaaaaaagaaagttttaatggctgtattggcgttgatattcgctgttatgcaaattttgccggcttttgcaaatgagctggaagataagcaagcggaatatgatgacgtacagcaaaaaatgcagcaaatggaaatagctaaagaacgtgctcgtcgtgaagcagaagctgccagtgacagaatggaagagattgttgctgaattgaatcgtctgcaggcagagattaaagagatcgaagccaaacgtgataaattacagccactgattgacgaaaaccaagaagttttaactgaaaagaaagctaaaatggaaggccgtatgaagatttatcgccagcgtctgcgcgatatttatatcaatggacaaatcaattatcttgatgtattgttaggtgcaaaagatttttcagatttttcttcaagaatgtttttgttgcaaaaaattatcagccgcgatttggcaatgatggatacaatcatgaaggaaactgctgaaattgaagcgcgtcagaaagaattggatgcgcagatggctgatattgaaaaaatgcgcagtgatcttgatgaaaagcagcagaaggctgaagccagcaaggaagagcgtgctcagctgctttatagggctgaagaagaaagtcgccaggctgatgaagattatgaccgcttacttgccatttctgagaatattgcgagtatgttgagaagcttggaacgtagttcttctatgcctacgggcggtggaaccggtaagtttatctggccagtaacaggtgagataacttcttattatggttggcgtacacatcctgtatttggcacaacaagatatcattccggtatggatattgcctgtgattatggtacaccgattgtagcggctgactctggtacagtaatttattctggctggatgggcggttatggttatgcagtgatgattgatcatggcggaggacttgtttctttgtacggccataatcaggaacttgccgtcagcgaaggacaatatgtaaataagggtcaggtaatttcgtatgccggcagtactggctggtcgactggcccgcactgtcattttgaagtacgtatccacggcgaggtaactgaaccgttggattatttaccttgatttaagggaagataagcgaggcgggaagttatgtttaaaaagcgttttagtatgatgacagtgcttgtagcctgcctttgcgctatagttgttacgcttggagctatattttacagtatggagcgcattaccggtgatgctttgggaagtttgaaatttctcaagacgttagttttggtccgggaaaaatttgtagaacagccaagtgatggaaaattatttgatggcgcagctacaggtttggtagaagcgttagacgatccgtattctgtgtatttggatcagcagagttttaaagatatcagtaatgtaacagaaggtttttttggcggtatcggcgtagtagtcggtaaaaaggagaataattttgttgtagttgcacctttagagggaacgcctggagaaaaagccggtatcaaagccggcgacaaaatagttcaggtcgatggaaaaaagacggctgggatgcagcttgaagatgttgttgcaatgattagaggcacgcagggaacagaagtcgagctggtcttggacgataataaaggtaacgaacgtacggtaagagttgtacgtggcgatattaagatcaagtcagttgcaggagaaatgctgccagatagcaagattggctatatcaggattgctatttttaacgagaatacatcgggagagtttgcgaagaaatatcaggaactggaagagcaggggatgcaggcactgctgttggatttaaggcagaatcctggaggaattttaggagagtctgtacgtgttgcacaatatttagttcctaagggaccgatcgtatccgttatcgacagggaaggtcgcaaatatacggaagaatcttatttggagcaagtgaagtatccacttgccgtattagttgatcatggcagtgcaagtgcttctgaaatcgttgcaggagctgtgcaggacactaagtccgggaagctttttggtactcggacctttggtaaggggtcggtacaaactgtatataggctacctcagaatactgggttaaagctaactacggctaaatattatactccttctggaagatctattaatggtacgggtattacgcctgatgaagttgtggaactgcccgaacagcccacaaaggatatacagctggaaacagcagagaactatttacgtaatctgcagaaataataatttaagaaccaatgccctcaagcattggttcttttgcttttgttatatttttatgataaaatatttaagtatataaataattgatatggtgatattatgaaattatctggagaaatagcattagcaagtggttttatttttgattatagcaatatgataaatactgatacaataacacctgcagttattgaaactttggagagtaaggctaaagatgctgcagatgctttactgttaatacgtgagcaaggtatggcaaaggcacatttatctaaagatggtacgccggagcatgtgctttttacgaaactgcctttcgttaagaatggcaatcctaatacgccggagtctattgctaaattgaagcagtttggaagttatctgcagcaggagatagatgctgttgttttttttggagtagggggatcttatcttggcaataaagttctgtttgatatttttgccggttccggctggaatgtaggctgtgaaaaaagcaggcatggttatcctagggtatatttctcgggaaataatttagatgtagatcagtatagtgaagttgtggatgaagtggagtatcttgccacgcacaggctggggaaaaatgagcaattcagagtattgcttgttcctatttccaaatctggtacgactttagaaactttagcagcgttttcttatttttatgagcagtgtcaaaagtcttcgttattgcaaatggaggttgctgttgtaaccgatcttgatgaagatatatctcctttatataacttggccaaggagaatgtatggcagtgttttgatatcaaagaaggtattggcggccgattttgtattttcagcgatccaggattaattactgctgccgctataggaatggatatagatgcctttttatgtggagcaagggatatggaaaatgcatgtcagtcagcttcgcttggagaaaacccggcgctcttgaacgcagtcttgaagtatgcagcagccgaaaaaggggttgatattgaagtttttatgccatatgcggcgaaaatgaaatctgttggtgaatggtatgtacagcttttggctgaatctcttgggaagcgtaaagatcgtgaaggcaatgttgtttattatggacgtactccggtttcagctgttggttccactgatatgcatgctcaaacacaacagcatcaggatggaaaaaaagataaagtaatacagtttgttgaaatattggaacgtgagcagcagattgttttaaacaatccctttactcatatcagctcattaaaaaaatatgacggcttgtctgttgaccatgctctgaaaattgcacttgctgctaatgaagaggctttgaatagcgacgggcggttaaatgcgaaatatattttgcctcggatagacgaatattatttaggacagctgctttattttctgatgctttccgtagcatatgaaggtgagttggctgatgttgacgcctacgatcaaccgggtgttgaaacttataagcaaatcatgaagctgaaaatgtcccaccagtagaattttaacgtgccgatattttacggcacgttttgtttttgtgaggaaatatgaaaaagttttggaaatttattttaacgattatcatagcagtcgcagcgtatggctatgaagcttatgattttgggtcagaagctcatgaagctatttcacttttgcaaggccagcttgaggtaaaattgttggatgttgggcatggggatgcaattttattgagaaatcaggctgttgcaatacttgtggatacaggtgattataaaaatagtgatatacttgttcgcagattgaagactttaggggttagaaaactggatgctttgattattacacatcatcatttagaccatttaggaggagtaataaaaatattaaataattttgatgttaaaaatttttatgacaacggtattgtaaatcctcaaagtgaaatttctaaagatgtagagaaattgattcttaacggaattttaagccgccaaatattaagtgctgggcaaaaactggagtttgcagacaatataaatttaaagtttttagcacctgctagtaaaaatggtttccctgaaaaagatttaaataataatagtttggtttttaaattgcagtatggtgaattttcaatgctttttacaggagatattgaagcaaagaccgaaaatgatttggtaagtagatatggaaaaaaactgcagagcactgttttgaaggtagcacatcacggaagcagtacgtcttccacttataattttttaaaagtggtacagccacagctggcactgataagctgtggcgataaagaaaaatataatcatcctaataaaaaggtattgggaacatttgagtatttacagattcctgttaaagtcaccagtcaaaatggtgaaattactttgaggactgacggagaaaaatatcagattatgacagataaataaaaaacgtcatcttaaatttaagatgacgtttttgttatttagaatgttgctccatttgcaaggaatactggttcggcagaggttttttctgctaaagttgtgccaatataacctcgttttaccattgtctgcaaaactaaacgctgtctttttttacagccttcaggattttctagtggattgagtgcagatggtgcataaggaagagccgcaataatagcacattcggcaagctgcatctcctgaggtaatttatcaaaataggtaagtgctgcagacttgatgccagtggcaccggcaccaaaataagttgtattaaaataaatctctaaaagctggtctttactgtaatgctgttccataaccagagaaagcagcgcttcttcagttttacggatcaaagtctgctcttgtgacagaaaaaggttttttgtgagctgttgcgtaattgtactgccgccttgaactacttctccggcagtaatatttactaatgtagcacgcaggataccgtcaacatctatggcgccatgattgtaaaaattgtgatcttcaatggccagtaaggcttgctgcatttcaatagggatatctgtgataggaacccactcaatatcgttagtgcgttcttggacagcttcttcaatatttaggcttagccagattttttgtatcggatctggccaagtttgttttggaggtaagatagaaagtaaaaaaacggttgccttactgtgttcagcaggcggcagttgcacagaatgctgtgtagttggcgatagaatctcttttttgatggggtcaccactggtaggataccaaaaaaagatacctacagctataatgatgataacgaatattttgaacataaggtacctctttaaattattataattattgattatattgtatcagagattttagaaataataaaataaaaaacacttaccaatgaataaaaaattgaaaaatgttttgaaaaaaggcctctaaagtagtacaatattaaatataatagggttagtgtttataataatagacagattttttttaagtaggatatttttaaaaatttttcagagaaatacttgcgtgtttatgcgataaagttgtataattacaaatcataagttttagggaggctggatatgaaagcaagtgtcattggagctacaggttttgccggagccgagctgttgcgattattggatggacatccggaagtagaacttgctgcgataacatctgaaagcagtaccggtgagaatattgctgctatgtatcctcatctgtctgtacggattgaaactgcattgggcagtttacaggatattgagcaaattgctgataaaagcgatgttatttttattgctttgccgcatggtcatgcgatgaagatcggcaggcagttgaaaatgcacgatacaaagataatagacctgggcggagactatagatttaaggatatacgagtttttgaagaatggtataaagtaaaacacgaagatccagaaactaaggcagtctatggcctgaccgaattatataggggacaggtaaaggatgctaaaattttagcgaacccaggctgttatacaacttgcagtattttagccttggtacctttactgaaagcaggcttgattgaaacccagggaattattatagatgcgaaatctggaacaacgggtgcaggacggggtttgaagctgggtagtctctattgctctgtgaatgaaaattttcacgcttatggtgttgctggtcacaggcatactcctgagatcgagcaggtttatagtgaatatgccggaaaagatgttgtgattcaatttacaccacatttgttgcctgttgatcgtggtattttagcgacttgctatgcctctcttaaaaatgacgtcagcgaagctcaggttcaggaagcttttgcagaaatgtatgctgatgagtattttattcgtttgcgcggtcagggtgcttgcccggaaataaaaaatgtcagagcatctaattatgtggatattggctggcagattgataagcgtactggacgtatcatcgttatgagtgtgctggacaatttagtgaagggtgcggcaggtcaggctgtgcagaatatgaatgtgatgtttgggataccggaaaatactggtttgactcaattacctatctatccatgaggaggcgtgaagaatgaagaaaattgatggctgggtaacagcgcctcagggttttcttgctgccggggttaaagccggtattaaagctagtggcaatcatgatgtggctgttatttacagtacagttccggcatctaccggtgctgtatttactcaaaacaaaatgtgtgcggctcctgttttattaagcagagaagttgcacaagagtctgtggctcaggctattatagtcaacagcggttgtgcgaatgcctgtacaggtgaacagggcttacttgatgccagagaaatgcaggcttttgcagctgatttacttggtattgaaccgcagaatgtttatgtttgcagtactggtgttataggtcattttttgcctatggataaaataaaaaatggtttagccgatgctgtcgatgttatggatgaaaacgaaggtgaaagctgtgctatggcaattcagacaactgatacgtttattaagcgtgctgcttatgaatttgaggttggagggaagactgcaaggattgctggaattgctaaaggtgcagggatgatacatcctaacatggcgacaatgctcacctttttaactactgatgcggcaatcgctccagatgttttaaaaagagctgttaaggctgctgctgataaatcttttaatatggtagtcgttgatggagataccagtaccaatgacagtatgatcgtactggccaacggactggctgaaaatgaaattatattttcagaggaacatccagattatccggctttttttgaagctttggtaacttgtgcacaggatctcgctaagttgattgccagagacggtgaaggagctacaaaatttttggaagttaatgttgttggtgcggctacatgggaagatgccaaagcagcggctatggcaattgccaagtcgccacttgttaaaactgctttttttggcgaagacccgaactgggggcgcattgtttgcgccgcaggttatagtggtgcagcaatgaatgcagataaagttaatttgtcaatcggcggcgtacgtttagttgaaaatggtatgaactgtaatataccgctgacaagcttgactgatatcatgagtgaacatgatatcacaatgaccattgatatggcggcagggaatgagtgtgctacagtctggacctgtgatttcagctatgaatatgtcaaaattaatggtgaataccatacctgagatttgttgacgtactgagtcgggagctttggccgcctcaaatttataaaaataacaaaaggcagtccagggcccggtactgccgtaaaaacaggaggaactgtcaatgttacgtaacgaagaaattaaaactttagtggaagcgctgccatatctgcgcgattttaaaggaaaaactgtagtagtaaaatatggcggtaacgctatgcttaatgatgatattaagactaaagtgctgcaggatattgttttcctgcaatgcgccggattacgtcctgtagttgtacatggaggcggtcctgaaatcactgctatgcttggcaaggctggcaaaaaaacacaatttgtcagtggtttgcgcgttactgacgcagaatccgtcgggatagctgaaatggcccttgttggtaagatcaatactgaccttgttgcccgtttaaatgttctgggtggacgcgcagttggtttgaatggtaaggatgccggacttatccgtgctaaaaagcatttggcagatgtttatgaaaatggtgaggtaaatttagttgatattggctatgtcggcaatgtcgaaaaaatcaatacagagcttttagaagtactgcttgataatgattttataccggttattgcaccgactggagtgggtgctaatggagaaacttataatattaatgcagacagtgttgccggtgagatcgcaggtgcactgaaagctgaaaaattactggttctaactgatgttaaaggtatttatgcggattatcgtgatgaagcaagctttatttcgacgctgagctttgaaaaagcacaggaactgatcatccgcggcaacatcgacggaggtatgattccaaaagtgaaggcctgcatcacggcgctttccggcggtgcgaaaaaaacgcatattattgatggacgtgctgagcatacaatcttaatggagatattcagtgatgaaggcgtggggacagaagtagtaaaagagctgtaaagactgctgagaataaaaggattagaggggatcgcaatggacgcaaaaacaattatcgaccaaacagaaaaatattatttgccggtctttggtcgatatcagctggcacttacccatggtaaaggctgtaagctttatgatgctgacggtaatgaatatctggattttttagcagggatagcagttaattctttgggacacgcacaccctgcactggtaaaagctattagtgaacaggctgcgaaacttatgcactgctctaatatttactatactgatattcaggcaaaagctgttaaagaaatcattgaaactacaggctttgacagggtatttttagcaaatagcggtgctgaagccaatgaaggtgccataaaacttgcgcgtaagtatggccatcaaaaaaatgaggggaaatatcgtattattacggctgtacattcctttcatggtcggactatgatgactgttactgctacaggtcagccaaaatatcagcaaggatatgagccattgcctgcaggttttgattatgttccttatggtgatttggaagcgttacgagaagcaatggatgaagatgtttgctgtgttttgctcgagcctattcaaggggaaggcggcgttcatgttcccagtgatacatacttgcatgaagcaagattactgtgcgataaatatgacgcactgcttgtttttgatgaaattcaaacaggtgtcgcgcgtacaggaaaatggtttgcgtatatgcatagtggtgtaaaacctgacattatgacttttgccaaagggattggcggtggcttccctgttggtggttttgtcgtcacggaaaggttggcgcatgtttttaaacctggtgatcatggtggtacttttggcggcaatgctttagcatgtgcggctatttatgcgaccttaactacaataaaaaatgaaaatattctagaacagacggcagaaaaaggagattatttcaaaaagaaactggaatttctgatggctaagtatccggataaggttattgaaatacgcggctgcggcttgattttaggcatggagttggctaaagatggcaaagaggttgtcgaagcttgtcttaagcgccaggtcattgttaattgtacggctggtaacgttattcgtttagttcctcctttgatcgttacaaaagaagaaatagatcaggcagtagctgctttagatgcggcattggctgaattttaaccaagtttgtgagggtggagaatgggtttaagaaataaagatttgatttctattcacgatttatcggtgggtgaagttgcgactattttagatgtcgctaaaaagttaaagcgtaaacaaaaaaatggcgagccgcatcaatatcttaaaggcaaaactcttgggatgattttttccaaggcatcaacacgtacacgtgtttcttttgaggttggtttctggcagcttggcggtcacccgatttatttgaacgattctgcttctcagattggccgtggtgaaccagtacgtgatacggcaagagtcttatcacgttttgttgacgggatcatgattcgtaccttttcacatgaatctgttttagaattggctaaatatgcaagtattccggtcattaacggtttaacggatatgctgcatccctgtcaggctttgactgatttatttactattatggagtataaagaggtcttgaaaggcaggaaacttgtttatgtaggtgatggtaataatatggcacattcactgatgtatgcctgtgcaaaagttggtatgaatatggtctgtgcttgtccgcagggatatcagccagatcctgttatcgttaagacagcccaggaagatgcagtccatacaggctgtacgattgaggttgacgatgatctgttcagagcctcgaaaggtgctgatgtactttatactgacgtttgggcgagtatgggtcaagagtcagaacaatctatccgtcaggaagctttgggtgaatatcagatcaataaagaattgctggcagtggcccggcctgacgctatggttttgcattgtttgcctgcacatcgcggggaggaaataactgaggatgttttggaaggaccgcaatcaaaaatttttgatcaggcagaaaatcgtctgcatgtacaaaaagcgattatggcacttttgatgagtgatgaagtgttataagtaaaaatacggtatacattcataaaaactcttccattttttggaaaatgtggtataatcatattcgtcattacaagtttatgcatgaaatcttacatatttaaacatcttaggaggctgtatctacaatgaaaaaagaagacattaaaaaagtcgtgcttgcttattctggtggtttggatacctcggtaattattccctggctcaaagaaaactataataactgtgaagttatagcagttacggcagatcttggtcaaggtgacgaacttgatcccgtacatgataaagcacttaaatcaggtgccagcaaatgttatattttagatttgaaggaagaatttattgctgattatgtttggcctgttgtcaaagccggcgcagtttatgaaaagaaatatttacttggtacttcttttgcacgtcctctgatcgctaaaagattagtagagatcgctgaaaaagaaggtgctgatgctgttgctcatggtgctacgggcaaaggtaatgaccaggttcgctttgaactttctgtaaaagcactggctccgcagctggcaattattgctccctggcgcgaatggagcatccgttcccgtgaagatgccattgactttgcggaagcacataatattcctattcctgttaccaaggaacatgattattctatggaccgtaacatgtggcatttgagccatgaaggttcagatctcgaagatccctggaatgctcctaaggacgcactttttattgtaactaatactcctgaaactgcgcctgacaaagctgagtatgtagaactggaatttgaacagggtgtgccggttgctgttaacggtaaaaaaatgagtccggccactatcgttgaaaatcttaatgagattggtatccgtaacggcgttggtatttgtgatatggttgaaaatcgtctggttggtatgaaatcccgtggtgtttatgaaactcctggtgggtctattatttattatgctcataatgaactggaaaatctttgccttgatcgtgctactatgagctataaacaaatggtaggcattaaatattctgaactcgtttatgacggtatgtggttctctccgctgcgcgaagctttggcagcttttgttgatgaaacacaaaaaactgttacaggtacagtacgtttgaaactgtataaaggcaatatcatttctgcaggcgctaaatctccgtattccttatacagccaggagtatgtaacttttggtgctgatgaagtctataatcaggcagatgccggcggctttattaacctgtttggcttgcctttgactgtacgtgcattgatgaaacaaggaaaactgaaataatggctaagctttggggcggcagatttagtaaaaataccaatgaactcgtagatgcatttaatgcatctattgagtttgataaacggctgtatcacgaagatatccgaggcagtattgcccatgcgcaaatgctgggcaaatgcggtattattcctgctgaagatgtggaaaagattgtagccggcttggaaactattcttgctgatatcgaagccggtaattttagttttgaagtggctttagaagatattcatatgaacattgaggcacgccttactgagcggattggcgttgctggggcacgtttgcatactgcccgcagccgtaatgaccaggttgctttagacatgcacatgtatatgaaacgtgagattgtagagatcggtgaattgctgctgcagtttgagaaggcgcttttggcagttgccaaaaaacatgacagaacgctgatgcctggttacacacatctgcagcgtgctcagcctataacctttgcacatcatctgctggcctattttaatatgctgcagcgtgattttcgcaggttgcagggggtgtggtctggcgctgatatgatgcctcttggtgcaggagccattgctggaactacattccctattgatcgttttgatgtggctgagcagctgaatttcggcagtgtttatgccaacagcatggatgctgtcagcgatcgcgattatattatcgaatttttgtcatttgcttccgttttgatgatgcatatgagccgtttgagtgaagagatttgtctgtggtcaagtacagaattcgggtttatagaactggatgatgcatttgctacaggttcatcgatgatgccgcagaaaaaaaatccggatattgccgagcttgtgcgtggtaaaacaggtcgtgtttatgggcatctgcaagcgatgctggttacagccaaaggtttgccgctgacttataataaggatttgcaggaggataaagaaggtttttttgatgcggtcgatactgttaaattcagtctggcagtatacagcgatatgatttctacgatgactgtcaatgtagaaaaaatggagcaggctgtcagcaaagatttctctaatgctactgatcttgctgattacctcgttcggaaggggttacctttccgacaggcccatgaagttgtaggtaagtgtgtggcttatgctatccatcagggaaaattcttgccggagatttcgcttgaagaatataaaactttttcagcgttgtttgaagaagatctactagaggctttgcagccggaaaactgtgttgcggcaagaacttcttatggcggacctgctttttctgaaaatgctaaacaattttcacgcggagacgtactgttggcagaacagcaggtagtattagatgatttaaaagcaagaatataattaatttaagaaatttttgcaaaatatattaaactcgtgcatttcgcatagcgaagtacacgagttttttgttataatatatattagaatattgttgtctaaaaaatacttaggaaacaggtgaagagtttgttattgcagctgcagggattattaaaaacgataagcattttagatgttttggatattttagttgttgcttatttccttttccgtatatacttaatgttaaaaaacactcgggccgcaactttagtcaaaggtcttttggtcttagctgttattttatttatcagtaaatggctgaatctgcatgttattacctggcttttggaaaaaagtatgacagtagtcatggtcgcgctgcctgtagtttttcagccggaactgcgtcgtgcgcttgagcagattggtcgcgggcgtttatttcataagcataacgaacttgatgaaaaagaactggaagatatgctgaatgctgttactaatgctacggaaattatgagtcgtagaaaaataggcgcattgatggtttttgaacgggagacaggtttggaagagagaattgaaaccggcgtgccgattgacggtttgatttcagatagtttgctgctcaatatttttgaaccggatacacccttacatgatggcgctgttgttatacgcggtaatcgtatcgtagcagcaagctgcctgcttcctttaacagaagcacgtaatctgagccaggagttgggaacgcgccatcgttctgctatcggtatttccgaacagtcagatgctctggttttagtcgtcagcgaagagaccggcacgatttctctggcccgtaacggtgaattgcatcgctatctgaccggcgaagatattaaaagcttattaagagctgctgtagtacagccttctctgaattggaaacaggttatcaatgataaaatcaaagagattcggggtggcaaatgatggggaatttctttgatcgtgaaaatatgttggcacgggtcatcgcgtttcttattgcctgtgcgttatggatgtatgttatgaatgaacagaacccacttgtagaacgtaattatgtggttaatttggaactgcgtaatgtcccggaaggtatgattgtacttaatactcctgataaagtgcgtgttaaggttcaggctcaaagaacggttttaggtgatataacggaaaaagaagttacggcctatgttgattttgctgacaaaaatataggacagcaggccttgcctgttaaagcacagtttaatcaggggaccgtgttggaagtatatcccaataatatttatgcttatcttgattctgttacagaaaaggtaatggaggttgatacgcgtgttatcggtatacctgcttctgattttactttaagtaaacgagaggtcattcctgacagtgtaactgtaaaaggtgctacgcatcgtatcaatgagatggctagagttgtggcacctgttgatgtcagtgagcgagaaaatgattttcaagttgaaagtacattgatagcgatgagcgctaatggtttggaaatgcctgatttgcagatttcacctgctaaagcacaggtaaaagcttcattagtacgtcagatgattacagttgaagtaccggtagttgtagaaactactggagcattaactggcggaatgaccatgaaacgtgcagtctgtgaacctgcaacagtgaaattgacagccgaaccttccattttgcaaagtataacagaagtaaagacacagccagtagatttaggtaaattcagtgctaatggcaatgtagaagcggtacttttgttgcctgaaaaaacaatggctgatactcatacggtaaaggtacatattgaggcggaatgagaaaggattactaatgaggttaaaggtgaataatgtcagggtttcgcttttggaggaaacatctgttaaagaggcagccgctaaaaaactgggattaaaaaaacaggatattgagaatttgcaaatagtacggcgggcagttgatgcccgccgtaaaaataatatttccttaaattaccatgttttgattgatttagaaatatcttctaagcagttaggtcgattggttaaggataaagatgtcactttattgacagaagaaagtcttgttgaacctgatttgggtgtggaaaaaatagttggacggccgttggttattggagcggggccggctggtttgttagctgcattggagttggctcggtatggttataggcccttgatactggaacgtggtaaacctgtagcacaaagagtggatgatgtgcagcgtttttggaaagacggaaaatttgatccagattctaatgtccagtttggtgagggaggcgccggtactttttccgatggtaaattgaccactcgtgtcaatgatccggtgatgggaagaattttaaaagattttgtgcaggcgggtgctcctaaggaaattttatacgaacataagccgcatgtgggcacagatcaattacgtgtgatggttatgggcttgacaaatgaaatacgtgcctttggcggtgaaatacgttataatgcccatgtcgttgattttatagttaaagaaaatagtttgagcggagtaattctttctgacggtgaaaaaatcatgagcaatgcggttattctagcatgtggtcacagtgcgcgtgatacttattccagattgctgcagcttggaattggtattgaagcaaaaccatttgccataggggtacggattgagcattcgcaggaacttatagataaggcacagtatggtgattttgcaggacatccacgtctgggggcagcagattacgcattagtccatcatactccggataagagtagaactgcatattctttttgtatgtgccctggtggtatggtcgttgcggcagcatctgaagcaggtggtgtagtagtaaatggtatgagtatgtatcagcgtgattccgggattgccaacagtgcacttgttgtaaatgtaggtcctcaggattttggtacggatccgcttgccgggatggagtttcagcggtattatgaaaagctggcgtttaaggctggcggaagttgttataatgcgccggcacagaatgttgcaagctttttgaaatatttgcagcctgatttacggtgtaatattaaagctacttacagacctggattgaccgcttgtgcgttagacagcgttcttcctgactttgttgcagatactttacgttcgggaatacttgcttttgacaaaaaaattcaaggttttgcggatggcggcgctttgcttacaggtatcgaaacaaggacttctgcgccggtaagaattatgcgtaataatgatactaaagtatcaattactcataacggattatatccgtgtggtgaaggtgccggctatgcggggggaattatgagtgcatccttagatggttatcatgtcgccagggctgtaatggcaaaatttacaccatttttttaaaggcttgtcacttggtgataaaaagtttataataagctgataataaaaatcctttgttcggaggtcttgaaatggctcgtttgtttggtactgatggtgtgcgtggagtcgctaatgttgaattaacgccggaactcgcttttaaattagggcgcgctgcggcaacttattttggaagggaaactactacaccgaaaatcattattggtcgtgatacgcgtttatcaggtacgatgctggaagctgctttagcagctggtatttgctctgctggtggtaacgcgcatcttttaggcgttatgcctactccggcagtatcgtttctgacaccggaagtgaaggccaatgctggagtagttatttctgcttcgcataatccttttgaagataatggcattaaatttttctctaaaactgggcataagctgccggatgcagtagaggatgagattgctgaactggtaagcctgcctgtagaatgcagtaagaatccccgcggttcttctgttgggcaggttattgtggaagaaggccttgataagctgtatatagatcatgttattgcagctgctccatgtaaacttaatggactgaaggttgtgatggattgctctaacggtgccaacagtgtcattgctccggttattttacgctctttaggggttgaggttgtaacgatttttaatcagcctaacggcattaacatcaataatggctgtggatcaacgcatcttgaagcattacaggctaaagtagttgaggttggtgctgatgttggtattgccaacgatggtgatgcagaccgttgtttggttgtagatgaaaagggggaagctcttgacggtgaccaaatgatgttgatttgcgcactggaactgatgaaaaagaaacagctgaaagataatgtgctcgttacaactgttatgagtaatgtcgggttgcatcaagctatgaaaaaatatggcggttcctgtgtaaaaacagctgttggtgatcgttatgtgttagaagaaatgttgaaaaatggatatagtttgggcggggaacagtccgggcacattattttttcaagatttgcaaaaactggtgatggcattttaaccgccgtacagcttctcggggcgttggttcaaaataacaaacgactctcagaaatgggggcgatgatgacaaaatatcctcagattctgcttaatgtacgtgttgctgacaagcatggctgggaagaaaaggaatctataaagaatattataaaaaaatatcaggaagagcttggtgacaacggccagattttggtacgggcatctggaaccgaacctttgatccgtattatggctgaaggaccacagcaagaacgcttagaagagatagcaagtgctattgccgaagttgtcaacagcgaactgggataactggtcagcattgacctaagagtcaaaatatagtacaataacaatggttacaaggacgtgccgcgtgggacaagccaagcctgcgcggcatgttgtgtgctcagcatacacttgttaccataagcgcaagtgccgcctttggcggcagacgagggagaggtttatcgatcagtcagcgggtacctctcggctagctgcaggccgtaagcagactacaaattccggcggtaacgacggtgacaaaatgtctgtggcagaattggcaatatacatttaggaggatacaactatgtgtggtatcgttggttatattggtaataatcaagcagcgccgtttttactggacggcatgagcaagcttgagtaccgcggttatgattccgctggtatcgctgtttatgaaaaaggtaagatcactgttgagaaatgtgtaggccgtcttgattctttgcgtcaaaaattggatggtcatatgcctgaaggcaccatgggtataggacatacccgttgggctacgcatggacgtccgtccgaccgtaattctcatccgcacactgatgccagcggggagtttgttgttgtgcataatggtattattgaaaattatctggttctgaaggaagatttgattgccaaagggcacaaatttgtttctgaaacagatactgaagttgtggcacatttaatggctgcatattatgatggagactttgaagaaactgtaaaaagagttttgcgtgttattgagggatcctattcgctggtgtttatgtgtgccaaagaaccggagaaaataatttgcacaaaaaaagataatcctttggttattggacttggtgaaggcgaaaattttattgcttccgatataccggctattattgctaagacacgccgtacgtttattatgagtgatggtgaaattgctactgtcactaaagaaagtgtctgggtacaggatataaatggaacaccgatcagtaaaaaggtttttgaagtaaattggaatgcagaggctgctgaaaaaggcggttttgaacattttatgcttaaagaaatttacgaacaaccaaaatctatccgtgatacaatgactgggcgcgtaccgaaagattctcacggaattgaatttactgaacttggctggacagaagaagaaatggcaggtatcaataagatttttattgttgcctgtggcactgcttatcatgcaggtattgttggaaaatactatttggaacagctggcacggattccggtagaagtcgatattgccagtgaattccgttatcgcagtcctttagttgatggcaacagtttgacgatagttatcagtcagtcaggtgaaaccagcgatactttggctgctttgaaagaggctaagcgccttggttcccgtactttggcggttacaaatgtcgtaggttcttctatttccagagaagctgatcaggttgtttatacctatgctggcccagaaattgctgtagcttctactaaagcttatactacacaacttttagtaatgctgatgctggctatttatgttggacgtttgcgcggtactttagatattgccaaagcgcataagcttgtggaagggttacacgatatccctgagcagattcataagctactggaaaatgtagatcagattaaagtttttgcaacccgttatggcagcagtgaagatgcatttttcctgggccgcagccttgattatgctgttgcgctggaaggtgctttgaagcttaaagaaatatcttatatccatgccgaggcttatgcagcgggagaactgaaacatggtactttggctttgattgttgaaggtgtgccggtaatcgttttagctacacagcctgatgtttatgataaaacagtcagcaatctgcaggaagtaaaagcgcgtgaagcgatggtcattgcaattgcttttgaaggggatgacagtattgcaaaatatgctgatcatgttattttcattcccagaacagataaatatctagctccgttgcttgctgtcctacctttgcagctgttagcttattatgctgctttaactcgtggctgtgatgttgataagcctaggaatcttgctaaatcagtaacagttgaataaaaataacgcctgccggaattttttggcaggcgtctttttgtgtccgtcttgaaagttattttggtagagttagctaatagtgcgaaaaatatgctataatagcggtaacaataattattatcgaaaaggagtattgtatgaacaattctgttgctttattatataatttcaatgaagaaaagttaaaaatgattaaaatggtctgtatgatgatgcaggtgaggtttaaagaggttgcaagagcagagtatgagcagccgctgggagctttattgggaatttctggaatagaaaatcacggagaagtttatcagggggaagaatttcaggaagaaatgttggtgctgcatggatttgacggcagcaagttacaaaaatttttaattgctttgcagcgtgtaggggtaggaagaatagagttaaaagcgatgattacggaaaataataaaagttggaatggcctggctttatatgaggaactttgccaggaaagagaagcttttaagaagatggaagctgaaagacgtaataaagtacaaaagtaaaagtaaaaccgcggtttaccgcggttttactttttttctaaaatattttcagaaattatacaagctaaaattattacagctccgctcatacctgtaaaagttaatttttcattaagtaaaaagtatgaggccgcagcagttaaaataggttgagtacattgcagcattgatactaaggaggaagataagaatttcaaggcagcgttttgcagaaaataagccaggcaggtacatgtaatagccagatagataacaacagcccaggcttctggttgaattttagtgatagtgctgatatcgtcgaataataaagctcctgcgatgctgataactgccgtaataaaggtttgaatagcagaaatagtgatagcatctgttgctttcagagatttttctccaaagaccagtgctcctgcgacgctgactgctgtaagcaatgcccataaatctccctggttaaaagaaaacgttcctccattactacagagtagatacataccgagaatgactaatagttgtataggaagatgtgaaattttataaggtcgctgtaagactattattgacaaaagcggtgcgaaaattactgataaggacataataaagccaacattcgttgccgtagttccttctaatgccagattacatgaaatataagctgaagccatacataatcctgctggcagatattggcttgcagaaagtgcctgcagctgtttccttaagcgtgttgcaaagaaaattgcgaagagagaaaaagccagaccaaaacgaaaggccagacaccataaaggtgtgatactggcaaaagcaattttagtgagtggattacctaagccgtatagaaaactttgcaacaatatgaaaatgatatatttattatgtgaattgtttatcatcgttctccttgaatacaaattgcaaaataaaatacattgtgagttatattttaacagctaaattcgactaatgcaaactattttgtaaattaagatgattgctttgacaataaaaggcgtttttttgccagtaatgattgaaactctgcttctaatttttcagttggattgaggctaaggtgactgataatttcagccagtttattttctataagtaaaatatctgctgttgcttcaatatactcagtgcttatttgtttatttgagtagtcgtcatatggcccagggaaaaagttcagttttgttccatcaaagactaataaatttttagcaatggctttaagcaggcggcggtcatgggttgtaaaaatcaaagttcctggataattgcataataattcttctaaagcagttacagcatccagatccaagtgattggttggttcgtctagcataagtacattacagtcactgactaatatttttgctaaagcagctttgactttttcaccgccgcttaaaagctgtattggtttaaaaaaatcttcgcgtttgaaacgaagtcttattaaaacagtacgtaataaagcttcgctttgtgaagacgttgactgtaggttacggagcaggtttttatcaggatcaagaatatcaatatcctgactgaagtaacctatttttgctccgccggctatttgcacatttggcaagtgtttgttgtgtgcttttaaaaattgtttgagtaaagttgttttcccgcagccgtttggtccgatgatggcaagtttgtcgccggattttactgaaaaacttgctgtttgccagagcggttttttatcaataatataagaccagttatgtgctcttactaaaatttgtccctgccatagttttgaagacagtaaattcatttttattattggtaaggattgtcttttttctatctgtttaagtttgtctaacctcgtcagtagggattgacctgtttgctgtaactttttctgttttttagcaaagtagggtttagctccggtaatcctggcttctgataaagatatcttcgtggttttaacagctttttgcgcttgctgctgtttggcagaaaaagctgtttctaaatgagttttttgcataatatatttacgataagcttgatcatgagttttttcagaaattatcttttgctgctgataattactgtaattaccttgatatatttgaagttgtttatcgtccaaagcccagatttcattgcataatgcatctaaaaaatcacgatcgtgggaaactaatattaaggctcctgagtaatgccgaagttccttttcaagccataacaaatggtccatatcaagattattagttggttcgtctgccagcagcaaaccggattgttgtttgagcgcctgcaggatgtaggcttgagtcgtttcgccaccgcttttggagagtctttcttttaattgcggtagtatagtcattgttgttttgcaaatgatttttgcggctgcaggaattggtcttatacctgctaataactctaataaagttgtttttccacttccgttcagcccgatcaggcctatacggctttttgtatgtagttttaaagcaggcagtttgaataatagtctttcgcctaaataatatttaaatgaattggtttcgaggatgtacatataatttcaactcctaactttcgaagacaataaaaacctcccgattcaagacagaatgggaggtgtaaaggtagacttagcctcaaatcgcagaaaatgatccattctgacttactgataaaagacaacacttaacaaagcttttggttttaagctgtttttgtgtctttttcagataaggtgcgaaattggatcagtttttcattcgttcaagtgtcctttcaatattcataattatatttttataatataggattataaaatctttgtcaactaaactccagtcccatcaaagatgggaataaaatcagcgctggcagcggtatcttcctgaacaaagccgtcttcaataccggaattgaaaaggtactgctcaactttttgatattcttctgcagtaacaacacggtttatttcagggtattcagcggctcggccgcatggaatatattgatgcatcagactaaacaggacctgccctggttcaaaattgtcagcgatccagtctattactcttagtgtattttctaacatattcggtaacagcagatgcctgataattacaccactttttaataaaccattttcatcgatttggtagggcccgacttgtttgtacatggtttttatggccgttgtagcagtattaaaataattaggcgcattactgtactttattgcggctaaatcgtcactatattttagatcgggaagccatatttgtattttatttttcaatctgtgtattgtatcgacagtttcaaaaccactggtattataaattacagggactggcaatggttcctgtaagcttgcgataatagtctcagtaaaatgtgttgctgtaactaaattgatattatgggctccttgtttaattaagtcaaaataaatttcttttaatctttcaacggatatttcctgtcctttatttaaacagctgatttcgtaattttggcagaatgcacaatgtaaattgcagccactaaaaaaaacagtgcctgaacctttggtgccgcttatgcatggctcttcccacatatgcagtgccgcacgggcaactattggctgcataccgcagccgcaggaaccgaaaataccatttggactgttcattgtttctgccctgtcaactccgcagcggtgtgggcagacgtaacagtaagtcattaaaacatctcctttggagtattttctaaattgtagcatagttggacaagagataaaaggataattgacaaaaagagcggtaaaaagtataatctaaagcagaagtaggtcatataactgacggaagtggattaaccacgtggagtatgaccggtgttgccgaccgtctgggcgttttaccccagaagtgtcggtttttttatatatttttaaggaggaatagtcgtgaaagagctgctattgaagtatggctgtaatccaaatcaaagtaaggcgcgtatttatagtaaaataggtgaactgccaattgaggttttgaacggccgccctggttatattaattttctggatgcctttaacagctggcagttagtaaaagaattaaaggaagctaccggcctgcctgcagcagcatcttttaaacatgtaagtccagccggtgctgccgttggattgccgatgagcgatgtactgaaaaaaatatattatgttgacgatctagctctgactccgttggctactgcttatgccagggctcggggtgctgaccgtatgtcatcttacggagactttgtcgctttatcagatatctgtgacaaggagactgcagctatgctggctcgagaagtttcagatggcgttattgcccccggctatacagaggaagctttggaaattttaaaaactaaacgtaagggcacttataatattatcaaaattgatccgtcttatattccagagatacaggaaacgaaagatgtatttggtataacttttgaacaggaccgtaatgaggctaaaattacgtcagagctgcttgtaaatcgtccgactgtcaataaagaaattcctgaggatgcagtacgtgatcttctgattgcgttgattactttgaaatacacgcaatcgaattccgtctgctatgttaaagatggacaggcgattggtattggtgcggggcaacagtctcgtgttcattgtacaaggcttgccggaaataaagctgataactggtggctgcgccagaaccccagtgttttagaactgccttttaaggacagtattcgacgtcctgatcgggacaatactattgatgtgtatatttctgacgattatgaagatatacttgcagatggaatttgggaacagttctttaccgaaaaaccagctccgctgacacgtgaagaaaaaaaagtatggcttcataagctgcacggagtttctcttggcagtgatgcttttttcccgtttggtgataatattgaacgcgctcaccgcagcggtgtagattatattgctcaggcaggcggaagtatcagagatgataatgttattgaaacatgtgataaatataatatcgcaatggcatttactggtttacgtttgttccatcattaatgactttccgccaaagaaaactttggcggatttttttgaacaaaaatgactgacaagtcagttttgtgggcgttggaagctgttgtggtattttttttacataaatcgcataaaattgtctgaaaactattgagttagtaaattttttgtggtaaaatacacaaggtataatgtccaaaatatgtttatgttttagtaagattatggcaagtaggagatgagtagttcgtgagtactgaaaatgtatcgggaatacttttcttagtgcaatcggcttgtctggaaaggcgctttttagatgatccggcgctgagtatagaacagttaaactgcggccagatacggataagtttttctctgacggccggtactgaccttgatcatcgtggtaaggtccgtagcagcgttatttatcgtcttcttgaatctgtattgcaaatcagcgctgtcagcgttggtgtcgaagctgaaacattaaatttttgttgtaacattgtaaaatacacagcagctgaaaaactttatgctgtctgtaagatttgccattgcggacgaatgactcttgtggccgaagctgaggtatatgatgaaaatgatactctgttggcaacggtactgacgactttgtttgttgtggaaacaattaaggatataccccgtaaatggtaaaggctgacggcaagtcgccttaacaagcaatttggcttaagccttaacacaaggaggacaaaatggattttgcacttaatgaagaacaacttgaattacaggaaatggtgagggattttgtagaaaaagaaattaccccttacgctgccgaaatggacagaaataatcaatctatgcccgggctgcttgaaaaagctgctgatatggggcttttgaatgttattgttccagaagaatatggcggacctggactggacagcgttacagttgccgttatttatgaagaactgggcaaaggctgtgcaggtgttgctacctcaatggctgcgaactccctggcgtcttatcctattttaattgccggcactgaagaacagaaacaagcgcattgtgatttacttaatgatggtaaactggctgcgtttgcattaactgaacctggtgcaggttcagatgccggtggtgtcgctacttcagctgtaaaaaacaaggaagccggaacttatactcttaatggtactaaagcgtttattactaatggtggaattgcagatacttatcttgtatttgctaatacccgcaaatccggtggtatccgtggtttgaccgcatttatcgtacctaaaggaacacctggctttactgttggtaaaaaagaggataaaatgggcatccgcccctctaatacctgtgaattgattttacaggatgtcgtgattccagaatctaaccgtgttggccgtgaaggcgagggcttccgtatagcaatgaatactttggattctgcacgtccttttgttggagcagtatccgttggtctggctcaggctgctttagattgtgctgtaaaatatgctaaagaaagaaaacaattcggccagccgattgcttctttccaaatgatccagtccatgattgctgatatggctatgaaggttgaaacggcaagattgatggtactgaaagcgtgctggatgcgtgaccaggggctggaattttccaaagaggcggctatggctaaatgttatgctgctgatgtggctatgcaggtgactactgatgctgttcaggtaatgggcggttatggctattcccgtgaatatccggttgaaaaaatgatgcgtgatgctaagatcatgcagatttatgaaggcacaaaccaaattcaacgtttggttatagctaataaaattctgtactaatagtttatttataaaacccggtactatttggtgccgggttttttatataggactgtcaaaattatttatgcataaatgtaaaaaaatatatactttaattattaagactgattactcaagtgattctcattacactatggcaaagaagcattgaaaaaagataattttacaggtataataataagagtaatttttataaatataggagtaacttatgattttgatttggctggcggcgttagtcgttttgcttgaccaattgacaaaaaatatagttgtagctgtgatggctgaaggacaaagtattcccatcattcctaacattttccatttaacttatattttgaatccaggggctgcctttggaatgtttgcccataacagaactttttttatttgtgtagctttgctggtgctgatcatagtttggtggtttagaaaagaaatcttagcagaacctttgtgtgtgcgggccggaacagcactttttattggtggggctgtcggtaatctgatagacagagctgaaaatggtatggttgtagatttttttgattttcgtatttggcctatttttaatgtggcagatattgctatttgtgtaggggtgggttttattatatggaatttaatacagacagaaatactgaagaagtagaaaatattgctgctgcagaaaatgatgttgggcaaagactcgatatttatctggctgcaaaactagaggtgtcgcgctccaatatgcaaaaacttttggaggaagggcgtgtatttcgtggagcaaaagtgtttaaagccaactataaagttaaggccggcgatgtgttcacagttatgctgccagagccggaacttttagaaattcgttctgaggctattcccttggatgttatttttgaagatgaagatgtagttgttgttaataaaagccgtgggatggtggtgcatccagcaccaggccattataccggtactcttgttaatgcactgcttcatcattgccaaaatttatcagggataaataatgtaatcaggccggggattgtgcaccgtttggataaggatacttcaggcatcatgattgtagctaagaatgatgctgcacatatatctttatcggaacagattcaaaacaaaactgccaaacgttcatatattgctattgtcaggggcaatataaaagaggataccgggacaatttcggcgaagatagctcgtgataaaaatgaccgtaaaaagatgactgtagtacaagagggtgggcgtaccgcagtaactgattatgaagtgcttgagcgttttggacgttttactattgtacgctgccgtttgagaacaggtcgaacacatcagatacgtgtccatatggactatttgggatatcccttagtaggagatcctaaatattctccgatgaaggttccatttgcgattcatgggcaggcacttcattcacaggaactggagtttacacatccgcgtacaggagaacggctgcggtttgaggcggggctgccggaagatatgcagaaaattattacccgtttacgtaacggacaattctaaaatattttgaggtgagctgtatgagtaaagtagttaagaaaaatgttattatggacagtgatgcaatgcgtcgtgcgttggtacgtatcgcacatgaaatcatcgaaaagaacaagggtgtcaataatgttgtgcttgttggtattcgaaccagaggagtgccgttggcacaacggattgcacaggaaattgaaattattgaaggcgtaaaagtaaaagtgggtatgcttgatattaccttatatcgtgatgacctttctaccttggggtataatccgatcgtacatggaactgatattgattttgatctgaatgggaagaatatcgttttagttgatgatgttctctatactggtcgtacgattagagccgcgctggatgctgtcattgacatgggacgcccacggtctatccaattagcagtgcttattgatcgaggacataaggaattgcctattcgcgctgattttgttggtaaaaacgtaccaactgctcataaggaaactattgaagttactttaaaagaacatgatgaaactgatgaagtattcataggggaagtagttgcagaataagaggtgagcagaatggcaaaaactcctactcaattacgcagtgaagctgcatgtaaaacagttttgaaaaatttggaaagacgtggttttgaagctttttattgttcggataagcctgcggctttagacaaagcattagaacttatatctgaagacgacgttgtatcctggggcggttccgttaccatacaggaaattggactgttagatgtaatgcgaagcggacgctataaggttattgaccgtgacacggcagaaacacctgcgcagagaacggagctgatgcgtaaagcactgttgtgtgatacttttttaatgagcagtaatgctgttagtgaagatggacagctggtaaatattgatggtactggaaatcgtgtggcagctatggtgtatggtcctaaaagtgtaattgttattgcagggatcaataaaatcgtcaaaacccaggatgatgctttggcacgtgtgagaatgttggcggcgcctattaatgttcaacgttttcctcagttaaaaactccttgtatggaaacagggctttgtgcagattgtaacgcacctgactgtatttgcaattatatattgactaccagacgctgtaaacctaaaggaaaaatcaaagtgattttagttggcgagagtttgggttattaaaaatattactgtctcagcatttgctgcggcagttttttatttcacattgctgtaatatcttttagcaggagcaagtatgaaaatggcgaatatatagattaagtagaagtatgattttaagaaagcgaggcagtagcgtggggaataaagtaatgcctaatgaagttctttatcatattggtatttcagcagaaatgcttaaaggagcagagtatgctttgctgcctggagatccagggcgtgtagaagcgttggccagagctcttggcaccgctgagcctgtcggttgtcatcgtgaatatacaagctggctggcggatgttgaaggaacatcggtattggtttgttctacaggcatgggaggaccttctgtcgccataggaatggaagaattggcacgtcttggcataaagaattttattcgtgtcggaacaactggttctattcagaaagatgtagaacttggtgatcttgttatcaataaagcggcagtacgtttagacggaacgtcacagcactatgcgcctttgaattttcctgcagtggcttcatttgagttaactctggcactgcagcaggcagcagaaagtctgtcaattccatatcatactggtatttctgtttccagtgatactttttggcctggtcaggaacgttatgacagctatacaggctatgtgagaaaatcattgcaggggagtctacaagagtggcaggcattaggagctttaaattatgagatggaaactgcggcgctgtttatagttgctcagagttttggtttgcaagcggcttcaatttgcggcgtcgttgctaaaaggactgacagcgaactggttgcgccgcaggatctttacgaattggcttcgcaaagatttcaggcagtagtaaaaaagactttgcaggatttaataaaggcaggtaaataacatggcaagaagtattattttattattggattcttttggtattggctatgcccatgacgctgaaaagtttggtgacagcggtgcagatacattaggccatatttgtgagtggatggctgcaaaccgcaaaagtgcggatggaagttccaggtatttacatctgcctaatctggcaaggttaggactggcaggtgcggcagagctcagccgtggtcaaaagctggcgtatcctctaagcagtgacgatagtaaaatcgatgctgcttatacttatgcagaggaaataagccatggtaaagatactctgagcgggcactgggagattacaggcgtcccggtactttttgactgggggtattttccgcagcagctaaaatgttttccaaaggaattagttgagaaaattattaaacagggaaatttgccgggggtattgggggaaaagcatgcatctggaactgaaataataaaagaactgggtgaagaacatctaaagactggcaagccaattatttacaccagcgcagacagtgttttgcaaattgcggcgcatgaagaagtgtttggtcttgaacgattatatgaattatgtaagatttgctatgaactagttaaaccttaccatatagcgcgcgttatagcgcgtccttttgtgggcactcgtgcagaagattttgtgcggactggcaacaggcatgattatgctgtgcctgctcctgctgatacgttgctggacaaactggtagccgcaggcggcagtgtctatgcggtgggtaaaattgctgatatttttgctcaccgcggaattacgaagcattatcctgccagtggtcttgataaattatttgccgctgcattgcaggctgtgcaagaagctcctgataatagcctggtttttgtaaattttgtggattttgattcttccttcgggcatcggcgtgatgttgaaggctatggggaaggattggaatattttgatgatcgtttgcctgaactgcttaggttattaaagcaagatgacctgttgctggttactgcagatcatggatgtgatccaacctggagtggcagtgaccatacacgtgaaaaaattccggtcttgttttttggtaaaaatattgttagtaaggctttactacccatgcggacgttttctgatatcggtcagacaatagctgttcatttaggtatagagcggcttgccaatggtaaagcagctgaattacgctgataggagggagtattaatgaaaaaatttaactggctgttgttggctgttttattaacaatagtggcaattgttcctaatacggctgccgcttttgctgatcagcctgtagcctttgtagtttttgataacagtggtaacgtaacgcagcaggtttataaaatgtggcgtgagcctgtacgttgggcgtatcatttccctgattttaagctggttgatacagatcggactaaaaaggtgactgcagaaaatatttttacgggacatggaaaaagcgttgtcgaccaatctgttgcgaggaagatagcagaagaaataccagcggaagcgttagttttggtcattgtgcacgacatgtacgagcagatggtgcagggaatgatatggcgtaatgaagacggttcaacctatgtaagaacggttttaaatgctgatatctatgtttaccgaaaagatggtgatagattctctaaaaaacggattagggaaaatgaaataaaagaattggggaatcagactgctccggaagaaactatgaaatgggcaatcagcaaacaggtaaatatcatggaaaatcgtcctgttattaattgaagtcataaaatgatgtactaaatattgtatatggaaaagttaataagtgaaataaacacaaaatattgtagaaagggctttacaaataattattattgatttataattaggtcatggaattttatctaaggagctggttaacatgacctatgaactgcatggtataaaaattaattgcgcggatgggatctcgcaagaagaagccgccatttatctcaataatcaattacaggtaatgccgcataaaacattgttgtctttggatttagggcttgacggtaatgatgtagtcgttaaaccacattatgacaccatagtgcgtgtacgccgtattaccggttatctcagtactttgccgcgttttaacgatgctaagaaaaaagaagccgctgatagagtttctcatattcaatgaaattaagttttaatgcctcgacctgatatggtcgaggttttttatttgggtgtacgtttgtttgcagaattgtcaaatcctgttcggtgaagtctctttaaaaaagctatgataaatgataaaatattactattaaagaatttttttagtcaaaaaaactgcagatgggaagtgttgagatgaaatttatttcttggaatgtaaatgggctgcgggcctgtatgaataaaggctttaaagaatttatggacagcgtcgacgcagatgttttttgcgttcaggaaacaaaaatgcagcgtgagcaggcggagtttgtttttcctggatatgaggagtactggaacagcgctgaaaaaaaggggtattccggtacggctgttttttctaaagtcaagcctcttactgtcacctatggtttgggaattgaagaacatgataaagaagggcgtgttattactgccgaatatcaggagttttatctggtaaatgtatatacgcctaattcacagcgcgggctggaacggttggattacagacagatatgggaagatgcatttcgtgattatctgttgaagcttgaccaaattaaaccggtgcttgtttgcggagatcttaatgttgctcatcgtgagatagatttgaaaaactggaaaactaatcgtaataatgccgggtttactgatgaagagagagcaaaaatgacggagttgttaacggcggggtttactgactcgtttcgccatctctatcccgaaaaagaaggtgcttatacctggtggtcgtatatgtttaaagcgcgcgaaaagaatgcgggatggcgtattgattactggcttgtttctgacagatgggctgacagaatagaagacagcgtgatttatgctgatatcacgggcagtgaccattgcccagtcggattagttttgaaataaatttttagtaatgacaagaggtcaaaatatggattttaaaataacagcaccttttgagccggatggagatcagcctcaggctattgagaagttggcagaaggtatagaaaaaggactgcggacacaggtcttgctcggggctaccggaactgggaaaacctatactattgcgcaggttattaataaagtgaataaaccaacattggttattgcgcataataaaacattggcggcacagttagcaagtgagtttaaagctttttttcctgaaaattcagtggaatattttgtgagttattacgattattatcaaccggaggcttatattccacaatctgatacctatattgaaaaagatgcatctatcaatgatgaaatagataaactccgacattctgctactagcgctttatttgaacgccgtgacgtaattattgtggccagtgtatcttgtatttatggattgggtgcgccacaggaatattatgatatggtgctgtctctgcgtgtaggacagaagattgacagacaagctattttacgcaaattagtcgagattcaatatgatcgtaatgatattgcgtttcaacgtggtactttccgtgttcgcggagatgttattgaagttattcctgctggctataatgaaaaagcagtacgcattgagatgtttgatgacgaagttgagcggatattggaagttgatgtactgactggagaaattttggctaaacgcagccatgttgctattttccctgcttctcactatgtaacctctcgtgaaaacctggatcgggcaatggaagacattaaagtagaattggcagaacgacttgaatatcttaattcacataataaattgctggaagcacaacgtctggaacaacgtactaactatgatctggaaatgatgaatgaaatggggtactgctccggaatcgaaaattattcacgtcatttagctaatcgtaaggcaggagaacctccatttactttagttaattattttcccaaggatttcctattagtaattgatgaatcacatgtgacattaccacagatcagggcgatgtacgctggtgaccgttcgcgtaaagagatgcttgtagaacatggattcaggctgccttctgcttttgataataggccttttacctttgatgaatttcagcagcagataaatcaggtgatttatgtttccgcaactcctgcaaaatatgaaatggagcagacgcagcaggtggtagagcagattatcaggcctactggtttattagatccgcaggtagaaatcaggccaatcaaaggtcagattgatgatttgctgaatgaaatacataaagttactgaagcaggagaacgtactttagttacaactctgactaagcggatgtctgaggatcttactgaatatttgaaacaagctggggtaaaagtccgttatttgcattctgagattgctactattgagcgtgctgaaattattgatgatctgcgtaatggtaagtttgatgtactggttggaataaatctgctgcgggaaggcctggatttaccggaggtttctctgattgctatcttagatgccgataaagaaggttttctgcgcagtgatactgctatgatccagaccattggcagagctgcccgtaatgagcacggacgggtcataatgtatgctgaccgtattacggattcaatgcggcgtgccattgatgaaacaaaccgccgccgggaactgcaggaagattataataaagagcatcagattacaccaaaaactatctataaagaacaacgtcagctgataaaactgacgaagattgccgaggatgacgggacggaagattacagtgataatgcgataaaaaaacggtcggaaaaagaattgcagaaaatggcgaaagaacttgaaaaacgtatggctgttgctgccaaggaacttaactttgagcttgctgcagaattaagggaccgtttgatcgtaattaaaggacagttaggccagaaattgtcgcctaaacctaaaaacaggagtaagtaatgaaagaacaattaattgtaaaaggtgccaggcagcataacctgaaaaatatcacagttgagataccgcgtgatgagctggttgtagttaccggtttatctggcagcggtaaatcttctttggcatttgatactatctatgcggaagggcagcgtcgttatgtcgaatcgctgtccgcttatgcgcgtcaatttttaggacagatggataagccggatgtggattatattgaagggctcagccctgccatttccatcgaccagaagactaccagtcgtaatccgcgttcaacagtgggcacagtaactgaaatatatgattatatgcgcttgttgtttgcccgtattggagaacctcattgcccaaattgcggaaaaattattgaacggcagacagttgagcagattgtcgatcatgttctggaactatctgaaaatactaaatttatggttatggcacctttggtgcgcggccgtaagggtgaacatcagaaaattttagattctatgcgcaaagctggttacgccagaatgtatattgatggtgaggtgcgcacattagatgaagaaatatctctggataagaaaagaaagcacgacttatccgtgatagttgatcgtttggctgtacgtgatggtatcgctcagaggttatcagattctatagagacggctttaaagttggctgatggtttggtggaaataaatgttattaatggtgaaacgcaattgtacagcgaacattttgcctgcagtgattgtggtataagtttgcctgaaatcgagccgcgtctcttttccttcaataacccttatggtgcttgtcctgaatgtactgggttgggcatgaatatggaattggataaagagctgattattccagatggcgctaaaacctttgcggaaggtgcaattgcagcactcagcacgaatatggaagcttatcatatgaaacagctgggagcggttctgaaggcttatggatatgattttggtacggtttggaacgatttaccggaaaaaataaaagacttgctctggtatggcagcggtgaagaaaaattttcttttgtctatgaaaatatgcagggagaagtaaaaaaacatactactgcttttgagggtattattcctatgctgcgccgtcgccatcgagaagctttttccgaacggatgcgtttggatattgaagggtttatgacaagtactccttgccctgtgtgtcatggtgccaggttgaaaaaagaggttcttgccattcttgttggcggtaaaaatatttgtcaggtcacagcgttgaccgtacgtgatgcaatagaattttttaatgcgttgaaacttactgaacgacagcagattatagcaaaacaagtcctaaaagaaattctggcccggctaaaatttctgaatgatgtcggactggattatcttactttggatcgtgctgccggaacgctttctggcggtgaggcacagcgtattcgtctggcaacacagattggttctggtttggtaggcgtattatatattttagacgaaccaagtattgggctgcatcagcgtgataacagtaaattacttgagacattgaagcatttgcgtgatctgggaaatacgctgctggtagttgaacacgatgaagagacaatgtatgctgctgatcagattattgacattggtcctggagccggtgagcatggcggtaatgtagtagcacagggaactgctgaagtcgtcaagcagtcagagcaatcaattaccggtcagtatcttagcggacgcaaatttattcctgtaccgaaaaaacgcagaagtaatgacggtcgttttattgaaattaaaggagccaaggcaaataatcttaagaacatcgatgtaaaaattcctttaggtgttttctctgttgtgactggtgtttccggtagtggcaagtcaacgctgattaacgatattctttataacgcattggctgcgaaactgcatggggcacgtctgcggccagcagaccataaagaaattttgggattgagtgagatcgataaggttattaatattgatcagtctcctattggaaggacccctcgttcaaatccggctacttataccggagtttttgattttattcgtgaactgttcagccagacaaatgaagcaaaactgcgcggttataagccagggcgcttcagctttaatgttaaaggcggacgctgtgaagcttgccgcggcgatggtatgaataaaatagagatgcattttctgcctgacgtatacgttccctgcgaggtatgtcatggtgcccgctataatcgtgataccctggaggtacattacaaaggaaaaactattgccgaagttttagacatgactgtaacggaagcctgtgaattttttaaaaatctgccacgtatttatcgtaagcttgaggttcttgaagatgttggtttaggttatattaggttagggcaggctgcaacaacactttccggtggtgaggcgcagcgcgtgaaactggcaacagaattatcacggcgcagcacagggaaaactctgtatattttagatgaacctacaaccggcctgcatatagcagatgtacataaattattagaggtattacaaagactggtcggagcaggtgattccgtcgttgttattgagcataatcttgacgttatcaaaactgccgattatattatcgatttgggtcctgagggcggtgacaagggaggtactctgcttgcctgtggtactcctgaagaagtagctaaaaacaagaaatcatatacaggtcaatatattaaacaagctttggctcaggctaaaaaacatgggtggtatcagtaatgaatgaatctattgctaaaactttagctgtactgccggataaatctggcgtttatataatgcgtgacgaacatgggaaaattatctatgtcggaaaggcggtagtattaaaaaatcgtgtacgcagttattttcgtaatctggcatcacatactgtaaaagttaaagcattagtcgcaaaagttgctgaaatagaaaccattgttacagacagcgaagttgaagcgcttattttagaatgcaatttaataaaaaagcaccgtccgcgctataatattatgcttaaggatgataaaacttatccttatttgaaggtaacgatgcaggaagatttcccgcgtatttatgttacgcgcaaacagcttcgtgacggtgctaaatattatggtccttatgcagatgctggggcaatgcacgctactgttaaactgctgcggtcaatgtttcctttgcgcaattgccgaaaaatgaataccgacaggccctgcctgcaatatcatattaaacgttgccttgctccatgtgcggggtatgtttcccgagaagattatggaaaaatgatcagagccgtgtgtttactgttagatgggcgtacgtctgaacttgaacgtgaactaaagctgcagatgcagcaggccgctgaaaattatgcttttgaagaagctgcccgggtacgtgaccaactgcaggctgtaataagactgaacgaacagcagaaggctgtaacaagcggtggtgatcttgatgtagtaggtcttgccaaagatagtaccggaacttgtttgcagatattttttgttcgtggcggcaagttgattggtcgtgataatttctttttacaaaatgatgatgacagcgatcaggaaattttgactgcttttattaaacaatattataacgaggcatcttttgtaccgcgggaaatacttttgccagttcttccagcagcggatgagttgatcgttctggaagagtggctgacagcaagagccgggcgtaaagttgagtttttacagccccggaggggaactaaacgtgaattattgcatcttgcggttgaaaatgcagccaaacttcttgaagagaggctgcgcaaaggtcaggtttcgctgaaaacagaggaacaggcggcagaagaattacagaaagctctgcaattgccaaatgcattagaaagaatagattgttttgatatttcgcatactcagggaacagaaacggtagcttcaatggtggtttttcgtaatgggaaaccctgtaaaaaagattaccgccgttataaaattgaatctacagaagggaaaccagatgattttaaatcaatgcaggaagtcgtttaccgacgctataaagattatgaggaactgccaagtcttgtcattatcgacggtggtaaaggacagctgagttcagcgctggaagttattcgtggcttaggtctgcatgaacttcctgttattggcttggctaaacgggaagaagaaatatttacagagggttcgtctgaaagtatcttattggatcgagattctgcttctcttcatttgatacagcggattcgagatgaagcacaccgttttgccataacatatcatcgcaaattgcgtagtaagcggaatttggtttcggtacttgatcatattgaaggtattggcacgaaaagacgtcaggctttatggaaacgctttcagtcgctggatgcgatgaaagctgccagtgtagaagaattagcagaagtagaaggtatgaattatccaacagcacagcgtatttatgatttttttcgtttagatttgccagaaaagcgagaagtgcttaaataaattaaatcgtcatttatgtaaattttgtttgatgacttttgctgtattgatggtataatattattaaagaacaattagcggtaattttgtggtaaaacaggacttgctttttgatgtcgtagttaatgcttaattaacagagcttgaaaaaataaggttttgttttacagcaggtcgctgatgtagttgaaaatatcaatttaaggagttgaaacaaatggaaaaatgggtatgtgatgtttgtgggtatatttatgatccggaaataggagatcctgataatgggatagcggcaggcactgcttttgcagatttaccggaagattgggtttgtcccttgtgcggtgttggcaaagaccagttcagtaaacaataaataataatatcaaagaagtttcgctatgcgaaacttctttttattttatagtactgtgtaaaaacttgacgaggtgctttctagtctgttgagaatacgtacccttgtggtataatatatctcgggtgatggtatgtatgcattttttctgcgcgccgtaactttgagcgtgctttatttttgtttgatttactggaccgatgttatggaggtcgtcacattgggcggtctgatagcaggggcatgtattgctggtattggcagtgccttagtccagattttagtatggaaacttggtggttctatcttacggaagcgggctttgctgtttgtgggcagcagctgtctaactatggatattatgcgtttgctgccaggttatacagtgactgataaatttggtgcgttagttttgctggcggtattttgtctgatggtattaggtgttactgaactaacagttaaaaaggagatcaaagaatgaaaatcaaaatgattgccagtgatatggatgatacattgctcaataatgagcggaaaatatctccgcgtaaccttgctgctattaaaagagcattagctgcaggaattgtttttactcttgcaacgggcagaatgtacagatctatcaagccctttgctgaacaattacaattggatgttcctttgatcgcttataatggagcattggtaaagggtgcgctttcagaaaaagtatacgttcggaaaccaatgcagctgcaaactgctttagatgctctgtcctattgcaaagaaaaagactattatgttcaggtatatatagatgatgaactgcttgtaaaggaagaaaatgaatattctcgtatgtatagccgtatttccggtgttcctacgactgctgttggtgaagctgtatatcatataaccaaagctccgtataaattattactgatgactgaaagcagtgattttgcagcggcttggcaagatgtggcgaatcgttttgatagacgtattgacgtaaccagttctaaggacaattttttggagctgatggagcctgcggttaataaatgggttgctgttaaagaattggcggaaagttttggtattaaaccggatgaaatcatgtgtataggcgactcaaataatgatatttcgatgattgccaatgctggtatcggcgttgctgttgctaacgcaaaacctcaggtccagcaggcggcaaaattgattactgctagtaatgataatgatggcgtggcattggctatcgaaaatatacttaccaggcaggctgagataaatttacaataagataatttacagaaaaataataaaaggcaccgctgtttttacagcggtgccttttattatacgttaaccatcttaagttaactagttgactaaaaagcgttgacgagctataatttgactgttaactaaaaaaaaataaaggtttacgaaggagctggagaaatgaaaaatttaattttaagcttagcggatagagttcttcagggtggatcaataacctgtcaagaagctgaacagcttattgatgttagcgatgatgatacgatgctgcttttagctatggcagatagaatcagacaaaagtttacaggggatgctgtagattgttgtgctatcatcaatggccgcagcggccgctgccctgaaaattgtaaattttgtgctcagtcagcccattataatactggtgttgaagaatattcattgctagcggaagatgagatagttgatgcggccaaaaaggctaaagctgcaggtgctgtaaggttttccatagttactagtggacgcggacaaagtaaagcagacgattttgataatatttgtaaaacgcttattcgaattagagaggaagttggtattgaaatttgtgcgtcgttaggaatattaacagaagcacaggcttttgaattaaaaaaaataggtgtcaccagatatcattctaatattgaaactgcacccagccattttccggatatctgcagtactcatacttatgaagataaaatgtttacgatccggaatgctcagaaagcaggattaagagtttgcagcggcggtatttttggacttaatgaaacagcaaaacagcgtgttgaaatggctttcgaattgaagaggctgggaatagattcagtgccgcttaatttacttactcccatccccggtactccttttgccgataataaaactttaactcctttagaaatattgcgtgcttatgcagtgtttcggttcattttgcctaaagcactgattagaacagccggaggacgcgaagtaaatttacgtgatttgcaggctttggcacttaacggcggccttaacggaattatgataggcggttatctgactacgggcggacgcagtacagatgctgataaacagatgattaaagatttgggacgtaaagttactgttccggtactgtaagtccaagaaggtgagaatatgctttacagtgtcaaaatgcgttctgcgcaaggaggtccgcatgaacaaggcggacgccatatttctggtgccgaacgtattttaagtgaagaaaaaatagaacaggcgattattgcaatgctgcatagggcacaaaagcatcagcgtggaatggcggattttataagcttaaaagtagaagcggtaaaaactgcggatattttttatcgtccgttgctgccgctttcaagctgtcaggcagatagtgttatggcaggcaggaaagcggctgtggaggaacttgttaaagccggagtgagtactgaagctgcagcggctgggatttcccgtataatcaatctgcgggacagtatgcgtggagcgatgcttttggatgcggatacagggctaagagtagactctttaggtgaacgtggtgtgagagtcagtaaaatggattgtgacaattcagaaagatatgaggcgagacttttagaaaaagggctttttggggatcatgtccgtgaggctttggtattggcatctaaagtggccagtgctgttggggttgtcgctgaattatgctggtcggatgatcctgaatatgtgactggttatgtagcttcggcaaaatatggatataaacgtattcctgtattgaaagaatatggcaacccgattggtggcagagttttttttgtagagcatggaactgatgttcagaaacttatcacctatttacaggatcaggtagtattgatcagaccggaggataaataagatgcttgagacaaggatcgcaaaagagttggcttatatcagtcaagcagggctggcgcgtagaattactgagctgtattttgtaaatccagctcaggcacaggatcgaaccggtaagacttacttggtattggcaagtaataattatcttggttttactcatgctccggaagttattgaagcagcttcccaagcggctttaaaatttggtactggttccagtggttcacgactgactactggagggaccttcatagcaagtgaactggaaaagcgactggcagattttaagcatagtgaaagtgctttggtttttaatacaggctatatgaccaatttgggagtcttgtatggtttgctgcaaactggtgatgttgttttcagtgatgaacttaatcacgcaagtattattgacggctgccgtattagccgttgcaaagtggttgtttataaacataatgatatggcagatttacagcggcttttagagacggaaattgttactggtcagcgatttatcgttacagatggagttttcagtatggatggtgatattgctgatctgccttctttggcggtgctgaaaaaacaattcaatgccttccttatagttgatgatgcgcatggagtgggcgtaattggaaatgatggcagcggaacggcgtctcattacggtttaacggatgtaatagatctgcaggtaggaacattgagcaaggcgttggcagcagaaggaggttatgtagctggtaaaaaaatacttattgactatcttattaacaggtcgcgaccgtttattttttcaacagcattagctcctgctactttagcggcagctaatgcagcgttgttacttttacaaactcaggcttccaaataccttgattctttacgggcgaactcaagactaatgcgccggcttttattggaaggtggattgaatgttgttgaaggtattactccgattataccagttgtcattggggaggctgggcttacgatgcaatttgctgacaggttgaagtcgaaaggtattttagtgtcaggtattcgcccgccgacagtccctcgtggcgaaagccgccttcggataacggttacagctgctcattgcgaagagcagttgcgtcaggcggctcaaataattactgcgctttggcaggaactaaaacatggtgaaaagaaagaaggctgaataaatgttgggaataggcgttacggcaacggatactgaaataggtaaaacagtagtaagtggagccttggcggcagctatgcggcaccgcggttataaaactggcgtttacaaacctgctgcttcaggatgtgttaagaatagtgacgggaagttgatttctacagatgccgagtttttactgcactgcgcggggctaaatgtggaaaaacatgatcaggtcgtaccatatgtattggaggctgccttggctcctgctgaagccagccgtcttgctggtataaaaatagatccgtgtgtaatgctggcaggagcaagggagatgcttttgggcagtcaaatcagtatagttgaaggcgtaggaggaatctccgcgcctttgactgatgaatatttggttaaagattttttcagtgaactgaagctgcctttggttatagtggttaaagctgttctaggtaatgttaatcatgctgtattgacggctgaatatgcaaggatacatggtttgaaagtagtgggattgatagttaatggttgggacagaaaaaaagctggtgccttggagcaaagcaatctttattattatgagaaattaaccggtttaccaattttaggaaaattgccagtcctatctcagcatttgcttgatgaatttaatagtcgtgaattagctgaaattacagaggcgaacattgatattgatagaatattatcattagcaggaggtactgtaaaatgaatcaatgggaatttatggataaagaatatatctggcatccttttacacaaatgaaaggatggaatgaaaataagcagctggtaattgatcatggcgaaggagtcaaattgtatgatgttgaaggaaacgcttattatgacggtatttccagtttatgggttaatatacatggacatcgccgttgggaaattgatgaagctgtaaaaaaacagcttgataaaatagcccatactactttgcttggtcttattaataagccttctgctgaattggcgaaaaaattagttgaggtaacgcctaaaggattgaataaagttttttattcagatgacggatctacagctgtggaagcggcagtaaaaatagcttttcaatactggcagcataaaggtttgcctgaaaaacagcaatttatcaatttgggagattcttatcatggagatacggtaggtgcggttagcgttggtaatatagatgtttttcataaagtctacaaacctttgctttttaatactaaaaaaatgacttgcccgtcgttttaccacagcagtatagaggggataaacaatgaaatagaattccgggattttttgctgcaggagttggaagattatttgaaagaaaacagtgataaagttgctgcaatgattatagaacctcttgtacaggcagctgcaggaatgttgatgcagcctaaggggtatatcaaaggtgtacgtgaacttaccaaaaaatataatgtgcttttgataattgatgaggttgcgactggatttggccgtaccgggaaattatttgcctgtgagaatgaaggtatctgtccggatatgatgtgcttatccaaaggtattaccgcaggttatatggcattaggtgctacaatggtgactgatgagatatacaatacttttttaggtgaagcagccgaatataaaactttttaccacggacattcatataccggtaatcctttggcttgtgcagctggtgttgccgggttggagctttttgaaaaagacgatgttattgaaaatctgccgcccaaaatggcggttattgcagaacatatacagaagatgaatactatgaaatatgttggtaatgcccgacaatgcggtatgcttgccggtattgagctgatgcatgataaaaatttaaaaataccctttgactcaactcttttgatggcagggggaatttgccagacagccagaaaatatggccttattgtaaggaatattggtgatgttattatttttatgccgccgctggtaagtacggtacagcagatagaagaaatgctgagtatactggaacaagcaatgcaggaagtttttgagaaagtcgatctgcatagtaacattaaattttctgatccctgcgcattttaagttttgctgattaagacgccctgaaaggggcgtcttttttgattactgtgatataatatgataacttgacgaggtattttcgattctgttgagaatatatacccttgtggtataataaaccttatagggtcatttattatggttttagtatatatggaggtgagcttatggaagaatcaaagtttctgatcattacagggatgtccggtgcaggtaaaacacaagttgtgcggacgttggaggatatgaattttttctgtattgataatttgccaccggcacttattcctaagtttgccgaattatgtcgtcaaacgcaggcccgtaatactgctctggtagtagatgtacgcggtggtcgtttttttgacgagttgatagaaatattggacgaaatgaaagctatgggacatgaatatgaattgttgtatcttgatgcatccgatgatagcttgatcaggcggtataaagaaacacgtcgccgtcatccgctcggacagggtaaaagcctcagtgaaaatattgctgtagagcgtgagagattgactgaagtacgcaacagggctacacacattatcgatactactgatatgcctacagcagagctgaaagaaaaaatttggaagttgtattcaggcaatggcggtgtagagcgcatgattgttttagtacagtcctttggttttaaacacggactgccattagatagtgatatggtcttagatgtcaggtttttgcccaatccgttttatgaagaagatttaaagcgtttaactggcaatgaccagccggttgccgattttatttgtcgtttccctcaaacgtttcagtttctgaaaaaagaagaagaaatgcttgaatttttgttgccacagtacatttccgaaggcaaaagccagcttgttataagtgtaggctgtaccgggggacagcatcgttcggtatttatagcaaatcgattgtatgaatttttgcgtacacagggctatgccgtacagcttactcatcgtgatctgcagcggaaaaacaaataagaggaggttcctatgggctggatcagttggttatgtccgggaataaacctgaaacgctggttgctgctttttgcagggggcgtgctgtgctgtgctattgggctggcactatttttcaattaccaatttatgggttttgttgaagaaatgctttttcgtatgtcatatcttactactggtaaatattctaataccgtctcgatgttgacaggttttatttccctatgtgctggattatttattatgtattatgcaactcgtaaaattattcgttctgtagttgaggctgttatgccagataataatgcatcgctgatggaaataatctttacgcagcgcaagctgacacgcggtccggcaattactgttgttggtggtggcactggactttcaactctgctgcgcggtatgaaatatattacgaataactgtactgctgttgtcactgtaggtgacgacggcggatcttcaggaaggctgcggaaagaaatgggtattttaccgcccggggatctgcgcaactgcctggttgccttggcggatcgcgaacctttgatggaacggatcatgcagtaccgttttaaaggcgattcgccgctggcgggacacagttttggcaatctgtttattgctgccatggctgaagctgaaggtggtatggaagcaggccttgctgctacgagtcagattttgaatgtgcgcggtaaagttgttccgtcaacgctgcgtgatatcagactgaaagcagaaatgacggatggcagtattattaacggtgaatcggagataccaaaagcacataaaagaatcagaacgatggctatggaaccagccgatgcaccggcaactgccagtgcagtgcaggctattctaaatgctgatatcctgatttttggtccgggtagtctttataccagtgtcatacctaatctattggtaacaggtattcgtgatgccgttatcaaatcagaagctgtgaaaatctatatatgcaatgtaatgacgcagcccggagaaacagatggttatggggcttttgaacatgtacaggcacttattcagcaggctggaacccagtttctagattatgttattgttaatgaccagcgggttacagcggcgcaattagcgcaatataacgaaaaaggttctatgcctgttacgcccgatatcaaaaaaatagaacggcttgggatccaggttattcccacgcgtcttatcagtaataaagatttagtgcggcataatccgcagaaactggcgcaggttattatttctttagtttatcgtttgcgtttatttggcaaaggtatacaattttttgattacttctttatgcggcaaagcatgcgtgaattaaagaaaaaatagatatatcaattattttatagaaggagaatgaccggtgtctttttctaacgaagttaaaaacgaactagcccggcttgaaaacggtaaacagtgctgtgaaaaagccgaactgtttggtttgctgagaatgagtggtgctattattttaagaggccgaaatatgggtattcatttttcgaccgaaaatgctgctttagccaggcgtgtgcttcagttgtttaaaaataactacgatgttaaaacagaagtagtaataacaagatcacgtcgccttaaaaaaaacaatcgctatcaggtaaaagtagtaccttccccagaggctggtaaagctttggaagaattacagctgttgccggcagaaaatgaaggaggcaaaacatctttattaacaactccttgctgccgcaaatcttttctgcgcggagcttttctagcgggtggctcgatcagcagacctgccagtgattaccatttggaaatggtaactgagaaccaggattttgcgaaaatgatcatgaaaactatgcaaggattttcattgcctgtaaaaataacagacagaaaaaatgattatatcgtttatttgaaagaaggaaatggtatcacctcgtttttatcagttatcggagcacataatgctttgttggaatttgaaaatgtacgtattgttaaagaaatgcgcaataatgtcaatcgagtagttaactgtgagacggcaaaccttaataaagttgtgcaggcagctgtacaacagcttgaaagcatacgttatatagaaaaacatctgggattgggaaaattgccgctgacattacgtgaaacggcagaattacgtttaaatcatcccgacgcttctctaaatgaattagctgatctatccgaagggaaaataggaaaatcaggaattaatcaccgcttgaaaaaaatacagcatttagctgaagaactagggatgataaagaatgagtgatctttggaaaaagtataaaaaatatatggctgccgctggtattagtataatagtattgcttgctttaacagctttttatgtaaggtatgactatcaacagtattgtaaagaggctgtgccgatattggaatatcatggtattgggtcggcagatggctggatgaaagaactgtttgtttctaaagaaacttttgaaacgcatttgcaatatttgcatgacaatggttataaaatggtatcagtgaaaaaaatggcagagatgtttgccaatggtgaatctacagaaaaaacaattgttatgaccttcgatgatggctatcttgataactatactaatgttctgccgcttttaaaaaaatataacgctacagcgaccttttttgttgttcatagtaaaatagggcattacagatatatgacacacgatcagatacagtctttgatagataatgggatggaaattggttctcatacaatcaatcatcagatacttacggatatagatcctcagtatttgagttgggagcttgctacttcgcggtattttctgaaaaaagattataatggttatgtagttcgttcactttcatatcctaatggtatgtataattcaaaaattttagcggcggtaaaagaatacggttattactgggctgttactgggaatgctggcactgtcagtaaaaaaactatggaacaaaagccgttggaattaggacgtatttatattgacaattcaaatatcaatacttttaaagaaagattgcgttattcttattgggttggatacttgaaagaacgaggcattaacatacattttttcaagagcttataagaaaatatcaggagaacacttgcagaaatctgcaaaaaacggtaaaataaatcagtaagcaaaacatattgggggtatcttaaaatgagaaaacacattaaaaccgtgaataaagcaattctgaacaaaactttaaaaaccggcggctgcggcgaatgtcctgcttcctgccaatctgcctgcaaaacttcctgcactgttggcaatcaggtttgtgagcaaaaataattcaggctgtggctttatttaactagtatatttgtttaatttgcagctccctgttttacagggggctgttttactatgaaaggtggaaatacatgcttattcataaaatgcgtcttgatgaatatatggctgtacttgacgttaacagtggagctgtgcatctggtagacgatgtcatctatgatttgcttgatgtttttgatggaactaatgatgatgaagccattgcggccttacaaacaagctatccggaaaaagatttgcgtgaagctttagaagaacttcatcagttacaggaagaaggattacttttttctcctgaatttgaagtgccccagacttttgcagaaacaccaatactaaaatcgttatgcctgcatatagctcatgactgcaatctgcgctgtggatattgctttgcagggacaggagattttggaggatatcgtgcaatgatgagcaaagaaacagctgaaaaggctgtggagtttgctatagctggcagtaaaatgcgtcataacttagagctggatctatttggcggtgaaccgctgatgaatcctgaggttgtcaaacatgtcataaactatgtgcgtcgtcgtgaatttgaaaccggcaaaaatatcaaattgacactcactactaacggaacacttttgaatgatgatattattcaatttttaaatgataatcgtgtcatgcttgttcttagtttggatggcaaaaaagaaactcatgataatatgaggccgttcccaaataaaacgggcagttatgatgcagctgttcgcgggtttaaaaaagttattgaaagccggaatggaaaaaattattatctgcgtggtacttatactcattttaatccgcattttgctgaagatactctcgatatgacaaagatcgggaaagaactttctgtagaacctgttgtaggaattgacgaaccttatgtacttaccgaagctgatctgcctgtactatatgaagaatatgataaactggcaagggcttatctgcaaaagcgccgtgaaggcgatgcttttgattttttccattttaatgttgctcttgataacggaccttgtgtggctaaacgtttagcaggctgcggtgctgggcatgaatattttgccataacgcccgaaggcgacatttatccatgtcatcagtttgtaggcagagaagaatacaaattaggaacgttggaaacaggtgtcgtaaaacctgatctggtacaaaaattcagacatactcatgtgatgactaagacagaatgcagtacttgttgggctagatttttctgtagtggaggctgtcatgctaatgctgatcttatcaatggtgacatcagcaagccatatcaatatggctgtaaattgcagaaaaaacggttggaatgcgctatcgtgctgcaggcgattctggccgcagaagcgcaggaaggtaaagatatgcgtcccgagataacgaatttcaaatatgaggtagaacataaataaattacaggatgttttttagcggcagtttatactgccgctaaaaaataaaaaaatgaaaaaagcacttgaaatttttcataaaatctagtaagataatgaaagtcgcctgaggcgattgaaggcagttgataactgaaaaaa

SEQ ID NO: 10028 - DNA, 2022 bp, Unknown
  gut microbiota DNA sequence
gccgccgaagccgcgcgtcacttcgccatagaagttgcccgtcctgctgatcctgacattgccgcccagccccagctcgaaccaggtatcgccgtagtcgttgtgcttggtcaatatatcattggttccgcctgcatccgaggtcagctgcaggtcgcgctcaccggcaaattcgtgcagcaggtcggctttcagatagatatcgctgccattttctatcttctgtcccatgacgaagccgatacggccgatggcgctgttcatgccgtcgatacggccattgacgcctctgtcggtggtgtagtcgataccggccagcctgccaagggtaaattgtgcctgtggctcaacaaagaaacctgcttcaaaatcaaagcgtttgccgtattccacactaagactgtaggcgtgctgcttgtagctggctttatccgggtagtcgccgtaggattccaaatcggtcgagaagttgcctacacgggccgtaacattggtatatgcgccgctgcctgctgtccagatgccataaaggctaaaggatctcagattatctttgctgctgccgggggcgtagctgccgctgccatcgccgtagtcgatagcgccgccatagatacttccgcccttgaactgcttctcaaatcccaactgataaaggttgtagcgtccttcgtagcctgagccgctgaagcgccctgcctgcgtcctcgcccaaacgccgtctgcctgctctctgccgcttgccagtgctcccaaacgactgcgcagactgtcgttggtattgcgccacatagcatagctgttatcggcagcatccaaaagcatgctcgtatcattattgactgttttgaccatatttgtcaaataccagtcgttggccgaaagccccagagcatcacctttagacagtgtggggtcaacgtcccacagtcctccggcattgaattctttacccacaaaggtcagtttgccgctggcatcggttatcaaaagctgcttatgttcccctgttacttcaatattgtttaacttgctcaagtctttgatctgtacatagtgagtaccgacatcagcatgggtaatggtaactttatcgctgttggcttcacctgccagatcggtatccaggataaaggtggtgccgctgccgctaagcgtatctatggtcaggctttcataggccggtgttcccgcgcgtgtcacactgctgtcagtcatgtcgataactgcattatttgccgtcagcgtgccattgatattgaaactgccgccatcaatgttttctaaaaccatactaccgcctgtcatggtcataccactgactataccgccgctgctcatctgcataataccgccgttaagctctgtatcaagggctgtaccaccattaagaataagctgctcgccgccgctgttaatgatcgtcccgctcatctgtgctccgcttataatgcccatggtcacgttggtgccgccactgccaagcgtcatattatcataaccggaagtgatattgtcgatgatctgcataccgccgctataggtaatattagatatattgccgccgctgcccagatagacagttccgccgctgttcaaaatagtatccagtgacgtgccgccgactgaaacgatttgcgtaccgccgttcaaggcgtttaccgtacccttaccactgctggaaacaacctgcgtaccaccgagcatagtactcactgtgccgttgccaccgccggcaacagtttgcgtgccgccgttcagagtatcgactgtaccagtaccgctactgcttataacctgactgccactgttcattgtactgaccagacctgtgcctccccccatgatattctgctcaccaccgtttaaagtctctatcatgccattaccactaactctaacgatctgtgttccgccgctcatatcgactaccgtggcgctgccgcccttgaatacatactgctcgccgtccagcatagtaacgatcgtaccgatggcattggagtaaacgatctgcccgcc

SEQ ID NO: 10029 - DNA, 700 bp, Unknown
  gut microbiota DNA sequence
cagagatccactgtgtaccggtagtgttcatgatgttgattataccggtacagccttcgttcacatattgctggtagctgttaagctcgtttatcatacctgtgccgccagagtagataaactgcccagcgggaccattcatagttcctactgagccaacaccgccggagatgtactgaagaccgtccatagtctccaccttacctgtgccaccttcgtagacagtttgatagccaccgttcatatcaattaccgtgccaatgccgccgctagatacaaactgcgtgccgcctccatccattttactgactgtgccggtcccgccgcttgatatcgtctgcagaccagcgccgtttacgtcaccactcataacacttacaataccgttttgtccagaggttatagtctgcgtatcgcccttcaccatagtggctacgctggcattgccgctataatcagtggcttcggcgcgggcaaatatggccctgtccactacgtctgccagctggggcagcacggcgtaatccaaaggcgcagcatcgctacgcaggggctggactggggcaggcaccgttttcccagccgcggccagtgctgccaccggagctgtgacattgacaaggttcatgcccataactactgtcgccagaactttttctgcccgttttttgcgtttttcccccagcagtgattttaccct

SEQ ID NO: 10030 - DNA, 1781 bp, Unknown
  gut microbiota DNA sequence
actttattttggagtaaaactcttactgtactttttcaaagccttccatagctatgccagcttctatgggcaggcacagcatatttagcgagatataattgctttcgatccagcctttttctgtctgctgctttatcgtaaaaatattttccttcacgccttcataattattggggttatacatggtcggtttgtgccagtacaggtcgtagccctgctgttttatccattccaccaattcctgcgacttttctgcacggtcgttttctacatacaggatcggccgatatttacgaaggttttctgccgcgccctgtagtacgggcagttccatgccttctacgtctactttgataaagtcgcaggccgacagcttaagactatcgatggtgataacctctacttcttcaccttcactgcagctgcccaaggccagaccgccccagttcacttctttttcgcagtcctgcagtggtaccagcagcttgcccggtgcgttgctaagggctttttggaagccgtagatattggtcaggctgttgagcgccgcattgcccagcagtgtctggaacatcagccgctggggctcaaaggcatagaccctgccattcggccctgccagctgcgccagtcccagtgtatgcgcgcccagattggcgccggcttcgataactgtatcgccgggttttactacctggctaaaaacatcgtattcaccttctgaatattcgccgtagaccttcagcgctttgccgataaactggtcgtgcctgttaaagaccatcagtccatgccggcattgacgtactatgttaaatttttctggcatttttacttctccttatgttttttactgcaagaggcaaggttcattttcttatccgcgctttttttgctttacctgttgttttagcggcagtggttttatttattgctgcacttgctatggactcagcttctgctgacgctgctttatctggagccggctgttttggtgccagcggatccagctggtagtctgccatcagtttgtctataactttgtttaccgcttcgggggttatgtagcggctgcattcaaactggcggtcggtgcctttaaggcgtggacaccattcaaagtctttgtggtcgaatactacctgggtatcgttccagcaaccgttgcagacgtggtagtttatgacccggtagggtgtggcaaattcgttaaacggcagggtaaagccgctgatgagtacgacaggtatgcctacgccgttggctacccagctaagaccgctggacaggccgatgaagaagtcggcatggtataaaaggtcgatacgttctgacaggggcagcttgccggtaaaatcttcgacgccgtaggggattatgttaaagcgactgttcataccgtagacattttcgcggtctatgcacagcaccctgtagcctttggctttaaggtgtttgacgacgcccagccagccgctgccgttgttccaatatttggcctggctgctggactgggcggcgatgcagacgtatggtcctgctattttacgtgttttgtctttgggcaaaagcttgacgctaagctgaggcggttcgcctccttcgtccagccccaggatcatggcggcgttttggtgcagaccgcgaatgcgaaagtctgatggctggtgcagcctgtcgtcgcagggaaagaagatgcccatatagtagctggcgtacagcccttcaggccgttcttccggtttgagaaagtgtatcttaggataggctggtttaaacag

SEQ ID NO: 10031 - DNA, 37212 bp, Unknown
  gut microbiota DNA sequence
ttttaacagcactttttggctgcgcagatccaggtcgtgggcaaagatcattttatctttttcgtatacttcgatacgaaaatctataaaatactttttgctgctggcaaccaaaacgccgctggcaggtgcgtcgtagacagtaagacaggctttgcggtcaataaaccgaaccctgtactcgccctggggcactgtgacgcgggcgccgtagttaaagtcgaagctgatacctgcaataccgcttggctgctgcacctggcctgcggcgaaggtcatatagggttttggcgctgcctgaggtgcctgtccctgctggggcaggccgccgttgttaccatcgctgttgcctttggcagagtatgccatttcttcgtcactggctgattttatttccgtcatagtcatgtcttcctgttcgttttgttttctatcagtctaaacttttacacaacagtaccgcttatttgtttaaagctggaagcgttacggctgaccgctttttttaaccagtgtcagcagcagctccatatcactttgggtataccgcttatcctgtccggtcccgccgactgctacgttggccgcctgccgggggtcaaaaaaacattccagctggcagtcaaaaaggttggccaggcgcagcagctgtttcaggctgaacttgacgcggccgcattccatattgctcagatgggtctgactgatgcccagcgtttgcgctacatcctgctggcgcagcttgcgcatcgtgcgcaggaacttgacattggctccgattttttccagacaatctgcatcgtacatcgtttacctccgcctttctcattatttttaaggtaaaattttactgcttttcagatagattctttggttttcatttgattttcttttcttaaaacggtgtttttatttctcagagtaataataattattatagcacgtatgtacccccccacaagacatacaaacggatatttatcatagacttccgttttgcccctccccggcacttatacaacaaccatcagcgggcaatgctctgcacgtggtcactgtcctcctgctgcccgcctgcgccgtcagcaatgcaaaaaaatacccctcgtatactttgcaaatacacaagaggtcaggatttatttaagcaaaaaaatttagccccaaaggggctaagtattctacggcgttattttgctatttatttttttaaaacaggcgtacacttaaacacaaaactccggcttctaaacagccggagtttttatttattgcggtttttatatttgttcacgtgccagctttttctgcagccagaacatccgcagcgttaagaaaaccgccgagaaaaacaagcctatatccaggctctgccaatatgcggcaggaccatgctccattacaaaatccaggaaacagcccaagggcagacaaaccacccaataggcaaaaaaaccggaatagaaggttgctttaacatctttatacccgcgcaggattccctggatcggcgctgccgtcgcatcaaacaactgaaaaaagattgcataaaacaaaaagccgactactttttcaataatgacagggtcagtagtgtagagcatggctatataaggtctgttagtgtaaaccagcaccgccagaaaaatcgcgatggccatattgagagcaatgcccatacgactgaatttctgcgcttcctcaaaacgtttggcacctgcttcgaccccaactaaaatcgtcagcgccattgaaaaactgagcggcaccatataaagcaatgaagtaaagcccaacgctgcctgatgcgccgcaatgatgactgtaccgaacttggcaatgaacagtgcaactacaccaaaaatactggcctccataaacattgccagaccgatcggcacaccgatgctgagattttcacgcagctgtttgatatctaaatggaaacggtctttaaaaatccggaaatgctcaaaagccggcagcttatgcacgatccagacaaaaatagcaaattccagccagtaggtaataccagtcgccacaccggcgccaaccccgcccaaacgcggcattcccagttttccaaaaataaaacagtagtttaaaaaggcatttaccggcagcgccagcaaataaatcttcattgtgatacctgtatgtcccaaagtatctatcagagcgcgcagcgaggttgacataaaaaacggtatcacacctacggccaccgccgccatatacatcttggcaatataatgcacctgcggttccaaatgcagatgtgtcagcagggtatctaaaaataaaacacccattaaaatgataactgccgaaaaagctatcgccaaaaaaatcgtatgccgaatgaccttaccaatattatcgcgcttatcagcgcctaacagatgagcaactataggcatcgcgcctaataaaactccattagtgccaacaaaaatcggcatccagatattaccgccgatcgaagtgcccgccaaatcgaccgcacctgcatgaccagacattgaagaatcaaaaaaattcatagccatgatcgccgtctgagtaatcaaaatcgggatcatcactgaaaaaagccgccgcaggcgttgtttaaaattttcgtctactaacatatttatccctttctattttaaggcagctcagaaaacaccgctcgcctccgccagttccgtaagataggcccagcgttccacaagctgttccaaacgctgctcggcatcctgctgctgcgcggtaagctcgcccagcttcacaaaatcactgccggcgctattgacttccagcgtcagcattttcagctcggcttccacaccggcgatcattgtttctatctgctcaaattccagtttttccttataagtcatcttgatttgtttagactggcttttaacggcttctatacgctccttgccggtaccggttttagcaccgcctgcaagcattgctttgctttcggccgccgctgcttcatatttgctgtaatcgccgataaactgcctgatctcaccattacccataaaggcaaaaattttgccggcaaaccggtctaaaaagtaacggtcatgcgaaactgcgatgacagctccattaaaactgtccagataatcctccagcaccgacagcgtcgggatgtcaagatcgttggtcggctcatccagaagcaagacgttgggagcacccatcagcacccgcagcagatacagccgccgtttttctccgccggacagtttattgaccggcacccactgcagctcggaaggaaataaaaacctttccagcatctgtgcggcagtaatccttgtcccatcgtttgtttcgatgtggtcgctcacatcgcggatatattccagcacgcgctgttcgctgtccggaaattcgctgtgctgagaaaaataaccgatcctgaccgtctgtccgatctgaacactgccacggtcaggtactaattttcccgccagaatatccatcagcgtcgttttgccgctgccgttagggccaacaatgcccacgcggtcattacgcagcaggagatagctgaaatctttgatataggtcacaccgttgtagtcaagtcccagatgctcgcactcgaccacagttttccccaatcggctgccggcagatgacatttccagttctcccgatgcagaaatatttttcacttcctgctccagctcgttaaaacgttcgatgcgttccctgctttttgtccgccgtgcttccgcaccgcggctgatccaggccagttcacgccggtaaacattgcgcagccgctgagcggcagcagcttccgactggcgtctttcttcacgcttttgtaaaaaaaggctgtaatttcctgtatataaatagcattgcccgccatctaattccaatgtccggttgaccactctgtcaaaaaaataccggtcatgggtcaccatcagcagagcgccttttcgcttcaaaagcagctgttccagccaggccacagtttcattatccatatggttggtaggttcgtccaaaatcagaagatcggaaggacgcaccaaaactccggccagtgctacacgcttgcgctgcccgccggaaagttccgccatcggctgattaaaatcactgatccccagctgatcaagcaccgctttagcttcgctctccagctgccaggcatatgcgctgtccatttgctgctgcagttccagcagcctgctctgtaacgcactgttctcaggatcagcagccgccagcgctgccgcccgttcataacgccgcagtaattccagctgcggcgaatcgccctgaaatacctgttccaataccgttgcctgtggatcatgatcaggattctgcggcagatattcgatcacgcagctgccatttgccgtaatccggccgccgtcaccggcttcaccgcgtgcaatatcgcgcagcagcgtgcttttaccggtgccgttgacgccgataataccgattttatcgcccatttcaatattaaaagttacatctttaaacaaagttctgacgccatagctgtgcgacagcttctctacacttaaaatcattcttttcgccctctgtaaaacagaataaaagcagcctgccgcttgagcagactgcatatattttaaataagctctacttgaagattaggatttgcagcggcggcatcctgtacaactgtaagcagtcttacgccataccagcctaattctgaacctgcggctaccgcctgcggtatttttagtataacaggctcgcagacttccgtcaaacaatcatacaatgcgtccagattttcaccgtaataatccggcagctcaagctccgcacgcagatatttatgcagctgcctgatcgactgcatcctggccagtgccaaagttactgttttcatcagccgcctccttaatacaatttttcaaagcttttataatgatcgtccgtataatagatcagtccgtcattagaatacaccagacgtttagcattcctgttaccggttttgtaatcaatatcgcattctttccagctgcgtcctgatttctgcggcagtaatccttcgtagttgccatacctgtcgccgcctatacttttacctagcgccacttcattcagcattcccttatgcttccagcccaggcgctcggcttcacgtttagtaataaaatttcccggcaatttatgaaaggtatggatatacaaagctacctcagccttaccggtataagcgcgcccttcttcgactttgaactgcgcctgcttgccctgcagctgcgccagtccacttttggcggttttggccacctgctctgcagcctgctgtttagcctgattcagctctgtctgaggcgttttgccgcagccaagcacggcaccggttataaataatacagccagtaatgctgcaaaaatctttttcatttcaagcacctttaaaaccattttttcatttgattaaaaataccgcgtactatagtgtctacagctttattttccattcgcgtcatcgttttgctgatcagcttttcagcgaccgtaggcggttcttttttagaagccgcgctgcggctgcgcagctctttctgcagcgccgcttcttcctgtgccctggctgctgcttccgcatcctgctgggctttgacgctcaaaatctcataagcagactcacggtctacagcttcagcatatttactatacagcgggctggaggctatcagctggttgcgcagcgtgtcgtcagctacgccaagatagctgcgcggcggcatgacataagcacgctccaccattgtcggcactccgtcagcatccaatagtgataccagcacttcgccggtgccaagctccggcagcacttttgccgcgtcaaaaccaggattggctctaaaggcctgcgccgcagccttcagccccttctggtctttaggtgtgtaagctcgcagcgcatgctgcagcttgtttcccagctgtgacaaaacagtatcgggaatatcagaaggctgctgggtgataaaataaatgccgacgcctttggaacggatcaaacgcacgatctgttcaactttatcgagcagagatttcggcgcgtctttgaaaatcagatgcgcttcatcaaagaaaaagacgattttaggtttttccggatcgcctgcttccggcagcaggtcatacaactccgacagcatccataataaaaatgtagaatataacagcggagtctgaaacagctctacgcaatgcagaagattgatataaccgcgtccgtcatctgccactgccagccagtccctgatgtccagtgccggctcgccgaaaaacacatctccgccctgttcttccaggcgcagcagagcccgctggatcgcgccgacactctgagccgacacattgccataggcagttttgaactgagccgcattatcaccgacgtactgcaccatcgaacgcagatccttaagatccagcagcagcagtccctgatcatcggcaatcttgaaaatgatcgtcataataccgctctgcgtggtattcaattccaaaagccgactcagcagatccggccccatctcggaaatagtcgtccggacaggatgcccttttttaccgaaaacatcaaaaaaacgtacaggaaagcctttgaactcaaaattttctatgcctaatttatgcagacgtttctgaaacccttcactgctttcaccagccttgcacataccggaaacgtcgcctttgatatcggccaggaataccggcacgcccatctcgctgaaggattctgccagcacctttaaagtaacggtcttgcccgtacccgttgccccggcgatcagaccgtgacggtttgccattttcggcagcatgcagatcttatcctcgcctttacagacccaaatcttgtgttcatcagctaaatacatggtattccctcccgcatttttataaaataaactacatctttatattaatttttattatacgttatttaagggtaagagtaaacaagctgggcaggttctgtttttatactgctgtttttttatttttccttgcttgacattatcgtaattcttgctataatgagaacataaatcaaatagacctcgcaggactgacggataaagtggaatcaaccacgtgtactgcgatgccatagaaacagccgaccgtctgggcagagagaactgatcccggatggtttttttattttccggctttggccctctcggattttttctagtgtgaaaaggagatgtttacctatgaaaaacagatggctcattgctctgtcggctattggcatccatatctgcatcggcagtgtttacgcctggagcgtactgacaaagcctattatgcaggctatgggttttaccctgaaagaaacgacctggactttttcgatcgcaattttatttctcggactgtcagcgggatttttgggcgattacgttgaaaaatacggcccgcgtaaaagcggtctcacctcgacctgcttctttggtctgggtatgttcggtacagcgctggcactgcatctcaacagtctgccgctcttatatcttttttacggcgttatcggcggtatcggtcttgggaccggttatatcacccctgtttcgacgctggtcaaatggtttcccaacaaccgcggctttgccaccggtcttgctatcatgggtttcggttttgccagcctgatcgcaggtccgctgatgcagatcctggttgccaaatacggactggtacagaactttatcattctcggctgcgtgtacatggttatcatggccgcctccgccttatatcttgaaccacctaaagcaagcaatggcgggccgtccggcattaacgtcaaaagtatcctcccggatactcagttcacagccaaagaagcacgcaaaacctggcaattttacgcactgtggtggatttttttcaccaatattacctgcggtatcggacttttagcagtagcttcaccgatggcacaggaagtagtaaaaatgacaccgatggcagccgcctccatggtcggtatcatcggtctgatcaacggtctgggacgcattttctggtctactatttccgactatctcgggcgcagtacagtttatgtagtcttcttcctgatccagatctttgccttctacgcacttgcagaaacaagcagtgccttcatcttccagctgattgtcttcgtcatcatttcctgctacggcggcggcttctcctgtatgcccgccttcctcagcgatctgttcggcacgaaagaactcagcgccatccacggcaagatcctgactgcctggggcatggctggtattgccgggcctctgctgctgtcctggatccgtgaaacgaccaacagctattcaattaccctgtatttcttctccgcctgcttcgttgtcagcctcatcatcgccggtattttgaaatggcgtacttcagtaggcgtgctgatcgaaaagaaacatttctgatttgaccataaccccttcgctacagctgcggaggggttattttatgccgttttagactctgcctattcgttaacgtcataactatcagtacattttatctacatctggtattcattttactttccatactatatctggttttatttgccacagccgataccgctgcctgttccaaccagacttgtaatactggagcagataaccgataataaaaataacaccatttatcagactgaaaagaggcggttattatggatacttcgcgcccgcgttatcttcatatgtttcttgtttttgttaagatcggcctgttcacgatcggcggcgggccggcaatgataccgctgatacgtgacgaatttgttgaaaaacaaaaatggatcagggatgaagacattactgacgttcttgcgctctcgcagtctttgcccggcgttattgccgtcaatgcttctacctttcttggctacaggctggggggacttaaaggatcactggtagcaactatcggcgtcgtcctgccttcttttgtcattattttcgtcatcgtcacggctttcacctccagtggttttgaccagtaccccaatatattgaaattttttgacggtatcaattctgctatcacagctttattgatcgcagcaactctgaaactgattccctattccatcaaaaacaattttggctggttcattctggccttttcactgcttgggatctattttttcagtctcgacattgccataatcgttctgctggcctcagcgcttggttactgcgccactaaatatctgggaagtgatacaaaatgatgctttattgggaattattcactgtctttttcaaaatcggtcttttttctttcggcggcggtctggcaatgatcagtatcattcagcaggaagtcgtcggacgcggctggatccccgcatctgaatatgcacggatcatcactatttctcagatcacccccggccctatcgctgtcaatacggctacatatgtaggagccagggtctgcggtcctgaattctggcatgccctgcttggttcttttgtagctactttcagcgtcagcctgccatctttcattcttgtcgccatcgttgcccgttctctccaaaagttcaactcttcgctggctgtacaaggtatcctcaatggattgcggccttcagttatcgccttgatgctgaccgcagttttcttttttatgcggataacatttttccccgcagccggaaccgccgcaatggaaaatctgctgacctatttcaaattctggccgacattgctgacggctttgcttttttatctgcattactaccgtaacctgagcgctattcccttgatgcttttagccggctgtgccggactgttgatgtagaaaaaacacaaaataacctgcatacagcaggttattttatttcttctttaatatttgcagcccagagaaatggcttcggtcgggcaggactgcctgcatttaccgcagacaatacattccctgtctcctacccgtttacaatccatcaagcaactacgtacgcagcgctggcaggcggtacatttacgcgaatctacctgcatgccaaaaacggcgatcctgttaaacaggctgtaaaaagctcccaacggacagaaaaaacgacaaaaaggccgatagataaacagcgccgcagcagccaaaagtccaatgatccaacgccagtccagaccatgcagatcaaagaaatacagatcgcaggcaaacagcagcagaaccacatatttaaaataacttaaatagtatgtaattttatttttagacagcttcaacatcggcagcttatctaaaagctcctgtgcccatccaaacggacacagccagccacagatcatccgtcccaaaaatagagcgcacaagatgagcagcccccaaacccgccagcccaaaggtaaagtaaaaccggtcagggtatgctgcgtcagcccccagggacatccggcttctgcatagcggcaatagccgcaattaactccgggcagacaaacatttttccaggtcatatcggcccccagcagattggcggcaccacgcccattatacaaaaccgtcgccgcaagctgcgtcgtccagcgtttaaaatccttaaccatttttaccgctcctttcctgtattgctttcattgtaagggctggagttgactcacagtcaagcagtttgcaaaaaatctacaaacaacgcttgacctggagcagactccagcatataaactcacatatagaagccgtataagcaacggcagaccctatctatttgcaacttacaaacagagaaacggaggaaataccatgctgaaaactctggccctgacacttactttattactgagctttattgtggctgcctgcagcagcacatccggcaccaatgccaaaatcggccagacaacaactaacgcaactcataccgctccaacagacgcagtccaacgcatcaggctgacactcgccaaccaagacgagcttatcgtcaaactcaatggcaccagagctgcagaggattttttgagcctgctgccactggaactgacctgcaaagattttaataataccgaaaaggtagcttatctgccgcggcgccttgacacacagggcgctcctgccggttttgatcctcaaacaggcagttttgcttattatgcaccttggggtaatctggcatttttttaccgtgattacagttatgccaacagcctcattgaacttggtactgttgaaagcggtattgaaaaactggccgctttcgataatgatttcactatcaaactggaacgcctgccctaaaaaaacagagcttgcataaatgcaagctctgtttttttaggctttcagcgtttccttcaatatctcaacgatctcttctttagtcagcactttataaccgccctcaagaataaacgaaccctgagcgatcccgtcaagcatcgtttcatcgacgccaagttccctgccgttaagtacaagtcccagctccctcatatagctttccatcgccgcaaggcctgcctgagctatctgttcatcagttttcccctcaggacgcacatcccatacattgatggcaaagcgtttgaatttcgccagtccgtacggcatgatgtgcctgtaataaggcagcgacacagcggccagagtcattccgtgcgtagcgtcagtgtaagcgccgatcgactgaccaatcatatgcaccatccagtctgtcgactttcctttagctaccagggtattcaaggcccatgtagcgatccacataatattgcttctcgcttcataatcttcagggctttgcacagcgatcctggaactgtggatcagcgaacgcagcaagccttccataagatagtcggaagtattgtcgtcagttccggaaaaatactgttccaaaatatgcgacatgatatcaaaaaatccggcaaccatttgataacgcggcagcgtaaaagtatacgtcggatcaagtatcgaaaatctggggaacacattatcaccaaacacccgcccgattttagctttagccgcatgattggtaataactgaaccaccgttcatctccgaacctgtgccaaccatagtcagaacacagccaaccgggataatcttattatccaccgcttccatccgcagataatatttttcccatggatcagtttcgcagtaagctgaaactgaaacagccttggcataatcacaaacagaaccgccgccgactgccagaatcaaatcgaccttgttttctttggctatcctgcagccttcatataatttttccagtgtgggattaggcattacacctgcatcctcaaaaactgttttgcccccgtccctcaaaagcttgaccacgttttcataaataccgtttttcttaatcgaaccgccgccatataccagcatgacatttttaccatagcatgccaattcctgcggcagattttctaatgaattttcgccaaaatacaatttggtaggattggaataaacaaatttacccagcattatttttgctcctttatttcaaatttccatattctgcatctgttaccggttccagccattcattggacacccccgcggcgggcacttcgactgcaaggtgtgcaaaccagctgtcaggagccgctccatgccagtgtttcacttcaggcgggatattaaccacatcacccgcgttcagctcccgggccggtttcccccactcctgataataacctcgtccgcctgtgacaagcagtatctgcccgccttgatgatggatatgccaattattgcgacagccgggctcaaaagtaacattgccaataaccactccttctgttgtcagcatcttcaaatagctctgccccacaaaataccgggcataggcatcatttttttcacccatgggaaacacgcttaatttttcttccgacattctcaaaacactccttttctatcacattctcacatcgttctgcgctcaaatccgttgtagctgaaaacgcagtccgcactgctgcagaaccgccaaatcacctgctttttattgctcccactcataactaaaatgccggaacttccgttccttatctgtatcatatccaatggagttaactccaagtcaagcggctttttcaaaaaattaataccggctgtctgacaacaaaaccgttatttaaaaaagctctgcctgcagtgaccgcagcgcccgcaagtttctttccgtaaccttatccgcaggctccagctcactgcacagcagcggcgaactgctatttccagccgtaatctgctgcagctgtctgcggctgtcattggcataacaataaatgcagccatgcagacaggtgttataggcgccgatatcgatactggcggcacagccgcattcaccgcgctgatttttatctttgactgtatcaaggcggcacctgctcacacggccaagcagctctgcgtcgatgcaactggcatgcccaatccccagatcagctaattctatagcttccgcacaggtttccagctgcagaccatattgccgggctgtttgggacattacggccgcaagccgccgctgctcgtcctcactcaggcctctcagccctgcctgatgcagacctgccttgatcttaggataataatcaaggaaactgataatacattttttcgtgctgccggccagctgcgctgccagttcctcaaaaaccgctgcgtgatactgcaggtcatagcgtgcacttaacaggatcgggtcatagcgccagatcattctttccgcacctatcttctgcgccagctgccgaaatatctctatcctcaccgccaatggcggtaaagctgcttctacgtcagcagcatacgcattgagcgtaaattgaaaataataagcatacgcatccagaactgacagctgcttaagcatcggttctggattttttgtccagaaaaccagcccatccacgacctccggccgcaggctgatcctgcttacctgatgaaggttcagaggattgcgtaccagtacatactgttcctgcagccgcttttggaaccattcccaataaaaagcaggaatatcagttcgccggctggcactgataatcattcgtcatccctcctctttttgataaactgcttaaagcttcacttgtttctattatacactgatctatatcggacaggccggctaatttttttcagaaaacgcttgacttgaagttaactccaaacgctagaatgaatttaaaagttacaggaggtgatttttatgaatattaccgaagcaggcaaactgacttcgctgacacccaatactctgcgttattacgaacggatcgggcttatcccacctgtcgcccgtaataaaggcgggacccgggaatacacttccaaagacctctgctggatagaatttataaaaaccatgcggtcagccggtctctccccggaaactttgatagaatatgtcgccttgtcacagctcggcgacaccacgctggaagcccgtaaggatattttagaactgcagcgggaagtgctgcaggaaaaattggaatttatccagcaaaccttagccagaatagatatcaaaatagaaaactaccgtactgacatttatcagaaaaaccatccgttacaaaatcaaaaacaagaggaggcagacctatgaaaaactttatttccatgttcctgatgacatccctgctgctgggggggatgacctttacaattggcaaaatgagcgtgtgtgccgcttcaaaaaacaggattgaaacagcacagcaaaaacagtctcagcttttcggcagcgccaaaaacaaacttgccgctaccgacccggattttgctcagactatggacaatttcatttacggtgacgtttattcccgcggtaaactgaccgacaaacagcgtgaactgctggcgatcaccgcacttaccgccagccagactttagacagcctgcctgcacaagtgcaggccgcactgaaagccggcgctaccccggtagaaataaaagaaacactttatcagtgcgctccctatgtgggcttcccaaaaacagtcagcgctttagaaatcaccaataaagtttttaaaaaacagggcattaaaatgccgctggcaaaccagagcactgttaccgaagccactcgttttgacgacggctttaaagtacagggtgagattttcggagcagaacacattgccgccatgcacaaaaactcgccggctaatcaaaaacatatagccaattatctttcagagttctgctttggcgatacctacaccagaaacggccttgatctgcaaatgcgggaattgatcaccttatgcgctatcagcactatcggcggtgcggaacctcaggtcaaagcccatgtacaggccaatctcaatgtcggcaacgataaagaactgatgctggacgcagttacccagtgcctgccctatattggttttccacgtacgctgaacgccatcgcctgcatcaatcagatcatccccgccaatgcctgataagcattatatgtaaaagaatacctgtgctgactttaaaagtcagcacaggtattttatttatctgcaaatcattgtgccgtccgctttttaccaaacgtatctatttcgccgcgtacaccttccagccagctgctgatcagtcgctgcatcttcccggtcccgatatcctgcaaagccagtccttttgttatatacgcctgcgggcagcttgcggctatagcatccaggctcttttcgataccgctttttttactggtacaaaacggtacgagcactttacctgaaaaatcatgcgcttctaaaaaagtacgcacggccataggcgttgttccataccagacaggataaccgatgaaaatcgtatcatactgggaaatatcggctaaattcgccgccagaggaggccgttcattacctgcaagttcctgtttagctattttaccgcattcacttttatcctgcggataaggcacctcagtctgaatagcaaacagctgtcccccgaccgcagcctgtatctgccaggcggccagttctgtattcccagtatgtgaaaaataagcaatcagtattttaggattagtaggcaagccttccggtcctttaatcgtaaccggcttattttcatccgtttcttcatacccgatcccgccacagcctccgaccgcagccatcaacagcagacccagcagcagcagatatttcttgcagcttcgcatagtatccctccaagcatcaaatcattctttcttaattgtatcataaaccttagagtttgctctatgtcaaataaaactttttattttttatcaaaaaacagccctgataaattatcagggctgtttacttaccagtgatatttttcgccgcggctgattttaaacgcacggtaaatctgctctaccagcagcagacggatcatttgatgggtaaaagtcattttggaaaaagaaatacgctcatcagcccgatgccgcaatgcatccgtataaccaaaagcaccgccgatcacaaaggtgatatggctgctgcccgctaaggccagcttctctattttggcggccagctccggtgaacttacggccttgccactaacatccagtaaaatcacatacgaattttccgggagcactgccagcaaacgttctgtttctctgcccagcacctgttcttttaaggccggcgatggatcttccggcattctctcttctccaatagcgatcgtttccaatttacaaaacggctgcagccgttttgtaaattcttcgatccccgccgtcagatacttttccttgatcttacccacacaggcaatggtgatcttcatttaacggttttcctcaggaatctcttccagtgtcatgtggatcgtttcttcagcgccgccgcgcagaacaacaacatccacactgtcgccgactttcagctcagccagcttgccgcgcagctctactactttatcgatcttctcaccgttgaacttgagaatgatatcgccgggacgcaggccggctttagccgaaggactgccttcccaaaccttcataacaaaaataccgtcatgcaggtcgatatcaaaaccgtaccggttggcaatatccttatcgaccaggctggcgccaatatacggacgcactacacgaccttttttagccagttcatccaaaatcggtttggccgaattgatggggatagcaaacccgataccttcgacaccggaaacagcgatcttcgcagaattgatacctacaacctccccttccgcattgaccagcgcaccgccggaattgccgggattgatcgccgcatcagtctggatcaggtcaaatttacgttcccctaactggatggaacggttcaaagcgctgattacaccggctgtgacactgccgcggaactccagccccagcggattaccaatagcaatagcgggttcgccgacctgtaaagttgaggaatcaccgaaatcggcaacaggaagattgttttcgtcgatctttactacggcaagatcagttgccgcatcggcccccaataccttgcctttgacactgcgtccgtccgtcaggctgacgatgatttctgaagcgccttctacaacatggttattagtcgcgatcagaccggacttgtcataaataacgccggaacctgtgccgcgttcagtcagctgcactcgattaaaaatatcgcgcacataggctttattagtgatacccactactgccggacctacttttttagccgccgctacgatcggcgtgttacgggcaccggaaaggctggcatctttctgtgccgcagcagcagttttctgttcctttactgcctcagccttattgttatcactgcagccgcctataagtacagcagctcccagcagagcacagaaaaagatattcatggtttttttcataaagcttctctccatctcaacactcctcaatcataattttttactatgttttcctgcgatgtgatataaatttttgtatccgcgccaacttcgttagcgtccaggataccccgcaccgtttgcagggccagggaaggcaaattgttttcctggctcagatgcgccagaaaaacctcttccggcaggcgctccatatgcgccagcagccaggctgccgaaacattggataaatgcccgcgtgttcccagaatcctctgcttgagtatctgcggataactgccatttttcagcatatcttcatcgtggttggcttccagcaccactacgtcagcatcagctatattctgacgcacctcgtctgtcacaaagcctacgtcggtgagatatgtacatttactgccgccgcttttaaaaacatagcctactgtagaggctgcatcatgcgggacggcaaaagggattatttccaaactgccgctgctcagttttttgggcagtaagcggcagcagctgcgttccatttcactttttttcggcatatactgccaggtactttcattggcaaacaccggcagacggtatttacggcaaaaaacaggcagtccctttacatggtcgttatgctcatgtgtcaacagtacgcccgtcaaatcttcaggcttcatgcctgcctgatgcagacgttccgtcagctggcggcagctgatgccgacatctaccagaaaagcctgctctccggcacgtatcaccgcggcattgcctttactgccgctggccaggatcgtgatttcaaactcactgctcatgcttcgcctgccgcgattttgtgcccggcactggttccaatacgttcagctcctgcagccagcatagcctgcgcagcttccgcgtcacggatacctccggcggctttgactttgagaccatacttttctgcttcggctgccagcagctttacgtcatcgacagtagcgccgcccttgttaaaacccgtactggtcttgacaaacgccgcaccgccttcggctactaaacgacaggccgtacacttttcagcgtctgtcagcaggcaggcttcaatgatcaccttgaccggaaacggactggccgcctcgactacgctgcggatatcactgactacagcagcataatcaccggtcttaaatgccgatacgttcatgaccatatctatttcatcagcgtgcgcttcgaccgccatttttgtctccagagccttgacctcagaaaatgtagctcccagcgggaaccctactactgtcacaaccttgacgttcgtatcgctcagcagatgtctggccagccccacataacacggattcacacaaacgccaaagagcccgtatttccgggcttcgctgcaaagctgcataatatcctcgacagttgcctcaggttttaataaagtatgttcaagatgcttcgcaatcgtcatccccgactcctcctcatcttctataatgatttttgcttctatatattatatcaaaactttatactttctgctttgacaaaaaagtaaatttttataaaaacagagccataattttaattatagctgttcattgtaattatacactaacaatattctatattatcatacaataaaaactctgtgttcttaataaaaaagccccgactgtacagtcggggcaacataaacatttctctaatttcagtgttttttacggcacttctcacaaacgccaaagaaataaaattggtgtttgtcgatactgtaaccgcttgcttcttccacctttacgaccagagaccggtcattgagagccggtacatcatcgacacggccgcagacagtacactgcacatggctgtgctcgctgatatcagcatcatagcggaaactgtcctcgccggtattgatgatctggatcaggcccagtttattgagaatctcgacggtcttataaaccgtagcaaaactcatggaaggatatttaggctgcagggtaccgaacagcatttcagcactgggatgctgcttggtattagccagcgcttcataaactgccaatctttgcggagtgactttataaccgttttgacgcagcagggcggtcagttcttggttgtttaacatgatttacctccttggttgaaatgttttttgtccggcatttattgcctgtttagttttagataatctttatctattatttactaaattataataaagaaaaactttcctgtcaatatttaatatcctttaattgcagctgtttaaacatatttcacaaaccttccacaaggattttggcaattaaaagcgaattttataattattatacacaagaaagaggtagacccatgaccattgaacaaataattgccggcgaactgtcggtcaggccgcagcaggcagccgcaactctagaactgctggacagcggtaatactatcccttttatcgcccgctaccgcaaggaagtgaccggatcgctggacgaagaacaaatccgtatgatcagcgaacgtgctcaatatctgcgtaatctggaagaacgccgtcaggaaatactggaatcaataacttcacaggaaaaactgacccctgaacttgaaagccagatcaaagctgctgtcaaaatgcaggagctggaagatctttatctgccttaccgtcctaaaaaacgtacccgggcacagatagcccgtgaacgcggactggagcctctggcagaactgatcatggctcaatcccagccgctaatgaccttagacaagctggccagcctgcatgtagatcctgaaaaaggtgtcaactctgtttccgaagcctgggccggggcctccgacatagttgccgaaaatatttccgaccgcgccgatatccgcgaactgatccgcaaagaactttggaaaggtgccgaacttgcttcaacgctgacagttgacgaaaccgaagggcaggattacctgatgtataaagaatattccgaaccggtacgtcagctgccgccgcaccgcattttagccttgaaccgcggtgaaagcaaaaattgtctgaagctcaccctaaattatcctgcggattccatgctgactaaactggctcaaaaactgaaaatccagccacacacagtttggaacgagctttatacaaatgctgttgccgacagctacaaaaggctgctgtttccctcgctggagcgggaactgcgtaacgaactgacggaaaaagcagaaaaacaggctatttctgtctttgccgccaacctgcggcagctgctgctgcagcagcctattgccgggcatactgttttaggtctcgatcccggttaccgcaccggctgtaaagcagccgttattgatcccaacggacgtacactggctatcaatacgctgtatatcaccggcagccagcatcagcgtgaacaagcggaagccggctttatggatctggtgaccaggcataaagtgaccctggtagctatcggcaacggaactgcttcttttgaaacagaggagtttacggcccagatgatcgaaaaataccatcttgatattgcttacctgatcgtcagcgaagcaggcgcttctgtttattctgcctccaagctggcccgcgaagagctgcccgatctggacgtttccctgcgcggagcggtatccattgcccgccgtgtacaggaccctctggcagaacttgtcaaaatagagcccaaggctattggtgttggtcaatatcagcatgatgtcaatcaaaaggaactcactgcgaccttaggtactgttgtcgagtcctgcgtcaaccacgtcggcgtcgagctgaatacagcttctcccgctctgctttcatacgtagcaggcatttccggcaccgtcgccaaaaatattattgcctaccgtgacgataacggtgcctttaccagccgtaaggaacttttaaaagttgcccgtctgggtccggcagcctttactcaatgtgcaggctttctgcgtatcgcccaggctaaaaatcctttagacaatacctccgtccaccctgaaagctatatcttagcagagcagatcctggcagagcttggctttgacctgaaacactgtaatgacatcgctgttcaggaagcggcagctaaagccgacgcctctgcaattgccgtcaaactgaacgccggcctgccgactgtaactgatatcctggaagccctggcccggccggggcgcgatccgcgcgaagatgctccggcaccgctgacacgcaaaaaggtagcaaaactgagcgatttggagatcggcagcgttgtcaaaggaacagtccaaaatgttgttgatttcggagttttcgtagatatcggcctaaaaaccagcggtctgattcaccgcagcgaattatccaacagtcggtttcaccaccctctggacgttatcagcgtcggcgatgtgatcgagccggtcatcatcagcatcgacgaacaacgtaaccgtatcggcctgagcttaaaacaggcaaaaaaaactaccgtctaaatataatttaaacagacgtcttttaagacgtctgttttttattgttacaaattatattttcatcacaatattaataaatataaagatatgtatacttttatttttatgatataatatttttaaataacaatcaataatatttaggtgataaacatgaaaagagatatcaataccctcagtctgttaaatgaaatatcggaacttgtttatgtttccgatccagaaacctacgagctgctgtttgtcaatcagaccggctgccagacactgcatctggaaaactacaagcacaaaaaatgctatgaagttttacagggtaaaacttcaccctgcgaattctgtaccaacgacagactgtgcgatgataatttttatacttgggaattcacaaatccctctatcggcagacactttttactcaaggataaaataatccaatggcgcggcaaaactgcacgcatggaaatagcttttgatataacagaacgcgaactgcaaaagcaggaactgaaaaatatgcttgatgtccagaccttaattaccaactgtgtccgaatgctttacgccgtcgatgacctcgatcagacgatcaatgctgtcttgacccagatcggcgaatttctagtttctgaccgtgcttatgtttttgaaatcaaagacgagttgatgaacaacacacatgaatggacagctcccgggatctcgccgcagctggagaagctgcagcagctcgatctgtcattgatttccgactggctgccgttttttgaaaaaaacgactgtatcatcatcgacgatgtcgaacagctgcaaaagactaatccggcggcttatgccacgctgcacgcccaggaaatcacctctttgatcgctgcgcctatttttttggataacaagctggcaggctatatcggcatcgataattacgacagtgaaaaaatcaaaaattcttcttatttgctgctttccatgtccatttttctttcctatgcgatcagacatcggaatcatgtcgatatgctgcatcgcctcagctaccacgatctgctgacgaacgcactgaacagaaacgcttttatggacgtgctcagtcagttcaggccgggacaatatgcttctgccggcattatttatatcgatatcaacggtatgaaggaaatcaatgatttttacggccatcaccaaggtgataaaatccttataacaactgtagccaaagtcttcaacctttttaaacccgacgaacttttccgcatcggcggtgatgagtttgttatcatcacctatgatctgacagaaaccgatttttatgaaaaatttaaccttttgcgtaatattttctgtgaaaaaactaacttgcccttctccatcgctacaggcagctgctgggtcaaatcccccagcgatttaaacagcctgctgcagcaggctgacagcgctatgtatacggataagaaaaaattttattatggcaaagaaaaaacaagccgctatcggcataatttagatgatatcctcaatctggccaattacagcgctctgcaggaagcactgacagccggacagttctgcatttatttccaacctaaaatttctttggataccgaggaatttatcggttctgaagctttgatccgttatataaatcaggccggagaaatcattgcccccaataattttattccgatcctggaagaagcgagactgataaaaatgctggatctttatgtttttgaagaagtctgtaagcagatcaatatctggaaagaaagaaaaatgcgggtcaaacccgtttctatcaatctttcacgcagcactctgtcttaccatttcctggccgatcagctattagctcttatcaccaagcataatatcgacatcagcctgctggaactggaagtcaccgaaactgccgaagtcgataatcagcttgttttcagccaggctttggaaaaactgaaggaatatggtttctctatttccattgatgacttcggcgttcgcaacgccagtctttcgctgttcactactatcaatttcgatattttaaaattagaccgcagtttggtaaaaacactggcacaaaaccaaaaggcacgtattcttatccgttctctggctgtcatttgttctgatctcggtatcaaattgattgccgaaggcgtggaaacactggaacagttggatattttaaaggaattgcgctgcaatgaggtgcagggttatttattcagtaaacctctgcctttaaatgactttgaaaacaaatatctccagatcctgcggtaagacggcttgttgacagcccagactgtaagcctcataataaaatcagaagcataaccctgaaggaggcggtcttatgacagcaataaccggcaaaccagcaaaaatatatacagcttatttcagtcctacaggcggtaccaaaaaagcagccctggcacttaccagtgctctggctgatacagacggatttacagaaatagatttgtctttacctgctttggcacagtatactttcgctgctgatgatatcatcgttatcgccgtaccggttttcggcggcagagttccagcttttgcactgcagcagctgaccgctctgcacggtcagaataccagcgccattgctgtagcagcttatggcaaccgcgcctacgaagatgccttgctggagctgagcgatagtctgaccagtcaatccttccgtgtgatcgccgcagcagccgtactgtccgaacattcgatgctgcgcagtgtcgccgccggccggcctgatgctgacgatctggcacaattaactgactttgccaaaaaaatctccgctaagccgttaacagaggcgccagcgctgacaaatatccccggcaatcgtccttataaagactggcagcctatgcccgtcgtacctcaggtcagcgattcctgtatccgctgtggtatttgctcggccacctgcccaactcaggctatccccagcgggcagccgcacacaactgacccccaaaaatgtatcctgtgcctgcgctgcactactatctgccctcagcaggcccgctcactgcctcagcaggctcaggccctgatcgcccagaagctggcgccgataaaagacatttacaaaaacaacgaatttttctgctaaaaacaataatcccgcgcttgttttaaacaagcgcgggatttcttttttactgaccaggcatgagtactgaaagcagcaccggtaccagcagcgtcagcagcaggccgttgataaaggcgaatagcccgacatggatattggtatatttgataaccaccggcagaccggaatccatagtcgcagctcctgatggcgccaaagccaggaatttattgatttttaccaacagcggtatggctaaaaatgccaggacttcacgcagcatattagctaaaaaagcgatcgtcccgatctcaacactatacagcgtactgataactacagaggaaaggctgtaccagcctaaagcactgccgacaagcagcgcgtcccgcatttccatcccggtcacgaaggctgaaagagccgcaccgcctaaactgccgatagttacagccgttggaatggcaactgccagcagaatactctgcggattgcagattttttttataatatgcctgtttccgccgatttcgataccggcaacaaaaaccataaaatacaaagccgacatcaaaatctcgtccagcaggtctttatgttccaatcccaaaaagaaatatccgccggcgattcctaaagcgataaatgtaaaaatagcataaaccattattcatcgctcccttccgcccgggctgccgtttttgcaaaaagcttcagcaccagccacagcatcagcacgctgccgccaatgataaaaactgccatgaccagagatttgccgcccaactggtccagtttgcccaaaagctctgcatcacagccgatcttagcacccagacacaacagcatgataaacagactgactgtagaaaaccggctgagccattttttcacattataatttaaaaggtcactgcaacctacggcgattcccaaaacgatcgcgatcatgatctcctgcattgcttcccctcattcccataatataaaacaagccccgcgcacggcagggcctgctgatcactattttttattctaacgacagcagcagcggataaagcggctgacctccgtcaaaaactgtaacttcccaaccgccgtccagagcttcaagctctgcggcgattttatcagcttcagactgtgtcagatcactgccataataaaggctgatcaattcccagtcgctgccggccagcttgacagtttccgccgtgacttcttccagagttgctccggcataaacgatcttatcttccagcaaaccaatatactgccctttttttacagttatcccgttaacaacgctgtcacgcacagcaatactgacagcagcactgtgggcttccttagcctcacgtcgcatcacagcgctgttttcctgcagtgttttagctgcgtcaaaatgcagcagtgccgccagaccctgcgccagatttgttgtcggcacataatctacctgcgctgctcccaataattttttgacctgctccgccgccagaataatatttttattgttcggtaaaataatgtactgctccgccgagcccttttcaataactttaataaacgcctctaccggcggattcatgctctgccccccgctgatgatctcagatgcaccgagctgatgcatgatgctggcaataccgttcccggccgccaccgacagtacagccagaccgtgcttctccgtctgcgcaccgacaacgcgatgctgatgctgctcggccatattgtcgatcttgatatcgtgcagagagccccagctcaagccgtgctgcagaaccagcccgggagctttggtatggatatgcactttgacgatatcgccgacaacagctacaatcaacgaattacccaaaggctgaagagtactgcgtacaacgtcctctttgacttcagcttccttaacgataaattctgtacaataaggattttccaaatctacttccatctcgataaaattggcaaaggatggctttgacggcggcagatgcagctcacctgcgtcttcgcctcggaaacccgccagacagccttccaggaaaacgatcaagccctggccgccggcatcaactactccagccgctttcagcgccggcagcagttccggcgtacgagccagttcttttttcccgctctccaacgcctcgcataaaacatcttcaaaatcttcaccctgacgcacagcatgatacgcacctttagcaatagcacgcgccacagtaaggatcgttccttcaacaggctttgataccgcccggtaagcatacaaaataccaaactgaaaagctttgcccacctcgttgctggtagctcgttttttgccggccaggccttttcccaggccacgcagcaactgcgacaggatcacgccggaattaccgcgcgcccccatgatcgcactgcgggctgccatagtccctacttcggaaacagtcgcattctgcagctgactgatctcacgggccactgctgccatcgtatgcatcatattagtgccggtatcgccgtccggcaccggaaaaacattcaaatcattgatatattgatagtttttttcaaaacttttataagcgcccaacagcatattttttatttgttcgccgctgataatcgcctcttgtttacttgtcatatcaagtctgcacctttcttcagcgctgccgccgcacaaaaaggccaataacaccgggtcctaaatgtgctgccagaacagttccgatcccggttaccagaacaggcagtccgggaaacaattcaagcattgccttgcgcaaagtttcagcgtcttcctcagcttcagcattcgccacatacacagcttctataggagcattcgcagcggcaagctcgaccatgcgctgcaatactttcttgcgggtacggcatttatcgacaacgaccagttcgccggcggtatcgatgtgcacaatcggacgtatgcccagaatattgcctactaaagcgcctacggcgcctatacggccgcctttctgcagataatctaaagtattgacggaaaaatacgtttccgtccgctcgatcaggcccttcagatactcctccagctcgtccatcgttgcgccggtttcagcataagcgagtacttccattgccattccgctgatcggacaggctgctgtaagactgtcaaagacacggatatcagacccgggaatttcactcatgacctgccgggctgctaagcgtgctgtctgaacagtaccgctcaaaacaccgtctaacatgatcgcaatcacttttttaccgtctgcggctaattctgtaaatacatcaagaaatctgccgatggccggctgcgaagttttaggcagctgcccgcttgcttccaccatggcaaacatttcctgcaagcttttttctccgtccacccattcggtatctccatgtcttaccagcagggggaccacatggcaacggggatcgtcccgcaagggtgtttcttctgcaacagcaatactgtccaaaacgatatggatatcatttctcactgcgcatcctcccttaatcaaattaacgtacatgctcttatttcaggcagacgcctttacaatatgtatatattttatcatatttccagctctatttccacttatagcacaattagcaggcctttttagccatttttgtaaaaaaataaagtataatcctgctttttccaccactgtctgcacttttgttgaagctcaacttcaaaacagcattgcaaatactgtaaacgacttcaattttttaacagacttaaaaaagggtaaaaaaaaagcccttacgagaagggccaaatgaggggctgttttgatactcctagtatagcatttttgtatacaatatgcaatagcagttttctgcctttttcagaaaatttgtgcaaagagaatttacctgcattggacaaaggtttattgataatctttaccgataaaaatcaccgcgtcataagacgcatcatcagcccgcagaatcctcagagtgtacgggaacggtacagccgacagcctgctgaccacacgtccgttgctggtcgtagatactaccgtagtctgatcacgttcaggatcactgccgccgtcgataacctcaaagcccattgctgccagtcttgctgcggcatcactgcctgctcctttaccgctgcagtcaacgaccttgacagataccgtattgcggctgctttccttagcaggcggtttcacagccttaggcggctctgttaactgctgcccgtctttctctgccggtcccagttcttcgcctgacttagcttttttagccttagctttcttttcggcatcagctttttctttattcttctctttcgtatcctcttttattttcttttctgtttgttcatctgctttgattttctcttctgcagcttcctgtttttctttttcctgcgctgtaatcaggttgcgtttatactctgcttccattttttcagcaccctgacgataacgttccgtcatctgcgcgccctgcatatctaccatctgctcgcgcaggtcagtaatatcgggaatccagtagctgatctcatcaatatattcaggcgtacctggaactgtagccatctgcagaccgccctgttctttcatcattccgtgtaaagcgccgcccatcgccagcatatctgaaacgggcaggtcagttttgaccattttcataatttccgaaaccagccccggcatcttagttaaaatctgtgccgaagcaatcttttcgtaaaccgccatcataaacttctgctgacgcttaatacggccaatatcgccttcctcatcacgatagcgcacatactggatcgcttttttgccatccagatgctgttgccctgccggaagatcgatcagaaaatcatcccagtcatcataataatacatatccttttccacatcaatatcaatgccgccgatcgcatcgaccaaactttcaaaaccactgaaatcgaccattacataattattgacctgaatgcccaaaagctcttccgttgtctgctgcgtcagcttgtgcccgccgaacgcataagcatggttgattttatcccagccatgccctgggatccgcaccctggtatcacgcggaatcgacagcagcgaaacatttttacttttagggtcgaacattacgacaaataacgtgtcgctgcgaccaggatcatcgtccttttccctgccgtctacgcctaatactacgatattgcgtttagagcccagccgttcattgcgtggcaggtcatccatagttttagccagcgtcccaaacatcggatcgccgttcatataagcatataccaaataactggcggcagcgattgccgctacgatcagcaaaattaattttttcaatccttttcttcctttcccacacccaattacaaaatattagcctgcagttctttatgaaaccgtttaataaatccatgcagtatccgagctgtaagcccccagataacatgcccctgatattcgtaaaaatagatattataccccttccgcttataccagtcgtgcggatggcgcggcagcagatcaaaaggaaaatctgcagttgcgcggtttgccagttccatatgagcaacgcgcggctcagaaaccagtaaaaaattcagcggcaccgtaaaaatctcagctacctcatcgctgttgcagtccagctttacttcgttggccagcctgccaacaaaaggatgaataataggtcccatatgtgtcaccaagtaatccagttcaccgcacaattctattttgtcttcagtaatacccagctcttcacaggtttcgcgcacagcagttttggcaaagctgtcatcgccacactcatagcgtccgcccggaaaacatacatcgcccggctgccaccccaaaccggcggcccgtacttcaaaaagaactgccggaccctgcttggtgtctatcaacggcactaaaacggcagcatcccacaaacggtcagctttatcgatccgggcaggacggcggttgagtcgttctgtgatctgttttataagttcagctgttttttccatacaataaccccatttctcctatatcccttctgcgtccacagcaaatttcctgccgcctgttgtgaattattcttgaaatataaaagacggacgggtctaaacccatccgtcaaagagtcttgtcttattttaataaagcggttcttcgatgttcgacttttcgcttttatcaaccagataagcaacggtagcgtcaccagtaacattaacgcaggtccgcggcatatcaaggatacggtcgatacctgcgatcagagcggaaccctcaagcggcaagccgatcgccgtcaatatcatcgtcagcatgataaagcctgcccccggaacaccggcagtgccgatcgaagccagcgtaccagtaagaacaatagtcagatactgcccggtcgtaaggtcgaccccatagatctgcgcaatgaagagtgcgcagactccctgataaacagcagtgccatccatattgatcgtagcgcccaaaggcagtacaaaactggaaatgtctttcgaaacacccagcttttggatgcattgcatgctgacaggcaatgtgccgccggaggaacagctggtaaacgaaagcacctgtgccggtaaaattgctttgaagaacttgaccgggctgatcttgccgacgaatttaagcagaccgccataaacgatgaccgcatgcaggaagcagccgagataaacagcgataacaaccttcaaaagcggcagcagtacagccgggccgttagctgcaacgaccggagtgatcaaaccgaaaacaccgatcggcgccacattcatgataaaaccgacgattttatagctgacctctgccagaccgtcaaaaacattgtacagagccttggcccgatcaccgactgcagtgatgccgatacccatgaacagactgaaaacgatgatctgcagcatgttggctttaagcatcgcttccatcgcattagtcgggaaaatgtcaataattacctgcatgataggcggcgcggctttagccgcagctttaacgccttcaccaggcatattcacgccggcgcccggttctaaaaccgtacctaaaaatataccaagtacaatcgcaaatgccgtagttcccaaataataagccatagttttgccgccgatacggcctatctttttgatatcccccaaactgcagacaccaatgacgagagacgagaaaaccaaaggaacgatgatcattttgatcatattcataaagatagtaccaaaaggtccgatccatgttttggcgaaatctacaccttccgcacccagttccagaccggcaatgataccaagaccaagaccgatcagaatttttgttgacaaattcatcaaaatatcccccttgcgcataataaaatattaaaattacgtctacaataattaggcaaaaataataaaaatcctgccttctttcttcatgtatacagtatttctgcaaaatcgttgcccaaaccgcagttttttcaaaaaaaatatgctaaagtttttagttttatccaaaaactttagcatatcctgaaattatttattattctccaaacggtatgcacaatggtttgtcgcacctgaatattcattcagcttgaaagaaccgcgcagtgcggccgctacaaattttttcgccagttccacagcttcgcgcacgctcagtccattggccagtcccgctgtaatcgctgccgaataagtacagccagctccatgattatagcagggctcgattttaggagcgctggcaatcgtaaattccctgccgtcataaagcacgtcaacagcttccctgctgtcattgcgggaaccgcttttgattacgacatagcctgctcccagctccttgatccgtccggcagcttccttgatctcgtccagcgtttccaccttttccatatcggcaagataggctgcttcgatcgtattaggcgttactacgtcagcccgctgcatcaaaacagttttgatagcggcggctgcttccggtaccatgatcacatccacacccttgcagaccatgaccggatcaataacgacattgcgcagcttgaaacggtctatagtacgggccactagctcaaccagctcggcactgcccagcatccccgttttcatagcatcgataccgataccggcgacaatcgtttcgatttgtttttccacaacgtccaaaccgatcgggaaaatttcgtgatcccagtctttatgaggattttgggctacgataacggtcagcgccgtcattccgtaaacatccagctcctggaatgtttttaaatcagcctccatacctgcaccgccgctggcgtcgctgccggcaatggtcatggctttatgcagcatattcataacttacctcctgcctgaagctttacctggcgtaaagctcccataaaataaccgccaaacagccaggtattccaaagaaccccgcaatcagcgctttgataacggtgattttgagtccgaaacccaaaaatccacctataagatttataaaccacaaagctaccgcaccgcagataccattccagatgagacgaaacggcagcgaaaaacattttacgacgacgactaaaatcagtacgccgataataaacggcagcgttccttccagagtacccgagttgagcccttttacagcatggtcaatgccctgcatggccgaaccgcccagatctcggacagcactttctatttcctgcatgctatagctccttctttcttacattctatgcctgttttccaaagcacgtgataaagtcagctcgtcagcatattccaaatcaccgccaacaggcaggccatgggcaatacggctgataacgataccgacaggcttcagcagctgcgccagataggcagcagtagcctcgccttccacgtcagaattggtagcgatgataacttccctgaccatatcaccctgcagacgccgcagcagctcttttacacgcagattatcagggccgataccgtcaagcggtgacaaaacgccgtgcagcacatggtaaacaccgttataaccgcggctgcgttccatcgccattacatcctgcggctgttccacaacgcagactacactgtggtcgcgtcctgcattgccgcaaacctcacaggtctcggcatcagtaagattataacaaatatcacacaaacggatctgccgcttggcctccagcagtgtttctgccagacggcgcacctcttcttccggcatatcgataatatgatacgccaggcgcagagcggttttggaaccaataccgggcaggcgccgcagctgttcatgcacattggccagcggccggatcattctggccattttcagaacatgcccggcattttcatcccgccggtcagtttgcccatttcagcttcagtcatttcgtcgatcttgcgcataccttcgttaactgccgctaccaaaaggtcttccagcatttctacatcttccggatctactgcgctgggatcgatcttaacgctgacaacttcttttttaccgctgacaactacggtgacagcaccgccgcctactgtagtttcgattgtacgcagctttaattcttcctgcatttttgccatatcagcctgtaatttctgtacttttttcatcatgccctgcatatttcccataccaccgttaaacattattgttcctcctcgtaatgatgccttgcggcagaaatttgatttataatttttgcagtgtgccgccaaaagcgtccagcgcagccttcacagcaggttcaacatcttccgccggaggctgttttggagcagctttaggtttggcagcggcaggcttggcggcagtgatgcattccaaccgtacactttgccgtgccagcctcagcagcacttcttcaaaagctttcttataatcaggatcgttcatcctgacgcacatgaatttatttttgaaaccaacggtcaaaacgccgttttcataccctgtaacataaccgccggcggcacaggccaccatagactgttttttctcattcttaaggatctccaaagcctggttccacagatcttcgccttcggtccaatcaccgctgtattccagtgtcgtcgcagcagctgcttcctcagaaacaggtttcggctctgtttcagcttttaccgcagcagcaggctcgggttccgccgctggtgcctgaacggcacttactgccggcgctttttttacccgggacgctgcaggagcagcaaccgccgctgcctgtttttcttcgggttcaggcttaatctgagtcctgctgtttgcagcacccaaaggcacaccgctgcgtacctgatgctccagctgctctacgcgggccatcagtgcggcaatagtactgccctcaatacggcacagatcaaacagacataattccgcagtaatcctgccccgcgcactgaaccgcaattcacccatggcctgatgcagacgttcttcagccgccatcaggcgatcactgccaaataacggagccagctcggaaatagcttcttccgtatccgtcaaataaatttcgtggtatccgggcgatgctttatagagcagcaccgcccgcagatactcggccaactctgtcaggatctgacgcacatccttgccctgctcagccaaacggttcagcagctgcaaagcagctgacaagtcctgcctgccgatcgcacgcaccagctcacgcagcgcttcacgccccacgatacctaaaacgttccttaccgtttcggcagttacagtatcggccatcacgccgcactgatccaacaggctcagcgcatcacgcatacctccgtccgactgaatcgcaatcagtttcaaggcttcgtcatccgctctgatttcgctgccgtcagcaacctcgcgcagacgtttggcaatatcctcattagtcacacgtttaaaatcaaaacgctgacagcgggaatggatcgttgccggtatcttatgcggctctgtcgtcgccaaaataaacacgatatgcgccggcggctcttccaacgttttcagcagcgcgttaaaagcttctgtcgtcagcatatgcacttcatcgataatatatactttataacgcccgttgacaggcgcaaacatgactttttcacgcaggtcacggatctcatcgataccgcggttagaggcagcgtcgatctcaaacacatccatactgctgccgtcattgatccgctggcagttggcgcactcgttacagggattagcagtaggcccctgctcacaattcagagctttcgccagaatcttcgccgtactggtcttgcctgtacctcttggaccggcaaataaatacgcatgcgcaatccgtcctgtcgtcaaagcattgctcaatgcgatcctcactgcgtcctgacctacaagggcatcgaagccctgcggccgccagcgccggtatagtgctacataagccattttctgcctcctttcccatcattaagcctctgagtttcttatctacttattatataaaatttacggatataagtacatatccaattttgtgaaaaatttaagggacacttttgcatcaataatataaaaat

SEQ ID NO: 10032 - DNA, 61287 bp, Unknown
  gut microbiota DNA sequence
ttcacagactcctattgcgcaggacccgccgcctgcggtcctacagaaaaacaaaaagccgctgaccgcggcaaactttttttaagtggcggagagagagggattcgaaccctcggtacggtttcccgtacacacgctttccaggcgtgcaccttcaaccgctcggtcatctctccaggttgaaaaaatcagggattatgctattgtttaccgcttaaaaataaacttgcggctggcttaatccagccgcaagtaacagtatactgatttccggaagatatgtcaagagtttccatcaagattatgtaaaatttttttcacttctctattaatcattacttacttcatcagcaggcagcagcagcagtgagcgctcggaattaagcgtaacgttctgagctgttgcccccattaccaggcctttgaccaggccggcaccggttttagtcatcgcgatcatcgacacattttcttcttccgcccagcggcagatttttttagacgccgcccctttatcgaccagataagaagccttgatcccaaaaagtttcatctcggccaccagttcttccatccgcgattcggcattcagcagcttgctttcaagatcgctctgattgcggctgcgttccactacatgtacgaacaccacttccgctacatgctcacgcaggctgcggatcaaattgagcgccactaaagatttcttagaaaaatcggtcggtatcatcaatttacgcaacatatcatcatcggcaatattgtcgctgtcaccgtcggttttggcaacaaacaatggccgcttcgaagatctggcaagatcaaaggtcgtactgcccagcaaggcacttctaaaaaagccctttccatgcgaagccactaaagtcagatctacttctttatcgtcgccgacgcgggttatttcttcaaatacctcgccccatggcatttcgatacttactgcttcataaccgttgcgcatcagctcgttggcatacccctgcagcttgctgtaaacctttttataactgctactgtaaggatctgcgtcctcttcttcatcgaatacataagctagaataatttctgtatttgtatcggggcacagactgtacaggcacggcagcagtatttctgacttaggcgtaagatccattgctaacaaaactcttgtaaacatgtcgttcattgctcctctttatctaaaaatagcttgcgtcgacaaccccggcagttcctgccgacaatcttttttcatcctatttaaatagttatatttcgccatttataaaaaaaatcctgccttattattgtaagttgactttgaacaggttaaaatatatacagaaatttgaatttatacaaaaggagctaatgcgatgttaaagcaaaaaatcgacacagccgcactctttgctcagaaaaaaacagaagttcaaagcagcgcgcgcactttgctgatacttgacggccaggaaaacgcctatatttctgccgatgaacttacagaagagcttttagcaattccggaagaaggtgctatctggcttgatatgtcattatttggctcgcacgatcaggtaatgaccgtcgcccgctccttcaaactgagtcccgctactcaaaacattttagaaaataaaaaacagcagccgcgtttattccgcgacggcaacaacagaattctcatctgccgccacctgcagctaaacgaaagcggcaatgccgtttataataatatttgtttcgccgccagtgccaacagactgctttctctgcagcatggccgctgtgaccgtttaaaaaatgcgcgtacgctggtaacaaccctgcagaagcctaataatacgatcccgcaggctttgaccctgattttaggcaagatccttgacgacaactgcgaggtcatcaattatctggaagaacggctgcagcttctgtctgcagcttacagcgaacaggatgaacatccagatcccaaagaactgctgcgtctgcgccgcagcctggtcactgccaaacaggcggtctatccgatgcgccgcatcgtcagccgcgccttgcgtcaggacccgcctttagttatcggcagcgataatgcccccgaacttttgacgatcaaactggaaggtgccgtacttaccttatcggtcgccgaagaattactgacttctctggagcggctctgcgtcaatgccgctgctgaacgcagcgctgatattcaggctacgctgactacagtggcagtcattttcctgccgctgatttgtatcagcagtatttttgccatgaatttccagtatatgccggaactgaaatcccaatggggctatccgctctgccttggcgttatggcattgattgctatctttacgcttaaaaaattacaacgtaaaaaatggtattaatatttcaaaattatattgaacctcaaatacgcaaaaaccatctgtacttaaagtacagatggttttatcagttttcaggcgttgaataccttacccgggttaagaatatttttaggatcaagcgcacgcttgatttccttcatcattttcatttctaccggctccgtatatttttccatggcttcgaccttcttggctccgatgccatgctcgccggaaagacgaccgcccagactgtaaacataaggataagcttcagcatggaaacggcttacttcatcttcccactgctcgtcgctcatctcgcctttcaaaatctggaaatgcagattgccgtctccggcatgagccagcgtaaagagtttaaagttgtaattttctgcaaccctggtcagatggcggatacagttagcgatttgatcgactggtacgacaagatcatcagaagtgctgaccagactcaaaacgcgcgtagattccagacagttgcgacggagcttccacacacggtcatcagcctctaaaacatcagtagcgccgctggcactgcagatctcgtccagctgttccattttgctttccagctcatcttcattaaaggtctctaccgtcacaataacataaaaaccgtcttcataatgaggcagcttcaattcacagtaatcgctggagctgcgtacaaacgcattatccataaactccacgctcgtcggattcaaccccgctttgatcaggttcggcaccaaaccgacagctttatccaaatcggtaaagatcgccagcagatccagtttatacggacacagaggcagcagctttaaagtggctttagtaataatgcccaaagtaccttcactgcccatgatcagctgttccaggcaatagcccgtcgattttttcttcagccgtgcacccacattaacgatatcgccggtaggcgtaactgcttcaatcgcatagacctgatcgcgggtagtgccgtaacgtacagccttattaccgcctgcattagtggcaatattaccgccgatcagacagctgtcggcgctgcaggggtcgcctgcatagaggaagccggccgcattggctttttcctgaatttctactgtacgcgcgccagcctcgacaaccatatacataccttcagtattcagctcttcgattttgtccatccgttccaacagcagaacgataccaccataaacagggatcgccccacaggaaacactggtccctgcactgcggggtgttaccggcacattatattgattggcgattttcatgaccgccgcaacttcttctgtgctgccaggccaaactacgacctccggcagatgatgataacggggatcagtttcctcgtcagttttgtacttttcaagggtttcggcatcggtccttacatactccgcgcccaaagccgtttgcagagctgctaccacttctgcgctgaccggttcgtatttactcataacttccattcctttctactgtcctacaaaataagattttatcttttccgcagcatactgccgctgcagttcaataacttacagatcaaagatcttgcccgggttcaaaatcagctgcgggtccattgccgccttgatcgtgcgcatgatcgccagctcgccggccggggtatatgtttccatttctctgagtttttttgcgccgataccatgctcgccggccagacgcccgccgatgctgtaagcataagtataaacctctttatggaaagcttccactttgttttcccattcttcgtcgctcaattcgcatttgcataaaacgatatgcagattcccgtcgccgatatgcgcgttgattttgaccgggaaaggatatttttcgcctattttcataataaacttgatcgtaccggcgatctcattaacaggaactaccacgtcgtccgtcagggaaaccagactgatcagacgtacagactcctgacagttgcggcgcatatcccaaatacgttcatcggcttccagcacatcgacagcgccggcagcactgcacaactcatccagctgctccattttcagatccagctcgtcctcgctgaaagtctccactgtgatgataacataaatgccgttctcataatgaggggctcccttaaactccagatattcggccgtaccgcgcacataggaattatccatatactccacactggtcggattaatgccggcctgcatgattttcggcactacgtccaaggcctgctccggatcgctgaacacagccagcagatcaaatctgtaaggcgggatcggctgcagcttaagcgtcgccttagtgataatgcccagcgtgccctcactgcccatgatcagctgttccaggcagtacccggtcgattttttctttaaacgtgctcccagctctacgatctcaccagtcggtgttacgacctcgacagcgtaaacctggtcacgggtcacaccgtaacgcaccgctttattgccgccggcattagtggcgatgttaccgccgatcagacagctttcagcgctgcaggggtcgcctgcatacagaaaaccagcctcattggcatatttttgaatatcgacagtacgcacaccggcttcaacctccatatacatgccttcggcattcagctcgatgatcttgttcaaccgttccattaaaaggacaataccgccgcatacaggaatagcgccgccagccagactggtgccgccgctgcggacagtgaccggcacatcatatgtattggccagcttgataacagccgcgatctcctgcgcgtccttcggcagaacaaccgcctccggcagatggaacttgcgcggatcagtttcttcgtcagtctgatactgctctaatttttcaggctcggccaaaacgtattcagcaccgacgatagtctttaaatcctccagcactgcttccgttacgggagcgtaagttttcatatttcatctttcctttccttctgtactgccagctcggcagacgtaatctccgggtgcttataccgagttttctgatcgggttttaaacgtcccaggctgatagcattctgcggacaccagtgcgcacagccgaagcaatgcacacactcgctgccaaaagcaggcttaccagctgccatagttatattgcccgcggggcagacctcggcacaaatgccgcagccgacacatttatcatcagcgcagctcagcttaccgaactgcttgatcttatccagcacccacataccggcagctgtaccgccatacttccacaaaaaaccacgatccagatgctgataattatcatacttatttttgatattacgggcgatcagtcccaattcagccggagcgttgcgcagcagcttctcctgacgtgcctgcggcgaaggaaagacgatactgttatcaggcagcgccacctgagcgccatatgataaccgcagctcacgctgctttaaaagctctttcccctgacccagcgcctgtccggacatcgcgcccatagtcactactaaaaagatatactgaggcaccattttcacctgctgcagaaaagcctccactacaggcggcagcgccatacaataaacagggcagacgataccgacaacttcgtcctgcacctcgtaaggcgcttttaaataaccggtaatgccttccatccggcactgctccagttcctgcgcgatacttttagcggcatacaggctgttacctgtgccactcaaataaaaaatcactgccatgaggttcgcctcgcttctttgataatccgtcaaacggcagataaataaccgcttccattatataccaaatgaagttggatagtcaaaaacgacatatgatccaaatttatctgctaataaaaaaagacacccgtaagagcgtcttttcattcctgctattatcatcaactatccgtaccagctccattagctataaagagcaaatacacacctttattctaacgatttgcaaaaacatcatattctgttatcgttattttatcactcataaatcttttttcagtatctctgtaaaattcaacttttgttttctcccatttacccttctgatagccatagtaaaagcgccagtgctgcatagcattagaaagatatgatttctctgctttggaggcttcttctttggtaggataactgcctgtaaatatttcagtgtatcgctcaacatcaagtatgcctatataagggtacatgacagaatcattttttttaacatccaaagaataaacaggttccagattccgcaccttgaaccaatgtcctgaaccctgcagtccatgtttagagggatcaaaataacgtatgtggacagcatcttttttataggtagcgagaacaggctgcataatatcctgcacatgcactttaaaagaatccactacaacctgctcatcagctaaacaagaagcgcagaccaaaagcaatgccataattaaaatcagcaaacgttttgtcatttctctcaccctttcagcttgattataaaatgctgaaattttacattaaatcaaatttacaatgcaacttcttttattttctgaactgctgttacaaaaagctctgtcaacgcagaggtttttgcttagctgtttatatcagaaattacgctgatagctgataccgacaactttagcatagttatcatggctgcgggcggtatcataagtatcaccagctgctacatgtcctttgatgctcaacccatcaatatcgataaagcccaaggtcatggcaagcgtctgttttttatcgtggtactggaagcccagactgtaggtgcggcgggcaccggtcggcacgataaaatcggcgccgtcaaaaggtattaccgattcatcataagcataaccgcccatgatggtatatttgtcactcagtttatgttctacgcccaaagcataacgccagccgttgctccagtttttctgactataacttccagactgacctaaaaatttatcatcaaaagtaatattcaaagcatcataggtactccatttggtataagtaccgttcagttctacccgggtccgatcatcgaatttatggttgtaaccaatagcccagctatccggcaaagtaactttgccatgcgctttggtaaaatgatcacttcctgtaatgccgctgctgtaacctctaaaatcagcatccatagtatgggtcactttgctgcggtaaaccaggccgatctcatttttagaatcaaaagcataattggcagccgcattccagcccagggcccagctttctcctttggtttgggtagggaccgaattataaaaaacatttttttgcagttccagacccacataattgacttccgcccccacggccgcactccacttgttatcaaacttgcgggcataggtcggcgtcaggctggcgccgttcaagcgagagaaaaaggcattagatgcaactttagaatcccgttcaaattctgagatcatgccgaaacggctgaacaaccctataccaatccagtctttgtcgttgagctgtttgacatagtaattgccgggagcccaaccggcatgtacgacgtttttaccttcgtcaataggctttcctgtagcgtcataagccgtatatttgccatgcgggctgatataaaccgcactctgtttaaaagcttcgccccgcactttggtgatcgacgccggattgtaggcaatattggcggcgtcattctcagcaaacattcgcgctccgcccatagccacgccttcagctgaccactcgttgatcgcaaagccttcggccccagcatcgacagccggcacagacaaaacacaggccaaccctattatcgtaaaatgtttctttaaaaacaaaacagacacctcacaattaacaaaattttccaatattaataacaatattttaacagcttttgctttttattgtggagaaagttttaatccaacaattaaattattttttataatatatttagcttgcatttttcaaccttttacgtcataatattagttgaaagttcaactaatatggcggtgaatattatgacaaaactgcataatgacctgctgcgtgacatcggcacgctggcgcgcacgatccactatcttcacgatctgcattttaaggaactggcgctgcagcggggacagtttatttttctgacccggatctgcgaaaatacgggtatcaatcaaaacgatttatcgctcttattaaaagtcgataaatctacgactgccaaagctgtccaaaaattgaccgctgccggttatataaacaggcagcgcagcagcgaagaccagcggcactggcagcttttcccaacagaaaaagctctcctgctctacgatcaaatcatcactgaagaaaacaccagcctgcagttgtgtctgcaaaattttacagcgtcagaacgcaaagaactgaacaggctgttcaaaaaaatgtgtgccaatctggaaacacactggcaaaaaacaaagggtcaaaaacaaagaatcgaggtgcaatgatgctgcgtttggcaactatgcaggatttaacacggatcatggctatcgtgcaggctacggtcatggaaatgcacgcttacggcaactaccagtgggacgaggtttatccaactgaacaggattttgcctcagacatcacccaaggcgatctttttgtatcagaagctgaaggacagatctgcggcctgatctgcatcaatcagaccgaaccagctgtttatgctgatgccaactggactttggcggaaaaagccctggtcctgcatcgcatggcagttgacccggccctgcgcggccgcggtaccggctctgaattgctgcagcaggctgaaacgctcgctctcagtctgggactgcgttatttaaaaacagatacctacgccctaaacgaaaaagctcagcagctgtttctaaagcacggctatcatttctgcggtgaaatccagttccgtaaaatggagcaccagttttactgttatgaaaaagtactgtaaaataaaaacacaccctttaaaaagggtgtgtttttacttataaagcagggtcgtccacgccgttggccttaaaggcattggccctgtcgatgcaggtgccgcattcgccgcacggcctgtcgccgccttcatagcacgaccaggtatattgataaggagcacccaaattcagtcccagctccactatctgcgctttatttttattcagcagcggtgcttccagatgacacaatttaccgctgccttcataaatggcagtatccatagccgcataaaactccggcgtacaatccggataagcccgtccagccgcatcgtcagcatgagcgccataacagatcgcatcagctcccaatgaaatggcaatagcggcagcagcgctgatcaaaaggccattgcgaaacggtacataagtcgctaccgtaccttcgccatgctcagccagctgctgcgcgtagcttttatgttcgatggcttcactgctggcagccagcagtgagcaattactataggacatgatgccggcaatatcctgctccagtaaacgtacaccataataagccgcaaccttacgggctgctgccatttccctgctgtgcttctgcccgtaaaaaacacacagcgccgtgacattttccgcaccgcagacctgcacagcctgcgtcagacaggtggtgctgtcaataccgccgcttaataacactacttttttcatactgcaacctccgtcacagatcgcgcctgatgatggcaggcggtaattcttcccagggcttgtattgaatcgtgctgcaaaatacataagccttataacggtcggcagctgtttcagccgctgccgctttggccagatcacgctcaccggcttcactgaccggataatacctgaaagcctccgcaaacagctgtgccgctttttcgtcatcaccattattatgttcatgctcagctaaaaatttataggcaaaataacggtaaggattgataccgtcgtttccagcttccagctccagcatcttttccgcttcctgtacagcctgctcttctttgcctacctcacgcaggatcgccagccggcgataaaacatatcgccgcgggaagcactgcggaagggatgtttataggcccggctcaatgcataggcctgatccagataattcaaagcggcatcctcattacgggccaacttccaaacgatttcagctatatcccgcaggcacagcactttatgttcagcttcgctgaggcccatttccggtgcatcctccatatcaggctccacatcaagtatcgttgccaggacatgcatcgcggcttctacctcacccatccaatataaagcgcgccccaccgtcgagcggcagcgccagtcgttatagttgctgatcataccgcgggggaccggatattcaccgccggccacatggttcacacacgcctgccattcctgttcgttcatagtcaagtcacactccttactgattctcatattattattgtagcatattgccgccgcagcggcctaaataaaaataacgccctcctgcttttacagcctttgcaaataaaaaagcggctgcccggccgaagccaaaagcagccataaataagggaaagcgtttttaaagcagactcacttttcgttgcgcacataacggcgcggcatccgcggactgacgctgcagaccagctcgtagcagatagtacctgcccactgtgcaaccagttccatcggcaaatctttgccgccgaaaacggtgacttcgtcgcccactttgactggaggcaggtcagtaacatcaagcatcacctgatccatacacacgcggcccacgataggagccctgccgccgccaaccagcatatagcccacgttggaaagacgcctgttgacgccgtcggcataaccgaccggcaccgtggcaataacactgggacggctcaatgtataagtacgcccataaccgatagtcgcaccggcaggcaggcttttgacaaagcttaccgtcgatttgaccgtcatgacaggctcaaaatctttataacaatcgctcatatgcgcaggatgcaaaccatacaaagtaataccctgacgcaccatatccatctgatattcacgcagttctgtcaaagcggcactgttggcgatatgtgccagcggtaccctgatacccttctccctgatcagcttcagcgcttcctggaagcgttcaaactgatgcgcggcataggctttgtcatcagcatctgccgttgcaaaatgcgagaacactccttcgatctcaatgccaggcagcgccgcggccttagccgcaaattcacccgcatcgcgaacatgtacgccgatccgatgcataccggtatcaatagcgatatggatcctggcttttttattcaatttaacagccgcttcgttaagggcatataaacgttcttcgtcaaaaacggcgtgactgatatcaaactgcactacaacattggcagctcccggctgcagcgaacccagcactaaaataggcagcctgatacctgcttcacgcagctcaagaccttcctgcagcagcgctacggccagaaaatcagcgccgttcttttcggcttcgcgggctaccgctaccgcgccatgtccgtaagcatcagccttgacaacggcacacagcttagtatgaggatcaagattgcttttggcgatctgcacattatgcgccacggcatcaagattgatctcggcccacgcgccccggtcgatatgatacataaaactaaacccaccttcacaaaaaaacgcaggacacgtacgtctgcgtgcgcctgcggctgatacaaaatccaatgaccttatggtcaaattatatgctttttaaaatgatttgtcaataatctgcaaggcttcgacgccgcaggcgtctgccattccaccgcttatttggaggcagtttcctgatcctgtccgtgacagctgggtccgcagccattacagccgctgcagccggcacaaccgccggaagatgtttttttgaagacgctgcgcattgccaaaattgccagagccactaaaataccgccaataatataatcagccatttttacacctgctttcgttcacgctgcgccattacggcttctgccgcagacgctttattgcaccataaatttaaatttgctcaggttagctttcgctaaccacattgtactacgttcctgcttttttggcaagcacttaaaatattttttacagataagacaaatattttgaaaccaaaaaatttaaaatattttacaggaaaatcaagctgcagccacttaagcttctactttccagcgatcgaaaaagctcagcctgctttcatacaaatgtacaaaccgccctactaaaactgcggccactactgtaccggctccaactccttgtaatgtaccgaattccacccaggaaataataatcgctaaagtgaccagcgatatatcgaaacaatttttgatcaggctgaactttttttgagtaacaaacgccagtacactgaccacaccttcgcccgcaactaaaaagattttagcgcgcacctccagaaaaacacccaaagccaagacaacaatacttaaaaggcaagcaagccattgttccagtgcactgcccggtataaaccagtccaacagacccatcgaaaaatcaatgctgcagccaaaagccagcgtcgtcagcagctggcccaccagctcccttacataaagcgccctaagaatgagcggctgcgccaggatcataacaatgttcatcatgatcgtaatatcacccaaactaaagggtaaaaacatactcataacccacggtacactggaaataggcgatgtacccaagtcagccttacaggacagagcgataccaaaagtcattaaaaatatccccacggcaaacatcgccagccgcggcttaaaatgctgattatggactgatcccaattcacttttccttctttcaaaacataacaggcaagctccaaataaaaaaacggttctcagcatgcaagaaaccgtacgctcaagccatttgattgtatctttattttaccataaatcatgcgaatataaaatatgacccggcatctacaaataaacgtccgcagcaaaagcagaaagcctgccgataaaaggcaggctttccacacagggacacaaaagggtgaacaggaaaaagagattttgaaaaagttgttttttagaagctgtaagttacattgagcataaatttactgttttgagcatgactgcctttctggcaggcatagcctaagccataagtccaatcacctttttcagcctccaggcccagtttgccgacaaagaaaccgctgtccatgatatcatagccaagtctgtcggtcgcatttacacccggaacggtaatatccatcgcagtatttttatcacctaaagtccaaacataagcgatatcggctgtcggacgcactttccagcctccggcagtaacgctttcatggctgatgctgatgcctaccggcaacaaccacaaatcagctttatcggtactgtaatgagcggccgtcttcccgtcgatactgccgttatagctgtccgtatcaatattcatataacgcaggcccgcatacggtacatagctcgttccatgcccattgctgataagtttttcacctttgactcccatactgatgacctgcgtgtcaggttcggccttgattacgcctttgacgtcactgctggttttgctgtaaccgacatcgaaaatcagattggtatcgccgttttggataccgccatagtagctgaggccccagaagtcaaattcatttttagaggcgctgccggtgctgtcgccgctgccataactgaaagctatgccgctgctgtatttgccacggtctgcaaagtcgccgccgatgataaaaccgttgtattgtccgtcatagctgacgccgcccatgttatcgactttatccttgttgtggatatattgtgcccagatgccgccgttgtcagcagtatcaacagcagctttgccgaaaccgccgctctgttctgcagccgccttggctaaggacagatgttcctgcaccgccgtccccagatccagggctgctaaagcacccgtgcgggtagcgccgctgttttccgctccctgggcgaaggagttgactgcagcgataaaaccctctttatcaagcttattgtcattagccaaatcagttagatatttgatcccggcatattctgtcctgctttgatccatagcctgcaaaatgttcggcaatgcgatgccatcatatttcttttggacgtccgtctgtctgacagttactgtaaaatcaccgtcagcagtatttttctcgattttctcgatttcagaaagcttatttacactgacatcaacagctgcagcatctgctgaccaggaccagccatcaatcgtagtattggcaaaacctttggcgatcgtataagttccggcattagtactggtcaggtacagcttggctccctgattgactgtaagcgtggaacctgatccacctgtcaacgctgcagttccacttgttcctataccagaaccgttaacgatcagcagcgagccgtcggcaaaacttgctttattagcttccgctgatgcggcggtcttagtgccgtcaagcaatatgccgccctgaacttgcagtttctgggcctggtcaatgtataacgccgcactcacaccagttttcccccaggtcaattcagattctgcaaaagcctgctcggctttacctgtatcgtccgttcccaggctcaaaaccgaattgcgccctactgtcatcaatccattgacattattatttgtaaaagctaatgccgccttagaagcattcccaatcgtatcattaccctgccatacagggtctaaaactacagccgcgccgttgagatcagcattaccggcaactaaactgcccgcgctgttaccagtaccgacactaattattgcattgctgtcatttaccgtaagattccctgctctagccgtacctgtaacttctatcgttcctgtactaacagtcatactctgggcttctaaagcgcctgtaccgcttagcttaaccgtacttcctgatgagccaacagtcaaactatcggttttgagtgcagcaccttcgtttacattgatcgtgcctttatcagcgctgatttcattaaccttaaaagttccggcatcgacatttactttactgtcatcattggcaatggcaactgccgcattaagattgccgccgctggccgttcccgcgactccaagatttaaagtacctgcattagtgccgtcgccaactgcaacggcaacattagttttcgccgtaccaccagatgtttttaccaaggcatcattttcgctgccgccgccaaccaaagtcaattctttaccatcacctacagttactttgcttgcatctgcagctgaaccgccaagagccaaatctttgacgcccagattttcaagaccgctactgccgattgttacatcattagtatctactttacctgtcacacctgcatgtaccgcaccggtatcagccaaatcactggcacttgcttctgtttgaatttttccgtcagtagtgactaaagtcccggtaacaactagtcccattgtgccgctatcagcgttattgagtgccgctttagctgtctttaaccaagccaaattatatttctcatcgctcaggatcagtttaccactttcaaatttaacggcattattcactacagacaatacatcaccactatcaatagcagtacctgccgctgttaagccactggtaaaaatgtctttggacgccgcttttaaggagccaccattcaccacaaaagaattactggctaaattttgattatttaacgtaccgaaatccatcgtaccaccattcaatttgacgctaccattactgccagtcccttgggtaacgaagctgttgatgttgatattattataaacagcgtcactagcgccactcagattaacagtgccaccgtcaaccgctttgactataccgttaattgtattagttttaccagcaatattaatcacaccatcatttttagcaacaatgtcccccgtcaagtgaacggttttaccggtgctgccaacggtgatttgtccatcagcttcggcattcagtgcgtaagaagcagttttaccagcagcaacgatagtcgtatcacctgatgtattaacggatgcttgccctgatgtaaacaaaacctcaccattttcatctgttataggtgctccactgacaaaaattcctgtagcattactgtttgcagatacggccttaatattaagctccttgctgaaattagcagcacctccctggtccgtaccggattccttattgggctttgccgaatgtacatatacgccgaaagcctcttgatcccggctctgtgcattgatctttacatttccagtatggttaactacagcggacggatacaaatcattaggcaagctttgtgtatgattgtctatatctacaccataagcgttgcctgaactgcttgcagcattgataattgtatctttcgcactgtaaacgaccttaggtgaccagacggcaatcgtaccaacagcatcaccagccttggatgtactgtttatagtaagtttttcaccgccaaaagttgcttttgtataataacttgtccaaacacctatggcagtaccgttatccgactcagcattcaataccgtcgtaacattatcgccgatagttatcttaccataaccttcactacgtaatgcagttgcacaagaaagctcattatctaaaggatttgtattagcatttacagtaatgtttttactgccaaatattattccgtcactgcctgttataccactgacataaactccgttagcccattgcccatatccgtctggttttggacctgcaatctcatctggtttatacgaagtagttattctggaatcaattacagtattatcggcatcaaaaacagcaacagcattactttgtacctgtacaccataagcatccgtaccacccaaagcagtaacattagtctccttaccggaaaattcagctttaccgctattccaaatatcgatacctactgctgctgtatcagtatcctgaacatcagccagaacatttacagtcccaacagcagtaaaattgccgccgccattattcctgacagcacgggactggacaccctctccgccataagcttcaatatcaatgtttccacgtaatgtaatattaccgccattttccaatgcaattccataaacacggtcgtcaccataaacaaccctattagaagcctttatattttctgcttctattattatatcagcactatcagccactatagcagcagacctggcgctgctttctattgtatgactgcgatcggcaacagtatttacatttcccgaagatgtaatacttacgtctccgccagcagcggcataaatcgcaccaatctgatcagcatttttgacaattatctgtccgccattttcagcaacgacattaccagtaaggctgactttcgccatacccctgtcactgattttcaccaaagcgttagaaccagcatagatagcattttggacccctgtaatattaatttctttgcctgcatcaacgctgacaaaagcatcgcctttatctctgccattagcagcataaattccattttttccagctttaatattaactacatcgtcagcgttgagaataatgcttgtttttcctgtttgaaaatcgttagacagtaatcctgtagatttttcagaaatcacataaatatttttcccctgcaaatccactgtcactttgttatcagtaacattactatccatattagcagcacctactgccgtagaagatgtcgactgcaatgttatatcaccagaagatttaattttgacatcactgggataatctccactacaattacttaactgtgcccaaatagcattttcatcttttgactttattgaaactgcatcagcatcaatataaataagtcctccttgagcatgtaaaccaatacttttttctgttgtaatattaaaaagccccactttatcaaatataatggcaccattaatattactatgaagtaaactgtcatttattacattgcctgtaatatcaacttttttcacatttgaaatcaataccttggcattgctactactttgtgcagcgacagcaaattgaagtccttcgccatttatagttaaattttccatgtctgtaccaataatactcagcccggcattatcagcatttaacataacattgcttataatattatgcccgttcatctctatcgacgctggtatttcaccaataacattataaacagtatcactagtcagctttaccgtattctcagcccatacgtcccccccagatatacaaacggacattgtacctgccataagcaatgaaagcattacttttctgcttaaagctttttcccttgcaccattcctcaacatgaacccgcaccttcctctttctttagcctctccctgaaatctgtctgacaaataaaaaatacccgaccgtataacgggcaggcatcaaaattgtccaagtcgagaatatctctgcttgtgagcaactggctgtcatttcgttatacgaagtagaccctatagctttgcgtcactgcctttcgacagttttgccgttttatattatttaatattcttttacttattaaaagaatatcatactttctatatatctacaagcatatttatttgtatttttaaatatttttctggcaaatataaataaatcagaacgacaaaaaagctccgtcaaaaagacggagcttttgtttattgttttattacagcaggcagttgctttcaatcatcaaaaactgtattacgggtctcccagcgtttaaactggcaatagccccagggagcataaatgccaaaagtaacagcagtcagaagcataatgaccagccattgaaaaaagaaccccagcccggtgccgtcgaaacgcagccgcctgccttcaacgtaggtattagcacagatccagcgctgctgcgctgaataagcccatgggaaaaacaagcccacagtaataatagaaacgacagtcgtccaaatgagcaaccacaaatagcccaagcctgaaccaacaaaaacaaacggtttattcattgcgacacccccatttacaggatttaaaatcagcagtcgttactgcattttttctactaataatttattaaccatacccgggttagctttgccgcgggattttttcatgacctgaccgaccaggaagccgattgcacggtctttaccggctttaaagtcggcaatagactgcggattttcggccagcacttcatcaacgatagcggcaatagcgccttcgtcgctgacctgctccaagcccagctctttaacgaggactttcggagatttgtcggcttttagcatttcggcaaatacttttttagcaagcttgctggacaacacgccgcctttaatcagggcaaccatttcgcccaggttttccggtttgatcgggaaagcgtcgatttcgatgccttcgttgttgagataggcggaaacgtcgcccaaaagccagttggctacagctttgtcatcacctgcatttttgcaggcagcatcaaagtagtcggccatagctttggtggcaacgatcaatcctgcatcataagcaggcaggccattttctgtcatcaaccgctgctgacgctgagcaggaagctctggcagttcatttttaacgcgttcgatccaggcgtcgtctaattctaccggcaccagatcaggttccgggaaataacggtagtcatgcgcttcttctttgctgcgcatggacaaggtcatgccctgcgcgtcatcccaggtacgggtctcctgcacaacatggccgccgctttcaacaaggtcgatctgccgctcgacttcgtactcgatcgcgcgcaccagagcgcggaaggagttaaggtttttgatctcggcgcgggtaccgaactcggcagcgccttccggcatgacagagatattggcatcacagcgcagactgccttcctgcattttgcagtcgcagacatcagtatattccaaaatagcttttaattgttccaggtaggcgcgggcttcttcggagctgcgcatatcaggctcggagacaatctcgatcagaggtacgccggcacggttgtagtctactgccgacgagtcggaggtactgatcgtagcgccgctgtggttcagcttcccggcatcttcttccatatggatacgggtcacgccgatacgttttttctcgccttccacttcaatgtcgatatggccgcccaggcaaataggctgatcgaattgagagatctgatagttttttgacagatcgggataaaaatagtttttacggtcgaatttattgaatttctggatatcgcagttcagagccagtcccgcacggatcgcaaattccaccacctgtttgttgagcacaggcaaagcgccgggcatccccaggcagaccgggcagacatgggtgttaggctcgccgccgaactcagtcgagcaggagcagaacgctttagaatttgttttgagctcggcatggacttccaaaccgataacagtagtatattttttcattatttgttacctcctaacggtgccagtaccttgtggtattcgttggcttgttcaaaggtataggctgcacgcagcacggtttcttcgtccagcggtttgccgatcagctgcatgcccacaggcataccgtccgcgaagccgcagggtacggaaatccccggcaggcccgccatattgaccggaatggtgtaaacgtcgagcatatagatggacaaaggatccattttgccgtcgataggataagcaacgaccggggaggtcggcgccaggataacgtcacatttttcaaaagcgctgtcaaagtcgcggcggataagcgtgcgcacctgcatggcttttttatagtaagcatcgtaatagccgctgctcaaaacataagttcccagcatgatacggcgttttacttccgcgccgaagccttctgtacggctgagcgtagtcatttcgggcgcgctggtggcattagccgcacggaaaccgtaccggacgccgtcataacgggccagattggcggaagcctctgccggagcaatgatgtaataggtaatgaccgcatattcggtatgaggcagggaaatctcaacgatctcagcgcccatggcttcgtattgagcgattgcttttttcagttcggcatggactttggggtccaggccttcgccgtaatattctttcggcagaccgatacgcaggcctttaacgtcctgacgcagagctttggtaaagtcaggcacttccaccggcagcgaagtagaatcatgctcgtccttgccgcagatagtattgagcactgtagcggcatcggtaacgtcgcgggtgatcggcccgatctggtcgagcgaagacgcaaaagccacgcagccgtaacgggaaacacggccataagtcggtttgataccgacacagccgttaaaagaagcaggctgacgaatggaaccgccggtatctgaacccagagtccagatagcttcgccggccgcgatagcagcggcactgccgccggaggagccgccaggtacgcggtccaggttccatggattatgagtagcctggaaataagacgattcagtagtagaacccatcgcaaattcgtccatatttgttttgccgaggaaaatagtttcttcggcgcgaagttttttaataacatgcgcatcataaatcggcacaacgttagccagcattttggacgaacaggtcgtcaaaagacctttagtgcagatattatctttgatcgcgccggggatgccggccagcggagcgattttttcaccggcggcgatcatggcgtcaaccttggccgcctgtgccaaagcattttctttatccagcgtcacataggctttgacctgatcctcgacagcgtcgatgcgctcatacagagctttagtcagttccacggagctgatttctttattaacgagtttatcatgcaattcatgagcagtgctcttgtaaagatccacagtagttcctccctctcttattcgataacgcggggcactttaaagccgccgttatggactgccggagcatttttcagcgcttcttcctgagtaacgccgggcagagctacgtcctcacgaaacgcgttgctgatcggcagcacatacggagtcggctcgatgcctgcggtatcaagcttctgcaaaatatcggcataattgaggatctgattgaactgttccgtgaatttttccatttcaccctcaggaatagtcaaacgggaaagctgggcgatgtattctacatctttggtcgtgaccttcattttttcaccttcctatgataaatgttcttcattatatgcaataaatcggatatattatatcacaaattgtcctatacttctataatatccatcatataccgctttgcttcagcaactgccgcggcaaaaaaataaacccgcctttaacggcaggtttattttttattatttcactctgaaattagtaactttacctgtctggacatcgccggtagaataagcatctttacgttcaccttttaccgtagccgaaaaactgagagtctgcttcctgacattgaaattgatcataatgctgctgcccagtgaagccttttcgataccgttttcttttgccagtttctctgtttcagcaataaaaacaggtatcgcatcccagttgacgtcgtcaatattgaataaattatcttcaagtttaccgccgccgctcaattttccgactttaggtccctgccagcctgtattaggcgtccagacaaaattatcgacgttttctttattcttagggtcctgtcgggaaaaattaataaattccggtccgaaatgcatactttgaaaaatcatcagcggcgtaccgccgcctttggcttttatttcagtaaccgccttattaatagctgctttgtcgcggaaaagatccccataccccttgctcatgacaccgtcactaccgccgcagcctgccagtgccagggcaaacaccatgaccataactactgccgccatacttttcttcaacataaaatgcctcctaaagatatatttttacttgcacctagtttaatttatttcttttgcactgtcaatcgatctctatttgaatattttcacctggcttcaatgcctgttttcgccaaatttacagcattgtcacacaaaagcgattataataatagtagaaggagtgtgacagctatgcaaaatatcaacgctttcgaccatgcggaaactattttaaaggttttggcgaagggtgcttttcttactactgccgcaggcggcagacacaatacgatgacgattggctggggagcgctgggcaatatttggggcaaacctgtttttaccgtaatggtacgtcactcacgctatacgcacgagctgatcgaagcccataacgaatttaccgtcagttttccgctgacagccgctttcagtaaagcactgggactatgcggcagcaaatcaggacgtgacatggataaattcgccgcggcagaaatcacccctgctgaagggcagaccgttaaagtgcccgtcatcaaaggcgccgggctgcatctggaatgccgcatcgtggaaaaacgcgaaatggcaccggaaaattttgataaggccatggccgacagatggtatgccgataaggattggcacacctactacaccggcgagatcacagccgcttatctggacaaataaaaattttagcttcataaacgccaaacgactgcataataaaaattatgcagtcgtttgtttttctattatatttttaaaaaagcttctgttcctttgtcgctgtccccgatacttcagctgcaccgcttagcaagcgcaaaaattcggcttcgtcgataacagtcacacccagctgttccgccttcgtcagcttactgcctgcttcggcaccggcaacgacatagtccgtttttttactgacgctgccgctgaccttagcgcccacgtcctgcgccatagtctgtgcttcagcacgtcccaaagtcggcatcgtacctgtaaagaccatagttttgccataaaagggatgctcttcgctgacagcctgaacctgcatttccatattcagacccagctctttcagacgggtgagcaagtcgcggttcgacggcgacgccaaataagtaacgacactttcagctatcttcggtccgatatcgtcgatagcggcgatctgctctgcatcggcagccagcaaattctcgaccgtaccaaaatgcactgccagcagcctagccaccttggccccgacgtgacggatgcccaggccgaaaagcagccggtcgaagctctgctccttgctggcggcaatagctttcactaaattttccgccgatttttcacccattctatccagcactaccagctgttctttagtcagcagatacaggtcgctgacgtcgcggatcagttccgcctccagcagctgattgatcaccgccggtccacagccttcgatatccattgctcctttagaagcaaaatggatcagcccttcgcgtcccaaagccgggcaatgcggattagtgcagcgcaaagctgcctcaccgtctttacgttcaacagcccagccgcactccggacattcctgcggcatcgcataaggcttcgtatcttccggccgtttgcccagcacgacatgcagaacctccgggatgatctcaccggctttattgatgaccaccgtatcgccgatcctgatatccttcgctttaataaaatcttcattgtgcagcgtggccctgcttaccgtactgcccgacagccttaccggcgtcagtaccgccgtcggcgtcagcacgcctgtgcgcccaacctggatcacgatatcctccagcctggtttcagcctgctcaggcggaaatttaaaagcgatcgcccagcgtgggtccttgcctgtcgcacctaaaatatcctgctgataaacagcgttgactttaagtactgcgccgtcagtatcataagccagacttttacgccgggagtcaaagtccctgatatattctattgccgcatcgatactttttacgatacggtaattttcactgaccttaaagccataatcagccagcatcgccaaagaatcggcatgcttgtccctggctccttctcctacggcataagcaaaaaagcttaacgaccgctgcgccgttacgttagggtccagctgacgcagactgccggcagccgcattacgcggattggcaaattcgctctcgccggcctccaggcgttgttcgttcagctgcataaaagcatgccttggcatatagatttcaccgcgcacatctaaaagctccggcggcgcggtgccgtttttcatattcagcaccaaagggatcgaccggatcgtgcgtacattggctgttacattttcgccggtcacaccgtccccgcgcgttgccgcccttaccaaccgtccattttcataaatcaggctgcaggccagtccgtcgattttcggctccataacatattctacagcgctgccttccggcagaccgctgcgcacacgctgatcaaaagctaccagctctgcatccgaaaaagcattgcccagactcaaaagcggcgtcagatgtctgacctcagtaaattcgggattcaccttcccgcctacacggcgcgtcggcgaatcggcaggcacatcgtcaggccaggccgcttccagctcacgcaggcgcaccagcatccggtcatattctgcgtcggtgatctcaggtgcatccagcacataatataaaaattcgtgatggcggatctctgcccgcaaatgttcggcctcgtttttagcctgtgcgcgttccagttccatgactgcctcctttattatgctgcccttcggcggcttctgtttttcaggctttagtctcattatttcaaaaatcagagtgtcaaatttaattttactattctatatatggtacggcactttgccaccaaaacactatttaattacagcttcttcaatactgcatacttggtcagcaggctgcggataccggcaccggcaaacgcgattttcacttcctgcccatcctgcgaagatgtaacactgacgactgtccccacgccccatttagcatggctcaccttatcgccggccttaaaactgccgccggcagcagctcccgcagtgctcattgcctgcttgggaataaagctttcctgcccgcccaggaaccagttcgtatcacggctgcgtttctgcggttttgcttccaccatattgatcgtcctgcgttctaaagccggacgtttgaagaccgtaaccagattacgcggcacttcctgtaaaaaccgtgacggcgggtaggacaccgtatgcccataaatagtccgcatctttgcattgctcaaaaagagctgtttctctgcacgggtaatgccaacataacacaagcggcgttcttcttccacttcttcctcattcatcagcgtccgcgcatgtgggaaaataccttcctccatgccggccaaaaagacgatcgggaattccagacccttcgaagaatgcagtgtcatcagcgtaatagcgtcctcacccagctcggcatcatcgatatccgacaccagcgccacatgccccaggaaattttccagattattctcttcttccgtcttggcaaattcctgcccgaccgacatcaattccatcaggttgtcgatgcggctctgcgcctgcgctgtatgctcattccgcagttcttccatataaccggtcttattcagcacctgttcgatcagttcctctaccggcaggttatcagcctgattcatcaaatcaaaaatgatagccgccagttcatccagcttgctgacgaaacggatgctcagtccttcgacctgcgcggcattcgataccacgtcaaacaacgacatcccattttcagcggcatgggcctgcagcttggccagcgttgcatcgccgataccgcggcgcggcacattgatgatccgcagcagactcagcgaatctgccgggttaaaaatcacgcgcagataagcgatgatatccttgatctccttacggtcgtagaatttaagtcctccgaccatattataggtgatcccgcttttgataagcatttcctcaaaaatacgcgactgcgtattcgtgcggtacaagactgccatctcgcccagcttcatattctgctgcccctgcagctcctgcagtttttcaatcacaaaacgggcctcgtcgcgttcgtcgatagcctgaaaataagtgatcgccacaccattatcattatccgtccacaaatttttaggtttgcggcctgtattattttcaataacagcattcgcagcatccaaaataacctgcgtactgcggtaattctgttccagcttgatgattttggcttcgggataatccttttcaaaatccagaatgttttggatatcagcaccgcgccagccgtaaatgctctggtcggcatcgcccacgacacagatattacgatgtctggccgccagaagcttggttaaaagatattgggcatggttggtatcctgatattcgtctaccagcagataatcaaaacgctcctgatacttggcgcgcacttcttcgctttcctgcagcagccgtatcgacagtaccagcagatcgtcaaaatccaccgcgttattgaccagcagtttattctgataacgttcatagatctccgccactttctgattgtaaaaatccgaagcagctttactgaaatcactaacgctctgcagctggtttttggcattggaaatgcgcgacgcgataccggccggctgaaaacgcttttcatccagattcagttcttttaaaatctgtttaatcaggttctggctatcgctgctgtcatagatagcaaaattactgccataaccgcctaatttagttatttccatccgcaaaaaacgggcacagaaagcatggaaggtaaacagccagacatctttagccgcagctcccgccattttatcgacgcgctcgcgcatttcggtggccgctttattggtaaacgtaattgctaaaatacggtaaggacgtacgccctgctgcagcaaatgtgcgatccggcaagtaagcaccttggtcttgccgctgccggcacctgccataatcagcatgggtccgttggttgtctgtactgcttcggcctgttctggattaaggcctgctaaggtctctgtcattggttcctccgtctattcggcactgcctgtgccgcatctttttattttatcgtaactttaatattattcgcttctgattcactttttcctgctattttatccgccgcagccaagaaaataaataagcactgaaaataaatccagtgcttttactttattctccttgtgccagcctgctgactatttctgtatcggcaggacaaaactgatactgcagcagttctgccggccgcacccataaaattttctgatgtacgcttttttgcggcacaccgccggttattttggcggcaaaaaaggaaagccctattttattatccggataagtgtaactggtttgctcaagcagagccacaatatctatctctatccccagctcttcccggcattcacgtactaagcagtctgcagctttttcacccgcttcctgcttaccgcccggaaactcccataaaaaggcgcagctgccgcctgctccgcgctggcaaatcagtatttctcctgctgtattgcgaataatcgccgccgataccaaaatcataacctttaccccgatccttattgttataacagcattttatcacaaaacaggttcttctttcataaaaaatactccgccgcagcggagtattttttactgccgctcttaatggtcaaataaacgtcttacatcacgaaataaaatcctcagctatcggcattcagggccattaccagctccagacgcgtatcgacgcctaatttgcggtagatcccctgcaaagcctttttcactgttatctcggcaataaacatttccgcggcaatttccgcattagtcctgccctgcacaacaaagtttgcgatctcggcctccctggcagtcaaagttttgccgcccatgatatacgaagctttgtgcttgatattttttaaattttcctgatatactgcacccagctccaatatctttgccagcagctccggttcaccgctgttttgctgtgctgcttttttgagcagcggttccagcacgtcaaaattttccacaaaaggcatcacgatcccgtctgcagccgccagcaccagtgcccggttcaattcgctcaaagcttcgttttcatgctgcagaccgtcctgtgccgcagcactgtagaccgcagcataaatactcagtaaaaaattattaaaactccgcgccgccgcttcaaattcacgcagctgccccaaaagcggcagatagtccttctgcagcagtaaatagcgtccataaacgatatataaacagccccaggctgaataaagcagacccgatttctgaaaatcgcccttctgcagccagctaacgagcagtttgcccttgtcccccagctgcagatcgatccaggcgcggctggcttcgatagttttgcggtataaatgctcctgcactgccgtctgcagagcatccagccgtctgctgatctcacggacacgttttttattacccaaagctatactgatacgcagagcaataaattcagcacacagctctacgccgacctgttcattgcgccgtgaaacattcagtgcttccgttgccaaaataaacgctttttcccaataaccgcgctgaaaatacgcttccgatgccagtacatattcagaaccggcaccgtgattctgcaccagacggtaataatatgccatagcctgcggaaaaacatccagggttttctgcagcgtaccggcctgacggtaaaacataaacaaaatagaattggcaccgccgccccagatagtctgcggcgagaaaaagcgtaccggctgccgcagcagctgcagcgactttttaaaataagccgccatggcttccacatcattatactgggtctcacccagcaaaaactccagctcgcccagacactgctcccgttcctgtctgtcctccagctgcccaatatatttccgcagcttcctgatttcctgctgcagccgttcgttttccccactcaaaaacagccacagcgcataaatcaatcccgctttgatatgcttttgcctgatcgtttcaggcgcttcgccaaaataagccataattttatttttataattgttctcaaagctgcagccgcggtctttttcaaaaacggtcagcatcttgtcataatcgccggctgtatgatagtagcaaaaggctgtcagaaaatcgttctgcagctcataccactgaccactgcgccggcacaaacgacgccgttctgtatccggcagttctgctcccatacgctgcagatagactttgaatgcattatggatatggtattgtcctctcagcagctcataactgataaagccatgtctgagcgccagattttccagcagagctggcgctgcatcattttccgttacataagcagcctggcgtccactaaaatcctcatttaaaatagacagctctgttaaaagtgttttttccgcttcgctgcaggaattataagccacggcctgtaccagccgcagcaattcctcgcctgtttgagggctctgcccgttgtggtactgccgcagatacagatatagggcgctgacccagccttctgtagcagccagcagattttcggcggcacgacgttctaaaactatcccgtttttacgataataaacaataatatcactcacttcaaaagcaaaatccttcggctgcagatacagacactcacctttcaggaccagctcatccaaagtgaaatccggcggccgctgtgtcagcagcacaaaatgccagttgggcagatcagctttcgccagcgccagcagcagcttatcacagtcctcgctgcccagcagatgataattgttccagacgaaaacaaccgtttttttcaaattcgatgcctgcagcacttcgataacccgctgacgggtcgccgcattacgcggcagttcctgccaggtcagcgaagcagtatctacaccagcagtctgcagcgatttgacaaagcaacgccaaaaagccgcttccgctcctgtataacaggtatcccacagcatatctacagaaagagaaagcagcacttttttcacagcagtcgttttaccataaccgaaaggggcagccgcaactgtcagcggcactgccaaaatctgagccagacgttcttccaaagccggcttcaaatatatttttttaggaaaagcttcggattttttctgcatcgcttctacccctttaaagattacgattattcgtcagcacaattatttattatagttatattgtaccgtaaatgccaatttaaatacagggttttcaatattcaaaaacatatttttaaataatttatcctcttttttgaataattacattatttttttctttttttgcaaaatcagagcagagtttctgcttccttatgtttcagacattcagacacatcagcgctgcctgaaaacagcactgtaaattttcaaaaatatattttaacaaaagcttgacttcctgtttctgccatgataatatatagaagtattccgaatatacaaattgtgctcacatatttttgtaagtcatttgctattgaatgagttacaaaaatatgtgagttttttgcgtgtggtctgtgaatataataaaatttaggaggtactcgttatgatgaacggtactgtaaaatggtttaactctgataaaggcttcggtttcattactcctgctgacggcagcgaagatgtatttgtacatttttccgctatcgtaagcgacggcttcaaaactcttgaagaaggtcaacctgtaacatttgatacagaagctgatccgaaaaacagccgcagaatgcgcgctgctaacgttcgcgtagcttaatctaaaccataaaagcctgctctttttgagcaggctttttttatttgcactactaaacacccttatcgaacctggtgagggcacatacccttgtggtatcgtttgagtgcttaataaggtttttacgaatttagcactcatacatacccttgtggtataataacaacatcatataccagcactgaaggagaatctccatgagccgtacacccttcgttcctgctgagcttttaagcaagctctggcgggctgtaatcgaatttgatatgctgcaggcaggtgacaggatcctgatcggactttccggcgggaaggacagtatgtttctgactgccgcactggccgagatccaaaagtatgcccctgtgccgtttgaattggcctgttatactgttgacgcaatgttctcacctgcttttcccaaagcagagctggaagctttctgcggatactatggtctgaaacattacagcgaaaaggtcgatgtcaactctgcctggcagaataaaggcaatacgccctgcttcacctgtgcttatttccgacgtgccgctaccaaccgtacggcactggagcttggttttaacaaagtggccctggcccaccaccacgatgatgccgtagagacctttttgatgaacgtgctcacctccggtcagctgcgtacctttttaccggtcacaccactgtccagaacaggtctgaccgtactgaggccgctgctgtattaccgcgaagcagaaatcatcgacatggtcaggcagcttgacctgcagcctctgcgtaatccctgcccttacgacggtcgtaccaaacgccaggatatcaaagagcatatccgcgaactggaaaagctcagccctgaagtctacgaccatctggccgccgctatgcgcaatgctcccaatcaggagctgtggccggaacagctgagtcaaaaacagctggccgataaattccataacttttggcgtcagaaaagtaattaaaataatccgacttaagctgctgtctgtgttatcattaagacagcaacagtgatatttgtatttatctgacgttatataaaaggaggaatctttatggatttccaggaaatgtttttcagttttgacggccgcctgaaccgtaagccctatatcctgcgctttttactgcgtaatgccatcatctggtgtctgggctatctgatcggcagtctgtttgcgccagacggaacgatgttccagatactggcctttgctttgacctttatcgccgcgctcagctgcctgtcgctttacgtcagacgtctgcatgaccttgaccacggctcgctcatggtattgctggccttcattccgctgatcagctttttctttgctgtctacctgatgttctttcgcggcacgatcggtcctaacagctacggacccgatccgctggctgacgggcgcggtatcgacgcttggtaaacaatgatataaaataaaaagacgcagcctgagctgcgtctttttttatgctgtttttccggccgcaatactgcgggccaggctgttgatactgtccgtcagtctgtccagtctgccttccatgcgcaccagcagataccacgacaggaccattggaaaaccataattagcgacctgtggcagcagcgtttccatatccatcttatgctaaaacattgacttccgtagtgcgcacacgggcttcaacagcttcagtcagaccgataccgtccgctgcaaaaatatcggcagcaatgactgtctccatcgctgtttttgcttcgtcagcagtaacatcatcgcggggatcggtcacgctgaagacttttttgctgccatcggcttttttaaataccaattgtaaaactttttccattcattccagctcctttctaataaatatacgttctgtacctgtgcccgcttttattgagcaagctcggctttttcagtcacaacaacgcccatcagttcatgactgataagagtgccaagagcagcagcagcctgcatgatagcagcaggttctgcttccggacgtacgccggcataattatgacctttagtttttgcagccccctgactgttaacgccgtcttcgacattcagtgtcagggtctgtttggtaacagttttagtgatcgccatttctttcacctcctttgtcttaaaatttcgctgagataccacagggctttaccacggataacataccctcccggtttcagaacgctgtccagcggcaggtcaggcagataccacagatcccagcgcagctgcggatcgccgctgtgcggtccgtaaccgtcaaacaaggccgcttcgcaatgagtcgtcactgtcaggacattgatctccaactccagacaggccgtcaataccgcaacggctttggccagtgtttctatctgcactactgtcggcggctcgccgccaaaatcagtatcccggccgctgcaggcctgcgcctcggaagcgcagcacagcgcaatgccgatactgcccgtattacggtgccaggtatgctccttcacttctgtaaatgttttgcaagtcagatacatctcaccgccggggccgatgttcaggtgataatcatcataaacatcttcgtagtgacctgccgtccagtgcagataaatcctgctgatcctgcccttagcctgcatggccaaagcagccagctcacggtttgtaacagtttgcggattgacaacgatcattttttcacgacctttcagccctgtagtcgcagccgctgcaaaaaaacggaaccgtgccaaagatcccggcctcagttccgctttcaagtgccgtcgctgactaaaggtgtgacgattcttttcttgctctctctttttcttgtttttctctctccttcttttctggcgctcttaaaaacctcctttgatttgggttttatccttttatacaacaccttatttataccgcttttatcatttgactttgttggtatttgttttattaaaattaatattatataataaatatatataatgttttactctttaaaacaacaggtatcaacaaaccataacctgggaaagctggtttcttaatggatcacctgcgctcaattttccaaaagaacaaaaatctgctcgttttctgctgctgcctgttcttgctgctttaccctttcagcgccgctgccactggcatgcgccctcatcccatcagggtcggctacaccgacagccccggttttatcgaaaaaaccgcagccggaaccgtcgacggatacggcgttgcatatctcaacgaaatctcgcactatacaggctggcgttatgaatatgtttatgccacctggcaggaatgtctggagcttttagccaaaggcgagcttgatcttttaggcatggcccagtacacgcctgagcgtgccgccagctacgaatttgcctcgctgcccagcggcgtcgaatacatggtcatgtacgtgcgcaatgacgataacgaagtttactataacgattatcagagcttcaacggtctgcggatcggcgttctcaagggtaacttccagacagaaattttaagcgatgttgcccgtaaaaatacatttacctatcagcctgtactttttgattccagcaaagctatggtcgaagcgctgcaaaataaacagatcgatgccgtagttaccggcagcatgcccttatataaagatctgcggttagtggcccgctttcaggccgacccgatctattttattacgactaaaggcaataaagccgtcctgcagcgcctaaacgatgctttaatgaacattcacgccaatacgcctgaatttgaaaatacgacttatgccacctattacgaacaaagctccctgctgacgcagccgctgcttaccaaaaaagaacgagacttcctggcgcaccgcgggccgatcaccatcggttttctccctaacgacgaaccgctttcagcattcagttccgaaactaatctgccggcaggtatcctgcccggaatagccaaagagctgggacgcttatccggtgcccaggtcattttaaagctgctgccggcaggtgcccgcctggaccagagcctgcagaaagaaggttttgacctgatcgccgggatcacggattacgagccttaccgaaacaacatttcgatccggctttccaagcccttctttcaggggcgcgttatggctgtcgccaataaaaataattttatcgacatcaccaaaccgcagaaggtagctttgccctttaattatattgcctataaaaatctcattttaaatacctatccccatttttccattataaataaagtcaataccagagactgcctgatggcagtagcggacggagaggccgacattgctctgcagaacagccatatcatcagctatcatctgcaaaatccccgctttaccgatttaaagattttatctttatttaatttccccgataatctctgtctggcagcagctaataatgccgacggcaaccagctgctgactattttcaacaaatgtatcgacacgctgaatcctaaaacgctggataacatagtgatgtacgagaccgtacaatcgccttaccagcctttactgtctgatctggcttataaatataactatctgatcgctgctttgctggccgtgctgatcattctttttaccgcctggctttatttcactttgcagcgtcaaaaatatctggaactgctggaagctaaaaatctggagctggaaactgctgccaaacaggcgctggccgccagtgaagctaaaagcagctttctgtcgcgaatgagccacgaaatccgcacgccgctcaacgccatcctgggctttaccagactggccctgcagccggaaaaacaaagtcgcagcactgaatatctgcagaaaatcagctattcgtccgagctgcttttaggtatcgtcaacgatgttctcgatatgtccgcgatcgaaaaccaaaaactcaagctggacaattctccctttaaactttctcaagtactgcgtgaactccagagcctttacagcatccaatgccgcgaaaaaaatatcagtttcatactgaacagcgaagccttcaaacacgatatcctgctcggcgacagcctgcgcctgcagcagattttaagcaatctgctgtcaaatgccgtcaaattcactgccgcaggcggacagatcacgcttgacatcactcagcatcaggccgacagcgctgatcagactgtcctgacaatggtcgttacagataccggctgcggtatgtcggaacaaatgctcgctcaggtcttccagccctttgagcaggaagacggcagcaccgccagaaaatacggcggcagcggccttggactttctatcgtcaaatatttagttgaattgatgggcggcagcatcagcgtcaacagtgccaaagggaaaggcagtacgttcaccgtacagctgacactgccttacgccgaagaacttgctgaaaaagacagcacaacggctgaacaaaacctgcatgatctgcatctgctgctggctgaagataatcctctcaatcaggagctgtgtctggagcttttaaaaagccgcggcatcagcagcgactgcgccgtcaacggcaaagaagcactggaactgtttacaaacagcgcccacggcacctatgctctgatcctgatggatattcagatgccggtcctggacggttatcagacaacgcaggcgatccgcagcagtatgcacccgcaggcacagacgatcccgatcatctcgctttcggcagatgcttttacagaagatatcaggcgcgcttacgccagcggcatgaacgaccatgtcagtaaacccatcgttcctgaagagttatttgctgcgatcacccgcgtccttaaaacacttaactaaaaagaaaacgctcagagcctaagccctgagcgtttttatttttaaacagcactacctcaataagtcagcacttcgttgccggtttccgtaatcagcaccgtatattcccactgagcactcatgccgccgtcctgagtataaacagtccagtcattgccggcatcaacataaacctcgcgcttcccggtattgatcatcggctcgatcgtaaagatcatgcccggcaccagcagcattcctgtcttgcgtttgccaacatggcagatgaaaggttcctcatggaaatcgatacccacaccatgaccgccgaattcggtgacgacagaataaccatgcttatgagcaaaaccggacacggctgcgccgatatcgccgacaaagctccacggctgtgctgcctcaagcccgcggcgcaggcactctttagtgatcgctaccagatcctgtttctttttatcgactttgccgatcataaacattctggaagcatcggcatagtagccgttataaatagttgaaacatcgacattaacgatatcgccgcttttcaaaacgtcctgtgccgacggtattccgtggcaaacctgatcgttgatcgaggtacagacacttttaggaaatccgcagaaattgagcggtgccgggatcgcaccatgactaacggtatattcgtgtacgatagtattgatctcttccgttgtcatgcctgttttgatatttttttctacttcgtccaaaactgccgtattgatcttacaagcctctcgaatacctgcgatctgttccggcgttttgatcatctcccggtcaggcacttcgtgaccggccttgcggtacaattcgattttagcgtctatttcgctgtgacagtcggcataagctttgccgctgccgcaccagcataaatcagttgtcataacttcactcctcttccataaagaactataaccattatcacagacgtgccctgcttcctgcctgctgtaaaatgtaagagcaggctgtttgtgactgcaggtcagcatcaggcgagatcattgccgcacctgcagcttaaattcccgtcgctttacgatattgtcattataccatatccatctaattttctcatatcaaattcaggtattttatgataaaataaacttagttttttgcgaaaggaagtaacctctgacaatggaagcactttattctaattttttcgattacatcctgcactttgaccgctacctgcctcttgtcatggagcaatacggtcactggatctacgcgatcctctttacgatcgttttctgcgagaccggacttgttgtgactccctttctgcccggcgattcactgctttttgcctgcggcgccctggcagctacagcaggcggccttgacctgacgacgctcgtgatcatctttctggtttccgcaattttaggtgacgcctgcaattacatgatcggcgaagaattcgggcaccggatcctgcggaattatccgaaactcatcaaaccacagcatatccagaaggctgaagccttttatgccaaacatggccataaagcgatcttcctggcccgctttgcccctatcgtccgtacgctggcgcctttcgtagctggcatcggcagtatgcattaccgtacttttgctatctataatgtgactggtgctatgacctgggtctttttattcgtcggcggcggttatctgttcggcaatatgccctgggtcaaaaacaatttttcccatgttacgctgggcatcattattttctccctgctgccgattttttacgaaacacaccttaaaggctggctggccaaacggaaaaacaagtaaaggaagtggcgcgttatgtattattttaccagcgactacacagaaggctgcactcctgaaatactggaagcactggcagcaactaattttgaacaaaccggcggttacgggatcgacccatactgtgaaacagcagccctgctgatcaaaaaagaatgcggccgcagcgatatcgacgtacattttatgacaggcggcacgcaaaccaacctgacgatcatctgcgcagcactgcgccccttccacggcgtttacggtactgtacatagccatatcaacacgcacgaagccggcgcgatcgaacgaaccggccataaggtaatcgacctgccgacatctgacggcaaaatcacagctgccatgatcagacagcagcacgagctgtatttaggcgaccccagccgcgaacatctggtccagcccaaaatggtctatatctcacagccgacagagatcggttccctgtaccacaaagaagagctggaagcgctgtatgccgtctgccggcattacggactttatctttttatcgacggagcccgtctgggctacggcctgaccgcgcctgacaatgacctgacactggcggatatcacaaacaactgcgatgtcttctgcatcggcggcaccaaatgcggcgcgcttttcggcgaagcggcagttatcatcaatccggctctaaaagacgatttccgcacgatcatgaagcagggcggcgccgtactggccaaaggacgcctgctgggcctgcaatttgaaacgctttttacagacggactttattataagatctgccggcacggcgttgaactggctctgcagatcaaagcagctgtccaggaacgcggcctgggctttgtgaccgattccacaacaaaccagcagttcatcattttcccgcaggcaatgtacgacgaactgagtaaacagtttgcccttgcaccctgggaatacatggacgacggcaggatcgccgcccgtatctgcaccagctgggccacagacccaactcaggtcgacagactctgcaacatgatcaaagcactttaagacaagcttataaacaaaatgacccgtacggattttatcgtacgggtcattttttattcgctttccgcagcggttatctgcgacatgaacggttcattttccagctctttactgtaaatgacacaattatttttgccacgctttttcgcctcatacaaagccttatctgctttatataaaagcactgcatcatctgtaccatctacgggataaaacgatacgcctacggatatcgacagcggcacctggacatcagcttcaagtcccagtttttcgatgcctgctctcagctcatccgctttcatcagcggcagacggctatccttaatgttacgcataatgatcagaaactcatcgccgccgatgcggcagacgatgtcgtcgatccggaactgcttgctgatctcattggcgatccggcagagaacctcgtcaccgaacaaatgtccatgcctgtcgttgaccatcttaaaattatcaacatccaggaacatgaccgcagccttttccttctgcggttcgcagagcatctgctgcagcaggcgctcgccataagccctgttgccaagcttggtcaaagcatcactctcagcctgccttttccaaagtccgatctcacgtttcattttatcgatactgaccatcctgccaacgatactgagcatgacgccataattttctttatcccagatcgaatttatatggatcctgtaccatttttcttcgccgaacttattgatcagccggacatctttaacataaccgctgttctcttctgtcaatgccttggtcagctccgccagctgctgcagatcctcctgtaaaataggcatactgctgtaaatggcctcttttgcgtttgtgacaacacattcaccgccaaaaatatttttatattcatccgagaaaataatcaggtctttttcaagatcatagtcaaaaattatatcgccgctcatggcaaacagcgccttctgtttttcgcgttctatttccagcaaacgcgcaacgcggctgtttttatccatatcacagctatagcattttttaccgctgaatttctcggtattgggatgctgatagtgatacactaccgccggcagcccgtcgtctgactgtaaaatttccggcagccccggagcgattttcagaaagcactgcagaagatcggggctgaatgcgccgcattcgcctttttcaatcatttgcaccgattcttcatgggtaaaagcacctttataacagcggacactggtcaaagcgtcataacagtcggccagcgacacgatctgcgcataaataggtatctctttgccgatcagtccgtcaggataaccgctgccgtcccatttctcatggtgccagcggcaaatattgtaatgatagcggtactgctctttattctgcttcagactgtcgatactttccagaatctcacagccgtacagcgtatgctccttcataattgcaaattcttctgccgtcagccgaccgggtttattcaggatatagtccgggatcgcgatcttgcctatgtcatgcagtgccgccgccatcgaaatatcctcgatggtcttatcgctcattttatattcggcattctgccgtcccagctccttcagcatgatctttgtcagctgacggatacgctggacatgctgtcctgattcgcagtcgcggaattcaacgatcgtactcagggtatcgatcatagccacgttgaaattacgcagctgttcattctgcttttcgattttcgtcatctgttcctggaccagcttttccagtttataacgataacggtacaattcgatgatattattaacgcgctggcaaatattatctgggttgaacggttttaaaacgacatcaaccacacccagacgaaagcctttggaaatagcatcgttggacgattcggccgtgatcagaaaaataggcgttttctcagtcaggcctttgccgttcataatttccagagcttccaacccgtccatgatcggcatcacgatatccatcagcacgatcgctatttcctcgtgatactgctccatcagatctacagccgttttaccgttatctgcttccagtatttcatagtcaccggcaaaaagctcacacaggatcgcccggttaagctcaacgtcatcgactatcaggattttatctttctgcctctccaagcctgtctgcctccttttgcggttacttatatcacagattgcaagcaactgtaaaattcataatcatcacaattctatatgttctattatattatttttttgtattttacacaataaaaacttctttttataaataaaagatcactgttccttcaataattgctgcagctgcagtaccttctgccgccagtcatcgctgtatgctccgccgccctgagcaaaatgctgcgccccgccgcccctgccgccaaacagctcgcctgcctttctgcaaagactgcggcaatcagcctgcgtctgttccccgcttcccaaaacgaaattgatccgctcaccggacctgtacacgaccgcagctacagtacgcccgtctgccagcagtttattcagcagcagtctggcatcggcggcgctgcaatcctcctgtgccgccgcgacatatttaatgccgccctcatcgacagcagcctgcgctaaaagctgcggcgctaaaaattcatataatttggcagactgtgcttttaaccgttcattcagttccgttacttcttcctgcagcttcctcagtccctgcggtacgccctccggcttcatggaaagcaggcgcccggcctgccagacgtattcatttttgcggcgtgcatcttccagtgcccagcgcccgcataaaaactctactctgatcccatccttatgtttatcaaaacgattgatccggatcagacctatcatacctgtacgtaacggatgcgtaccgcagcaggtacaaatatccccgtctgccaccgtcacgatcctcagcgtgcctgtcagcttttcatttttcttacgcatcactagcgctgacagctccgtatgcggcaaataactgatcgtgatcggcttatcctcccagatctggcggttggcataatcctcggcctgctccagctcagccgctgtcaattctttatccaggtcaatagtcaccaaacgttcgcccatatgaaaaccaatattattagctccgaacagcttccagaccgcatgcgaaagaatatgctcgccggcatgctgctgcatatggtccagccgggcctgccagtccagcaccgcttcgacctgcgccccaaccggcaaaggccgctcacaataatgcactacttcgctgccgcgctgcgcagcataagtcatcttcacgccgcccagcgttccgcggtcactcagctgaccgccgccctccggaaaaaataccgtcctgtccagaaccacggcatacccgcgtttatcttctgcacagctcagcaccgttgccaggcaacttttcagcatcgaatcctgttcatacaatttttctgtcatcttaaaaacccctcgtcaataaaatttatatttttattataacactgccgccggcaacggttaagcaatatcagccgcagttttcttcagcatttaatttatgttataatgtgaacacaaaatcaaactatcataatacactcaaaggagcaggcaatgtataaatatatccttttcgaccttgacggcacccttaccgactcggcacccggcatcatccgctgcgtgcagtatgccctggaaaaatgcggcaaaggcacctgccccgaccgcgagctgctgccatttatcggcccgccgctgacagaatccttccagaaagtctgcggcatgactgccgcagaagcaaatacggcccttgaatattaccgcgagcgcttcgcacgcgtaggtatgtacgaaaactccgtctacgacggtattcccgaattactgcaaaacctgcggcaggcaggcaagacccttgccgtagccaccagcaagccgcagctttacgcagaaaaaatcctggaacactttggcctcgccgctcacttctcaacaatagcaggtcccggattcaacggcgagctgccaaccaaagccgacgtgatcagcgaagtgctgcagcggctgcaccttaccgctgctgataagaacgccgccgttatgctgggcgaccgcgagcacgacgctatcggcgcacagcaaaataaaatcgccatcatcggcgcaggctacggctacagctccccgggcgaactgagtgccgccggtgtcagacaaatcgtttctgctccgcaggattttgcagactttttattatgatttatttttaaagcagttacatcgatcatgatgtggctgcttttttattttcctctgcgccttgaacttttcgcagaaccattgacatataacacttcacactgcatagataaaattgatttttcaggctattatatatcaacaacttattgagaacagctatgttttttaacaaattaattttagcataaattattacttgtaatataaaaagttaaatgttataattctatctgatttcaaaattgaatactttatgataatcaggtgcattattgcctaacagagaaatcggtgcaatgccgatgcggtcccgccgctgtaatgctgagcaaacctcaaaacgtcactgggaaactgggaagacgaggtacgcgatgaagcagagccagaagaactgcctgattatagcccattacgatcctgcgaaagacaggaatggagcgttacaagagctttttacgcttttctgtctttatgcgcagaaaagcgttttttattttgcttttatttttctgacacgcgaaacccggtcagctcggtcagaaaaactaaagatataaaaattatttgacgaggtgtttaaaagatggatgggaagaaaaaaatctgggcaacggccgtcttatgcgctgttgccagcgttggctttgtagtacccgctggcgccgaagaaaccatgacgcatgatttggacgaagtcatcgtcgaagccgacagaaatactctgccggggggatttgtagccaacaacgacagagttggcattttgggcaatatcaaagcaatcgatgttccttttacacaaaaaaaatatactgaaaaaactattatgaccttttatgaccccaatcagcctttaaacggtactttggctaataccccttctattcgtatcggcagtacttctcccatgtatacagatttcagtatgcgtggcgtcaatatgaatgcttctcattactacatcaacggtattcccaatatgttcaaccagacccgcagcatcccggcatatatcctcagcagcgtcgatatagtctccggccctaacaccgtgcttaacggcgctaccttttccaacaacggcactaatggcaccgatgcgccggcaggactgctgaacggtacaaccaaacgcgctgctgcagaccctgtcacccgctatacacagcgtttttccggacgcagtacctggaccgaagaccttgatctaggacgccgctttggtaaaaacaatgaatggggcatcagagtcaacgcccataatgaagacggcggcctttccataaaaggtgccgatgtacgtgataaaagcatttatatcaacttagatcatcaggacgctaaaagtatgactaatattttcggcggttattatgactggaaggtaaatggaggccagcgctggctcagtgccagcggtgttaccaaaggcaatctggcagaagccccgaacggtaaaacagacctcagttttgacggtcagaccaaatataatcacggcatgctgtttaccttaaaccatatccaaaaattcagcgataaatggagcggtttcatcaacggtggctacgggcattattcagagcataaaaacgatcccaacagtggttcactgactctcggtgacaacggcaagctctccggtaaattccgcgactatgtctccgacagtaaaagcagttactggcaggtcggcgtttctaacaaggccgccatcggtaatataaaaaatgacttgtcttttgccgttgattatttcatgtataaaagtaaagccgccaattccggcagtgctgcaggtcaggccactatcggcggtgatctgtggaatggcgttcatattatcggcactccaatcgctgctgctgacatcgattctgttggctacagcaaagaatatgcttatgcagcaaccctggccgaccgttttgaatttggcaaagcttcgttatatgcagcactacaataccgcgatacagaaactgaaagtgcttccggcgccaaagtcagcaaagattcccttaatcctacctttgctatcgcttataagcctgtcgaaaatttatcagtatatgccagctacgcccaatcctataccaaaccggtagaggtaagtaagtcttacgataatgccggtgaaatttttaaacctatcaaaaacaaacaaactgaggtcggcatcaaataccgcggcggcgaaattttacacagtttggccttcttcgaattaaatcagggcagctatatcaaagaagataatcccggcggtaaaataggagaaatctacacgcaaaacggcgaaaataaattcaaaggcgtcgaatactctctgaccggtaaagttgctcctaaatggaatgttatgggaggcctgatgtaccttgacggtaaacgtgaaaaacttgctaaaggcagtgagcatctcgaaggccgttatgctaccggtactcctaaatggaacgccgttttggctacggaatacgaagcggaccagaataattccgctattttccgtatgaactacgtaggcaagtcccacgttaacgataatggtgttatggcccccgattatatgaccttcgatttaggttataaacataaaaccaaaatcaattccacacctgttactttgactgctatgtgctataacgttttaggcaaagattactggatctcccgcggtacctccgtagctctcggcgcgccgcgcacaatgatgctgtcagcacagttcgatatttagcagaaagccacactgcttttaggagttaagtccagatataccatcagcgtgcataactggaaaatttattaataaaattatgaggtgtttaccaatgataaataagcacaagaaatttttaacagcggctgttttctgcgccattgccagcactggttttgttctgacggccagtgctgaagaaaccatgacacacgacctggacgaagtcgttgtcgaagccgataaagacgccctgcccggcggctatgtaaaaaccaaaggcagtatcggcattttaggcgaaaaaagcgtcctggacgtgcctttcagcaatatgaacatcacgcaaaaaaccattgagactttcggcggccccaatcagcctttacaaagcattttagcaaataacccggctgtgcggattcaaggcacgactttgcacaacgatttctctatccgcggcatcaaaggcaacggtaccagttcctacctaaacggtatccccggtctaatgactcaatttgccgcccctacctttatgatcggcgacattcaatttatttccggccctaacagcggcattaccggtattcccagcacttatgaaaccacggcagccggcggtatagttaattttgtttccaaaaaagcaacagaggcaccgcttacacgttaccgccaaactttttcaggcaaagggtcttttggtgaatacctggatgtcagccgtcgtttcggcaaagacaaagaatggggcgtacgtatcaatacggaattattgaacggcaacacggcaatcaacagcaatgatatggaagcccagggtatttttgccaacatcgaccaccgtgataaaaaaagcaacaccaatttacttgttggctaccggcatttaaatatcgaaggcggcgcacgctggttctcattaaaagcagccgcgatcggcaaagagatcaccaaagtgccaagcgctcctgaagcaagcaaaaattacggttttgatggattggccaaagaatcagaaggatacatcattgctttaaatcatgaacaaaaaatgaatgccgactggaaatggtttctgaacgccggcatgaacagcaacaaactgcaaagaaacatcatcggcgccagcagtaattttgttatcatcaatgacaaaggcgatgtcagtaataatttaatgtccacacaaactgttaccaaaaattattatgcccagctcggtatcaacggcaatattaaaaccggcgcagtaaatcacgatgtaaccttagccctggacaaagcctggcacagtatcgaaggcgccaaaaacatgtataacaatggcagtatgggcagtgtcagcggcaatatttacagcggcctgcagggcaacaatgtctggtatccctcaatagaaaccggtttgagcagtaaagatcagtattggggtatctctttaactgacaccgtaaaatataaaaaagcccagcttttactgggcgttcacaagcataatgcttcggtcgacagctataataaaattaccggacgagtaactcaaaccgttggcagcgatgctttatgccccacttatggttttgtttatcagcccgatgagcatacttctttgtatgccagtcattctgaaaattttgataagggcactattgttgccagcaaatatgctaatgccggtgaagtcttgaatcctgccaaaaccaaacaaaatgaaatcggctttaaatatgccaatgccggcttccttaccagcttaggtatttttaacatcaagcaagccaacaacatcgaagtctacaaaggcagcacgtatttgcagcaggacggcgaacaggaataccaggggatagaattgtctgtgaatggtaaactcgccgataagtggaatttcatgggcggtctgatgtatttggatgccacccaaaacaaaacccaaaacggcactaacgacggtaaaactgtcaatggtgcggccaaatggaatgctgtggccgtactggaatataatccggatgaaaaattcagtattgtcggacgggcaatgtacaccggtaaagccgatatttataatgaacagctgcagaccccttcttatatgacttacgacttgggtgtcaattataaaactgctttcaacaaaactcctgttaccttgactgcaatgtgctacaaccttactgataaaaactactggactgcctatggtaataatctgatcttatccagcccgcgtaccctgatgctgtccgcaaccttcgacatttaattttcacttccattatcaaagagggtatgtatgccctctttgattttgtaatagcaggaggcagttaccgctatgcttaatttcaccgatatcgacttcaacgcagtctggcaggaaacctttggctggaacgctgccggcgataccgacaatcgcaaattcaatgaccaggcagaaaatgatttttgggtccggctggcgccgcgatatacacaggaatataatctcaatcacgataccggcctgattgccgataaactggccggccttctgggcaggaataaaaccatcttggaaatgggctgcggcagcggtaatttcactttgctgatggcacaatattctcagcagatcctcggtcttgatttttcacctgccatgctggctgtgcttgaagagaggcggcttgccgaaggtatcggcaatattcgcacgcaggcaggcaaatgggaagattttacaactgacgctgtattcgactacatcgtcagtgtcaattcactctaccgtatccgcgacataaaaagcgctttattgaaaatgcacgcttacagtacccagggctttatcatcgtcagaactatccagcggccgttcttttacagcctttatcagaaaaacggcgtgtcctgccctgaatgtcctgactatcagctgctgccgctgcttttatggcggcttggtctgcaggccaacgtagaatttctaacttaccccaaaaagaagtgtttcctcgacctggctgatgtaagtcaggaaatgcaggctgatttgactgcgcaaatctttcatgagcagcaggcaaagcttttgcaggcctttaccggacaggcagcttttacagacggacgatatacgatcagccagccgcgcactactgttattatttctgtaaaaaaataaatctgggatgaaaatatgaaacatttttataagcccctgttactgctgcttacgacagccgtgcttttgcttggcggctgcggcgtgcagcaaactgcctcagaacaggaaaaaaatatcacagctgaaaacagcgccgttgttttagctgccggcagacatttggccccaggcgaaaaagacggttactattgcagcaagattttaggcgtttgggaaccactgatcaccaaagatgaaaacggcctgcccaaaccctgcctggccacaggctgggagatgaaggacggcggcaaagaatggatcttccatctgcgccggggcgtacagttccacaacggcagcccttttaatgccgatgccgttatcaaaaactttgagcggatgaaattaggcgtcaaacgttcctctttttatggtctggatatcaaaaccttttatccgtcgctgattcgttacgaaaaaatcgacgattacaccttaaaattcctttttgccgagcccaacgtcaaccagctgtataaaatgatcgacttcggcagccctgtctatgccccggaatgctttgctcccgacggcaattttcagggcttcgctataggtacagggccttataagatcactgaaaacgtactgaacaaatatgtccgccttacccgcagcgatacttattacggcactaaagcaaaggtgcccgagatagtagtcaggaatattcccaatcccgacgtccgttatgcggccttaaaggccagcgaaattttaggagttctggacatcaacgccattccgccctttttggctgaggaaatcaaacaggatgaccgttttgcaatatcgaccaataaatcgacgatgatccgctttttggccctgaacggcagcagatttccttttaacgatgtacgtatgcgtcaggccgtcagcctggcgatcgacagaaaagatctggtccaggcattatatttaaactatgccgaaccaactgccaatcttttgaactacaccagcccttattataaagactatccggtagaatatgaccccgaaaaggcgcgaaaactggcccgtgaagtattaggcggacaacgctgcgaagtggtctactgcatcaatggcggcgaaccgctgcagaaaggcgaagcagaactgatctcatactggctgcaaagcattggcctcgatgtgacgatccaatcgctggaatatgccaccatggcccggcagatgcgccgaggcgactatgacattgcccgcgtacagcagggcttgcctaacggcgacccctacagtattttttatacttttatgatgccgtacggcagccgcaataagatcagctgcctggcttaccaaaatcatgaggtcgcagctttactgcaggaggccaagcattgcacagatgaaaataaacgccgtgccatttatgatcggttgcagcttatttccatcgaagaccagcctgtagtaccgttattcaacgaccgcagcatcgttgcttacagcaaacgtttaaaaaattatgatgcgctggtttacggcgttaatttagcagaaattgagttgatagactgatgattagttattgctgtaaaagaatcctgactgctgtacccgtattgctgggcatcagcctgctggcttttatactgggcgtcttatcacccggcgatccggctgaatttgtcctgaatcaggacggattatatgcccccagcgaagaacagctcgaagcgatgcgcgaagaacttggtttgaataaaccactgtggctgcgctacggtctgtggctgatgggaattctgcagggcgatcttggcagcagctatatcaccggccgcgacattgccgccgagatcgtgcagcgcctgcctgtgacgctggagctggctgtactcgcgctgctgatggcaggtgtgggcggtatctttttaggcagcatctgtgcagtttaccgcggcagcttttttgataacttcgtcaaaaaccttactaatgtcatgctctcgattcccggtttctggctggctttgatcctgatccttattttcagcgaacagctgcgctggcttcccaccagcggtacgggcagcctgaaatatttcctgctgccggctttcgttctggcttttgccaccatggccactgtctgccgctttatgcgcggcgcactgctgacagaatttggccgtcagtattttctggtcgccaaagtacgtggcatcaataaattcaacctgctcacacgctatgccctgcctaatgtcattatccccgtcatcgctctgctgggcaattattttgccagcgttctgggcggttctgtaatagccgaaagcatttttgctatccccggtatcagcagcatggcactggaagccatccgctaccgtgactatccggtgctgcaggcttatgttctggtcagcggctgtacgctgatcctggtgatggtaacggtcgatctgctgatcgcttatctcaatcccaaggtaaagctgggtgagcggtcatgaaaaaatcaaacctgcaattttactgtgcggccagtgtgctgctgctcattatcggcgccagtatcctggcaccgctcctggttacacacaatccctttgaacccgatatggcaaaccgtctgcagccgccctcctggcagcatttttttggtactgacgctctgggacgcgatatgttcagccgcattctttacggtggccgtgcttcgatcctgctttcactggcttcggcaattctgtcgcttggtgtcggcctggtaatcggtctcttctgcggcttttacggcggcaaattggatatgctgtgcactgtcgccagcaacattttccaaggcattccgggcagctgctttatgatcgccattgccggcattttcggtcccagcatcaaaagtctggtactggcgctggtcattacctcctgggccgggttttcccgtatcgtgcgcgctgaagtcatgcagcttaaagaagaacctttcatcgaaggtctgcgctgtctgggatgcagtgacagtcggctgctgctgcatcacatcattcccaatattgtcaacaagctgcttattctgttcactatccgtgtgggacgcggtattctgtccattgccggactcagcttcctcggcctgggcgttcagccgccgactcccgactggagcgtgatggtcagcgatgctgttttgtattaccgcagttcaccgcatctgattttgatacccggagcctgcatcttttttctgatctacgctatcaataatctgggcgaatttatgcgtgacaaactggatgtacgctttaatgaggtgcgtaaatggtaactttaaactctgcagcacttgatctggtgctgcatcagctttacgtgcactttcctgtccccggtggactggttcgggccgttgacggtgttgacatctgcttccgtcaccaacaaatcactggtatcatcggagaaagcggctgcggtaaatccgttttggggcaggctattttaggcattctgcccgattatgtcgctcgcagcggcaatattttctaccgcagtacagatattctggcagacaacacttccctgcccggtttttacggacagcaaatcgccctgatacctcaaaatcccggcgactcgctcaacccgctgcgcacaataggcaggcaattcgacgatatcctgcagactgccggactcaatgataaaaccaaccagcgcaagcaacagctgctgacctttttcggattaccggatgcagagcgcgtactcgccgcttatccgcatgagctttcgggaggtatgctgcagcgcgtattatgcgcgatgagtatttgctgctcgcccctgtggcttctggccgacgaacctaccaaaggactggacgaaacagcctgcggcgttgtttatgaaaatctgcagaaaataaaaaccagccagtcactgggtatgctcatcatcacccacgacttacagctggcacgttctatctgcgccgacatcgccgttatgtatgccggccagatcgtcgaatacggtccccaagtccttaccggcccacgccatccatatacccaggctttcttggcagcactgccggaaaacggctttcagccgctgcctggcctgccgccattaccgcaggatcatttgcccggctgtcggtttgcgccgcgatgccccagctgtcaaaaacgctgtctgcaggaagtcccgcctgtctatgacagcggcaccgcgaaagtgaggtgcttcctctatgcttgaagctgtcgaagtttctaaaaaatattgggaccgcagcagcggcaggcaatacgatgttttacaaagctgcagtctacagatcgctgccggagaagcagtcggtatgatgggacccagcggctgcggcaaaagtactctggcacgtgtattgctgcggcttctgccgacagacagcggccgtatcatctttcagacgcaggacgtgactcagctgtctcagaaacagctgaaaccctttcgccagcaagtacagttcatatcgcagcgtcctgaaagcttttttgatccgctgctgaaattgggtgccagcctgcgtgaaccgctgcagatatttgatctgcctgacagcagcgagattatcgaagccgcactggccacagtcaaactgtcacctgccctgctggaccgttatccgcatcaggtcagcggcggcgaagtacagcgcctgagtatcgcccgtgcgcttttgcttaaaccgaaactgcttatcctggacgagccgacatcaatgctggatatctccgtccaggcacagatcctacagcttttaaaaaatattcgccggcaggaacagatggcgttcctctttatctcccatgacaaagccgtaatcaattatatgtgcgaccgccagctatatatgcaggaaggcaggatcacctgacaaaaaaacacccaacgctatgcgttgggtgttttactttaataagaacatcagtaccgcttctcctgccgttacagccattgtcccagtacttcctgcagccgttcgatactgaccggcttgctcagatgctcgttcatcccggcattgagcgccatcttgatatctgaagaaaatgcgtcagccgtcattgccacaattggtatctgccgcgcatcttcacgcgccagcctgcgaatctccctggttgcttcataaccgttcataacaggcatccgcacatccatcaatatcatttcataatgaccgggcgcagatgcattaaacatttccactgcccgccggccattttcagcaccctcgcagactaaccccaggctttgcagaaactccaaagcgatctccatattcaggtcattatcttcaactatcaggacccggtgtcccgaaaaatcgctcctgcccgcaggctttactgccggcagcggttttactgcatcatcgcccagccagcgcagcggcagcgttaaggtaaactttgcgccgccttccggcctgttggcggcttcgatagtgccggccatcaaatttgtcaggttcttacagattgccagccccagtccagtcccctcgattttacttgtacggctgtcttcaccgcgttcaaacatatcaaaaattttcggcagcagttcttccgacagccccggaccgttatcgctgacagtaaaaacatactgcgaacgctgcgggatcactgcggaaagctcctgcagccccaaaacgatttctccaccttccggagtatatttgaccgcattacctaaaacattaagcaaaatctgcttgagatgcgtactgtcagtcataacctccgcatgtttcagctcttcaagctccagccgcagattttgcatttttttaccggccatcgggcggatgatatttagtacatcctccagcagctgcggcaggcccagctcatcatctgttaaaataactttaccgctttcgatcttcgacatacttaaaatactgttgatcagctccagcaaatgggcggagctgctgccaattttattaagacagtccagcgttttgactttattctcaatattctgcctggcgatagtcgtcattccgatgatcgcattcatgggcgtacggatatcatggctcatctgcgacaaaaaagcgcttttcgcctcattagcagtatgcgccgccaccaaagcttccttcaattcctgctgctgttccatctcacggcggcgctcatcatcaataaaacgcgccaccaggaccgcctgttgttttttcgaaccgctgtaatccggcagatatgaaaccatcagactgatccatttatagaccccgccgtttttgcgacgcagctccatttccagcttatcaccggttttagtcaaaacccggcgcatctcccgtaaattaaaacgctgcctgaatttatgccagtcctcgcgcggtactacatctctggtataggccagaaattcctcacacgtgccgttatacggatagtccacgcatttttgcccggtcagctcaacaaaatgataagtacctgcgtccagatcaaaatgcactacggcataataaatatcgcccagcacatgattgatctcataattaaggctttcgaccagctgcttttcctgctgcatccgtttccaggcgtcgatatcgcgcatcgtccccacaacgcgtaccggcagtccctgttcataaacagtcgttgcctgcactaaataccacttgttatctacctgttcgtcaatataacggcgcatcctgatttccagggcttcttcgctgcgttcaccgcgcaacagtcccagccaagcctcccgatccgatggatcgacaagattttcttttatgaccacggaaagataatccgggatataactgcgccgtgttttttcctgagaattttcagaagctatattgctccaggaatgcatcacctgtaatctgatatcatattcaaacagcagatctatactggattccatcgcgacccggtaacgttctttttcctcgtacagctgccgttccatgtcccggcgctgggtaacgtcgcgcataaaacagccgcagtagccgtacatcggctgatagcagtcgaccgacagatatttttttaaattttcgttataatcctcgatattttgggtcagaccttccaacgctgttttcgtatagatattcagccatttggcgccgttatcgccccaaatatcgctgaaagacattcccaaaagataatttttaccgtcgatacccaaaaaagaggcacaggcgctgttggcataaacaaagataaaatcctgaggcagtccgcttgcatcggcctctaccctcaatacatatactggcagcggcagcttatcaaactgcatcatcataccacgctgcatcgcggcaaaatctttgttgaattgttctaataaaagcttcttttccaagctttctcacccttccgcgtccaaagccaaggttatcttacagcatgcccgtacaaaaacctgtcgacaatcagatccgccagttcagcatcggtaaattcaggctgacccacatagtgcagcaccgacatcgttaccccgccgaataaatggtgagccgtgatcgtaggctgcccctgcttcataaagccagtctccataccttcgctgataatcgtcaccagacataagacctgctccctgatcagattgcggtaccgcaggatacggttatattcatcttcagacagagtatcaccgtacaaagaactcatttcccaggaaccatcgtttaaaaataccggatgaaagccgcgctgattgccgctcacctcataccataaaatccgatacagatccttattatcccgcagaaacggcagcagcgccagcatatagcttctgattttttcgctggtgcttttacctgaagcaaccacttcctgcaggcattgcaggaaaggctctatcttactggcgacaagcgtataaaataagttatccttattgccgaaatatttatagaccgtgcccttacctgtatccgcaagcgcaatgatctcgtctaaagtcgcctgcacatagccgcggcggctgaaaacttcctctgctgccagcaatattctctgatctttaggtaaggttttgtctatttcgcgcataaatcaaacttcctttcaataaatatttctatttctccattattatatattattataagttttttagacaaactttacaaatttatctttccaaacttcactttgtttcatcaaaaaattttgctattttattttttcacaattttagggctttatatcgccgatgctttcctatataatagagttgaaatcacagaaaactattatttattttttctaattatttttgttccgcttaaggcggatagtttttgagaaagaaggaggtcgcgattatgagtctgaaggtccatacaaatcgctgcaaaggctgcggaatctgcgtagcattttgccccaaacaggttttggcaatcagcgagatcgaaaaagtagaggtggtcgccgaggataaatgtatccaatgcggccagtgcgaaacacgctgccctgactttgcgatttttgtagaaaagtaaaacggaggagttgaaatcatgtccaaaatccttttgttacaaggcaaccaggcagtggtcgaaggcgccatcgctgccggtgtaaaatttttcggcggctaccctatcacaccctctaccgaagttgctgaatctttggctgaacgcctgcctctcgtcggcggtaaattcatccagatggaagacgagatcgcttccatgggcgctattatcggcgcagcgctgaccggcaaaaaagttatgaccgcgaccagcggacccggcttttctttaaaacaggagctgatcggttatgcctgcatggccgagatccctttggtcatcgtcaacgtgcagcgcgtaggcccgtctaccggccagcctacctctccttcccagggcgacctgatgcaggcccgctggggcacgcacggcgatcactggctcattgccctgaccccggccagcgtgcctgaatgctttgaactgacgctgcgcgcttacgctctcagcgaaaaataccgtgttcccgttgtactgctgatggacgaagttatcggtcatatgcgcgagaagatcgaactgccggacgattacagcgagatcccgcaggcagaacgtaaacagcctgaatgcagccccgaagaatttaaagcctacgctactgacgacagccttgtacccgccatgcccgctttcggcagcggctaccgctggcacgtcaccggtctggtacacgatgagaccggtttcccgaaaggtacaccggctgctactttagccgctaccaaccgtcagcatgacaaactttacaacaatcttgacgacatcgtccaggtagaaaactaccagatggaagatgccgaatatgcagttatcgccttcggcggcggtgcccgcaccgcttacgaagctgtcgatatggcacgcagggaaggtctcaaggtcggcctgatgcgcccgatcacgatctggccgctggctgacaggcagatcaaagaactggcctccaaggtcaaaggtattttggtgcacgagctcaacta

SEQ ID NO: 10033 - DNA, 72091 bp, Unknown
  gut microbiota DNA sequence
acaacgaaccggctacccccgctcagctgctggctgagatcaaaaaggccatggcctaagaaggagaggagatttgattatgaacatggaagcaatgatcgataaatatttccgtccgggccgcctgcctcatatctggtgccccggctgcggcaacggtgtcgttaccggcaccatcgtcaaggcagttgccaagcttgaccttgataaagacaaagtcgcagttatttccggcatcggctgcagcagccgtgcctccggctatttagatttcaatacagtccattccgcacatggacgcgctttgccggtagcgaccggcgttaaactggctgaccccggcctgactgtcatcgtcgttaccggcgacggcgacgctacagcgatcggcggcaaccacctgatccacgctgcccgccgcaacatcgatatgaccgtcgtactttacaacaacagtatttacggtatgaccggcggccagtattcgcctttgacaccgacaggctccaaagcgacgacagctccttatgcgacgatcgaacaggacttcaacgtagccgagctggtcaaagcggccggcgcaacctttgttgcccgcggcaccactttccatgcccagatcctggccgacctgatcgccaagggtatcgaacacaaaggcttcagcctgatcgaagctgttactgcctgccccatctcctacggacgccagaataaaatgggcggtcctgccgacatgatgaaatggcagcgcgaccacgcagtgccgctggcagcctgggataaaatgaccgaagaacaaaaagcgggcaaattcccgatcggcgtactgtatcaggttgaaggcagacaggaatatacagcagcctacgacgagctgatcgccagagcgcagggaggtaaataatcatgaaacaggaattacgtttatccggtaccggcggccagggcctgatcacagccggcatcattctggcagaggcggcgcttttagacggcaagctggcgatccagtcccagtcttatggcccggaagccagaggcggcgcctctaaagcagaggtcattatctctgacgaagcgatccacttcccgaaagtgaccgacccgaacctgctgctggcaatgagccaggaagcggctaccaaatattcacacgacctgacggcaggcagcgttatgatcaccgacagtcttttcgtcagcgacgtgccggacttcggcggcaaggtctacgagctgccgatcatccacagcgccaaagaagtgcttggcaaagcgctttttgccaacatcatcgcgctgggagctttggtgaagctgaccggcatcgtcagtgaagaatcgctggtcaaagctgttttgaaccgcgtaccgaaaggcactgaagaaaaaaataaacaggcattgcaggttggtatggatctgatcaaataagctgctgtaatccccggcattattaataatgccggggatttttgcgcattccggccccttatgtgttatagtagtaatatacacatcaacattacgaggtaaaaacatgttaacccaacaacttgctgcatcccgcagcgaagacgacggacgtatctccgatatgtctttccatgatgaaactctgaataatgaagacctcagcaaaatcatttttcacaatgtccagttcagcaaatgccgctttacacgctgtgatttctcacaatcacgctttttgtcagtcgctgtaaaaaactgtgatttttccaactgtaatttcagcgaaagcttttggaaacaagtcactatcgccgacagccgcggcaacggtgccgatttctcacaaagctgctgcaaggaattgaccttgtatgacagttcctttgcatacgccaatttctccaaatcacaatgggaaaactctgccgtcagcaactgctctttcaaagagtccttctgggctgaagtacgcctgaagaaacttactttagcagcttcagttttcagcggtgccgacttctttaaaacacctcttaaagaccttgatttttcagactgcaaaatcgatggcattactgtttcagaaacttttaaagaactgcggggcatgcagatcaatttactgcaatccgctgacattgccagactgctgggcatcaaaatagtttaaaatcccagctggctttattttaattttcacacacaacatataaaacctggattgctgttatcaaaaataacaataatccaggttttatatttttctcgattaatatatttaactttttatttttatattcatttaaaaaatgttataattttaatataaaaaattatttattgtcgtcctgtttatcagggggaggatctgcaatgaaacgctttgacaaaaaactaaatgcccaggatatcattaacgctattcccggcggcgtcgcaatctataaagtttccgacatctttgaaacggtttactattctgacggcgtacccgctctttccggctatagccgagatgaatatgacctgctcataaaacaggatgctgctgatcttatctatcaggaagatgccgctatggtcattcggaagatacgccaggtactggaagccggaaaatcggcaagctttgaattccgcaaacagcatcgcgacggacacatcgtctgggtcaatgttcacgcccggaaaataggcgaagacggcggacatccccttctgcaatgtgtattccacaatatttccgccttcaaacaggcccgagaagagctggcacacgtcatcaattctattcccggcggcattgctgcctatgattttaatgatatgcagaatccccggcgtctgttttgttccgatggtgttgctaaacttttcggctgcagtgacgcagctgatctgcagcattatgcggccaatccctggagtatggtttttaaagaagactatcagcgggtctacgatgctttccagcatatgttcatcagcagtgacactcttgatctttcttatcgtatcacccgaaaagatcaggtactggaatgggtccatctgaatggcaaagctatcaacggcatcttttatgccgtttttaccggtatgtccgatgaagccaaattattccagcagatcagcaacgaagcggcccagggtatctatgtcattgataaaaagaaccatgacctgctgtattacaatgaaaacgtagaactttttttaacaggtaaaaacaatgcctggggtaaaaaatgctacaccgccctgcacgacaaacagactccctgtaccttctgccctttatcaatgatcaaaaatatcgaaaaaccacaggagcttaccttcgcaaacggcaaaagctacgagatccgtgccaaagaacttgaatggaacggtctgcctgcttacacgctttttattaacgacattaccgataaaataaccagttcgcgaaaaaccgagcaactggaacagttttatcagacccttgtccagaatcttcctggcggcattgcagtcatccgttttgatatggcaaaaaaacaaatgctccccgaatatatttccgagggtttcgccgccatgacaggtatgtccactgacgaagcttacgcgctttacaaaaacgatgccacagctggcgtccatccggacgaccttgactatatcattggccgattgaatcagcatctcaagaagcaccttgatacctgcgaaagtatctaccggctgcgcaaaaaagacggcagttatatctggatcaaaaacaattcttcactcattttaagcccaaacgaaataccgcttatttatgcagtttacagtgatatcaccaaagaaatagaagcgcagaacaagctgcgccaaaaatacaatgatcttttacttcgtcagcagaactatccgctttctaacgaaattctcagcggttactgcgatataaccgccaacaggatcctgcgtatttacgacaaaacaggtatcgatcccctgcaaaaatttggtttcgagcgccagaactttttcaaggggctggccactcttatcgaaagcccggaagaacgacagcacttccttaataccttcctcaatgccccgctgctggaaaaatttgctcagggcatcaacagtcaggaactagaatgctttatccgtatgtctcatgataacagcggtcattaccttaaatgtgtcatcaatatgatagaatcaccggataacggccacacgatcggcgtactttccgtgctcgatctgacacaatttaagatcaacgaccagatatcgatgcatctggcgcacgcccattatgattttatcgctacctgtgatttcaacagcgatagctatcagctttttttcacaaacagcaaagcgaatttaatgccgcctgaacagggaagctacagcaaaaatatcgtcgccttcctgcagaccttcactgtccccaaagatcgggaattttgtatggaaatgtttgatcccgccaatatgcagcggcggctgtatcacgaaaattcctactccttccattattcactgaaggatgaacaaggacatatctatactaaaaatatgatcgtattcctgatcgatcagcggctgaataaagtcggtatggcccgagccgatatcacagactacgtacgggaacagcgagcgctgctgaatacgctggcctatacctttgagcagctcagtatcatcaatctggtgacaaaagaatttacaatgtatacccgcaaatctgtactgcaaaatctgtcaccctataaatgcgcggactttaacagagcactgcacaagctcagccttccttatactaaactggcagcggatgaaactgcggcagaaaaattttctttgccggtcatcctcagcaggctggcagagaaaccgcagggttacgaatttacgctgccgtatcttgctaatgacggcagcgaaaagaacaaacagatcaacgtcctttggggcgacgaaggtcatcatacgatttgtcttgtccgatgtgatgttactgatatcatcagcgccgaaaaaaattccagatccgtactgcaaaatgcattggatctggctcaggaagccaaccgcgccaaaacagattttctctccgctatgagccacgacatccgcacgcccatgaacgcgatcatcggtatgacggatctggcacttgacgatctggataaccgacagcatctcagcgaatatctcgatattatcaaaagctcttcgtcacatctgctgacgctgatcaatgacattctggatatgagccgcatcgaaaaaggcaaactgaaactggcgcgtacctcgttcaacttgtccgtcgaaatagacagattctgcagccgttaccagctgttgatggataaaaacagccttaacttcctgcataacgcagaacttcttcactgcaattgtatcggtgataccgcacagctgcagcggatctgggataaccttgtcagcaacgcctgtaaattcacacctccgggtggcactgttaccttcagcgcctgcgagctcccttcagacaatgagcggctcggctggtataaatttacgatcagcgataccggtatcggtatcgacagcgaaagcctgcagcatctattcgatccttttttccgcagcagcgacgtcatcagcaagcatatcgaaggttccggactgggacttgccatcgtcaaaaatatcgtcgattataaaggcggtacgatttccgtaaccagcaggcagggtgaaggtacgacttttactgttacactgccgctgcacttcgatactgcagctgaacatcctgttgaaaaaccaacgcacacttttggcagtgctgattttgatttttcagggaaatcgcttctgctggcagaagatcatccgatcaatcaaaaggtcgccgaactgattttggaaaaaacgggtgcggcagtcacgatcgttgaaaacggtctgcagtgcacagagcttttcactggatctgcaaagggcagcttcgatgctatcctgatggatatccagatgcccgtcatgaacggctatgaagccgcccaggctatccgcagcagtatacatccacagtcagcaacgatccctattattgccatgactgccaacgcttttgccgaagatattaaaaatgcgctgtcagctggtatgaacgcccatattgccaaacctatcgacccgcagaaactctatgaaactctggcagcttatatcaaataacaaaaaacactgttacgtatatacgtaacagtgtttttgcattttgactaccgcttggcccagctccagacctcacgtgtcagccagataaaaaagacccctgaaaaatccaggatcacgtccgtaaccaaggcactgcgccccggagcatgcagctgaatatattcatcgctaacggctgctgccaaacctaaaaacaaaatataccctgtcgctgtacgatgactgacaccgaacgccgcgtaaacattgcacaggatcacgcccaggatagcaaactccaaaaaatgtgccagcttgcggatattataatccaggttctgctgcggtacatcaataccgaaccatttccccataccggtcagaatcgagccgaccagttcactggcccggtgtgattctgccgccggcatagaagaattataaaaaataaaagctacaaaaacgatcagtaaaagcagccatacaaatcttctcacggtcttacttacctcgccttataaatttctgcttaacatatccatgaccatcatattgctgacgatgccaataccgcctggaacaggcgtaaaagcgctggctttggcgctgacggcagggtcaacgtcacctaccagaccgccttcgacagcattgataccaacatcgacgatcacgacgccttctttgaccatttcaggtttaatgaaagccggtacacccacagcggcaacgatgacatcagcaccgcgcagcacatccgcaatatccctggtccgggaatggcagacagtgaccgtagcatgctcctgcaggagcagcagcgccacaggcttgccaactacattactgcgcccgacaacaacgacgtttttcccctttaactcaataccgtaatgagacagcgtcgccatacaggcccgcggagtgcacggtgcccagcggctgcgccctaaaaagacttctccgacgcttttagggtttaaacaatccacgtctttgctcatagtgatagcggcaccgacagcatcgccgtcgatatgcttcggcatcggcatcatcggcaggataccggtaacatagcggttatgattaagttttttgatagcggcaataacttcttcctgtgttgctgtttccggcattgccagcaccttggcttcaccgccaagactttctaccaattttaccagacggtctttataaacatgcgaagcagggtcatctcccaccacaatgatcgccagagtaactttgatccctttttcctttgcggctgtgattttggctgaaacagtttctctatatgcatcggcaacgggcttgcccttcatcaacaaagtttccattgctacaactccccttaaaacaagccgctgatgacgccgtcatcactgacatcgattttctctgctgccggcaccttcggcaggccgggcatcgtcatgatatcacctgtcagcacgactacgaagcctgcgccagcagagatcctgcagtttttgatcgtcatggtaaaaccgctgggacgaccaagcaacgtcggatcatccgaaaacgaatactgggtcttagccatacagatcggcagattgccataacccagactttcaaaatccttcaaagcagtttccgcttctttagcataaactacatcgccggcaccgtaaatctcacgcgccacagttgcgattttttcctttaaggtcagctcggaagcatagataggagcaaaatcagccttgccgctttctgccagcgcaacaacctccttagccagctccacgccgccggcgccgcctttggcaaaaacatcggacaatgcaacattgacgccatgtgcagcacaatgggcacgtacagcttccagctcttccggtgtatcctgagcaaaaatattgatggctactaccagaggcagaccgaattttttaatattttcaatgtgtttttccagattgacgataccttttttcacagcgtccacattcggcgcagtcaagtccgtcttcggcaccccgccatgcatcttcaatgcgcgcactgtagcaaccagcacaacagcatccggcttcaacccggcataacggcatttgatgtcaaagaatttttcagcgcccagatcagcgccgaagcctgcttctgtaatcgtataatcagccagcttcatagccgtcttagttgccatcacgctgttgcagccgtgggcgatattggcaaacggcccgccgtgaataatcgccggcacattttccagtgtctgcacaagattaggcttcacagcatccttcaaaagggcagccatagcgccgtgggctttgatctgccctgcggtaaccgggttgccgttataatcataagcaacaatgatcttgcttaaacgttcttttaggtcgtgcagactgctggccaggcacaaaatagccatgacctcagaagcaacggtaatatcaaaaccgtcctgacgcggtacgccatgcgctttgccgcccagtccgacaacaatattacgcagctcgcggtcattcatatcaacaacacgtttccaaacgatccggcgcgggtcgatattcaaagcattgccctgctgcacatggttatctaccattgccgaaagcagcatgtgtgcagatgtgatcgcatggaaatcacctgtaaaatgcaggttgatatcttccatcggcaccacctgagaataaccgccgccggctgcgccgcccttaacgcccatgcagggtcccagagaaggttcgcgcaaagctacgataacgcttttatcaattttggccaggccctgggccagtcctacggtagtagtcgacttgccttcgcctgccggcgtaggcgtaatagccgttaccaaaaccagcttgcctgccggtttatcttccatgcggcggatcagatccatagataatttagccttgtaacggccatacatttcaatgtcttcttcgccgatgccgagcttagcggcaacctccgtgatcggcagcatcttggcctgctgagcaatttcaatatctgataacataaataaacgccctcctcttcacttatacctgtgaaccatcttgtatatcttctgtgccgacagattttttcctgctgctctgacagcaacctaatgtatacatttaaatgtttttattcaaaccagatttccagcttcgtaccttcggaaactactgttcccggaggctgcgactgcttccgcgcccgaccgctgccatgcggcaccagtaccagacgtccctgctggatcagttcagccgtctgccgcatatccagcccgctgaaatcaggcagtttgatcttaccgtctgccagtatctccatctgcggcatcttagccggaggcggcactgtcgaattaacagcgggattattccgtacatgctgctcaaatgacggcagtccttcactgctgctgggctgaatgcccttagctacaaggatctgctgcaatgtatcgcggaataccggcgccgaaacctgcgaaccgtaaaaagctccctgcggcgtatccagcatgatcagcatcgcatactgcggcttatcagcaggtacaaagcccacgaaagaagcaatatatttaccggctgcataaccgcctgtttccgcaagcttttcggcggtaccggtcttaccggcaatacggtagcctttgatccctgctgctttaccaccaccggcagcgacaacctgctccatcattccgcgcatctgtgcggcaacttcctcactcatcacccggcgcaccacttttttctgcccctggcgcagaacgcgtccatccggcatcacgatcttatcgatgatatacggctgcaaaagctcgccgccgttagcaatagcacagatcgcacgcagcatctgcagcggcgttacggcaatgccctgaccgatagacatggttgcaatatccggctgatacatatgatccggattataaaggataccctcttcttcacccggcagctctataccggtcacactgccgaaaccgaacttcttgctgtaatcgatcatccgctgtgctcccagctgcatccccagctgtaccatacccgtattgatagaaaattttataacatcctgaaacggtaccagtcccatgccttccccgtcccaattgcgtatcgtacggtcggcgatctgaatactgcccgtatcattgatcatcgtggtcggcgtaataattttttccgtcagtcccatcacgcccacaatcggcttgaaaaccgagcccggttcgtaaatagtcgaaaccgcgcgattagtccagctggtagccggatatttataaaaagtattagggtcaaaactgggccgattggccatgcccagaatcgcgcccgtattcgggtccatcaagatgaccgccgcactggcggctttcgtatccttcatcgccttatccagcgcatcctccagcacaaactggatcttgctgtccagggtcagatagactgaagccatcttctgcggcctggctttattgaaaccgctgtcacccatggggcgccccagcgcatcgacgacctcctgctgctgtgtttccgcacccttgactaccgagtccaaagccagctcgataccgctgagaccgttatcatccgtaccgacaaaacccagcacctgagccgccattgatttttttgtataatagcgtttactttcttctaaaaaatgcagcccgggcagcttattctcacgaatgatccgttctacttctgccgcttctttaggctccatcgttcgtttgagccagatgaagcgtgcttctgttgtaaaatcagcatataattcgtctgctttcatctgcagcactccggccagcaaatcagcggccagccgcttgacgtcacgttccggcttctcgccctttttcgtcgggttatcctgcatctcgaccgggtcgacatacagagatttagacataatgctgactgccagctcctcgccgttgcagtccaaaatggctccgcgcggcgaatatttagttaccttgccggtaacctgattggcagcacgtctggccagctcttcgttttgaatgacctgcagccagatcagccgcaaaaacaccgttccaaaaccaaaaaagatcagcaggccgataatggcaaaacgttttttaccgttttgcagcgaaaacttcttcatcagcgctgccacctcccctcagcgggtgaaacgacacgcatctgcgtcctgcgtgtatcgggcgacagccgctccagcttttcacgtttacactcgtcgcgataaactgaaagcaccagtccgatcgaagccagagttatcagcatcgaagtaccgccataactgataaaggacaaaggcacgccgattacaggcagcagtccgcacaccattgccatattggcaaccgcctgtcccacgataagcaggctgacgccggaaacaagaataaagccccgttcatctttagtattcatagcaatacgaaaaaatgccgcagccagtaacagaaacaccgaaatcaggatcgccgcacccagcagtccccattcctgacaaaagatagcaaatgcaaaatctgtatgcgcctcaggcagataaaagaacttgccgctgccctgcccccacggcaaacctgtcagaccgccgctgccgatcgacatcagcgactgtaccatctgatagcccgtattagcctcatcgctccacgggtccaaccatactttaacacgctgcagccgataaggggccataatcgcccctgccaccgccactgcgcctaaaatccccaacagacctactacctcacgcagacgcagacctgccaaaatatacagacccaccatcagcgctacgataatagccgccgtacccatatccggctgtttcaaaaccagaatgccgtagatcaccgtccccacaaaaggccagacggtatccttattcagcagactgatcgactgacgcttacgcagcatttcaccaagcagagctgcccccagaaggatcacggcaatcttcgccagctctgaaggctgaatagaaattccgcccacatacaaccagcgctgagcacccttattagtcgtaccgatcagatctactaaaagcagcaggctgccgacaccaaaatagatggctttcagccaaaaatcgttgagccacgttttatacgaaggcgcacgaaatcccagccacagcatcagcatcagtccggctgcgccaaaaatcaagtaccgcttcagataataataaccatcctcaaacatatcccgcgcttcgacaaagctggcgctgaacacattgatacagcccacgagcatcagcagtaaagtcaggctgatgatcgcatccttgggattatcccagatcaaaaatcgtttcttcataacagcctctcttaaaataccacttcacaaaaatttatcggtgtccccaaagagctgaatttacgctcatattccgtctgcacttcattatcataatctgagttatgcagatcatagctcaacgcaatgatctccaggccaaattccttaaattcctcaactgaaaaatcgaacagcgctctgttatccgttttaaagcgcaggtgtccgccttttcctaaaagtctttgatatttcgccaagaaattacgatgcgtcagccggcgtttggcgtgacgcgctttcggccacggatcgctgaaattcaaatataattctttgatctcgcccggctcgaaccagtcctccatatgctctgcattagcgcagatgaccttgatattatccatcttattttctttggcagttttaccgggataataagcaatatcgtgttgcgtttccacaccaataaaagccttttccggatgcagctccgccatcccgataataaagcggcctttgccgcagccaatctccagacataaacgcttaccgggaaacagttcctgccagcgtcctttataattttccaaatcatgcatcaaaacatattcaccttttaaatcctgcattgcttcttcgatccatggtttttttcttagtctcatactgacccgcctttgtaaaatctaaatacaaatccaatttatattatataacataatagagttctaatcatcatttttataaaaaattaccattgtattgtaaccagaaaaaccttttacacctgctgccaataccctgtacaaataaaaaaagcctgccgcggcagcagcagactttttctattttaacaataaattcattttacgctggctattttttccctgatcgcatctaacttttcacgactgacatccaattcataagccacataactccagtcatgcgtcggcggacgatgagcagccaaaatgctctctgccgtgctgccagaagcttgtgccagcagtgcggcatgcagcacatcattcagcgagtaattctgacgcaggtaaggaaggatgtccttttctttcaagccaagtgcagcggcaaaataacgggcatcatttctatcacgtgccgctttaatatcgttgggcgtgatacccgttaaatattctaccctcggccagctgttgttttctttcagacgcaggatctcattgatatttttcccggaagccagtgacagcagagcagcgtggcgcagctctttaaaaccccagccccgttcaaactccgtctgcagaacagacgcatcaatatcaaaacgtttactgatcttctgcagttctgcagtttcacgtacctgcggcggaaccagtacttgtcccggagctggccgtaccggtttggcttcggccgtttgagccgcaacagaaaatgttatggctgtgaaaacagccataataacggccgctaatttgttcttgaacattgtcaacacctgctttcatacttaagttggctttattataatcgctcaaattttacttggcaataaaactgtacttcataaactttcttttttcttagacttaaccagattattttaaaagtgcaatagaacagaccttctctgcaccctttataactattttaaaccctgcttttacccaagatttacaatttaattttctaagacatattgacaaatttgtgaaatgtgatataaatataaattgtagttagtctatgctaacttaaatattatattagctaaacctaactaacgaatgatgagggagtgaaaccatgcagaaattttctaaaaagagcagtctggcactgactctttgtattttaagcgccataagcagcagcggttatgctgcagaaaaaagtgatatgatcacttatagtctggacgaagttgtagttactgctaccaaaacagaactgacgcagaaagaaaatccccgcagtgttgaagtcatcactaaagaggatatacaaaacaccggcgcgatcagtgtgagggatgctttacgtactgccactaacattgatattgtcagtgtaaaccacggtggcggcgaaaatatcagtattcgcggcggcgataccgatggtgtattaattttagtaaacggccgcagagttgcaggagaaaactactttatgtcacagggcagcaacgcttatgccttagacaggttgaacctcagtaacgtcgatcacattgagatcctgcgtggtccggccagtgctatttatggttccggtgctatgtccggtgttatcaatatcatcaccaaaaaatccgaaaagcctgaattttccgttggtgtcgcaacaggaacaaacgaaatgagcaattactaccattacgatactggtaaaaatggtaaagtcagtgtcaatttcgatgttaatttcagtaagcttcgtaatattgacagcaaagccgggaaaaatctcctgcatggccctaagcaagcttataatttaaatcttgattacgagatggatgaaaataacaacctgaatttaatgcttgattatgccaaggataatctggaaaccaggatgcgcgatttttcagtcagttcatcagctcctgatgatttaaaatatcccatcacttcttttacttccgaacgaaaaaccatagccctgacctatgatggtaaaaacagtaacagcgactacagcttatcggcatcatacagccaactaaacagagacccctatgctgcagatacgcctggcacaaatgaaaaaaaatacaaaagctggaacatagaggcacgcgatacaattcgtacctccgacaataacaagcttattttcggcggcgaataccgaggcgacaaagcaagcatctacagtggtgacaacactgtcaaaaatactgaccaatattccctgtatttatatgatgaataccgagtagataataaattattgcttacaccagccatacgttacgattatcataaatccttcggcagtcatacttcaccaaatctaggagcaacctacttcatcagcgataagtcgcgttttaaagcaaattatggtacctcctatcgggcgccttctgttgatgaactttacggagctttcacgcacggcggaatttggggcggtatggccatagtcggtaatcctgatctgaaacctgagaaaagcaaaggctgggaaatttcttacgagcaggaattcggggatactacttctgccaaattaacctattttgacaataaaaaagaagacgctatttcttacaaaatcgaaatggcttccccaagccaaatgggtaaattttataatattgacagcacatcttctaaaggcgttgaatttgaaatcaaacacgacttcggcaagggctttactttggtcggcaactacaactggcttgattctgttgacgataccaccggcgaacgtctaaattataacgcccgcaacacatatatggcgaagctgatgtggacagaaccaatcaaaaaagaatggaacatcacggcctggaataaatggtacactgacttccaatacgactctgataccgtttacagcgttaacaccttcaattttacagttactaaacgctggggtgataaataccgtgttttcgccggtatcgataatgtatttaacaaagatttatccgatatgggatattacggacgtctgtggcgtgtcggcgcagaaatgaaattctaaaattgctttcaataaataaaaaaacagagtgcaaatgcactctgttttttatttatttttcgaatttttattaatcctctttgccgactttaggtcccagtccatattttttcaaataacggtacagggtaacacgactgacatcaagcattcctgccagtttactgatattaccgccggcagatttccaggccgcaataaaagcgtctttatcatatttccaggatttttcaagcgtccggtcaccaggcagcttgatattatctgattcaatgatcgcgccgggagtatggaagaaagcctgttcgataacgccctgcagctgtttgatattacctggccagctgcagcctgtcaaaagattcagcgcttccggcgacaaacgtttcggcggcagattatgctgcgccgacatttcagccagaatatgggaagcgatgacctcaatatctttcacacgctcgcgcagaggcggaacgcgcattgtcgtatccaataccagctcatataaggattttgagaaaagccccttatcagacaaacgtttcaaattagaatcgcaggcagcgatcacacgcacgtttaacttcttgcgaacaccggtttcacggtttaccaaaccatttttcagggcatcagccagcttatcacccatttccacaggcagcttttcgacctcgtccaggaagagtgtgccgcccagtgccagctccagtttaccggccattggctgacggtcaccgtctacactgccgaaaaattcttcttccagcgcctcgatcggcgcattcgaacacttcacaacgatcaacggcgcagccgcacgcggactggcctggtggataccatgggccaaacgctgcttgcctgtaccaggctcgccctgaagcagaatattattatcgctgcgggcgatacgcgaagccttatgctgcaaagccaaaaattcgctggtctcgcccaccatgctgtacagactgtagcgggagctgtagccggtagcatgggcaatcgtagttttcagatcttcgatcgacatcgacatcaccaaagcgctttcgacctcactgccaactttgatcggcatgactgtagtaatatcttcataggtacggtcctgcgtgatccaggtgatctcacgacgatgcgttggtacaccctgcagggcttttttgatgggaatatgctcataattcaaaaagacgtcttccaggttctttttgccatccagacgcttttgcgcattgttattacagtatttcaactgctcgtcctgaccgatccagtacacggccaccggcagttcattcatcatcagctgataaatgctccagtattccagcatggaaagatgctgctcgatagaatatttcattgtcaaaagcagcgacagcagcaggtcataaggcagatcgttctgatccagcgaaaagaaggaaataatgtagcggatcttgccgttgacacagatcggcgcactgcaggcatcgccggaatgactgtctttgatccacatttccgggccaaacattaaaaacggtacattatgctcacgcgcaatactgatgctcgaggtgcctacgtcctcttccagtacgcgcatcccctggatatcttcgatcactctctgaaaaaagggcagtgcataatttttgatcacataaccgtcttcatcgatcagcagcatgctcagattatgaatattgaaatgctgtttgctttgttcatacaaaccgtcgacatactttacgataaactcatgggtcttctgatgttcaacgatctcctcacggctcagtttattgagcttaggcatcgtttcatggggcagtttcatcgcccggcagcgctgccaggactcagccacccagggatggacgttcggatcgatgacaccgtcttccataaacttacgataataggaagccagtttttccttgttacgtttttcacggatcattattcagacccctcctcgatttcatcaaatatcataaaagcacctgttgaatattacacttcaccgttatcgacaagaatacggcgcgccccataataatgggatttccaataagtattgtccagtgaatcgagtactacgccgcgagacgtcgatgcattccagaacatgccttttccggcataaattccaacatgagatgcgcccggctcataagtcgagaaaaagaccagatcgccttccttcagctggtttttaaggacaaaaacaccctctaagacctgcacatccgcagtacgcggcagctgcgccctgtgcttgccaaaaacatactgcacataggccgagcagtcaaagcctttaggcgttgtccctccaaatttataaggagtacctttatatttagaagccgttttcacgacatccctgcccttgacattggtaatcccttcctttttaaaggcttcccatgtgacctttttataggttttatcgtccaggcgtccattcgctttcagtttatgctttttctgaaagtttttcaaactgtcggcagttgctttactgaacttaccgtcggtacggtcagtagcatatcccaaagttttcagcttctgctgagtgaccatgattttccagtccttgtcaccctctttaaaggttttggcaaaagctgcggcaggcagcagacagattatcagcacaaaggtcagcaatgcggtcattttcctcattaccatcgatccccttccttgcacactcaatatctcgtattgttataaacgtcccagtccttgatcttacctaattcggaagcgctccaggcaatctcgcccagcagcctctccttgtctttcggcagggtccctgccagctgaacataattagaaacatggttactgcggaaaatgcacggatgatcttccggcagttcgacagcagctaaaatactatacaattcttccattaaaccctgtggtggcagcggttcaaattctccgcgttcaaactgatccagcagctcgctgccgcggtacagcatcaaacacaacgcgctcagcatcgtcggcttgatagcattgatcgctttggcagtttccgccgcatggcgcttgctgcctggtttgcccgccagtcccagaataatcatcatcgacagcttcatgcctgccgcaataaccttccggcctgcttcaacagcctcttcgccgctgacgcctttcttcacggcctgcaaggtaatatcatcacctgtctccatgccgtaataaagcagcttcaaacctgcttcgcgcagctcgaccagctcttcatgcgatttacgcaggatatcctttggagcggaataagccgctaccctctggagcttcggaaaagttttatataacgcgtctaaaatttttaaaagacgcggcgtcgacagtaccaaagcgtcaccgtcggctaaaaacactctacgaaccgaatttctgccgtgaacggcagcagcctcgatctgtctggcgacctcgtcctcagtcagtacctgaaacggcacgcttctgtacatattacagtaagtacatttgttatgggcgcagccgcgggtcacacgcaggataaaactgcgggcttcactgggcggacggaagacaggagtgtcataagagtcaaaaaacatgtatacctcccggtatcctaaattgtaccggcagtatcaaaaatactcaacttgatgactgccaggattacagtaaagcgattttaagctcgtaataagcaacttataatacactttacgatacctattataacttattttacagtattccgcagtagtttttcgtgaattttttgagaaaatatggctaaagtgtaaaataaatctgctttttttgttaaatttatagcaaatattcagtgtattatcagggaaaatgcacttttttcaggtacttcacattttttgtagacaatcgtttttctctgcattgtatttacaacaaatatagttgacttgcattttattacattctttactatttttctgatacctggcaatattacttgaaaatgttgctgaaacaattgctatttctgcagttacgccttataatatatgttaaatctttattagtatacactatttgtttttaacgaggtgacaacatgttttcccgtctacatacctttataggcggcactcatatcgatgctgctaaaaatttaactgcggaactgccgatcgaggctatccccgcacccgagaaagtcgtgctgccgctctctatgcatatcggagctcctgccaaaccattggtacagcctggcgaaaaggtatatcttggacaaaagatcgccgaagcccagggagcagtcagcagcaatatccatgccagtgtcagcggcatggtcgttggcagcgaaagacgctttcttcccaacggcaccgtcgcggcctgtatggtcatcaaaaatgacggccaggacacgctcgaccccacgatcacaccgcgtgaaagcggcctggtacttccgcctgatgagatcagacagcttctggcagaaaaagggatcgtcggtatgggcggcgcaaccttcccgacacatgtcaaatacgcgccgcagagcagcggccgcatcattgacacagttatcctaaacggtatcgaatgtgaaccctttattaccgccgactaccgtattcttatcgaacatgccgatgaagtaattcgcggcctgaaatatttcctgaaagcatctttagccaacaaaggcatcattgccatcgaagataataaaccacgggctatcgagctttttaatcagcttactgctgacgatcctaatatcagcgtcgttgtctgtcccgaaaaatatcctcagggcagcgaacgccatctgatctatgccgttaccggccgcgttgtccctgagagagcccttccctcggctgttggcgtaatcgtcgataatgtagccactgcaatgcaggcggctctggcagttaaagacgacctgccctgttatgagcgtatcgtcactgtcagcggcaacgccgttcacaaaccgggtaattatcgtgtccgcatcgggacactttacagccaccttgtcgagcagggtgcccagggcctgaaaaacgatccggcccgcatcatttccggcggtccgatgatgggcttttccctgcattcgcttgattttcctgttctcaagggcactggcgggctgctgctttttgatcaccagtctgaactggccaagctgccgcctgaaaatccctgtgttcgctgcggaaaatgtgtcgatacctgtccgatgtttttagaaccgacccagcttttcaaagcagtcaaacgtcgtgattggccggcagctttggccggccacgttggtacctgtatcgaatgcggctcctgcgcctataactgtccagcccatatcccccttgtccagtatatccgcatgggcaaacagtttatccttactgacggcttcggcggtcataacccttactataaaaaataagtatcttgtgcacgtatagaaaggaagactcttatggaaccggtcaaagctcctgcgcctttagtcattatatcgtcatcgccatatatccattgcggcagtactatcagcgccgctatgcgcgatgttttactgtcacttctgccggctctggccgccgctgtttactttttcggctggccggcgctcagcgttatccttacctgctgcctctcggctgtcatctgtgaagcgttatgtcaaaagctcatgcagaggccgattaccgtcggtgacggcagtgcccttttaaccggcctgctgctggcattttgcctgccgcccgaattatcactgggtctggcagccttcggcagcttctgtgctgtcgttatcggtaagcaggtctttggcggcttgggcagcaatatctttaaccctgcccacttaggccgcgccatcctgctcgcttccttcccggcacagatgacgacctggaccatgccctggaacactgccgccgcagaagcagttactaaagccacaccttataccgacgctgtcagcagcgctacaccgctggcagctctgcgcctggccgaaagcgcctggcagcgcgggcttaatgtcgacctgccctcactgagcgcactgttttggggtaatgtcggcggttccttaggcgaaacatgtgtcccggcgctgcttttaggcggaatttatctgctctggcgaggacacatcgactggcgtatccctgctggctatatcggcacggttgtcgttattactgctatttacggctggctgcgcgaatatccgacctggtttgccatttatcatctgctttccggcgggctgatcatcggcgccttttttatggctactgactgggtcaccagcccgatcaccaaaaaaggccggctgatctacgcactcggtcttggcatccttacagcattgatccgcctgcgcggcggttatgtagaaggcgtctgctattcgatcctgatcatgaatatggtcactcctttgattgaccgttatataactaacgtccccttcggaggaggtgcccgccatgagtaaagatattctgcggctggcggctatcctgctcgttatctgcggtattgccgcagcctgcgtcggtactgcccacgaccagacagcacctttgatcgaagcccgcaaagcagacgctgtccgcgaaggttataagcaagtactgccagacgccggtcagctcactgatgaaccggcagcaggaaagcatatcgtcgctgtcaaacgttctgaaacagacggccagaccaacggctatatctacacagtcaatccggacggctacagcggtaaagtagttatcatgctgggtatcgaatatcccagcgcccgcatcagcggtgtaaaaatcctgcagcaaaatgaaactcccggtctgggagcaaaatgtacagaaccggcttttatagaccaatttttgggtaaggagctcagccatgatctgactgtcagcaaaaatgcttcccaaccgcaggagatccaggctattactgcttcaaccatcacctccaaagcagttgtcaaaggcatcaattctgcccgcaaacattatcaggaacatttcggcgtgagcaaagccgccgcagggaaaggagtgtaaccatgctgccagaatttacaaaaggtattatcagggaaaatccgctttttgttcagcttttaggcgtctgcccggccctggcgaccacttcttctttaactaatgctcttggcatgggcgcggcttttactgcggttctgatcggttctaacctgattatttccgcactgaaaaaatttatccccgccaacatcaggataccagcctatatcgtcgtcatcgcctctctggttaccgtgaccgaaatgctgatgaatgcttatgtgccggcgatctatgaatctttaggtatttttattccgctgatcgtcgttaactgtatcattctaggacgggccgaagctttcgcttctaaaaacggcctgtggctttcctttcaggacgctgtcggtatgggtatcggctttacgcttgctctcagcgctatcggtgcctgccgtgaatttttcggagccggtaccctgctcggacatgccgtagcactgcctggaacgcagcccgtactgctgctgatcctgcctgccggcgcctttctgaccatggggctgctgtttggggcactcaactatatcaaagccaggcgggaggtaaaccatggacagtaatttcgccattatcttttctgcagtttttatttccaatatcgttttatcacaattcctgggcatctgttcctttctgggtgtttccaaaagcctgcgtaatgcgctggggatgagcgccgccgttgccttcgttatggtactggcttcactgatctcctggctggtttattatatgttcctggctccctatgacctgacctatttaaagaccatcgtctttattctggcgatcgcgtctttagtgcagctggtagaaatgttcatcaagaaaatgctgccggcactgcataaaagcatgggcgtatttctgccgctcataactactaactgtgctattttaggcgttgcccttatcaatatccaaaaaaactatacgctctggcaaagtctgcttaacgctgtcagcaccgctgtcggttatactctggctttggtactgttttcctgcatccgcgaacggctggaagacagcgacgctccggaatgtatgaaaaacctgccccttgccctgatcacggccagctgtatgtcgatcgctatcatgggctttgccggcatacactaaaaggagaacaccatgtggaaatctgttgctttagtagcaggcctgggcggcatgttcggcgctattctcgctgtggcaggccgcaagctggccgtacataccgatccccgtatcgaagagatcaccaatctgctgccaggcgccaactgcggctcctgcggttatcccggctgcggcgtactggctgaagccatcgttgccggacgcgacggtgtttcaccctgtttggcctgctcgcctgattctaaaaagaaaatagcgcgcatcatgggctttaccggcgatatacctttatcgcccgacctgcgtaaggtcgcccgcgtcgcctgcaacggctgcaaagaaaatgcgcccaagctgtacaattataccggcatcaaagactgccacctggtagccaaatactacggcggaccgggcaagtgtaactttggctgtcttggttttggttcctgcgtaaaaatgtgtccctttcatgccatttccatgagcgaaaacggtctgcctgttatcgactatggtaaatgcagcggctgcggtatctgcgcgcggcaatgcccgcagatggtattgtatattaccagcgccagcactaagatccatctaaaatgcaataaccgcgacaaagggaaagccgctatggtagactgcagcgtttcctgcatcagctgcggcatgtgcgcaaaagtctgccccgtgcaggccattaccatgcgcgaagatgccaacggcagtctgcctgttatcgaccacagtaaatgtatagaatgcggcctttgtgttcagaaatgtccgcgtcattgcctgcataaattagatcccattactaccgaacacgagcacggcaccgttgctacgaataaaaaaagcaactgcacatcctgcccgctcggagaaagctgcggccagaaacaatgaaaagttactgcaaaaaatatctgctctttctgatactgcttttaacattcagcatcagcggctgcggcgaagaagaacagatcaaagtcaccgacacccgcttttctatggataccttcgtcaaaatagacgcctacagcgataaacccggagaagcccgcttggctatagacgacgcgatgcagaccttccaaaaaacagcccaggtcacggaccgttttaacgacggcggccccggttccttatacgaagccaacagcaaagctgcagcggccccggttacgctggctccacagcttgccggactgctgaactatctggaccatcaaccggatgcgcagctcgatattgccatcgctcctgtcgttgacctctggcagctggcccgcagccagaacagactgcccgctccggaaaaactacaggaatccttacgccatacaggtaaagacaaatatcattttgacgctgccgcacaaacactaagctacaatgatcctgacgtcaaacttgacctgggttctgtcgctaaaggttatgccgttgacgcggcggcggcaacgctgaaaaaacattctggtattacctgcgccctgatcaacgccggcggtaatattaaagcaattggtaataaacccggcaacatgccctggcgcgttgccatccagcacccccgtgatcctgaagcctttttaggtacggtgatgctccatgacggccagtccgccgcaacttccggcgattaccagcggtactacgaactgaacggcattcgctaccatcatattttagatccgcaaacagggcagccgtcccgtctgcatcaatctgtaacagtgatcgcgccatcggcgctggacgctgattatcattctacactgttctttttactgccaacaacggaaatcaaaaacaggcttactgctgccaaagatttggccgtagtcattgtcgaaaatgacggcagtattttcgtctccgaaaatctgcagcaaacctggcagcctgccaaaggaatatgattatgcgccgtaatgattatctgctttgtttagtcatcatcacagcagcactgtgcgggttctggtattcagacagcactgctgcggacagcaatgccgttgtacgcatcacccggcaccacgagcttatcctgcagcaaacactgcgtgattttcccgatcagtatcttttgccaactgaacacggcagcctgacgatcaccaaagcaaacagcagccttcgcgtcagcgaggctccctgccctgataagctctgcgaaaagcagggcccaattaccggcagcggttctatcgtctgcattcccgaaggcgttattattgaaataataacttccaaagaaggagactcttctgatgcgctcctccactgatacgacaactaaaaccatgcttgtcctggcactgctggcagcgctggcagttttgctgcgtctgggagaaaacctgctgcccctgcctgtccaattgggcgtaattcgtccggggctggccaatactattactattttatgtttatatttgttcggtctgcgcctgaccgggctttttttaactgtccgcgttcttctggtcggacttttgagcacaggcctttttacacctggttttcttatcggccttggaggaacgcttttaagcctgctgctgatggaagcaggacggcgcagtcagcttttttcaccctatggtatcggcatcctgggggctgccgcacataatacaggtcagatcctgactgcttccctgataatgcaaagtttctctttattctccctgctgccgttactgctccttttatcattgcctttcggattactgaccggtgctgttgccgcaaaaacattaccgttcctgaaacaatatctgcattgaattcaccgatccttcacttttactaagtttcagcttatgatatagtaaaagatgatatcagataacgaaggaagtttttacatgaaaaaattactgcttttattctgcagcctgctgcttgtggccggctgcggtaaaccggctgctaccctgcccactgttatcggcagcggcagtgtcgatatcccagcttataaaataacagcgcctgccgccggaaaaatcttaggactgatccttgaatctggcgaacgtatcggtaaagggcagcctttatttgcaattgaacagccggagcttgacgccgctgttgaagacgctgctaccgaagcggcccgcgccgatgctgagcttactaacctggaaagcggaagcggtgaacaggccatagccgctgctgattattcactgcagagtgccgagagctcttatcaggcggcggagcagaactatcaaaaaatggcctctctttacgctcaaaacgctatcgccaggatcaaagtggaacaggcacaggcagcactggcggcagcagaagccaacctggaagccgccaaagcgcatcagacacgtttgacagccaaagcttcacccgaagctatcgaacagcaaaagcaagcagcactacaggcacaacagcattatcaacagctgctgcaaaaacagcaggccaacgaagcccagagcccctgtaccggcatagtgacggaaaaactgctaagcagcggagatacagctgctcagggacaacatatcctgactatccgcgcaaccgaacaatgccaggtaaatctgaaaatgcagccgcagcaggccgcagctttaaaaacaggtcaggaagtaattgccgaggccgctgtactcaaaaaaactttccccggtactatcacagccattgataacggtactgtcaccatcatgctggaaaacaaactggaagaactaaaggccgcaatggaagtcagcatcagcctgaaaaaataaaacttccaaataaaacataataataaaaccttaagcacagaaacttaacactctgtactgaaggttttactttttcatcgattctgatatcaataacgctctaccgccacatcatgcgccagtttgtacttaaactgcatccccggtttacagctgacatttttgcctttaaaagccagacctgcaaaaggaacagccacacctgccgccagcgaagtataattcatatctcctgaaaattttatttcctcattattcaatctgagcagataaccattgggcagataataatctttaagccgcatcctgatcacgcccttttgtgacagcagcttgcctttctgcacttttttcaggtacccttccaaaacagttcctttaggaatgatgacctcatcagcaacactgacagcttccaataattttacagaaacagtatcgccgactttatttctcttactttccagaaaattcatcagctctaactgcagcacagtatcctctggaatagtaatgccggttctcgatatctgctgctctgcggccaccgaacttccgatcggcaggcagaccgcagcaacagccagcaacccggacagtaaacaacacaaaaatttatgcactttttttgccttctttcaccagctgtaattattgttttttcagatcgtcgctgcccttaacacctgacagccacaagccaatcgccacaacattaataaactgccctaaaaaaccctccagcaaaaccagcatttttaaaaaccgcgactccggcacaatatcaccgtaaccgatagtcaagatactgacgccgctgaaatacaggcaatcaagatatccattcagacgattaacagtacgcggcagcaattgttcgttgccgccactgtccttatgcggcaccaactcccaaaaatgcggaacattacgcaaaactgtactttcctgcagttcagtaacatgcatatcgccgtcccactccttcaccaatccttcgacactggtcgcattagtagccacaaaattttcggtgtcgctgaaaaaataatataaattgccgaaggccagccaaatcatcagataggcgctgataataagcatcatacgccgctgacccgtagtattgctgttgattgccgcccagatcgcaatactgataaaactcaataacaagaacagcagcagcagaacgatgcccaacagcagacctgccttgaagcggccattgccgtaaataactatataatcaaataatacactggcgatcacgggtgcgctggccaaaagacccagtgagatcaaaaatttataaaaattttcgtcaagcagctgcttgtaccattttttcaaaccaaaaacatcgatttttattttcattctgctcatctcttttcttgctgactctctttgcattgtatcacgattacaggtatttaagaaagtatcctaagaatttttttatttaaaaaccgggcttcaatattatcgtaaatatattatctgcacgctttctatgctataataaatatgaacaacaaaaatttatgtatcaggaggcaaatatcatggcacttttaaacaaacttggcgaaatagttaaatccgccgctgaaaagactgaagaactcactaaaactcttggtgagaaagcagaagctgccctcgaaatccagcgcctgaactctcaagtcaataaagaacgcagtaaaatcagcgatacccacaaaaaaatcggtgagatcctgtgggctaaatttgaagcaggcgaagaaatacctgaagaattcaaggaacactgtactgctatcagtgaagctttgaccaaaatcgatgaacacaaagtcgctattgccaaaatcaaagcaactgcctttgccggagaagaaccgaaaacatcctgcccgtcctgtggcgctcaggtgacgctcaactcaaaattctgcggcgaatgcggcggtaaaatgccggtccatgaaccggaacccgttgaagaagaagctgcgcctctgacagagacagtcgacgaaaccaaagcagaaactgctgaagttgtggatactcctgccgaagcagaagctgctgaaactgaaaaaacagaaaccaaagcataactgttataagaaaaaccagtccatatggactggtttttttatctgttcaagattttacctatattttttatagaaatagaaatctttccatcagggttgctgacaaattcgatataatcgttattttccaggcattcagccggcacgatgatctcgatcccagtatcggttttgatcttcattgacttactcatgcgcagagcataatttttatcaaccggtacctgctcaggaagcttagcttcttccaggcctttttgcagctcctgctgcagcacctctgaatcagaaaacacctcttttaccaacgctgctgtttccagcttactgtcagtttcagctgtttccgccagatagcttttgaccttggcaacggcttctgtgctgctgtacccgtagttttcagcgatctgccctgccatttccgttaccagcttcactgtttccctcgttgaggtattcgtgctgcactgtaaaatacgctgcggcaaaatatagacatcttctccgccgatactgcgttttttatcggcaaaacgcagctcgccgctggcagcattgactaaagcaaaagtattgaccttctgcaccggattgggcaggattgcataatggcggatgatctcattgcgtacggcagtgccatcattgactacctgatgcgtataagctggccggctgccataaagcatcactcccaaataacgctccgtttcgatcgtaaaatcgcaaactacgacatcgacgatatctgtctcaccggcatcagtaaggcaggtatcaagatccttgcagataccggcactgaaatcagagaaagtgatatgctcatctaaataatttgatgctgtttggctgaaaatgctctccggcagaaattgtcccgttttagccgacgcgtccttgaataatttatcgatatggcccgctaaaaaatcataagtaccgggcgcgcccatatccagctctgccccggaatagatggtagcccctgaattaaaatccataatatgcaagatcgctttgctgataactatcattttttcaccaacttttttaaactcgtagtgctattataccacaagggtatgtattctcaccaggctcgaaactttgccaaatgttcacaatactaagacaaatgccctttataggctgccggttatgtgataaaataaaagcagtttataaatattatacaggagcaaaaacaatggaacgtcaacgattactgccgctgctggcagtcattctctttatctgggtcctctggcgttatgaagcggcgctggcactgctcggcttcttctgcaatttaatcatgccttttatcatcggcggctgcctggcatttatcgtcaatgttcctttggtgcatatcgaacgtctctggcaaaagctgtttgtacgcttttcttcagactggcctcaaaaaatcaaacgtccggtctgcctgatcgtcaccctgactgttattatcggcatcgttctgatcggcgggctcaaaatcggccccgatctgcaccaaagctttaatatgatcgtaaaaacacttcctaaagcatctgccgaactgactgtctcccttaaagaaagatgggccgaacttgccctttcacctgatacgctggattacctgcaatcgcaatggtcagaatttctgcgtgctgtagacacctactgggaaactaataaaacgactttattctacaatacgctaaatatcacgacatccctgatctcactggtcagtaatattgttatcggcgtcgtttttgcagtttacctgttgctgaataaagaaacaatctcccggcaaacccgcaatatgattttagccttctgcagcggtaaacgcgcagcttacctgcttgatctaggcagtgccgctcatactattttctccggttacatcggcggtcagctgctcgaagctttctgcctgggattattatgcctcgccgggatgctgcttttaggcctgccctatgctctgtcaatttcggtcatcgtcggctttctggctattatcccgatcatcggtactattttcagcgcccttttaggtcttattctcattgggcttgccgcccccggcaaaatctggctgtttattcttttcttcttcgtactgcagcgtatcgaaggcgatatcctctatcctaaaatcgtcggcaaatctgttggtttatccgagatctgggttttagcggcaattaccgtcggcggcagtctttacggtattttaggcatcatcgtcagcgtgcctgttgcttcggtgatcgcctacatattatcagacagcgtgcaaaagcggctgcagcaaaaaaatattgacattgaacggcaaaatccataaatatcagtttttttctttaagtggctttgcaacaaacagcgtttgtgctataataatctagtaatcatgcgggtgtagctcagtggtagagcagcggcttcccaagccgcgtgtcgcgagttcgaatctcgtctcccgctccataacaaaaacaagacgcagacttcgttctgcgtcttttttatttctaacttttctattttctatacgctgaacatattttaaaacaatatttacgtccaactttgtcttttctacagctcaaattttgatggcgccggaaacaaacactctaaaaaattttttattttaatttttctctctttagaacaagtattaccggaatttatacaaaaaaacttaggtttaaattttaatatctcttcctgcaatttatcagaatcatcgttatccatgtaactttcccactccacatttttgaaaaaattcaatgctttccgccatggctttggatcagaaacaatttttaaaactgcatttcccgaatatacagcatcaagactaaacaaaatacgctgcacatcattgtcacttctaaatctatttccgagaaataatttcaagctttcagctaatttttttgaagtttccaaccatgcagttttattgtaactatctatattatgatgagaaacataaaataaatcattttcatcttttccatattccttaaacagtatttcggcagcattgagtacggctttatcagaaggagcatattcaagaaaaactttctttgctttttttagtgttttatacttattcatcaccttaactctgacaattggcataccatcttcaaaaaaatcactggatcttacagtacggcctaaaaagaaatcatcattagcataaagaaacctctccgataaagctggaattttcggcagaaaatactctattacatttgaattaaaacatggtattatctcctgcggcataatgagtgaatggtcaataatcgaaaccttttcataagcagtattcaaccaatgcggacattgcctgtctgtaactatatacacgtgattgatccaaggcgcgtatttttctaacgagcgcaaagaatagcgcagttcctcattgtcaaaaaaacgttttattcctgatacctcttcatctttaatattataatcggcagttaaaaaagaatttttccgttctctaaactctttatcattgccatcacaccataaatataccatatcaattttattattttcgttttccatcgtgtaatacctgctctccctctgcacgacattctttatatttatactaaaaatatcttaactttatttttccaatcggtcaattataaaaacataaaataatttttatgtttgcaaatactttactatcttttttaggcttttaattctaactttgtttttacataaaataaagctgcaggaattaatcctgcagctttgtcatttgcttttatccattatactaaaataatattactgatatctggaatttatgatcttcaaatttattacagaataaagctcgtcctgattccaaatttttattttcccttcctgcacgtttcttctataaacattttttgaaggtacagcgatttctaaatttattggcactgtgtttttactgcgttttactaaaacatcttcagattttaactttttccaaatcccttttttagatccttgtgaaattatagcatccacgccttctgtttcacaacgcagtttcaaggtatcgtcctccgtctgacagcgcaaagcaacggaaaaaacattcggctccagccagtatttaagcagacccatttttcctacgtcaacagtatattcaacacttttatttttattcaaaactattttttttaaactcctgtcgccttcattctgcattttgaaactgctgagtaagatcattgccataacagcagccgccaccagaagtatttttttcccaagttgtttattcatacctggcccgcctttttccagctatcttcctagaaaaaattttaacagataaaataacgacagccgccgctcccggcaaacagcttaactggcagctgccacaaataccggtgcagccagacgtgctgccccaagaagaaatcggtatacccatagctgcacaaaaagtaattactttattcctcatcatttttcctcccgtatctgatcgccttttcaggacatttactgatacagaccccacacagtatacaattgtgtacgcaattcacagctttccgctcttctatcaccatcgcttccataggacaggcaaggctgcagcttttacagccaatacatttttggcggtcgataatcaaccgataaacgaatggcagcctgctgctgaaagaatacaacaaattctgtaccgctcctacagggcacaaaaaattgcaaaatccgcggccgcctttagtaaagataccaaacagacctgcccacaaaaacaacgtcagaatcatactggagctcaaagaaataaaatacccaaaaacgaaatagttaacaaacaaatcaaatagaaagaaattgcaatatgcacatgccagcagactatcaaaaaatggcaatattacaaacccggccagcatgccataacgaagcggagcgatctcggtataagtacgccagcttatctgcagccttgatggtatgactttgcttaaatactcggtaaaagctccggcaggacataatctgccacaaaatacaggaccaaaaaacaaagtaactatcagcaagatcacgatacaagcaataaaaggaagcggcatcaacagtagttttccatccagtaaatgttctgtctgaatgcgaaaacacaggctgtgaatggtcagctgctgccacttgcccgtaaaaataaaaaatattattttttgaaatagcgcaaaaggagcatagaataaaataaaacctaaaaaataccccaaaagccgctgatatttaaactccatttttatcttcacttccatgaattttcaggacagggaaaatccctgccctgattttatttacttaaaagctataacgcaggctcacgttatatgtcctgccggaagttgcttcactggcataaaattctttgtcgaacaggttgttaataccgaattgtaaaatcgtacctttagcaatttcataattaaaggcagtattaacgataaaatatgcgtcttccgccccatattctcctgtcacatcatcaggagcctgacgagcgctcacatactgacaatccaatatagcgttgaacttatccttattataattgacaccggcatgcagcagatgtttaggaataccatagtctgcgctgtcagcatctttcaggttagttcccgccaccgcattttgttttactttcccctgctgccaggcataattaaaatatgtgccccagttatcgttaaatttatggtcgaccgtaaattctacaccgcggcgtttttccgtaccgtagttttcatattttttatattctgctgttgttgttccaggctgataatgggtcgtataaaggattttatcatctgttttcacctgatataaagagatccccagattagtctgccgcgacaatttcttcttcatgccaatctcaaaagtatttgaggtctccggatcaagatcaggattagccactacaccgcccatactgccaccgccgtcacgatagacctgatacaaaggcggcggattaaaagaatgtccataggaaacatagtaattagtcttttcatcagctttataatcaaatgctattttcgggctgaattcactataactgacttcatcatagtccaaagaacgtgttaaagcaccggtatttttatcataatatctgcttttaccatccatttttgtaaaatgatcataacgtacgcctaaatacatcgtcagcggatcgctgatctgatattcatcctgcacaaataaagctatgttccgcgctttaccgccatggttttcataaacaccgttatcaccaagtccgccgataacagaatcatgatcgcgccagttgctaagatatttacgcagctgatcaaagctctcctgtttaaaactgccgcctaccaggatagagtgcctgccaacattttcccaagccttctgcacatcaaaattatatgtttcaccgggatagaaagaatcagtaccggcgccgttccagtctatagagtctggactgctggcactgctatagccattacttttcatatccaaatacccaaagttggcactgaatttatttttattatcattatatgacaatgtatgtaaatcggattctttccgcccgtcataaccaagatatgttccaatgcttggcttcactatctgtccattaccaacatcaacactgccactaaatacgggcttaccgtctttataaattgtcgtccacggattttggtagcgatactcactttccgtatggataaaagtatattttaaagatctgtcttcatcaaaatcatatttgatattcgccgaaatattttcgttttcccaaactttttctccgcgtcctcctaaaatatatttaccgctgctcaactgcggtaattctttatcaggctttatcgtgcctgtatccttgctggcactgcctgtataataatagcctttaaacccatctgattttctgttttcataacccacgccgaaagataattttttattcactcttgcatctgcgtataaagcttttttccaggtattattactgccatagctgactacagcatttacactggctccttttttttcaggattatccttagtgatgatattgacaaccgcgcccacagctctaccgccatataaagaagagcctgctccccttacaacctcaattctggcgattttttctacaggtaccatttcccattccataccgttattatacgtagtattcatcggcagcccgtctaacaaaaccaaaatatcactggagctgaaacctctgatctgaataccgccctgcgccgcctgactcatatagacgccgggtaaagtctgcagagcttccggtacagaattgatatttcgttcttcgatatcctgtgaggtcacaacgctgacgctggaaggaacctcctgcagttctttcatcgttctggttgctgtgacaaccatctgatccagattaaattgctgcagcccctcttcggcgtatactgctgtacccccccagatgacattgccagttataagtgctgtcatcagtatacttttactcataccctttttcaacatactcaacttcctttcctgatttttgtattgttataaaagtatcccttacacctttaacggcagtgcatacgatacctttacctacaaactgaaaaataccctgtgcctaaaacgcacagggtattaaaagacctcaaaaaagccctctctttacccaaccgtctcacgcagcagtaaataaatcatcaggcagttcttctgactttggttcatcgctcctccaagccttcccggataattccagtgacgtaaatatggatttgctcaccattacagcgacgggatcgtgtgggatttacacccagcttctctattaagacctgcgtcacctgacaatatcattattcactttttatattttataacattatattctattttatatcagcaactatatgttataatatcatatatgatatattactatgtatggctactagacagtcaatagggagataattattttatgaaagaaccaattgacaattattttacaaccggagaattagccaagctttgcaagattcctcgaaaaactttgctttattacgatagtttaggtctgatcacacctgaagttattgaagaaaatggttatcgttattacaaacgcactcaattatttgcattagaattgattttgacgatgcgcaaactggatattcctttagccgaaatcaaaacttatttgtctaacaaatcctatgttaactacaggaatattatgtctgatcgtgaaatattgcttgaaaaattactcaaaaagataattaaaacaaaaaatgaactgcatcattccctcattattcttaaccaattagaaaacattaaatttaatgatgtactaacagttcaaacagacaatgaatttttatgtttaagtaaaccagtctctcccaaaatgaactttaaagacagaacaaaaatatcagccagcctatttataaatcttgctgaacatattccccttaacaatcatactttcggttacgttgtagataaaatttcacttgtcgatcaaaaaaaacctcgtcatataaaatattatttctatccggttttcactaaaaccgattatccgaaatgtactatcaaaccaaaaggaacttaccttaccctttattttaaaggtatctatatgaacaactatgataagtatatcaacactctgtcagaatactgcaagcgtaatatgctcgttcctctatccgatatttatatcacatcaataaaaaacttttggcttaccgatgaaatcagcgaatatatttacaaaatagaagtacaaataaaataaaccgttttctaatccagaaaacggtttattttattacttgtgaaaatataatttctctaatattaccagatatttttctatttagatacttcttaaaaataccccctatacgatttgcattgttgcaaacgaaatgttataatgatgcgattttttgcaaggaggtaaaaaaatgtctattggaatcatcgtcaattcagcctgcgtacttatcggcggcctgctcggcagttttttcggaagactgctgccagtcaaaatgcgtgaatcgctttatgggttattcggttactgctccatcatcatcggcatcattctgctgcaaaatataaaatctatgccggcagttacattagctctgatcttgggtactatcatcggcgaagcacttcgaatcgaagaccagatcaatttcgcttcgcttaggcttaaaacacttatcgaacgtatcacaaatactgcggcagcagataatgatgcttatatcagccgtttcgtcggcctgctgatgctgttctgtaccggcagtacaggaattctcggcgcgattggtgaaggcgtaaatggcgacagcactgttcttttaacaaaatctgttatggacatttttgcagcatttgcttttgctgctcatatgggtcctatgatcgcctgtatcgcaatcccccagtttctttttttcagcatcctcttttggagtgccgtcttcatcatgccgcttacagatcctctgatgattggtgattttatggcctgcggtggcattttagctattattaccggctttcgtatctgtgaattgaaagacttccgtgtcgccaatacgctgccggctttatttatcgtaatgccgctcagttatctttggcgcacttattgctgaacagttaacactaaaaaaacaggccctgcatacagggcctgtttttattccatgatacctgaatcctcaataataatccagctcacgctcaaaaataacgccggtggcaggattaaactttaattcccccttaaatttaagggtagtaaattcggcttcatagtaggaattattgccttctttgtccatagttacaacaatattgcgggcatccgggtattcagccataacaaagcgctcgatatctgccggagttttgttgataatagtgctgcctttgacaaatgttgcacccttgacttctatctctttgattttggaagtagccgttgcaaccttcacataataatattccaaagtgtcagggtcttgaaaagtaatacggctttcatcacctttagttgtataaccaatcagattacagtttgccggaatttctgctttagcaacttcgatcgccgccctgctttgcccaagctgactgggagcaggagccgccacagccatagcgcctacacataaaactactaaagctgccagtaatgaaaaaacatttttcaatttcattcgattcacttccttaaattattttgtattactgcttaaatacatcatacaaaacatttttgttaatttcaactgtgtgctatctcctatttgaatttattaattaatttattccatattatcaatattacaagcatttattttgttaaaattcataaatctgttaagcccttcccataataaaacagacctcggcatatttatgtccgaggtctgttttattataatcactgttctgccgattgttttgcatcttctttacagaccgttgtttcttcgtctttaaaaaagtatttcatcacaccgccgaccagcccctgtaccaaaagaaatttatattcgttttcgatccgtcttacttcccgctgtacctctctcttaatgatccagaaggacaaagccacacccagcatcgccccaaacaaggctccaaaaaatgcgatccagatcgcaggtatcgaaatattgatcattattgccaccgcctgtctgttttctttgacttcaaaatatcacattagctattgcctgtcaaattaaagaaaattcacattttcttctattgcaactgcaaggacaaatattatataatattagaacagttccaatactttaaaaagtgaaagggttgttaccaatggagaaaatttacgaaggcaaaactaaaacagtatattccctggaaaacggcaatgtactcttaaaattcaaagatgactgcaccggcaaagacggtgtttttgatcccggtgagaataccgtcgggctgactatcgaaggtatcggcaaagcaaatcttgagacttcgatccactttttcgagatcctcaaaaaagaaggtgtaaaaacccactatgtcagcgcagatatcgataacgccactatggaagtcctgcctgctaaagtattcggtaaaggccttgaagtcatctgccgcttgaaagcaaccggcagcttcatccgtcgttacggtgactacattgctgacggcactgttctcgaaggcggctacgttgaagctactttaaaagacgacgctaaaggcgatcctctgatcacttctgaaggtttggcggctctcggcatcatgagccaggaaatgttcaacagtatgaaggaacaaacccttaaaatcactaaaatcgttgctgcagacctggcaaaaatgggtctggatctatacgatatcaaatttgaatttggttacaacaacgacgaagtaattctgatcgacgaaatcgccagcggtaacatgcgcgtctataaagacggcaaatatgtcgatcccatcactctgacttcaatcatcctcggtaaataaatctttatatttaaaggcacagcaaaagctgtgccttttttgcttcttaggcatgttgatgctataattattttaaagcgtttttaaagcccgctttaatttttgaaaacaaaggaacgatgcattatgaacaaattagatccgcgtaatatttatgacgacttacatcaaattcctgaacttggttttgaagagtttaaaacctctgcctatctggcagataaattagaaacaatgggctacaaagttacccgtaacatcggcggtaccggcgttatcggcgaaatcaaaggctcagagcccggacctgtaatgatgctgcgtgccgatatggacgcactgccctttctgatcgacggcgaaaagaaaaatattcatgcctgcggccacgatgcccattccgccatgcttttagccgctgcctccgagctggtaggcaaggttaaacgcggcaccctgcgcatcctgttccaacagggtgaagaaaccttaaaaggcgctttggcagttattgatgccggcgtaattgaagacgtcgatatcgctcttggtctgcacatccgtcctgtacaggacattgcctacggcgaaatgtcgccagcagtgcgccatgcttccagcaccttcgttaacgtcgttatcaacggtttatccagtcacggcgcacgtccgcacctgggtgtcaacgcaatcgaggcagccgctgtcgctatcaatgcgattacggctattaaaatcaatcctatcattccctggtcctgtaaagttaccggcatcaaaggcggcggcgtagcccccaatatcattcctgataaagttgaaatgatcgtcgatgcccgcgcacaaaccaacgaagctatgaccgaactgctggaaaaactgcgccgtgcagttaccaatgctgccgctgctcttggggctactgccgaagtcactactcccggcggtgtgatccccgctgctgaatacgatgacgaactgactgcagaagttgcagaatgtatcgtcgaagcagtaggcgaagaaaaacttgcgaaagaactcgttaaccccggcggtgaggatttccactactttgttaataaatatccccatatcaaagctgcttacttcggtgtcggcgcagctgcagctccgggcctgcatcatcaggatatgcagctgaacaaagaagctctgcccagcggtactgcggtcctcgttaaaatggtagaacgtaaattaggctgatcactgtttatttttcgttgctgaattatatataactgcaaaaactcagacttccataaattatgaaagtctgagttttttattactgtactatgcttaactcattttcgtatatttatttaagctgactgtaaacattctggtcaacaggctccagccaggtagtacctgcacccttgctcataatcgacagatgctggaaccagctgttgccggcagcgccatgccagtgtttagtcccttccgggatcgtcacactttcaccggctttcatttctaccggatcctgtccccagatctgataatatccacggcctgataccccgaccaggacctgacacgaaccgctgtgagtatgccagttattgatacaggacggagcaaaagtcacgttagacacacttacagtatcgttagccatgggaaaaagaaagctctgtccggtaaaatatctggcataagccgcattatcattaccgataggaaatactgtaccacctgcctgcagcagcgacgcgctgattatctttgtctgttcctctgttacaggctcaccggctgccaaagctgcatctgtaccgcccatgaccgcagcagccacaaccagagccgcagctattcctctaaaagtgtttttgttgaatctctgccaaaatttcatattattttcctcctcataataaatcatttgtttatcaacttctggatcagattgctagtgctttcgaagccggatgcctgtttaataaagcatatgtttccggctgtaacaaattctcataatttctcagctgataatctgccagttccgcaaccaactgcaaactgttgattttatcaagcagcgtttcacgagcctctgccagcagctttttacgctcctgtatcgtagcatcacccatttctgccagccgaatataatcaatgatatgttccaatgacatcccgctggctttcagctttttgataaaattgataaaatttacaaaatactcatcataattgcggatcccggccgcattccgtggcaccggaggcagcagcccgatcctttcataatatcttaaagtatcagttgacatattggtttttgcggcaatttcccgaatcgtcatttttactcctcctcacagtgattatgcctgagctgataaatactgtaatctacattatccagcagctgttgtttaaaatggatatcatccagcagataaaagcgcagatttttcagcagcttgattttctgttcctctgtattatcgctgtgctcaatgatatttaaagctgcttttaaccgctccggccgctgttctgccgactgcagaatctgctgtaaattctcctgcgtacatttctgcatcttttccatagctactcagccccactaaaaattctctctttaaacttttccataacacgtgttcccggatcactttcattataaattattctttcttatatgtataatacctatttctcatatccatcaatgccttttaggcattgattttccacgactgtacaaataaaaaaagtgcaagcgcaatcacttctggtgatctgcacttacactttctgaccacagcctctgattcagctgcaactgtctgctattgcttttatcttcactgttccctattgttatatgttttcacaaaatttttggcaaactcaataaatttcgtcgtcgttacactgaaaggctgtcgttttttccaggccagcactgtagtagcagcaagttcaggatacagcggcagcgaacagacctgtgagcggtccaaaaaaggccgtgaaccctcaatatgaaaagcatatcccagcccgttccgtaccattatcgaagcattcgtactcatattgcaggtatacggaaccctgacctgcggaaaataatcaccaaaccagctgaccagctcattttgcactttcagccgtgcgggaaaaatcagctccttccccaccagatctgccgccgtaacaaagcccttttgcaccagcggatcttcggcaggcagcagcacggcccagcgttctttgacccccagacggataaaatcatacctgtcaatatccacaggttccagaaacaaagcaatatctgacagacctttttcgatacgttcattagtataatccgcattaccggcatataattcgtaagttacagcaggatacttttctttaaaagcccggaacatttcagcaatgacctgtacggaagccaactcgccgcagcccaccgatactacgccgttgatcagctcgtcgcgttctgtcagttctttttccgttttatctgccagatcaacgatctcctcggcccgccggcgcagcagcattccttcgtcagtcaacgtcaccttacgcgcgccgcgcgaaaacagcgttactcccacatcttcctctaactgtgccagctgtcggctcaatgtcggctgcgtgatatgcagcagctcagccgcttttgtgatattctcctcacgtgccactgccagaaaatacctcagtatccgcaattccattgcctctgcctccttttatcctggtcaactgcatctgcctgttctgtccttttctttctatcataaagtatttttatgctctcaggcaagctttatctgtccttaaacatagaaaaggcattatttccccaaggaaacaatgcctttctttactgctatttattcagccgctggccgattttcagcatatacatcgggtcaacgttctgcccatcgacaaaaacctcaaaatgcacatgcgggccggtactatatccgctgctgccgacaaagccgatgatctcacccttacgcacgctttgaccgggcgcaacggcaatcccgctcatatgcccgtaagcagtttcataaccgttgccgtgatcgatacgtacatagcgtccataaccgccgttccaaccggcaacctctaccgtccccatcgcactggcgtaaaccggctcgccgaattcaacagcaatgtcaaccccgggatgccagtcgtaaccgccaccgatcggtcccgtacgtccaccgtagggagagctgatcgtaccacctttggtcggccacagatcaggaaagaccgagcgtttattattgcgcccttccagctccgaaagcagttcactcatcgaagttttcttctcgtcgatctgctgcgccatatttttattctgagccgtcagtactgccgccatttccttaacgcccaaatcagcaggacctccctgtcccaagtaacgaggagtattgcctgccgttgccgtttcgcctgacgcgctgctcaaatcactgcccagcttagtactgtcagtgtcacgaatcaatgcccggcgcagtttagtttccaatgtcgtgatttcagacatatcacgcagcattttttcgttatccgccagcaggctttgcagctgtgcttccaactcgccttttttagcctgatattctaaaaaatcagtccgttcctgacggaactgataaaaattataacccatataaccaagcgcgcccaccatacagacagtacatatcaatacagcgccggccagcaatttaaaccgccgggcgccaaaatggtaaactttctgcccttccgcccgaggtactgtaaaggtatattcttgctgtttctgtaaatctttttcttccatattttaacctcttatctaaaataccctaacttctgacctgctgccagcagcctgtgcccaataaaaggcagactttccagatcatccttaccaataccgcccactgccagcaatacgccgccgtaaacaggcacagccacggcaatagccgctaaaatcgcccaggctccccagcttaccgccagcgtgatcacgccataaacagccgctcccatagctgcggctgacacagcaggcttaaatacaccgctgaaggataaagcaaaacctgtatatttgtaaataaaaatcatatttaaaactgctgccaggccaaaatccactaccgtagccattgccgcacccttgatacccaaagtcggtatcgccgtcagcgtccagcttaaaaacaccttaaccgcagccgctaaaatcatattgatgaccgggatcgaagtccgacccagcccctgcagaattcctgtactgatctgatgcagacccaacagcaagatacctacgctcatagtttggatagcatcggcagcgccaggcgcattataaatcagcgccgctattttttcagccagaaaatacatacctacaaaacagggacaggtaatgatcaaagcgactctgaaggccgtcctggttttggccctgatgccgaaaacatcattcagtgcccgtgattcagaaatcgccggtaccaggctgatcgtcatagccgccgtgaagatagtcgctaaattgatcaacggcacagccatacctgtcagataaccgaaaaactctgtcgcctgactgatatgaaaaccagccgcttccaaccgctgcggcacgatcaaaagatcaaggttcgccacaaccggcagcatcaggctggacatggaaacaggcagcgccagccgcagcaggcggctgatgatggcccgcgccgactctctcgtagccagtggattctgctgctgcagatccgctttcagcttctgcttgagccgtccatagaaccacatcaaaaccaaaagcgcacagaaggcgccgactccggcgcccatactggcgccgccagcagcataagctaaaccatgcggcataaacatattcgcaaaaacgatcatcgtcacaacacgcatcagctgctctactatctcggaagccgccgttggcgtcatgatctgccagccctgcagatagccgcggaaactggccaaaaatgtaacaaaaaatacggccggagccaaagcaataatagagtaataagcgcggctgtcacggatccagtgattatcgatcagccaatgagcgccgaaaaaaagcgccgatgcaaaaaccaggcctgtaacgaacaataaccgcagagaaacattaaaaacccgtttggctcccagaaaatccttctgcgccagcttttcagccgtaataatcgaaattgcgaccggtatccctgccgatgacaatgttattgccatcagatagatcggaaaccccatctggtaaaggccgatcccttcgccgcccagtacacgcgacaaaatgatccaattcagcgaaccgatgaccttgacgacgatactggaaaccgtcaaaatcagtgtaccttttaaaaatttattattactgctagcactcttttcggtatcgctcatgattacccgccttgtcaaattttacaattacacatactcatacattataattatcaccttaaagccactttttgacaagctttttcggttttatttcacaaaatattgctttattgcccggccattgttacaattaaagttagaaataatttatcaaggaggtcatttgcatgaagaaaatcctgtccatcgctctggttggtctgctggcctgcggcgcgttacttaccggctgcggcggtgaaaagaaagccgaccctaaggctgcaggcgacaaaaccaaagttgccttcgtttatgtcagctccgccaaagacggcggctactctatggcacatgaactggggcgtcagtatgttgagaaaaacatgcccaacgttcaagcaagttacatcgaatcagttcctgaaggtgccgattccgaacgtgtaattacacaactagcttcccagggcaacaaagttatcttcaccaccagctttggttatatggacccgacgatcaacgtcgcgaaaaaataccccgacattaccttcctgcactgctccggcttcaaaacagcccccaacgtaggcaactacttcggccgtatgtacgaagcccgctatgtcacaggtatcgttgccggtaaagaaacaaaatccaacgttattggttatgtagcagcgttcccgatcccggaagtaatccgcggcatcaatgcctttaccctgggcgcgcaaagcgtcaaccctgacgtacaggtcaaagtcctctggaccaatacctggtataatccagctaccgaaaaacaggctgctatcacactgatcgatgccggtgccgatatcatcgctcagcatcaaaatacccccggtccgcagcaggcagctgaagaacgcggcaaatatggcatcggctacaatgtcgatatgtctgccaatgctcctaaagcatccttgacctccgcgatctggaactggggaccgtattatgaagaaaccatcaaacaggttaacaacggtacctggaaatccggcgcttactggggttccatgaaagataaagtagtcgacatcgctccctacggacccgcagtcagcgatgaaacaaaaaaactggctgatgctgccaaagcagatatcattgccggcaaacaaaaagttttcaccggcccgctgtatgatcaaagcggtaccgagaaagttcctgcaggcactactctgaccgataaggaacttttgagtatggactggttcgtcaaaggcgttgacggtaaaatccagaactgactcgcttgagtgttttagtaaggaaggtataaaggaatgaaaaagacattaattttaagcttagcactggctttaggaatcaccactgtttgcgctgcttctccgctcaaaaactataacgcgggcaaagtagctgttgatctggggcttaacgtccctaccagcaatacttatgaaggacacagcgtcggcagcaaaaaaacgtctccctatgccggtatcaccgtaggccttggcagcaataccgctgtcaactacaaatggaatcaatacaaaaacagcggcagtaacaaggtcgaagcccagcagctcaacctgatgtacaaagtcctgccagtacttgatgtttacgcaggttatgtcgacagtgacgtcaaactgcacggcgacagccgcagccgcagttccggccaagtcggtgtccagggacgtgtcgaattgccttttctctgtactttatggggcagagcaggcgtgggcaacaagctcaacagctatgaaatcggcctgagccgtactctggtatccaatgtagagctgaatatgtcgtactatgacaacaaattcaaagattctgcgcccggcggcagcaacgtcaaaaccaaaggcgttaatatgggtatcaccgtcaaattctgacctgcatctattaatcatctaactaaataaacctcaaaataaggcctggaagcaaaaattcccggccttatttttctatagtactaacggataattattattgacaactgacaaaagctgtgctattataattacattgaaaacttacatctgcgtaagttctgctcacaaaaaaataaattttatagcacttggaggaatgaagaatgaaaaaattcgtatgtcaaatctgtggttatgtttatgaaggcgaagcagctcctgagtactgcccgcaatgtaaagctcctgcatccaaattcaccgaaatgtgcggcgaccgtacctgggctgctgaacatatcgtaggtatagcaaaagacgtcgcagaagacattaaaatggatctgcgcgctaattttaccggcgaatgcaccgaagttggcatgtatctggcaatgagccgtgttgctcatcgtgaaggttatcctgaaatcggcatgtactgggaaaaagcagcttttgaagaagctgagcatgcagctaaattcgctgaacttttaggcgaagtcgttaccgactccactcaaaagaatctggaaatgcgtgtagaagccgaaaacggcgctaccgcaggtaaattcgatctggccagccgcgctaaagcagcaggtctggatgctatccatgacaccgtgcatgaaatggcaaaagatgaagcccgccacggcaaagctttcgaaggcctcctgaaacgttatttcaacaaataataagcaccttacccactataatcatcatccttacctcaacactcaaacaaataccccctgtttccaacggaaacagggggtatttggcgttatttatcttcaagcgtcttatatttgacgtaatagacgtaatagtaggatttttttatcagttcctccaaataactccgttttacgatcattttgcctgcttgaccaaaatgatattgttggtttttattcctgatacctgtacatactcttattagttaccgttttaacaaatcatccatttactagaattttatatgaagcagccctttttatctgattacttattcgtgttttatgtgattgaccctagtcatttatggtataataattttacaagtcatattttaggagcattgtataatggagaatatcgatttattacttaaagaattactttcacaacctgctgaaacgccatatattgaattcaaagcaaataactccactcctcaaatgattggcgaagacataagcgcactggcaaattctgcggccttatacgaaaaaaattttgcttatatgatatggggagtcgaagatataacccatcaaattattggtacttcttttgattttcagacagaaaaaaagggaatgaagaactggagaactggcttagatgcctgttatccgataatgctaattatagctttcacaaaatacatttagaaagcaaagatatagtcatcctaaaaatccataaagcgatcgaccgcagcgtaatgtttcaaaaactagaatacataagggtaggcagttacacaaaaaaactaaatgattttccaacattaaagaaacaattatgggaaaaattacgtgacactaaatttgaagatactattgccaaacaagatttgcaagaaataaatatcagtacacatataaattttcagccctattttgatctaaaacaaattcccataccttctgatcttgataaaatattattttatttgcttgaagacaaaattttatccaaacaagataatggcttatattctattacaaatttaggagcaattttatttgctaatcaactcaaaaatttccctagcgttggtagaaaagcccttagaatagtaaaatataacggtaaaaacaaaataaatatggagcaggaaatactgttggataaaggatacgtcatagccttctccgaaataatgactttaatcaacgctctgcttccgacaaaagaaactatcaacccaacaaccggaattagagagaaagaaatcctatatccacaaatcgctattcgcgaagccgtggccaatgctcttattcatcaagatttatcaattactggtactggacctgtcattgaaatatttgacaatagaattgaaatcactaatcccggttctcccctcgttgatataaaaagaatcattgataccccaccaaaatcacgaaatgaaaaaatcgcctctctcacacgacaattaaaaatttgcgaagagcttggaaccggttgggataaaatcgccacatcttgtgaactggcacaacttccagctcccaaaatcgaaatatacgaagatagcacaagagttgttttgcttacacatattccttacgtcaaccaaacatctacagataaaattcgagcttgttatatccatacatgcttaaaatatatctctggggaatatatgaataacagttccttacgaaaacgatttggccttggtacaacagcatcggcttctatgtccagactaatcaaagatacgataaattctgacttaataaaaccattagatccaactaccgctccaaggcatatgtgttacattcctttttggggataatattttaacttgctggtaacttgctgaatagatctttgcgggaaatccatatctatatcttgcggttatgacaaagatagattgtcattatatacaacattttcgataattttaacttgctggtaacttgctgaatttcaatgataaagctttcgaaggcctcctgaaacgttatttcaacaaataataagcaccttacccactacctttatacatcatcatactccttaaaaagaacagcccctgtttccgaatggaaataggggctgtttgtttactattttctatttcataccctgaggaattgtaaaaccaggagaagcaagaactttattactgtaataaataggactagcaacatatacattcccagcagcctgtatttgtccataaaaatactgtttataagttaaatcaatattttgatgtgacgataaaaaaccatattttataggtcgttgaataaaaatattattattagccattatcataaataggttattgtcaccatcatttcctgttccaccaaaagtaaaagatttttttacaaaaattctaatatttcctttaacaattccattcaaaacaacttcattatcaaaaactaatgttaacggctttccagaagtcggacccaatataccatcagtagtattaatatttattgcttgattactgtgtacaaataaagtgcttccattagcctttgttccatcaatcaaataaccccaattatatggcaagggccagttaatgagataatttgtattagaagctaaatttattttatcccattgttcggaaactataacttcctgtaaattctcataactattttcttcaaagacactatttggtataagtgtctttaaaccatgtaccaattctttatctgcgtatattttaccatccgtatatcctccatcaccaccattagttttatcttcaactttaccactatcactaacataaatattgccatctatagcccccgtaccatcattggcaaaagttactttcccgccagcctgcactaaaccaggcaacttcagtgtttcctctccgccctcgtcaccaccaccggttccgccgttatcgcccaaagtatattccttacgaataactttacgaataccattataagacccaacagctgtaatagtgtaaacggtcccttcttttggtttataaccatctaaaatatcctcatctgcatctactattgaaacagcataccaaacaccatcctggttaactttttctaaatctagcgaactcggattagggctaaacccaaaattaccttcccctgtcaacccacctgccgctgataaccaactccacttactattgcctgcttccaattgtgctacagcacgtttataaccggcttcggcggcataccaggcctgctgttcccgataatcagacgcagcagccgttttttccattgtcatcatcggcagccaggctacggcaacaaccattaaaaacaacagcattgccaaagatatgacagttaccgacccgcgttgacatttcatttcgtcacctcgtatcattaatgcttaacctcttgaacgatttcccaccctgtaccagttattacagatttaacatcctcccatgaaggttttttatctggagcaaattggtcggtattaagagtcacccctttatcactaataagatgacgccattttttatcatctgaattataaatataatttgtattccaattgtcactccacttaggattttttgcatgtattataacaacattatttccacttgaaaaatcaaaacacgctggagaaaaatatccatttacaccatctaataatattgatgggtcaagattttgataaattttttcgtaaatatatgctctaatcctggtattgctcccaaattgccatgaatatttcccattatttgttattccccagtaactacacaacttatcatatatatccctttctttttgcgtaaaagcttctgatttgtcaagttttaacccaatatttaaaatttccatgtattcccgacgcattttttcttcaggtgtttctgttacttcatctttactcggtacaactttagtttccaaggtctgtgttttcatttgcccattaaattcatattgcaccggtaaggctatcttgtacataataacgctgttgccgtctttcaactttatagattccgaagtaataggaaatgcactatctcctttaaacaagctgttagcactgtcattgggaaaatggatttcttttgttcgcttactgccatttttagttttatctgtacgtattacttttagctgttttaagccacccccagcatcaaaccactccaccgtaatatcatatgatatattatcagcatcagcagcaccaatatccatatgccgattccacatcgtaccggaataactgattttatcatcaggattctgaggattgatactgtctgcataacgcagcgtagttttcagttcgttcatcagcaaacgcgcttcttcgtaaactacctcctgcttgctgccggcctgcagactggtaacactgctgccaaataaatggaccatcgcccccatgatcagcgccagtactgccatcgccactattaattctattaatgaaaatccggactgcttcttcatgccgccgctcctttaaatcaatcttttgtacggatatatgtttccaaagatatcgtctgtatccgaggatcactccattttacaaaaactttaacataatataattggtttacaccagtagaattattatcttgaagaaatctccccgttccccaaaaataaaatttaatgtcatcaatctcaactgattttgctttttcaggatctgttcctatattatccatcataagatcttcaatatcactactgctatgcccgtcggcagccttcaacaattcgatcttttcagccgcaatctgtacggctttttcctgtctgtctgctgataccattacaccgataccataagtatatagtgctgccaacgcagccaggccgatagccactaccaaaacaccgataatagcatcgaccagtaaaaagccctgtttatttgtgcgcaactgttgcatgaaagtcattctgacagccgtcctttactcataaaatcccatatttattatatcacatattttctttagtttataaataataactatcatatattttaaaaatacttagaaaaatatgtataaaaattgcctcttcttaattaattaagaagaggcaataaattttcagttatttctttttatctttactcttggactgcactgccgtatcgttggcattcgcaaccggcacccactggcgcagcagctcggtacaggccgccgcatagctgccggcactgccgaagccgcccgcatacgcatcctgattgtaaacagtgaggatctcgatgtcatcatagtaaatagtggcactgccgccgttatcatagacgataaagcgatatggatcgatatggcccttatcacgttcacgcacgcagtataaaccgccggcaagcatataagcgcgatattccgggcggtcattaccgacagtctgcgtgatattaaaaccccagtcaccttcatgcactctggctgtattatcttcgttaagagttatttccggatgtactttaagcgctttgatctgcttcataacacgtttcaaacgttcttccggctcgggatggctcgaaaaaataccatagcctggattaccctgttccttcgccaggtcttccagcttgttgatcgtcagcacaacactgtaaggattgtaaccggctgctacacacagattaaaaccgcccttatctgcgccgcgttcgtcggtacggctgtaaccggccgctaaagcctgcgtcgccagtcccgctatgcctaaatcacctttggtaacgatagcaaaagccaaagtcgttaaaagctgtttttctatttgatgcacagtgtgctttttgacaacgtgtgtgatctcgtggcctaatacgccagctaattctgcatcggatggcatataatcgatcagtcccttgaatacataaatgaaaccgccggggcaggccagcgcatttacttcgtcactgttcagcaccttaaagctgtattccagatcctgccgttcgctgaccttgaccagactctgaccgatccggttgacacgttcctgcaaggcataatcctgcacgacaccgtatttagcttccagctgcatcgccgtctgccggcccatctctatttcctgttccttactgatcagccccgcttctgccggcggcgtcatccccaggctgcagcagaatacaaagactattgctaaaataaagcgtttcatcttttcacaccccttgttttaacgtaaactgtcaaatcgcaccagtttctttcaacttcataatctctggctccgtataacccagttcagtcagcacctcagccgtatgttctcctaaaagcggcgcccggcgttcgatgctgcccggcatatccgacaaacggatcgccggtttgacatactgcaaagtgccgatatcctcctgtttttgtgccagcatttctgactgctgtgtcagctcgctgtttaaggcttcctccagcgaacagaccggcgtcacgcagaattcttcctcaccgatcaacgccagccattcggcctgcgttttggtctggaatactgctgccaaacgctcctgaagctcattaccatgttcaaaatcatgctgacgctcgatcagctcttcacaacccaggatttcgcacaaacgccgccagaatttaggttcgatcgtccccacgctcaaataacggccgtcctgcgtccggtaaatattataataatgtgccgtgcgcccgaaaggctgacaacctgtagccttacagccccacaagctgctgatgccggttgtctgcaaactcagtgaagtattatataaattgatatctacagcctgaccttccccggtacgttcgcgcgccagcaaagccagcagaataccgctgacagcgttcatactgctgcccagcgccgcaatctgtacctctgaaacgcaggcactgccaacgtcatccagtgaattcagacctgcaagtccgatcacattcaggtcatgggccggtttatgacggtaactgccagtctgcccaaagccggtgatcgaacaatagaccagctgcgggttgatttccctgacagttgcgtaatccaagccataacgcgccagataacccggccggaagccttctaaaaatacatctgcttctgacagaagacgtaataaaagcttacgtccgccttcagtttttatatcggccgtaatgccgcgtttattacggttaagcgccaaatgccaatagctcatacctggcagcgcttccggaaaaaatctgcgtgtatcgtcgcctgtaggcgtttccactttgataacatcggcgccgaaatctcccaataccataccgcagtactgtcccggcagccatttagaaaaatctatcaccttgataccggtcaaagccttcattcttctgacccccaatattttaactgcaaaatatcctctgaaaatatactttataatattctacattttttactgtttccctttaatttatttgctgtgaaatgctataataagttatagaagttgtctgaagaggtgtcattacatgaagatccataagctcactttagcggcgctgctggttgccatcggcaccctgagcgcgcatcttatttatataccggccggcatttccaaatgctttcccgtgcagcatgccatcaacgtgctgggagcggtgattttaggccccggctatgcgacagcagtggcctttgtcatttcctgcctgcgcaatatgttcggtaccggctcactgctggcttttcccggcagtatgatcggtgcctgtctggccggactttgctatagcaggttcggctctgtcaaagcggctatggccggcgagattttcggcaccggtattttaggcggactgactgcctgggtcatcgcccgtttcttcttgaacagcgcggcagcagcctggttctttatcccgccgttcctgatcagcactgtcggcggcagtatcatcgccggactgatcattaaaagcggtatccttgcttacgctctgccaaatctttttgctaataaaggaaataaatcaaatttatgaatattgataccatgctttcacaaattttatattgcctgagcggcttccttttcggtattttcgcctcacgctacagcgtcatcagctggcgcactctggccagtcggccgccgctgctgcagtgcgcgccctacgtgctgtttatcatcgcagcttttacgctgtttcccttctggctgattacccgtaccgaagccggcggttttatttattatgcgacgctgctgttctttttcacaaagggctaccgcgctgataagaaaggatgagccccaacatgagcgaaaataaaactaacaatactgtgatctgcgattcctgcggacacagcgccagaatccaccctcagctggccgataaatatgtacagccgatggcggaaatattcaaggttttaggtgacccgacccgcattaaaattttagaactgctgtcccacgaggatatgtgcgtcagtaatatcgccgaaatgctggatatgacccattccgctatttctcatcagcttcggcagctgcgtcatgctcagctggtcaagttttccaagtccggcaaagaagtcatttattcgctggacgacgaacacgtcctgacgctgtttgcccaggcgctggatcatgtcaaacataaggtttaagcattccgcacataaaaacggagcctgctgtgcagactccgtttttttatttttacagctgcagaaaataacgatagacagcatcgctgtctgtcaattccgggtgaaaactggtcgccagcagctttccttgccgggcagctatgatatgccctgcatactcccccaaaatttctgtctgttcgccaaccttttctatccacggagctctgataaatacaagtggcagcggttctgcccccaaagcaggcagcaactgcctgcagctgaaactgtcgagctgactgccatacgcattacgacgcacggtaatatccatcacccctaaatgcggctgttcaccgacaatattttttgccagcagaatcagccccgcacaggtcccccagacaggcagcccctctttcaccctccgttttaaaagctcagacagtcccgttcgctgtaaaagtctgctgatagcagtgctttcaccaccgggaaggatcaatctgtccacctgctctaaatcagcagccgtttttacggcaaccggcaaaacctccgtcagctgcgccagtttagtcagatgctcagaaaatgacccctgcagtgccagtacgcctacactctgcattaccagccacgctccgcaaaggtttgttccgccggtatagttttgatatcgataccgctcatggcctcgcccagatcttctgatacttcggctacgattttaggatcgttataatagctggtcgccagtacgatcgccttggcgcgcttagccggattgccgctgcggaaaatacctgacccgacaaaaacaccttcgctgccaagcttcatcatcagggccgcatctgcaggcgtagcaataccgccggcggcaaaattaactaccggcagcctgccgcccgcagcgacttctgccaccagttcatacggcgctccctgttctttggcaaagctcatccattcctcccgcggcagattctgcagcaatcttatctgtcccatcatcgtccgcatatgccgcactgcttctaccacattgccggtaccagcctctcccttcgtgcggatcattgccgctccctcaccgatacggcgcagtgcttcgcccagattgcgggcaccgcagacaaaagggatcttaaaagcatgcttgtcgagatgatataaatcatcggccggtgtcagaacttcactttcatcgatataatctattcccagcgcctccagaatctccgcttccacaatgtgaccgatcctgaccttggccattaccggaatcgatacggcgcttttgatctctttaataagcttcgggtcgctcattctggcaacgccgccatccctgcgaatatcagaaggcacacgttccaacgccataacagctactgcgcctgcagcttcggcaatttcagcctcttgggcattggtgacatccatgattacgccgcctttgagcatctgtgctaaattacgatttaaaatttgtctatctgtcatctttattcctcctaaaaacttactttcgttaacgacagtttttatgatacaataattctgtacagtaataaatagccagaaactatttttccaaaggggacagttttatgcttttgactaatcttaaacttgacaaacagaccgaaacgcctttatatacccagatcattgactctatcaaaaaccagctctacaatgaccagatcgcagccggcgacagacttccgtctgtacgcaggctctcagcagcgctgcagataagccgcacgactgtcgaaaacgcttacaatcagctggttgccgacggttatctgcaaaacgaacctaagcgcggttattttgcagcagcactgtcaggcctgagaaagcacagcgacgcgcctgtgacacaaagtatcgaaccgcctgccgtacgttataactttgccaataattatatcgatcccgcttcttttccctccgagctttggcggcgctatctgaaccgagccttaaaaaataaacacctgctgtccggctatggcgaaccgcagggtgaaacagaactgcgccgtacactggccaaatacagctcggtggcccgcggcgttatctgcagccccgaacagatcgtgatcggcgccggtgtgcaaagcctgctgcagatcctgatcgacattctacagccagatatcaccagtattgctctggaagcgccaggctttgcccaggcagagcggctttttacttcgcatggctggcaggtacggcatttcagcaccgaccagttagagacttccctgcccaggctgctttacgtcagcccttccaatccctataaaggccgctcgctctcgccgcagcaaagactgaacctgctgcgctgggcaacgcagcagcagacctatctactggaagatgactataacggcgagttccgttatttcggccggccggtatcctcactgcagggcatgagtgatggccgcacagttatctatcttggttctttttcgcggctgctgctgccttccctgcgtatttcttacatggtattgccgccgctgctgttagaccgttaccgccagctgggacacctttataaccaaacgtcttctacgatcgaacagctggcactggccgactttattgccaccggcgcactgcgccgccacgttaaacgactgcgcaggctctacagtaataaaaacacactgctgcggcaagctttaacggaaatcttcggcagcagagtcattgtacgagcctatgaatccggtctgcatctgcgcctggctgtcgtcacgcagcaaactgccgataccctgtccgaactggcactggaaaacggcgtccggatcctgccggtttacgacagcaacggtaatttaccagagatcctgctttcttttgtcggtattcaggaaaacgacatccgaccggcactgctgcaattaaaaaaagcatggttttagtatctgccaagctattgacagtattgacctgcgatgctatgctaaaaaaagagtgaagccgtaaggcgtcacaaaggggtacaccaccacgggtgtagctttttgtggcgcctttttttatttttcttcaaggagggttccctatgcaaatcaacggtcaaccaatcagcaccgctgcaggcagcaccttgtcgcaattattggcgcagcagggttttgacgttgcccgcgtcgccgtcgaactcaacggtaaaatcatctgccgcagcgatttcagcaaagtgcagctcgccgacagtgataccatcgaagttgtacagtttgtgggcggaggttaaaaatgactaaacaaatcaccaggcaacagctttcagcagcactggttgaacggcacggacaggaacgccagcagcatttgtacaccgccagtgtcggtatcgccggtttaggcgggctgggctccaacattgccgtccagctgacgcgccttggcatcggacacatgaccctcgccgactgcgatcgggtcgagatcagtaatctcaaccggcaaagctaccgactctgtgacatcggcagacctaaacccgaagccttgacagaacagctgctgcagatcaatccctatttatgctacgagccgcactttctaaagctcacgccgcagaatatcccggaaatttttgccggctgtaatatcatctgcgaagcttttgacgaccctgaacaaaaggccatgctgacagaaaccgtcctgcagcggctgccgcaggcaaaactgatcgtttgttccggcatggcgggcgctggcagcgccaatgctattactaccagccgcaggctgaaccgtttctacctgtgcggcgacggtactgccgatattgccgcggacggcggcctgctggccccgcgcgtcagcgtctgcgccgcccatgcggcgaccatggtcatgagactggcgctgggcttcaccacaccttaaacaaaaggagaattttaaactacgatgcaagaagataaacttattttaggcggctacagcttcagctcccgctttattcttggcagcggcaaatattcgcttccgctgatcaaagccgctgccgaacaggccggggcgcaaatcatcaccttagcgctgaggcgcgctcaatcgcagcaggacaatatcctcgattttattccctcaggcatcacactgctgcccaacacctcaggagcccgtactgctgaagaagcaatacgcatagccaggctggcccgtgcctgcggctgcggcgattttatcaaactggagatcatccgtgattctaaatatctgctgccggacaatcaggcaacgatcagggcaacggagatcctcgctaaagaaggctttatcgtcatgccttatatgtatcccgaccttaacaccgcccgagatctgcgtgacgcaggcgcagcctcgatcatgccccttggagcgccgatcggttccaacaaagggctggcaacccgcgattttatcaagatcattattgatgagataacactgcctgttatcgtcgacgccgggattggccgcccctcccaggcctgtgaagccatggaaatgggtgccgctgccgtcatggccaataccgccatcgctacagccggcgatatccctctgatggctgcagccttcaagcaggctgttgaagcagggcgtgccgcttacttagccggaccgggacgtgttttagagcagggtgcggctgcttcatcgcctctgacaggctttttggaagacaggtgatatgaatatgaaaatcgatcagcataccgatccgatggcttatcagccggatatggaaataacctcgtcagctattatggaacaggtgctggccgcccgtgcagcttacgacgaaactgtttatacggcggacgacgtgaaacaggccctgcttcaggatcacctgacgcctgaagcattcgccgcactgctcgcgccggccgcagcaccatttctggaacagctggcacaaagggcacaggcagaaacacgtaaacatttcggtaatgccgtcaatctgttcaccccgctttatatcgccaactactgcgaaaatcactgcatctactgcggctttaactgctacaacaatatcaaacgcgccaagcttactgccgctgaaatagaaacggaaatgcaggctattgccgctcaggggctggaagaaatcctgatcctgaccggggaaagcccgactatgagcgacgtacagtatattggtgcagcctgccggctggcccgcaaatattttcgtgttgtcggtctggaggtttaccccatggacagcagtgattatgcctatctgcatcaatgcggagctgacttcgtcaccgttttccaggaaacctacgcccctgacaaatacggccagctgcatctgggcggacgtaaacgtattttcccctatcgttttaatgcacaggaacgggctttacagggcggaatgcgcggagttggctttgccgctctgctgggactggatgattttcgccgtgacgctttggcaacaggtctgcatgcttatctgctccaacgtaaataccctcaggccgagatcgctttttcctgtccgcgcctgcgccccatcatcaacaatgagcagatcaatcccaaagatgtccatgagcggcagctgctgcagatcatctgcgcctaccgcatctttatgccctttgcctccctcactatttcctcccgtgaatgcgcccgtttccgcgataacgtagtcggacttgccgcaactaaaatttctgccggcgttgaagttggcatcggcggtcacagccagcagagcaaaggcgacgaacagttcctgatcgacgatagccgtaccgtccgtgaaatctgcgcaatgctgacgaaccgaggactgcagccggtcatgagtgattatgtctatgtttaagctgatcgccgttaccgaccaagcttcctgtcctgaaaatttttggacgcagctccagcttttagctgcttctgaaatcgacgctcttattttccgtgccaaagaattaccgccgcaggaatattatcggcaggcctcacaggtgcagaaaatctgccggacacatcagctgccgctgatcctgcatacttatcaggacatctgccgccggcttgatacgtatggactgcaggtaagctatcagcagctcctatgccagcctcagctgcgggcacaggtacaatgcctgggcgtttccatccaccatgctgacgaagcggtacgtgccgctgacttgggcgccgattatttactagccgggcatatctttgctacaagctgcaagcaggggctgcccggacgcggtcttgattttctcagcgccgtctgcgccgctacatccctgcccgtctacgctatcggcgggatcacgcctgccaatatcggacagatcaaaaaaacaggcgccgccggcgcctgtctgatgagcagcctgatgacctgcccaaaaccagcagtactggtgcaaaaactgcggcaggctttaatataaaatactaaagtaactaacctgtcactcccctcataaaaaataaaatattatctttgccatcttagatatcaaacaaatccggatatatacatttagccattttctttatcccacttccggtcttaatagcactattgtatgtataattaagagcaataccacaaatcctattatttctgacagcttttaaactctgcagcgccggaatatttttaaagtattccgcagcagcttcagggtcaccaccgctttttaccacaaatatcacatcaggatcttctgccagcagatattccagaccaacagttccaaaagggctactgggaacataagcacctaatctggtacaaatatcaccagctaatttagaatcatcataagcaaccagattttttcccaacccctcaacgatcatgaccttcggctttctacgacccctaattctactttgaacatccttaactgtttcctgcatttccgctataatttttccggcctgctcttctttgttaaaaatcattcccaaccctgcaataaacttatattccaactccaaactctcgcgatgattgcgtaaggccggagaattggcattctcaggtaaaaaagtatggatatttctctgattccaaaactctgtgcttttcagacctttattagtaaataaggattgccccgaaattatcaaatcaggcgctaaggctaaaaccgtttccgtatttaaaattatgccgctttcaaaatgtattttattatatctttcagcatatttttcttcaggcacataataaggattgccatattttacagaacaaattattttatcttctactcctaatgctaccaacgtttcattgatattttcaccaacagcgactactctttgcggtacgcgatcgtaaaagctgatcttctccccaacaatattataattttttacttctacattcctgatcatacgcttggggtacgtttcctgcacagcaattccagcaggttgggatacaaaactggtttcacgcttgatcaacatggttatcactgtcaaaagtacgactgccgcaataactgttattatttttctgttcatttttcaactgctttccgccataatttcaggtaaataccggacaaaacacccgcagtcagttgccctcctcagtaactgtgtgttccccagacgaccttgatattattttgttcaaaaaaatcaattatttttaaaatatatttgcatcttcgcttgtctgccgttctagtctgacagcaaatacctatatgaacagcatccggccgtatcctcaaaatacgctctaatttttcattaaatcctattttactgctgaattttatattctcacagccattacatgacataaaggcagccagctcaatctcctggtcagcgtaacgtgaaaaatatgcacttttattattaaaggcctttaaacaggacgcacccgcacaattttcctcagctttcaaacaacgtaaaacaactatttttttcattattcttttctccagtgctgcggcagataaattatgttgattctgccattttcagaagtatttacctttgtccgcactccatacaattcataaataaatttttcagtaagcagctgctccggcgcagcgcagccaacgatcattccgtccttaactgcaatcagcctgtcacaatacatagcggcaatattcaaatcatgaaccgcagccacaactgttagatccagaccttttactatatccattatctgcagctgatatttgatatccaaatggttagtgggttcatcaagtaccatacattcggtttgctgcgtcaacgcacgcgccaaaataacacgttgctgctcaccgcctgacagcgtactgaaactgcgtttttcaaaaccggctaaaccaaccgtttccaacgcatgtcttgcaatagcatagtcttcggcattatctctgtctaatatctttttgtgcggcgatctgcccatcagcactacctgcaaaacatcaaaatcaaaactgcaaaaattgtgctgcgccactactgccagctgcagtgccgattctctgtaactcatttcatccagacttttaccatttaaaaatatcccgccttcagttggtttttgcacacgataaacacattttaaaaacgtacttttaccactgccgttaggcccgataataccgacaaactctttatcatgtacattaaaatccatccctttcaggatttcctgattgccgataaaaactctgacggcctttgttaaaatttccattatcaattacccccaaagccgtaggtacgctttatcatcaaatagacaaaacacggagcgccgataagtgatatcaaaattcctataggcagttctgttctgggaataataatacggcacagtccatccgcaataaccaaaaaaacagcacccactaaagccgttaccggaataagctttttatgatcagtcccaatcagcatgcgcacgacatgcggtactatcagtccgacaaaacctatcataccggcagaatatactacaaatcctacaattaaagaactgataagcaaatatacctgacggtaaatatgcaggtctgtccccaaggtgactgctgcctcatctcccaacaacattaaatttaaaatgcgactttgcgaccagaagaacagtactgccaaaatcactatgggtacaataacggtaaggttatcccatttagcgccggcgaagctgcccatcatccaataggcgatcgtctgcatcccttctttattattggcaaaataaactataaaacttgaaaaagcgctgcaaacagcgctaagcgccatacctgccagtaaaagtttcattgaattactcctgccgcctaaattcgaaataaataataccgccaacgaaatacaaaaggcaccgataaaagcagcgataccgacaaaattttcacctaaagtcatacctataccaagtaaaatagctgccgtcgcgcctaaagatgctcctgaagaaatacccagaatataaggatcagccaaaggattttttactatcgcctgcataataactccacaacatgccagaccacagccaacagcagcagctaataccagccttggaagacgcagcagccacactatatcatgcgccgcgcctcttcctgctgcttcaacagacagatcgctttgcagctgatctactataacggtgtaaatctgtgccaacggcaattttactgtgccaatgcttaaagcccacaagaaagcaagcaacaagattgcgaccagcagcaaacaaataaacaagtagcccgtttcacgaaaatatttctgcatcctgattgctcctctgccaataaaaatgcgataaaagatacctgccgtaaaaacaggtatcttttatccaaaccaaaatcattttgattccagacagcttacaattcaaactctgccgaaaccataaaagttctgggaccaccaagatgcaaaacatttccggatgcgctccaataatttttattaaatacattgtagcaaattgcattcaaagttacaggagtactgttcattttggttttatattttacacctaaatccatagtaaagtaactgggcactttatatttttcattcaaaacataagaagtacctacataattaccacgcagcaaagctgaaaaagcatcactggcttcatattctactcccaaactagcagtccagtcaggtacaccgttaggacgtttaccatttgtagcagtgctgcttgttttttgttctgtattaaggtgcataaaaccgccaatcaaattccatttttctgctatagtacccgttgcagtatactcaatacctttatgtctgcgttcaccatcctgtcctcttgtataacttccatctgaattcaagatatcaataccattagctttttttatatcaaaatagctcaatttatgtaaaaagtcccctgttttcatcttaatcccaaactcagtttgtttagttttataaggatctagtgtttcgcctttgttagtgtaattaaggctacttgtagtactaacaatctcaccttcaacaaattcctctgtatgatttgcataaactgtaaaacgagggctgaaagcatagctgataccgtaagcaggagaaatatcataataatgaccggtatttttattatgtgaaccgtctgctttatagctgtctctttttatagatttaccatttaaacctataagaatattcaacttttcattatcagtactgataatatccatcacagaccagccactggtgcgatttctcgtagtataacgtgcgtcagattgaccaaaggtaggatgcgaccaattaccaggatcgcctacataaatattaccattccacccactctctgtaacagaattactcggtcccccataataatgccactgccggtctacacccaaggtataattatgttttagatcaccagttttaaaatcaccacgcagaccaatctgtgcataatctcttttctcaatcagtgaataattatcagctgtagcagtaaaatcaccagcttcattaagtaatgttttactaaatccaacataataataccagtcctgcttaaaatgcccggcattcaagaaagcacttaaatgatcattgattttttgttcatggttcaaagtagcaacaaagttagtatttttatcacggcgccataccggattaaaattgatatctccgtccggagcagttggcaaggcagaacctatataactgcttgctactgttaatccgtacggcctgccctgactgtcagtataggtataaccaaccattaaattagttttgctgtcgtcagttttctgatctaaattgatataaatatttctctgttccaagtcccagttttttatagagcgctcgccgttaacattactggcattgatacggatgccataacgattgccctcgccaaaacggcggccaatatcaacagtttcttcaaaagcgcctttagaatgccatttcaagcctatactactgttaggatcatctaaagcctgtttactgttgatatttatcgtgccgccatccgctgtatagttagatgaacccctgatacctgtagcgggtccttcgataacgtcgatcgaatcgatatagttactggattgacgtgtcatggcttgcataccgggaataccgttgaccataaaacccctgccgctctcagaaaaacctcttatattaacacaatctacagctgcatcgtaggtcttttgtacggaaggcaccaaacttagcatcttacttaaaccttcagttgaggacataaaatcttcaactgctttttcagaaattgtagtaacactgataggtgaattcatcgcatcctgctcacctaaaataccaatattactggtagcgcgtacatattcaccggcaatataacgtttcccattgactacgatctcagctaaatgaaaattttgcagatcaggcgcagaagtctcttgtgtctcttggggggggg

SEQ ID NO: 10034 - DNA, 13509 bp, Unknown
  gut microbiota DNA sequence
cataaaccactcctaaaaaatttattcttcaatttttcctggtcaagctgcccttgtttcgctcaccaggaaaaattaaaaacctgattgaaaataaaaaagccttttctgcacatgacgacagaaaaagctctcttttctatatttcgcctacctgtcattcgcaggacatccccagcgttcaaatcaggcagttcttctggctctgcttcatcgtttatctagccttcccagtttcccagtggcatttttagatttactcggcattacagctgcgggacagcacaggaatcaaacctgtttctctattaagcattgctgcacctgatcttcttttattcaaattttaaagtgccatacattattctatagagtatagaataatgtatggcactttttttgtcaagcactaactatttgattaatatataacccttttaattaaaaaatctaatttcctatattgattactatttttttattatttgcatcgacttttccagaagctccagcattgccttatgtgccattttcggagattttatttttattgcttccaaaatattttgatgaccttgtataatatgcttttgaccttgctcacaaccgtcagcatatctcatatgtgtagaagcgacaagcatcttcataattttcacgaacacttcattccctgtctgtacccaaatagtatggtgaaaatccagatttagtgaatgaaattcaaaaaaactttttgcctttttttctttagcaataatcccagctaattgaattacgaaattatcatcaaaattatctatcgctagtttcatttccatctcagaaagtgcaactaaacactgataaatattatcgctctctttttcatcagttcttcttacaacaactccataatatggtttaatttctacaaatccgtccgctgctaattttttaaaggcttcgcgtataggaagtcgcacttatgcctaattcttttgcaacatgctgctcctttaatctgacccctgattctaatttctgactaacaatcaattcaaccaatattttataagctttatcgctaagtgtttctttatccagattgtgtatattattattttcgtccataatattcttccttccttggtactaagatattagcacaattgatcaattttgtcactcaacttttccaaacgaaatataaacaaaaaatcccgcttctgtcataagaagcgggattttatttcatcaggcaaacatccagacaaaaaaaatggtgatccacccgcgactcgaacgcgggacaccctgattaaaagtcaggtgctctaccgactgagctagtggatcacatagttatcaagtttcaagccaacttgacaacgatataattataactacctttcactgttctgtcaagaaataattttccaaaatataaaaaccgtcagaaaaaatctgacggtttttatttttgatttacagcaattttttcagtacgatagtctgttcacgttccggacctacggaaacaatacccagttcgacaccggcaacctcactcagacggttcagataagttttagcctgaacaggcagctcgtcaaaggtgcggatagacgtaatatcagtcagccagccttcaaactcttcaaaaaccggttcaacctttgccagaacgttcaggctggcaggaatctgtttgatttcctgtccgtcgatcttgtagccgacgcacattttgatcttcggcattttatcgagaatatccaaacgggtcactgccaggcagtccaggctgttcagacgtgcggaatatttgagcatgaaagcatcaagccagccacagcggcggggacgtccggtaacggtaccgtattcatggcctgtttcacggatctgatgcccgggtccgtcagtatcaagcagctcagtaacaaagggaccttcgccgacgcgtgtcgtataagccttgactacgcccaccacatggtcgatataacgggggccgatgccgctgccggtgctggcattgccggcagtcgggttcgagctggtaacatacggataagtaccatgatcgatatcaaggaaagtagcctgcgcgccttcaaacagcacgtttttaccctcgctgaaaatttcgtctaaaactacgccggtatcggcaatatacggccgcagctcttcggcataagccaaaaattcctgcagcatagtttcataatcaaaaggttcgccgccataaattttagtaataatggcatttttggcttccaggttgattttcagcttttctgcaaaagtatcgggttccatcaaatcacagatgcggatgccggtacgggcaaccttatccatatagcaggggccaataccgcctttggtcgtaccgatcttattacagcccaaagctgcttcctgcagttcatccagacgggcatggtaaggcagcaccacatgcgcacggtcagaaatgaccagattgtcgcagctgatgcctttagccttcatatcagcaatttcatgcagaactacgccggggttgataacgacgccgttacccagcacattagtcttatcactgtacaaaacaccggagggaagcagacgcagtttataggaaacgtcattgacgactaccgtatgacctgcgttggaaccgccggaataacgtacgacggcatcggctttctgtgccaaataatcaacaatcttacctttaccttcatcgccccattgggcaccaataactacaacagatgacatgtgagcatctccttatctaaatcataatccgaagcgggacataatcaaatctacatgacgcagcatgggtttgggatcgaagcaggcttcgatttcttctttggagagatatttttggatatccgcatccatttccacgttggtcttaaaatcagcgccttcaagccagcgggccatagcgttgcgctgcacccatttataagcgtcttcacgcagcacgcccttgctgaccagtgcgatcagcagattctggctgaagatcaggccgccggttttgttcaggttcgccatcatcgcttccggataaaccagcagcttgtcgacgataccggtaaatttacgcagcatatgatccagcgcgatagtagcatccggtaaaatcacacgttccacagaagagtgggaaatatcacgttcgtgccacaaggcgacatcttccagcgcagcaacggcataccctctcagcaaacgcgccataccggagattttttcgcaggtgatgggattacgtttatgcggcatcgccgaggagcctttttgcccgggagcaaaatattcttcagcttcacgaatgtccgtacgctgcagattacggatttccgtagccattttatcaagagaagaaccaatgatcgccaaagtagtcagaaaatcggcatggcggtcgcgctgaatgacctgggtagccagacgggcagccttgatacctaatttttcacaaacatattcttcaataaacgggtcaatattggagtaagtgccgactgcgcccgaaagcttaccgaccgcaataaaatcacgcgcctgcttcaaccgttcgatattgcgctctgtctcatccatccacagcgcaaacttcagcccgaaggtcatcggctcggcatggatgccatgagtacgaccgatcataatcgtatgcttgtgttcagcggcacggcgtttcaggacagcatggaatttttccagatgactcagtaaaaggtcggcagactgtttcatcatcacacccaaagcggtgtccttgacatcgctggaggtcaggcctttatggatgtatttggaagcatcgcccacatattcggccacatttgtcagaaaagcaatgatgtcatggttggtgacagcttcgatttctttgatgcgttcgatgcggaaatcagctttagtctgaatatccttcaatgcgtcatcaggaacgatgcccagtttgttcatcgcctcgcaggccagaatttctacctgcagcattgttcggaattcgttttccaaagtccagatatgacccatctcgggatgagtataacgttcgatcatttttttgtttccccccgtaaaatcggtgttttttgcaataagaataggaagaaggcctgcttgcgttcttcctctcttataaataaacttttttatcctctcatatcataacattttcagttcttcactgcaatactactgaacattttttgcaaatttatttaaaacattcgtaaaataaacaacagcgtgaaaacctgttatcacaggcgttcacgctgtttttctttaaagcgctccattatttatgacaaaaataaaaataccagaccacacaaaataatgaccagtccactgatacccatcagaaaacgatacccctgatcgccgaaaaaatcatgtaccagcgtatcaaaggcaaacgggcgcacccgcctgtggtcaaattcgcagacccaacgccagtttaaaagcgcgccgataaaaatcagcaggccgcagccgatgatagtaaactgccaatgcttctgcaaaaaagccatcagctgctccatccatatttccacgcgccgcctccttctcatctgctcacaggtctgagtttactccttacgcttactgagtcccacaaatttggtatattgtttgtggaagaacagattgaccgtatcgacagggccgttacggtgcttagcgatgatcagttcggtaatatttttattctccgtttccggattatagtaatcttcacgatataaaaaggctacaatatccgcatcctgctccaaagaaccagactcacgcaggtcagacagcatcggacgtttgacctgacgcgcttcgacgctgcggctcagctgcgataaagcaatgaccggaacatcaagctcacgggccagcgctttcaacgaacgtgagatctctgaaacctcctgctgccggtcaccgttgttgttctttttaccgctgccctgcatcagctgcagataatcgactacgatcagatcaagaccgtgttcggctttcagccggcgggcgcgcgacctcatatccatggcagtgatacctgctgtatcgtcgatatagatattagcactggaaagcgtatctgccgtattgatgagcatcgcccaatcttcatcacgcagctcgccgatacgcagccgctgcgaatcaatgttggcttcggcgcagagcatacgctgtacaagctgctccttgctcatttccaggctgaaaaaagcaactgttttcggagctccgccaacctttttggcagctcggatcgccacattctgtaccacattgagcgcaaaagcagttttacccatggaaggacgggccgcaaggatgataaaatcactgccatgcaggccggaggtcagattatcaagatcttcaaagcctgtaggcagtccggtaagaccattcttattgcccatcagcgcttcgatactcttaaaagaatcaagaacgatctcattgatcggcgtaaaatcagctgtcttcttccggttggaaatctccagaatcttgctttcagcactgtcgatgatgtttttcacatcatcattagcctcataacccatcgaagcgatttgcgtcgatacggaaaccagctgacgcagaatcgatttttcttcgataatactcgcatgataggttacgttggccgcagtcggcacagcattagccagcgaagtgacataagcgataccgcccacatcctccagcttgttgtcacgcttcagaatctccgtcaccgtgatcatatccacagcttcgttcttattgtaaagctccagcatagcgttaaaaatgacgcggtgcgcctcacggtaaaaatcagtatcccgcaggatctccatgaccttggggatagcctctttctcgatcagcatcgcgcccagcactgactgctcggcttctatattttgcggtggtactctgtcctgcataaccttccctgtctttcgcttattccgcttcaactactacggcaaattccgcagcaatctcagggtgcagtttagctacagctgtataattgcctaaacccttaacaggtgttttcagttctatcttccggcggtcgatatccagcttggtctgttcgatcaatgcttccgccacgtctttagacgcaaccgagccgaacattttcccattatcaccgacacgtaccttcaaggtaacggtcactttttcgatctgagctgccagaacggtagcttcatctttcttctgtgcggcacgacgggcagcattggcctgatcctgcttggcctgatttaaattagccgcactggcttctttcgctaatttgcgaggcagcagatagttgcggccataaccttcggccgtttctacgatatcgccttttttacctaaacttttaatatcttgcagtaagatcactttcattgttatcaatctcctctaactgtttttttgccaaagagatgatctgcggcatgatatccacagccctcttattgtcaagctgtacgccggccacagtctgatgaccgccgccgcccagctcttccataatgatctgtacgttgaccgtaccgtcgctgcgggcactgatgcccagcgaaccgtcaacatattccacgataacgacactgacataaataccgctgatggcaaccatcgtgtcggcagtctgagccgctatgactgatgattttgcttctttgggagcctgttcataaacggaaacgatcagtcccggttccgggctttctgcttcggcaatcagccgcgaacggatctggaaggtttccatatcgtccttgaacagctgccttaccacagtcgggtcagccccgctgcggcgcagtaaagctgccgcttcaaaggtgcgctcaccggtctgtacggcaaaatttttcgtatcgacaacgatgcccgcataaagcgcggtcgcttcgcctttagtaaattccagacggtcattaaaatagcctacaagctccgtcaccagttcgctggtcgaggaagaagaaggctccatatattgcagcaccgtttctttgatggcgtcttccgcacggcgatgatggtcgataatgatccgtttcgggatcgcttccataacctctttgcttgcgcacagcatcggccggtgatggtcgaccagaaacagcaggctgccgggcgtaatatgagccattgcctccggtccttccagcatcagttccaggtactgttcatcatcctggatcagcttcagttcatcacgctgcaacatttccttgatcttatccagtgcgtcagtttcgccgctgacaacgatataagtttccttctgcagtgacagcgccattttcgctacaccgatagcactgccgatcgaatcaaagtcctccatcatatgccccataacgaaaaccttatctgcggcaatgatctgttcatggatcgtatgcgctacgatacgtgcgcgcacgcgtgtacttttagcagttacggtagtcgtgccgccaaagaactgtgtcccgccgtctacggctacgaccacctggtcgcctccgcgccccagcgccagatccaatgctttgactgcgttctggctcagttcttccagattgtcgccttcgcaggcaataccaatgctcactgtcggagtgatcttattgccgacatggatctcacgtacactgtctaaaacggggaatttctgctccattaaatcacgcaggaccgcctgattaaaaccaatcagacacaattctttattagaacggctgataaagccgttttcttcctcggcccacttgctcagtacttcattgacctcgccgctgatattggcgcgggtcgtttcgctcatacccttcatcacgtcttcataattatcaaacctgacgtaggccagacacagcttctcattatcatatttctggcgcagcagctcaaaatcagtcacgtcgctcagataaaccatcaggcccgtgccttttttctcacctttttccgatgtctgcacccggcaatgcttcaaattatagtagcggtcctcgatctggatcaggcgttcgccgtccttcacgctcagcgtgtcgaacgcattggccggcagcggcagaacatcttccggacgtttgccctccagatttttagtacccacatatttactgaacagctcatttttccactgcagtttaccgtctttggcaaaaacagccatcccgatatccagattctgaacggcatgatgattagtacgctcaatattacgcactaccgtatccagatagctgttaaagcgtacttccttactgcgcagactttttttgttgtaataatacagcaggccgatcagcagaatacataccggtatccataacggttcgtaaaaaccgataatgaacgtcagaaaaacgatcagtatcagcggtatgatatcactgcgcgaatcccaaattttgttaaacatatactcgcctcatctctatgcgcgcttggaagtccttttcccgctgagattacggaaatcaaataccaggtcaaacgcgcccacaaacacaataatctgagaaaatatctggacaaaaaacaacagtgccaccgatacagttccccaccatttcggtttattgtttttttccagccaccaatagatcaaagcaataccctgcaatacaaagaaaacactggttatcacctgcagattaactgagatatggtacatcaggctttccggatactgaacataataggaaaccatcagcagcgaaataccataaggccacagcagccagccaggtacgttccattgcgtaaaaggaggaaactcctcaaaagcagctcccagcttactcaaaattttacgtgcggccagataattgacaaaggcaataataggagcgcacaggaaaaaagctcccggcatgatcagtcgcatcatccgaagcatctcggcattgcttttaacggctgcgtcgatctcggtctggctcattcccatggactggtaatagcctacgctctcacgggcagcctcttccaatgaagtaaacatcatatcgaccggctggatacccatgatatacagcgcaatcaaaaaactggcaccgatagaaatcaggcaggccaccgagctgatcagcatcagcttgaaaggcttatacccgcggcgcatacactcgcccaaggtcagccccactaaactaaaagcagccagcagcgaaaaagcatgcagcgggctgatcagaactgctacggcaatatcagctactatcagcgtcataacgctccagcgcagtccgttgcgcataccgcagatagcgataggcaggggccataaaaaattgataaagctgccgatgaccggcacatacatgctgataatagcaaaaactatggcgatagcggccaaaatgcccgcttctaccatggcagaagttttacgaatcacttaatttcctccttcgtagctatacatacatatatatagctaggtatgtatattctacaccgaaaacggcaaaaacgcaaaaaataagtggcgctgcccaaagcagcgtcaccttataaaacggttttatttccattcagttttagcttttaccagaacgccatcggcctgaggcaccagctcaaccaaatgtactacatcaaacagtgaacgatccaggacttttttctgctgcagcctgctttgctgcagcgcagccgtaaaatcgacactgatactgccctgctcatacttggtcgtaacactatccgcatcgatatccaccctgtcgatcaccagatctacgatagccatgatcagcttgctccccatcagctccactaccagctgcgcaaaatcattgtctgcgacagcaaaatcgaccagcttcagccttgtaaaagcagattcggcatcgacattaaacacctcgacctgcagcagcagctccaaagtgccgtgcgttgtatgctgcagctccagccgcagcagatcaggctcggcataagccagagactgtaatgtaaattcgctgccggccaggctttgacgcacataatccacgatttcatcataagggactaccagaccgccctggctcagctgctcccatttctgcgccgagaaccacagctgccccttatctttcaacggccgcagtctttcactgaccgtcgcgattttttctgataaaaccgtttccgcccgatcagcatgtttttctattttagaaaacaaatttcctgatttgtttcgcaaagcttccttcagctcacgcagttcaaaacgtttgctttcatcgcccaaaggcgtgtctttgcaatccattttttcaaaatcttcactgtgcttcattccctctttacgggcgctttcataaacttcccggaattcagcaatatcttcgggacgcccggccttaatccaggcattagcggccttgcctacagcataagtcaccgatacacctaccggcacctggatcggcgctattggaatcaacgttaccagtgtctgaccgacaaaagtcgcccccagtgaagtcaaaagtcccaaaacagcactttcttccagctttactccgcgcagctcgcccaggcgcataatcatatagacctcgttagccatcaaagccattgttcccaccaaaggcgcaactacaatcacaccggcacgggctgctccccagcggcagatcttttcagcttcccactctatatcgacaggctgtaattctttttcttcggtcatggtatcacctctttgcgattgttcctgctgttataattcgcttttgcgtcaacttatcctgcaatgttactaaaatatcacaaagccgctatttgtaaattttcattaaaatattatccaattataatattttttgatatctggatatataaaaacaaccaactttactggatagaatatctatcaggctgccctctgaatgggtttagacagtttttataatcatccggccctttaaccatttattttttattgttacttatcaatttcgacccgttcacctaacaaacatccatatttttcaaacaaatatccagcttatataattaggttaaataaactcaggcagatatttattgccgcttaaatcaaaaaactatattttattgaggagtgttgtaaatgaaaattcgtgttttagtagctaaaccaggccttgacggacatgaccgcggcgccaaagtcgtcgcccgcgccttacgtgacgcaggctttgaagttatttataccgggatcaggctgaccccggaacaaatcgctgaagcagctctgcaggatgatgtcaaggtcgtcgccctgagcctgctttccggagcacataacaccctgttcccgaaagtggtcgaattaatgcgggccaaaggtttaaacgatgtactggttatcggcggcggcgttatccctgatactgatattcccggtttaaaagccgccggtgtagccgaagtctttactccaggtactcctactggtaatatcgtcgattttatcaacgccaatacccactgaccgcagccggtaaaacagttctcttaaatcacactggctttaacagccaaccattcaggaggtgtttcccttgtcaacccaggtaaaaatagaaaaaatgctgcagaaaacagctgtagttttagcggcaggcggggaaaaacgtatcgccaaacagcacgcagccggtaaaatgacagcacgggaaaggatcgcctcactgctggacgaaaactcctttgttgaattagaccgtttcgtcaaacaccgctgtactgatttcggccagtcccaaaaggcgctgcccggcgaaggagtcacaaccggctatggtactgtttccggccgtctggtctacgtttttgcccaggattttacagtcgaaggcggttccttaggcgaaatgcacgccgcaaaaatcgtcaaagtccagcgcctggctctgaaaatgggtgcgccgcttgtcggacttaacgattccggcggagcacgtattcaggaagctgtcgatgccatgtccggctatggcaagatttttttcaataatactctggcctcgggagtaatcccgcagatctcggccattatgggaccttcagccggcggcgcagtctacagtccggcactgacagactttatttatatggtcagaaacacctctaaaatgttcatcaccggcccagcagttgttcaagccgtcaccggcgaagatgtgacccaggaacaattaggcggcgccatgacccataacggtacttccggcgtagcgcattttgccgctgaaaatgatatcgactgtctgcggcagatccgttatcttctcagctttctgcctgcaaataatctggaagcggtgcctgtcgtcgacacaggagatgctccacagcggatcgacgccagactgaataccctgctgccggacaattccaatcaggcctacgatatgaaaaccgttatcacatcaattgttgacaacggcgaattttatgaatcacaacaatactgggctgcaaatatcatcacctgttttgcccgtatggacggacagactgttgggatcattgccaaccagcctaaaatcatggcaggctgccttgatatcaacgcctctgataaagcggcacgctttatccgtttctgcgatgccttcaatatccccctgctgaatctggtagatgttcccgggttcctgccgggctgtaatcaggaatacggcggtattatccgccacggagccaaaatgctgtatgcttattccgaagctactgtacccaagatcacagtcattacccgtaaagcctacggcggttcatacatcgccatgtgctcacaggacctccgtgccgatcaggtcatagcctggccaactgcggaggtagcagtaatgggtcctgccggtgcagctaatatcattttcaaaaacgaccctgatgtaaaagccaaaactgaggaatacatcgacaactttgccacaccatatcaggctgcgatgcgaggtatggtcgatctggtcatcgaaccgcagaacacccgtcccactgtcatcaacgccctgcaaatgctgcagggcaaacgcgagacccgccctgcgaaacgtcacggaaatattcctttatagtcagctgtacatcctttgaaaataaaatagcttcgtttgtaaaccgcaaaataatgtcctttaacaggtaacctcatacacctttaagcggcacattatctttgcggtattttttacccataaattgtcctgctgtactgtctgttgccagcttcagcaaaactgttattttctggagagaaggagttgataatcatgaccccggacgtacaatttttattactgcttgctgttattgctttacttttcattaccgaactgattccgcttgccgtcacatcgatcggcggcgccgttgcatgcggcctgttaggcttcatcacacccaaagccgtcttttccggcctttccaattcttcagtactcctatttgccggcatgttcgtcgtcggtg

SEQ ID NO: 10035 - DNA, 28792 bp, Unknown
  gut microbiota DNA sequence
cccgcttgccgtcacatcgatcggcggcgccgttgcctgcggcctgttaggcttcatcacacccaaagccgtcttttccggcctttccaattcttcagtactcctatttgccggcatgttcgtcgtcggtgcagcaatgttccataccgggctggcgcagaacatcgggaaaaaagtagtctcggtattcgggaccagcgaaaaaagcctgatgctgggtatcatgatcatcggcgctgtcctgtcaggttttttgtctaataccggcacgacggcctgcctgatgcctgttgtactgggcatctgctccgctgccaggcttccggcttccaggcagctgctgccgctggcattcggcatcgctttcggaggcatcttcactattatcggtacaccgccgaacctgatcgcttccaacgctttagtcgaagcaggcttcaggccttttggattttttgaatttgcctgggtcggtattcctatcgctatcgccggcaccctgtacatgatgttcatcggctaccgttttcttcctaaagtcaatgccgccgccgatatagaaatcgaacaggaatttgacgtcagtaatgacaatcctcaaaaacagcttatttccggtctgatccttttaggcgtagtcatcgttatggctttgaacctgaaattcattaccctggaaatggcggctgttatcggcgcgctcgtcgccgtattgaccggctgcctgactgaaaagcaagcttatgccagcatcgactgggtttcaatcttcctgttcgccggtatgatctccgtttcatccgccatggataaaaccggtgccggcaaactgctggctaaattctgcgtcgatctgctcggcggcacgccttcacccttattcgtagccgcattgttatttttagtatccagctttttgacacaatttatgtccaacacagcaacagcaacattactctgccccatcggagttgctattgcccaacagataggcgcttcacctcacgccgtcgtcatgtcgatcaccatcggcatcgcctgcgcctatgccactcctgtcggtacaccgcctaacacactggttttaggacctggcggctatcgtttcatggattatgttaaagttggcactcctttgattttcgtaagttttatcgtttccatgatcgttatccctatcgtctggcctttctttaaataaactttcacagcacctgttcagcagcaggtgctgtttattttatagcaaacctttttttgtctcccgctccgtgatacaataataaaaaagtctgaaaggagcggtcggtttatggcaaaagccgtctgcgggcgctttgcccctacgcccagcggcagaatgcacctcggcaatgttttctgcgccctgctggcctggctgtcagcaaaaaaacagggcggaaccatcacactgcgtatcgaagaccttgacaagccccgctgccctgccggcagcgacatgcttttagaagatgatctgcactggctgggcctggaatgggataccggaggcagcgccggcggaaaagatgcaccctattatcaaagccgccgttttgacatctatgccgcctattttgcacagctgcaaaaactgggactgacttacccctgcttttgcaaccgggctgatctgcacgccgcccaggcaccgcatctaagtgacggacgcattctatacgccggtacctgccgccatttgacagccgaacagactgctgccaaagcccgcaccaaagacccggcacagcggctgcggcttcctgatactgctgtcagctttatcgacggacattatggtccgtatacgcagaacctggctgctgaatgcggcgatatcatcctgcggcgcagcgacggtgtttacgcctatcaactggcagtggtcgtcgacgatgccctgatgggcatcacggaaattgtccgcggctgcgacctgctcagttccacaccgcagcagctttatctgtaccagctgctgggctttaccccaccggcttttattcatgtaccactgctgatggctgcagatggcagacgtctttccaaacgcgaccgtgatctggatctcggctttcttcgtcagcattttgtcagtcctcagccgctcatcggcctccttgccttcctggccggactgctgccggcacctgaaccagtcagtgccaaagaactgcttccattgttcagctggcagaaagtgccccataacaatatcatcgtcagtgaaaagcttttaaatttatttaaactataaaggagcaacgctatgctttatgtagttctcgcaacctttgccgccggtatggcgacagaatattttttaggcaaccgctggataggttttttcgcagtcggcgtaccggcttgcctgtattttttctatctggattatcaaaaacgtgcggccgcaaaaaaagaagaagaagaaaagcgtgccaaacgtaaagaacgtaaacaacagcataaatgataaaaagaacgcattggataatgcgttctttttatttatcactgttattattaaatattatccgcagcgcgttttccgtcgccagacaggaaccaagctcactgctgccatcctctagtgtgccgtggtaatcgctgccgccggtaagaaataagccgtattgaccagccatctgtctgatagcttctttatcagcctctgtatttttacggtgttccagctcaataccctttaagccatacccgaccagttcaggcacaagctcaagattttgctgctgccccggatgggccaatactgccaatcctccggcttctgtaatcacacgcacggcagcggcagcatccaggtactcaatatcgaaatcacaataaccgccgtttttaaatgtttcatgataaaaagtgccaaacatttcttctacctgctccgtcgccaccaaatattccataagatgctgtttgtaaataacgtgtccggcccgtttcacaaaattctgaggacggatacgaaaaccattctctgccagaagtgcgatctgacgcaggctattagcctgcctgcgttccagcagcggacggcagaaggccgtcactgatctcgtgtcacgcatggcataacctaaaatatgcgccttccgctgcttttgaaaatcataggccgaaatctcgattccaggcatcaccttcaaagcagtgaccggcggaatatcaccgcagcgcggcacccggtcatggtcggtaatggcgatatgggtcagccccttgctcaccgcctgctggatcagttcaatcaccgtagcgctgccgtcagaatatgcagaatgtaagtgcagatcaccgcgcatcaggcaaaactcccttcggacatattgaagaccttatcacaaacgccttccataaattccagatcatggaaaattcccagcatactggtcttttcttcttttaactgctgcagaatatcctttactaaaactttagtcttattatccagagacgccgttggttcgtccagcagcatcagccgcggccgtttgaccatagcgtgcgccagattcaaacgcagcctttcacctccggaaaaggtctgcggataaatatcccacaattcctcctgcaaacgaaaataatccagcatttccttagcacggcgctcggcctcgccggcggcgacgccgatctccagcagtgccgacataacatgctcttttgccgtcgtacgcggcatcacattcagaaactgagccacataaccgatttcatagcggcgcagctgcagcatctgccgctcgtcggcctgagccagatcaataggcccaaaagcctgactgttataaacgatcgtaccctgcagcggcagataggtacggttgatacatttaagaatgctcgacttaccggcgccggaacgccccactataccgataaattcaccctcatgcagcgtgaaaccgatgtcgcggcagctcttgatagttttgcccaaattatgcagataaaaatttttcgttagcccttcaatggcaagtatctccataactcctcctaaaccctgtattccaactgtgaaataaccttgccgtcaaccaaagcgtgagtaataacaggataaccgtctaaaatcttgataatcagcagatcggccttttttcccaccgccaacgagccataatcgttatcgatacacatcgctctggccggattcagcgtcagcttattgacgatttccggcagcggcacgccgtgctgcttatgcataatgaaaatactgtgcagcattgccgcaggataatagtcggagcagagaatatcggcgcagccttccttgaccgcttctgccgcagatagattgccggtatgtgaaccgcccagcagaatattaggggctccgaccactgtagccaaacctaactgctgtgcttgcctggcaacgtcgatcgtaattggaaattcactgatagcaacgcccagctccttatttacctgcagcttggcagcagtatcgtcatcatgtgacgctgcggggattccgttagccctggccagttccgccagctcatgcagctgttcaaagctcagggtccgtttgtttttatgatgttccagcacgccctcaaaccccagcgttgttacagtttcgccgtgataagcggtaatagttttgcggtaagtctcgatattgcggtactgcccctgcccgggcgtatggtccataaacgatatctcatgcactgttttttcccgcagcattttgctgacgatatcaaacgcttccagattatcgatctcgatccgcaaatgcagacgatgatgaataaggtgatgacgctcgtggatattattgatcagctcagccagcttcagcacatttttcttatagcgcagctccgaagccccaaaataatcgtcctggtagagtgatatcgaatggtagatcgttgtgatcccctgattgatcaactgccgctcgatctccttcagtcccatctcgaaatccatcacgctggtaggacgcggctgaatgatctgttcgatcttgtcagaatgagtatcgataaaaccggggcagacataccttccgtgcgcatcgattttttcatcatattgccccagatctataacatcctctgcaagaatatcgataatacggtcattttccaacaccagcactttattttccaacacctcggcaggtgtgatcagtttaccattataaatagctgttttcatagtcatcctttcccgcggcagcgccgctgttagagcaatgagtgtaccagctgctgtgtataagcatgctgcggatcctctaaaatctgatcggtaagaccgctttccactacctggccatccagcatgaccatcgtcctgtctgccagcatcctgatcactgccagatcatgcgaaaccagaatgatcgaaatattataacggctgcgtattttcctgatcaggtctaaaaccttggcctgtaccgaaagatccagcccggtggtgacctcatccaaaagcagcagccccggattattggccagcgccttggagatctgtacccgctgctgcataccgcccgaaaaatttctgggcggttccgcacgcctggaagtcagtatctccaccgcttccaaaagctccactgttctgccgtccataaaagctacattacggttgccggcggcaatgatcttttcagcaacattggcagcagatgaataatccatacgcagacccagcagaggattctgataaaccatccccatcagatgatttttgatataccggcgctgctgtgaactggcgccgaaaatattgacctttccatcctgatactgcttcagaaaggcacttcctcctgttacttcatgatcgaaatacagacttttcatcacgctggattttcctgagcctgattcaccgacaatgcctaatacttctccgggataaacgtcaaaggatacattgcgtacagcccagacagtaccgcagcggggacagcgattcttttccagcggctgccggctgctgcagtactcgcagccgttgccataacgcagcagcagatcgcgcacctgtaaaacggcctcttctttattcatcatatctgccgcccctttccgcgcacagcatcctgctcttttacatattcacggaatttctcagattctttgactctggaagtggtttccatttcacagcaccccgccagcaccgtgatcttctccctcagcagcggctgcaggcaacagggcagatgctcagcgtgataacgatgcagcgctacacattcgcggcacttcccgtgccattcgcagcggctgtaaggacaactgcagtccagcacctcctggctctccagcaaggccctgttttttaatgtatcttcataatattcctctttagtacgcatcagcagtccgcctccttgcgcagccttcgtttagagcagtaacctgtatccgagcactgatagctgacagcgcctgtctctctgtcgataagctcgtcaaaataaacattttccgctccacataaacggcagcggcgaccttccatatgttcgatctcaaaaggcacatcgtcaaacgccagcgacacgacctttgtatgaggcgggatcgcataaattttcttctcgcgccctgctccgaataaatacagacattccgactcatgcagtctgggattgtcatatttcgggatcggactggggttcataacatatctgtcctcaacagtaaccggatattccgtagcaatcgtgaccttgccatatttcataatgctttcataaagctgcagccaaatgcccgtgtaatctgcttctgcatgcatcagcttcgttgcttcctcgcttggttctatcacccgcagcggttccggcaaaggcacctgaaaaaccagcagctggtcattacgcagcggttcctcgggtatacgatgacgcgtctggatcagggttgcttccgtactgtctgtagtagtcgccacatcgctgcacaaattgataaatttcttgatattgacagcgttgacactatcgtcgctgccctgatcgataaccttcaaaacatcacgcgggccgatcagcgacaaagtgagctgaatgcctcccgtcccccagccgcgccctatcggaagttcgcgcgagccgaacggcacctgataaccgggtacagccaccgcctttaaaatactgcgcctgatttcccgtttagaaccttcgtccaggaaagcaaaattatattcaggattcatgctccggctcctttctggtcttgcgtacgctgtccagcttagactggaaggtaacgtaatgcggcagcttcaaatgagaaataaagccgttcatctccagcgaatcaccatgcagcagtacaaattcttcatcctgtgcaggagtaggcccttctgtttccaacgacgcgtccagcaccgccatcgagatcgccttgttttcgttccgccccaaaactgcgccgtagcctactgccaatttcagtttcttatcgtcatcctcaggaataaagccctctacttccgtcagcaaaatttcaccgatgcagatgctttccgtctcgtcaaacaaatatggtacttccagctccacatagccgcagcgcagttcacctacagttggatgtacggcgccataaccacggatcgaactatacgccagtccgccgataaagcccccgtcagcccgggtcagagtctgcagacgcgcgcttctgtcagcagggaattccagaacattcttcgttacatccacaggttccatatcatcgatctcacagctgtcgatcaatccctctgccttcagatactccgaaacccgtggcagctttactaccggcacaggcttcgcctctttaaggcagcactgacgccgggcgcataattccactgccgacggctgtttaaattcaatcaaccgatgtgtataatcataggtcgctcccagaatctgtccgccctgaatatccttaaaggctgccgagatcctgcggacagcgcgcatctctgtcccgctggccggcagggtataataattgcggctcaaagtcgaacgataagcccgcagcaaaaacactgcttcttcgatactgccttccgcctgtttcaaagccagtgccgcataagccggcgcatataagccagactcgctcattacccgatccactaaaaggcccagctttttttctatcgcttctacttccagctctttaaaagtactgccgcgcatacaatgcagcagcctgatactttcctctattgcttcctgaccgccggaaactgccacataagccatctgttcacctgctttctattcttgttttacgtggtatacccatcaggcagccccgctgatccagcacaaaaaaatcaaggcccagcggatactcatattcctgctcatcacgtttccccaaagccgcctgcagttccgggcacataatgatttcctggacagccttgatcccgggcccgctgatccgctgcagcttgcctgcctgcagatccgctgtgcacaaaatgacagtcgcgcttttatgaggatcgcgcagtgtaccgcacttagcagcctgtactgcttcctgccaatccgcattctccgtcacaaagatataatccgctttactcacagcagccgttttagccagggtcagctcagtaattttctctgccagcgcaggagaaccgcagactgcaaaactgacctcattgtccaaaagcactgccgccacagtcagcggcatggcataagctccacccagcttccgggccaaaggtcccagctcaacgatgcgtcccggattgctcagcgcttccagcagcagacgaaaagcagcctgagtgtcatatacaaaatcaaattcataagctttctgcattatctttactcctgatccatagtctgaaaatcaaccatcgttttggcatacaatccgttttccagttcctgttcccgctgctgccgcatagacagccgctgcagcactgtcttcagttcatccagttcgctgacctgcctgttaaaagcagcgtcgatcaccgccatggagctgactttgtcaaaatcatcacccagcacaacagctgtccctttagtgccacccagttccacaactgtatcgcacaccagcgcctcacccagataaaacaagctattttttaccggctcacgcagcttgatcatcgccagtgttttagcaggcgccttcacaacgctgacaccatatttttcagccagcggctgagccagctcacgcagcatactgccatcggcggccgccataatccggaacaactcttttttctccataacatcaccctttatctgtcagatatagtttttcttgattgttgtaaaaaccagctccacgcaataggcaaatacaaaaaccagtacgatcgccagccctgcggccccaaactgatagctctggatattattcgcaatcgcaaagccgattccgccggcaccgatcatccccaggatcgctgattcagaaaaatttatttcaaaacgcagaccagtccaggccatgatctgcgaagctgccgcaggcagtatcgccgacaaaaaaatatgcagcttactggctcctgttgcctcaagcgcctcgatcacttcctcaggcacatcttcaaagctttgcgtaaaagccctggcaaaaaaagctgtggcatgcacacacagtcctacgatgcccgcagcaggccccaaccccagacaaaccagtgccagcaatacccaaaccggtgtcggtacggcacgcagaaacgtaaagaacgcgctcagagcatacgtcacaaatttatttttcatcaggttacgggcaccaaaggcagctaataccaatcccagcagaacgctgtaaatagttgccagcacagttattgccactgtctgggaaaaggcctccagcgtcagcccaaaatcgtgaaaatccagcagcgccagcaaaccaaaggtcttccccagatcaggcagcctggaaataagcttcagccaatccaactgcagataatataacgccactatcgaaacgactgttacagctgctaaaaaccagcgcagctcactatcctgcccgctgcgggcaacacggatcctgccgttactgaactcaagacactgcaccctcgcctgtacaaaagtctgctccattttatgtcaacacctttcttcgcagataattagttaaaaattccaccataatgaccatcgccgcaataaccagaataattcctgccgcgccggcataattaaacgacttgatataggaaaacagcaccagcccgatccccccgccgcctaccattcccacaatagtcgacgcgcgtatattaagttcgatgcagtacaggaaccaggcgataaactgtgtcagacaggtcggtacgataccctgacagaccttctgccaaaacgtaccgccgcaggccgtcagcccttccattgcatcacaggatacctcgtcgatcacttcaataaacgctcttgtcataaaggcaaaggtcgaaatcagcaaagcaataaaaccaaccccggtaccaatacccagtgacgaaaaaagaataaaagcccagaccagtgtcgggatattcctcagaaaagtggcaaacccccggatcgttctggccagtcccttccatggtgataaagaagtgctgccgaacacagcgaaaagaaaagcaaacactgccgcaacgaagctggacgaaaccgccaacgcaaaagttacaagaatcgattctactactaccggcgaagcattgaagcgtggcggcaggaaatcctgaaacagaaatttccagaattctccctgttcccaaagcacctccagcggattaaaacgggaaatataagtcgccaggcagaacaaaaccagcacgaccactaaaaaccaggtataaacctgtttttcacggggattcattatacttattttttcaggcataattttcaccctgcttaatgatcagattttccatcgaagtattataaattttctctatcactgcattattcagctgctgcggggttccgtcaaaaatcatttctccttttgccagaccgatgatgcgcgtagcataacgcatggccacatccagctgatgcagattgacgatacaggcaatattacggcgctgcgtcatctgatagatcagatccataatgattttagacgcattagggtccagtgaagcgatcggttcgtcacaaagaagcagcttcggttcctgcataatcgccctggcaatgcctacgcgctgtttctgaccgcccgacagatcactggcacggttatataaacgatcgcccatctcgatttcctgcagcaagtcaatcgccttacgtttgtcctcttccgtataattacccagcatcccgtccaacgccgacatataacccaagcgcccatgcagcacgttctgcattaccgacagccgctgcacaagattataatgctgaaagatcatcccgactttacgccgcagcagccgcagctttttgccggacgcaccggtaacttcctcgccgtcgatgtatacatgacctccgctggggaataccagctgattgaccgttctcagcagagtggacttgcccgatccggaaggacctataacagcgacaaattctccggctctgacctccagactgatatcatgcaaagcgcggacctgattgccataaactttctcgatatgctccatttttaaaaccgtgctcatgcttcctcctataaaaaaggccggacagcgccggcctctgctccaacttatttactgctgctcagggctttgttcagatcaatgatacctttgtaatcttcaatactgcattctacgaaacgcttatcctctgcacccattacccctttgtagtaagcggcattgtcatagctcaggataaagttttttaccttttccttcaattctgccggcagatccctgcgcagagccatcggttcggacgggatcgaatcagaagcgaaaataattttaacgtcatctttgctgacacgtcccgcattgatctcagccgccagaattgcatcagagataggagctacctgcacatcacccttgactacagccgccagacctgcttgatgcttgccggaaaagctgactgcctggaaaaatttgccattagtatgcagatcatccatcgaaagcttctcaccgggaaatgctttcataatcgccgctgaagggatcagattgccggaagtggaattcgggtcaacgaacgccatcgttttccctttgatgtcctggatactattgatatcagtattcttgctgctcgtaaccagaacagacttataagtcgcgttctttttatctttatccttggcaatcatcccgatcggttctgcacctgcacgttcataagccaggcagaagcttaacggtccaaaataagccatatcggctttacctgtacgcatagcctcaatcaccgcattataatcgttagataccagctctgtgacctccattcccaaaaccttgctcaaatcgcccgccataccttttctggcatcggcatttttatctgtcgattcattcggcagataagtgatcacaaatttcttttgctcagactgaccgccgcagccgctgaacagcaaacagctcattactgccagcatcagcagggcgcagaccttgaataattttcttgatttcatttccttctctcctttttcacaagtactgaaattttgcttgcatctggaaacactgtcatcataacaaagctttctttgctttgaattaagaaggctttaagttcttgtaaagaatttcacctttctttaaaggtttgttaaagcatgacccttaaaatacccgtgcaaataaaaaaagtccgcaggctgacatgcatcagcctgcggacttgcactttttaaattgttttaagctgttagatctttacatcaatctgggccgatacgcccacaccctgcacgcgattgataccgctgatagcgaccttatcgaccgggatcagcgctttcgcacggaagcttttaaagaaggaagcctccagctgcaaagcagcctgacatttatctacctgctccttcggtcccgatacctgagcagcgccggcataacttccgtcacccacggtaatgatcggcactaccttggtagcgtaatcgctggagataggatattttgccgtcaaagtattgatagcgctgttcagctggtcggcaaactggctgaccaataacgatacagcgccgcctttaactacggtacccaaaataccggcctgcgccggagccgttccctgtcccagtaaaaatccgcagaccagtgccgcggcgatccattttttcccctgcataatattacctcctctgccttaatcatttcagatttatcgtttcaattcgacatcaacaaacaaaactcttgctcttttgcaaattgttcaccaagaaatcacaaaatatttctcctgccgataattttatgaaacttctgcattttacaaactgcctgttttgcgatacgataggtttaagaagattttacagcggcagcatttgccgcagcaaaggagctgttattatggaacagtttaaatattacgcacctacaaaaatacttttcggtaaaaataccgaagccgaggttggtgaactctgcaaaacacagggagcaagcaaggtcctggtacacttcggaggcagcagtgccaaaaaatccggtctgcttgatcgtgtctgcggcgcactgcaggaagcaggactgcactatgtgaccctgggcggcgttgtgcccaatcctcgtttaagcaaggtttatgaaggtattgaaatctgcaggcgggaaaaagttgattttattctcgctgtaggcggcggcagcgtcatcgacagtgccaaagccattggttatgggattaccaatcccggcgacgtctgggactactacagcggcaaagcgccgcaggcctgcgcccctatcggcgccgtccttaccattgccgcggccggcagtgaaatgagcaatgcgtcagtcattaccaatgaagacggctggctgaaacgcggactgcagtcgccctatgcctactgtaaatttgccgttttaaatcccgagctgacctgcactctgccgccctaccaaacagccagcggctgtactgacatcatcgtccatactttagaacgttactttaccaagcccggcgtcacctccctggcgttgactgacggcatggccgaagctctgctgcgcaacgtcatgcgcaatgccaggctggctttacaggcacccgacgactatgacgtccgcgccgagatcatgtgggcgggcactctttcccacaatgacatcaccggcgaccgcagccagggcgactgggcttcccaccagctggagcatgaattgggcggtatgttcgatatcgctcacggtgcaggccttgcagcgatctggggcagctgggcccgttatgtgctcaaacaaaatccctgccgcttcgcgcaactggcagtcaacgtgctgaatgttccctacagcttcggcaatgacgaaaaaacagcacttgaaggcatcgccgccatggaagactttttccgttccattggtatgcctacctcgatcagcgacatggaaatcgaacttaccgacgcccaaatcaaagagctggcgcacaaatgcagctttatgggcagaagaacgatcggcggcttcgtcaccctgaacgctgctgatatggaaaacatttaccgcatggccagataaaacggcggctatacttgctgcagaaactttcatcttctttaaaacacaaaggacaagcagttaaactgcttgtcctttgtgtttttttactctgccggcgtttcttcatcctgcagattcacttcatcaaaaagcactggttcgattttcactgaattattctccagctgtattctgcggttttcttcaatatgccaatccctgtcattgaccaggctctgttcccacgcctgcgcaacttttttctgaaggctggtcaaagtggccgtatatttgtcatctgtagcgggagcctctggtttaggttccggctgagtaccggattttaccaccaatgtgcctgtcagctgcagcgcatagccgtcctgcgtagaatacagcagctcgcccaaatcatattcaccggctgccaaaccatctaatcccaggattttatcagggtctacatttatacccaactcctgcagtttggcaagcagcgcggccttaaaatcactgccagctgcagcttccagtctgcccacatcaccgctgatttcctgcagaaacggcttcagatacggtgccgtctgtttttgatcggtctgccagacttttttatcttcttctcccagcccatctgcgaaagcctgattgaactctgctgtcgtagcatatactgttccatcaccgtatttttggtaaccgctatcggtgaggaaataggcattccggacggcagaaactgcttctgcatcggacgcgcccataattgcatctacgtcagcactgccgctgaccttgcctaaattataaacattagcaactctgccatattctcccagccctaaaataccgccgatatttttattaccgctgacactgccggtattataagcatttttgatactggcatagtctagctcttcatcattgccgtcataaccggcaacaccgcccacattatctgcgccctcgaccgcaccggtattgtacacaccttcaaccagcgcattggcattagcgccgcagaccccgccgacataatttccatcagcagttacgtcccctgtattatagctgtttgcaatactgccgccggaattaaagccacagataccgccggcaaaactatcacctttagaattaccgctggtgataacacctttgttagaagtatttactattttcccgccattggtattataaccggcaataccgccagcgagctgctgatctgcagaaatattgccttcatttgctgcagcttcaatcaaaccgcctttattgttaccaacgataccgcctatataaccattgccgctcacatcaccgctgttaaaggcctcgatgacagatccatttccattcgcgtttctgcctacgatccctccggcagcagaaataacaccgataatattaccgctgttctcagtgttcctgatactgccggaattttccccaacaatcccgcctacagctacgccgccaaggatagcgcctttattaacagcattttcgatagttcccttatctatgttattaccgctgataccgcctaccgaattgccgcccattgttccctctttatatatcttaacgtcgccttcgttgaccacatcttttattgtccctttattgatcccgctgatccccccaaaacaggaactgtcgtccacattgcttgtaacagagccttgattaacagcgtttgcaatagttcccttactattgttgacaccggcgatgccgccgagatttccccagccaataacagcaccagtgttttcagcgtactttataataccagttttgctcccgtcaccattactgccggcaatgccgccaacactaccgccatctgttgccgtaatactgccgctgttactgacaaattccaccgtaccataattagtgctggtgataccacctaccgaagacttacctttgacagcggctttattggcaacattacggatcagccccaggttttttcccgctatgccgccgacgctgctttgtccgctgatactgccggagagtgtcaaattcgttactagcgcgctttccgtcaggcagccaaataaaccaacatacgattcgccgctgcgatcaatcgttaaatcactgatagtataccccataccgtccaaactgccggtgaacccgccttgaaatccacttggggttcccatgggcagctgttttaaagcgccaaggcacgcaaacccctgaccgctgttccagctgctggtaacagaagcatctatttcgttagccagcatataatcgccattgacatacctatagtcaaaatttgcactgtttttttcggtttcataattattattgatcgcctgcagctcatatacgtcatgtaccagcatacaatcagtaatatttttttcactgccgtctaaggccgctgtgacaatgcccaagctgctggcttttgttccgccgcctttgctgtaatcgctgacagtatgccccccgctgccatcgcctacatcaatggtagtcttatccgtcacctcgtagccgatgttgatattgtccttggcctttaaactgactttacccaggtcgccgccttgtatctgcagcgtatcagccttgatgatcgagatattattaccttcaaaatttatggcgtcggcagcgatcgttcctaaattaacaatatcggcctggattttggaaataccatcggcatccaaatttcccaaagtcccgttaaagcctttacgggcctcttccggcagacttcttgtcgatgctgtcaggctgcctacattgacctctgccgcggcaccaaacaagatcccgttgggattgagcaggaagacatgcgcgccgctgccattcagcttaccgaaaatctcgctgcgctggctgcccgtcacataatttaaaacggcctgcatatttttaaaatttactgtttctccctgggctatattaaagctgtcccagtctatagccagattgccgccggtgccggtaatatccattgcaccgccgccaggagagccgatactgccactgccgcccacgacctggccgccctgcggcagggcatagccccagtttggcaaaagcagcatgccgctgcttacaaccgtgaccatgatctttttatataaaagcattttcttatttttcatcttcacacagctccttatccttgagcgatattaaaacaacttgtaggccaaaaaccacagcctgccgtttttatcactttcttcactggtaaactcttcactgcccagcttgcgcgcatagtcaagccgcagatagtaatcgtcagccttggcgtactgcaggcccagtccccaaccggccagaccgcggtgctgaccatagcttttagacagctcgacttcgccccaatccacataagctgccagagtcagatcaggtacgggagtggcataacgcagttctgccgtagcctggtagccgctgtcgccgctggcttcaccctgcggataagcccgcacaccgttagcgccgcctagaacaaactgttcgctgccatccagatctttgctggccagctgactgtggaaatttacatgcagattcaaaacattgcctaatctgcggatatgattgacgtcagtattgaatttgtgatagctgccttccgtgtagctgctggcgtcgtcataacttagccgtcccgcataatataaagcgctgtagccagtataactgccgctacctttaatattgcccgctatgccggcatgcagtgcattactgtgttttttggtatcgatgccaaaggtgcgcagctcatctttcagctggcggttatcgtagccataaactgccgccaggtgctcagaagcagtatttatcagcggcgtactgccgtaaatgctgaaagttttagcccggccgaccgcgtcaaggatattataaaagccgctcagcgtataatccatcaggctatagctgacgcccagttttgtcccacggctgccgaccggcatttcgtagcccaaattatagttatgcagattatcatttgaaagcatcccgcccagaaaaaatttatcgccgatcctgccgggattgttgatcgttgtctgaaagccatatctgtatctgccgctgtatttattgccataattatcagtgtataaaatcgtctgctgcggtttattggcccgaagatcgatcacaaaatcgctggtaccgttggcctgccctgcccgcaaaacacctacggctgtaacgccggccagatcgttgatattattcaaaactgtttccagcctgtctgtacgcagcagctcgcccttttgcaggatccctgcggctttttctgcctgtccttccgccagagccgaagtattattgacctgtacattgcttaaccgccctaatactattttgacttcaatgataccgtcagtgatttcctgctgcggcaaaaaagcagtagcaaccgcgtagccctgcccgcgcagatacgcagtcaccttattgaccgcctgctgcagttcattaaaatcgacttcgcgcccgcaataactttctaccagcgcggccagtacgtcctgctggatagcatcttcactggtaaaggcaaaattctgcagataaaactttctgctgccgctcacatcagtgtttgtttcttcttttgtcaggacagccattttatcaccggccgccctgttttcttccaaagcacgcagatccccgctgctgtttggcaaagctgtggcagccgaagcgccggcacagctcagcaccagcatcaggcttatgattttagttttcatttttattctccttataccatcaaatatttacttttgaaaatatttttaatatattagttatattgttttatattataccacgtctgtacccccccacaagacacgttaaatttttagtaagatttactttttctgccgcgttaacgggtacgcggccggcagcaagctgcccgtccgctattttctgtatttacgtcgaaaaatagacttctcaaaaataaaaaagctttcttttccatcggataaaatcccataaaaaaagaaagctaaaaaacacaaagacgcgtctgccaaaaggcaggcacgtctttttttactgcgccctaacgcatattatttacttttgaatcagtttcctacgccggcgccgtaattatcagcctttgatatcgccggcctctgccaccatcagctgatcgacaaactgcatcctgaccggtactaaaagcttctgtcccggttgcaggttcgtattcgccagcgcattggtttcgcagatacggtaaatgacttcgcgtacatcctcgtcctgatcggcccagcggtcagcgatagcccacatggtatcgcctgtatgtacagtgatctgttcgtaatgataaacagtatcatcctgtaaaaaattatagcctgtatataaaatagtggtcatcagcattaatacaaacaacttcttcataactccacgacctttcaaaacatctgttcgttaaacatataataaaccgaactgttttgtttgtcaagagtttttctaaaaatttgttcgtgttttagagttttaaggcgaacgtttctgcaatcaggcgaacagatctaaccacgcagcacccacatataaaacggcgtcgttattactgccagcagtgtactgaccaccgtcagcatcgccgcatacttgtaatcgccgccataaaccttagctacaatagaagtgttcgtcatcgccggcatggccgcctgcataataaaaacctcgctcatcaatttcggcagcgcaaaaaacggcagacagaccataacgcacagcggacagatcacaaaccttcccaccattgccgccgtcagctctctgtcaaatttgatctcgctccaggacgctttactgatcgcgataccgataaacagcatggccagcggcgtcgtcattccgcccagataacgaaaagaagcttcgatcggcatcggtagacgccaatcaagcattactaaaataattcctgccaaaaaacctaacagcggcgggttcagaaccactttcagagtctttctgctgagccacggtgccgccacaccggcatcagacgccatatcgtgcactgctacgacccagaacatcgtagtattgaccatataatacagcatgacataaggaataccttcttcaccgaacaaagccagcgtcatcggcaagccgatgaaaatagtgttggaaacaaaaaagacagtacagaacacgccgacccggtcacgccgcaccttcagcagccgtgctgccgcatggccgataaaatagcccaatgccatggaaatgatcggtaccggcagaccgccgctcatctcgatcagctgatcgtggctgaaattgaccgtcagattgacgatcatataggtaggcaggcagaccttggtcaccagctgggccacagccgagctgaagctttcagaaaaccagcccttacgggacagataaaaaccggtagctatcataataacgatagtcaaaatcccctgcagtgcatgtaagatcgctgccataaaatcacttccttaaaaataaaaaacaccgaagccttcgcctcggtgccgctcaaatcagtttttggcctgtttcgcttcttccaatttatgcttcatccagtcgatcatggccagtttgccgaattcatgccaggttttacattcagtattcctggcaatatattcgttccatttatcctggttcacctgttctacctccagcagattcatgatgccgaagccgctgcgccagatcagatcgtccatcgaggtatatttactgttttccgttaaaaatttatcgttgaacaattcctgaaaagatacctttgccaaaatctttcccagttcctcgtcatgggtaaagatctccagataatgcttaaactctttttcaatatcgattgctgccattgtttcatcctccgacggtaaattattgattttataatttatacttcctattttaccacaaaaaagccgatggcgctaaccatcggcttttctgtaaaactaatgtgaataaaaggaggggttggagatgaaaaatcttaacagtaaaacagctgtcagtgaccgcagtcgtggcagcagccgctgcacacttcaataccttcgatcgacataccgtttttgaccttatagtcataaatcgcggcacgcaagccgtcagctgccaggttggaacaatgcatcttgatcggcggcagtccgtcaagtgcttcagctaccgccagattagtcagttccagcgcttcctcgacagacttgcctttagcaagctctgttgccatactgctggtagcgatagccgcaccgcagccaaaagtctggaaactgatatcggtaatgatattgtctttgactttaataaaaatcttcatgatatcgccgcatttggcattgcctacctcgccgacgccgtcggcatcgggcatcacacccacattacggggattcataaaatgatccattactttttcactgtatgccataaactacacctgctttcttacttgtggtaaagaggcgacatcgcccttaatttttcaacgatcaacggtaattgctccaaaacataatcgacatcggcactgctgttttcttccgacaaggtcagacgcagcgaaccatgcgcgatctcatgcggcagtccgatagccagcagaacatgcgacgggtccagagacccggaagtgcaggcactgccgctggaagccgcgatacccatatggtcaagcagcagcagcaggccttcgccttcaatatatctgatgctgacatttacattattcggcagtcggtcagtaggatgtccgtttaaccttacttcagggatctttgctaaaatcccttcgatcaatttgtcacgcaaagcacgtgttttttcggcattggcttccatattttctttcgcataagcagctgccagccccataccgatgatcccggccgtattttcagtgccggcacgcaggcctttttcctgcccaccgccgacgatcagcgccggtacacgcacaccctgacggatatacaccgcgcctacgccctttggtccatgaaatttatgcgccgtcaatgttaaaagatcgatattgtcgccggtaacatcaatagggatatgacctgccgcctgtactgcgtcagtatgcagcaacaccttatgtgcgcggcagactgcgccgatctctctgatcggcattatcgtaccaatctcattattggcatacatcaccgaaacaaggatcgtatcgtcgcgtaaggcggcctctacctgggccgctgtaaccctgccgaattcgtctaccggcaggtaagtgatctcaaagccttccttcgccagttcttcacaggtatgcagtacagcgtgatgctcgacctgcgtagtgataatgtgccgtcccttcttgacattggcatgagccacgcctttaataagcatattatcaccctcactgccgccgcctgtaaaaatgatttccttaggtgacgcgccgatcagatccgcaacctgctgacgggcagcggcaatagctgttgccgcacgctgtgctgccttatatatactggaagggtttccataattttctaccatagcctttgccatagcctctgctatttccggtctgaccttagtcgtggccgcattatctaaataaacttcccgcattgcgatccgtcctttcttaattcctacttgtttagtatgattacactttcagtatagtaattcccagtatttttgtcaagattattttgtgaattttttgtgtagaaaaaatttttttgttcagctattgaattcctagtaaactagtagtaaaataatgtcaagcttttgaaaggacgtgtgcttatgaaaatctctaccaaaggacgttatgctttgcggctgatgcttgacctggcttacaatcataccggcagcttcatccccattaaaaatatctcccagcggcaggatatttccgacaaatatctggaacagatcattacccagctgagccgcgccggacttgtcaaaagcgcccgcggcgcccagggcggctatatgcttgccaaagagccgcaggaatatactgtaggcgaaatactgcggctgctggaaggcaatctggccccggtagcctgcgtagacgataccaaggaagcctgcacccgtgcagacgaatgtgtaaccatggaagtatggcgtgaaataaaagacgccgttaataaagtagtcgataacatcaccttggctgacttagtggaacaacagcggcagaaatgccgatgttgtaagtaaattaccgcttgcagcataatttattaaagaaaggttttgatatcatgactaaaatttaccgtagcctgaccgacttgatcggcaacaccccgctcttagagctgaccaactataacaggaaatttgctccgcaggcgactatcatcgccaagctggaatattttaacccggccggcagcgccaaagaccgtatcgccatggcgatgatcgacgccgccgaagcccggggactgctgcaaaaagattcggtcatcatcgaaccgaccagcggtaatacaggtatcggcctggccagcgtagcctcagcacgcggttaccgcacgatcctgaccatgcctgaaagcatgtctgttgaacggcgcaacctgctgaaggcttatggagccgagctggtgcttacacccggttctttgggtatgcagggtgccatcgacaaagcagaagaactggcaacagaaatacccaatgcttttatccccggacaatttgttaatccggccaatccggccatccataaagcaaccaccggccccgaaatctggcgcgataccgacggcgaagtcgacattttcgttgccggagtaggcacaggcggtactgtcagcggtgctggcgcttacctgaaagaaaaaaatccgcgcgtcaagatcgtcgccgtcgaacccagcgattctcccctgctgtccggcggtaaggccggcccgcacaagatccagggcatcggcgccaactttatccccaaaaactttgaccgcagcgttgtcgatgaagttatcactatcgacgcggcagatgctttcagcaccagccgcgagctggcgaaaaatgaaggcctgctggtcggcatttcctccggtgctgcggcctatgccgctacgcttctggcgcagcgacccgaaaacgccggaaaaaaaatcgtcgtcatgcttcccgacaccggtgaacgttacctgtccaccccgggctttatcggcgactgaatcaattttaccctctcctgacaaacaagcgcagagtacacctctgcgcttgttttatggtactgtttgaacccttggcgaggtagtttcgagcctagtgttcatacgtgtctttatggtataattattttattaaatacgcgtcaatacgcataaacggaaggattgattttcatggctgatttaacccgcagtgaagcctgggagctgctgacaaaatataataaggaaccttttcacctgcggcacgcactgacggtagaaggcatcatgaaatacttcgccaaagaactgggctatgccgacgaagcagacttctgggctcaggtcggcctgctgcatgatctggattttgaagtttatcctgctgaacactgtctcaaatcacaggaaatcatgcgcgaacacggactggacgaaagattgatccgcgctaccgccagccacggctacggcctggcgcaaaacgatatcgaaccgcagcaccagatggaaaaggtgctgttcgccatcgacgagctttcgggactgatcggcgccgctgccattatgcgcccttccaaaagcgttatggacctggaactgaaatcagtcaagaaaaaatacaaagataaaaaattcgctgccggctgctcgcgcgacgttattgaaaagggcgctgccaacctgggctggaccgtcgacgagctgatcgaaaagactattctggctatgcgcgaagacgaagccgctatcaacgaagcctgcgcttcctttgatgcctgaacgaacgaggttttataataaattatgaagaaaaaagttttagtcgccatgagcggcggcgttgacagctctgccgcggctatgctcctgcagcagcagggctacgatgtaacaggagccacgctgcgtatgttctccaacgaggatctgggactggagcaggacagtgcctgctgctcactaagcgacgttgaagacgctaaactggttgcacacaagctgggcattccccactatgtctttaatttcagtccctgcttcaggcactgcgtcatcgaccgctttatcagcgaatacgaagccggccgtacgccaaacccctgcgtcgactgcaataaacacatcaaattcggcgaactgctcgatcgcgcccggttgatggactgtgaatatctggctaccggtcactatgcccgcatcattttcgatgctgacagaaaccgctggctgctggcccgcggcgacgaccacgccaaagaccagagctatatgctttttaacctgacccaacagcaactggcgcatatcctgctgccgctggcagatattaccaaacccgagatccgccggatgagcgaaaaccgcggcctggtaacggctcataagccggacagccaggatatctgctttgtccccgacggcgactacaccgcttttatcgaacgcattaccaaaaataaaccgcgccccggtaaattcatccaccaaaacggtcaggtgctgggaacgcaccagggactgatccactacactatcggccagcgtaaaggtttgggaattgcttatgaatgcccgctttatgttattgataaagacattgccagcaacacagttattttaggccctaatgatgctttgttccagaaagctttgcttgccgaaaactgtaacctgatcgcgatcgataagctggaggcgcccctgcgtgtcaccgccaagacccgttaccggcagaaagacgtaccggcagttatcgagccgctggcggacggtaaaatcaaagttacctttgacgaaccgcaaagagccatcaccccaggtcaagccgtagtattttacgacggcgattacgtagtcggcggcggtattatcgccgcgccgctgaaggagtaagaaacatgaaattatttctcgccgctatcgtcacagcagcactgctcgctgaaataatccctgtttgggccgctgacccaggcaacgataaaatcaaaaataaggctccttctgtccatacagaagctgataacagtaacggacatccgcctgaaggcatcagcatcacgccgcagacacaggcccagaggttggcagcagctacggctaaagcacagccgaacgccaaaacaccggctgatactgcgtccaatgctacctcctctgtcaatgcggatatcaaaactccgcctgctgatatgcagccggaaccaaccaaaccggtgatcaaaaaaatcaaacctccggtccctgaggaaaaaccgctgcgcgtgatctggccgcaggacttttattattattcctataacggcgatccttattacagcctgtcgctgcccaaggatttcggtactgataccctcgccggactgcctgctgcaggtcccatgctgatgcgggcccaaagcaacactgttttgatgacctttgccgccacagaaaatgatcctgttaaaaaccggatcttcagcgaagcgctcaaaaacagaagcgagataccgctgccgccattaggaccgaacgaagaatacgaatatatcccagccccgcgttatacttacaatactgacccggcgccgctggagctgcccaagcagatcaccaacgtcaaaatagtggatgctggcagcggacggacagcagaaaacctgatcgttcaatatctttatctcagctgtacggccgacggacagcattgcatggctgtacttacccacagcgaacgcaatcagaaagcctttgacggactgttcgtctttccttatgctgaaaaacaaaattatataccgttagttaccttcaccgcgcagagcctgcgggtgaggaaataaacaataaaagctgataaatagaagcgcttaaacgcctatatttatcagctttttaattatactatcatctatttacaacagcccggccggtatataccagtttctggcatctattggcagcagatcattggcaaaacagatcacgccgcctgcacctaatttcaaggcccgttctccttctatcaccggccgcaggatatcaaacttcttcgtttctttcaccgggctggagcttttgcggatcgccaaaggatgtatgctgccatcaacattcagcacaagctctacctcccggctgttaaagtcacggtaataaccaagtggcggtatctgtccgcaattactgaagctcttgtagatctccattaccgcccaagtttccaaaaagctcgaagacattgcccctgcttccaagatctcggcattactccagcgcagcagataagcagccaggccggtatcggtaaaatataccttcggcgctttcacaccatattttaaattcggatgcatgaacggctccagtaaatataccagccccgccgctgccagtaccttcagccactgcttcgccgttggcgcagtgatctccgcttccttggccagcgccgcatagttgatcatactgccggtatagctggctgccgcacataaaaaccggtaaaattgcagttcatcattgacctgggtcagcgccctgacgtcacgctgcagaaaggtctgcacataggaagagtaatagttgttccagtcctgctctgaggcattgttcagcgccggcatactgccgcgccagatctgctcaaacaaatcacgcatcggcagtatctcagcttcctgcgcccgctgcagtaaaaatttttcttcaggcacaaaagctcccgcaccaagaccggctacttcggcatg

SEQ ID NO: 10036 - DNA, 2638 bp, Unknown
  gut microbiota DNA sequence
tttttcgccgcctgcagccagaattacttcggactttttgagcattttctcaatttttgcttgagtagacaaatcttacacctccatcattattaggagaacatttttatatacatccctaacaaataaggatgtaaaattttggatcttgactactggtactttttgccattcatcaagagttctccaaaattcctgacactaattataatcaggaacgttctttttttctgttgcacaggtcacacttttttattatttctttcacaaaaatttcacttctagattataacaaaaaagtatttttcatctaattttatttgccagcaaatgaaatctaaacaaaaagccacataattaaaagtttttaataaaaacttttaattatgtggcgcaggcaacagatttttaagcaatatttaactaaaatattgatagttgaaggttaactatgtccaaatttaaaatgaacatattatttcctttatatatgggtaattagcataataaaaaaacaggcacaccataaaagatgcacctgtttcaattttagttatttagcagcaccaatcattgcaagcattgcacctgcagctactgcggtgccgataacaccagctacgttcgggcccatagcatgcatgagcaggaagttagaagggttagctttttgaccaacaacttgggatacacgtgctgccatcggaactgcggatacaccagcggaaccgataagaggattggttttaccaccatccagaacacacatgattttaccaaagataacgcctgcaaaagtaccagctgcgaaagcaacaagaccaaggcagatgatcaagatggtttgatagttcaggaaagattcagctttcatagtcaaaccagtaccagttgccagcataatcgttacaatgttcatcaaagcattttgcgctgtgtcagaaagacgatccaagcagccagcttctttgaacaagttgcccagcattaacataccaatcaaggcagttacaggcggaagcaacaagctgataacgatagtggttgcaatcgggaatacgattttctcaaaacgagttacaggacgcaattgtgccataacaattttacggtcagcttcggtagtgcaaagtttcataataggcggttggatcaaaggaaccaacgacatataagaatatgcagctactgcgatagcacctaacaggttaggagccatttttgcagccaggtaaatagcagtcgggccatcagcgccaccgataataccgatagcggatgcttcttgcacggtaaatccgagcatcatagcgcccagcaaggaaataaatacacctgcttgagctgcagcgcccaaaagcaaagttttcgggtttgcaatcaacggaccaaagtctgtcattgcacctacgcctaagaaaatcaaaggcgggaaaatttcatggtgaataccataaagaattacctgcataacacccggttgatcttcgaaaccggttttaggaacgtttgccagcaaacagccgaatgcgatcggagacagcagcaatggttcgaagcctttaccaatagcaaggtacagcagaatgatgccaacaagcatcatgatagcattacccatggtgaaagcggagaaaccgctgtcattccatacggattgtaaagcaactacaaatgcttccatttatatcctcccaatgttcaattatttgagagcttctagtttcaatcacaaataagctctcttctaaatataaaagttattgctttcttatgacgcaaattacattacgatcataacgtcgccggtaccaacagtttgacctgcggaaacgcgaacgtcagaaatggtgccgtcagccggagccatgatctcgttttgcattttcattgcttcgagaatcatcaatacgtcgccggatttaactgcgtcgccagctttaacttttacttcgagaactttaccaggcataggagcagaaatggttgcagagccagcagcaacaggttttgcagccggagccggtgcagcagctttaggagcgggagcagcggcaggtgccggtgcagctttaggagcagcagctttaggagctgttgcagcagcgccgcccatatcttcaacttctacttcatatgcagtgccgttaacggtaatggtatattttttcatggatgttaatcctccttaaaatctcgtaataaaatagattaattattaaccccaaattagaagcattctttacgtacgctaattgcttcaatatgagcattttgtgtccagcttgcttcgggcagacgacgtacgcaggctatttgctctgcggaatgaccaagagcagctacagctgctgcaataacagcaattacttcactgtcatcctgtacaggagctgcaacagcagcaggtgctgcggcaggtgccggtgctgctactggattagctgtttttttttgacgagtaggatctacaaagtagataactttcatcaagaaacccagcatagccaatacaccaaaaactatggtcatattgatagcagcaatcaaccaaggattagtagttacaggacccattatttcacctcattcttcttaattaattaagcactatactgcaagctgcaaattacaaagg

SEQ ID NO: 10037 - DNA, 459 bp, Unknown
  gut microbiota DNA sequence
aataatgatggaggtgtaagatttgtctactcaagcaaaaattgagaaaatgctcaaaaagtccgaagtaattctggctgcaggcggcgaaaaacgcgttgcaaaacaacacgaagccggcaaaatgactgcacgtgaaagaattgctgcactcctcgacgaaggatcctttgttgaattggatcgtttcgtaaaacatcgttgcacaaacttcggccaagagaagaaagaacttcctggcgaaggtgtaactactggttacggcaccatcgatggccgtctggtttatgtattcgcacaagatttcactgtagaaggtggttctttaggcgaaatgcatgctgctaaaatcgtaaaagtacaacgcctgtccctgaaaatgggtgctccgcttgttggcctgaacgattccggcggtgctcgtatccaagaagcaattgacgctttggctggttacgg

SEQ ID NO: 10038 - DNA, 1676 bp, Unknown
  gut microbiota DNA sequence
aattcctgtgtattctgcggtgttttatctttatcagctgacgaagttacctgccagccttttttcttaaaatatttgaccatacctttagtattagtcccggtataggactttgttcccatgatcttgccgatcgccagttcatcttcctcgctgcgtccctgaaaatgttcgaccaccatcaatgcagcggcagggccgcaggtatattcggtagtttgctgataggtacggaacttaggcagcagcacaagcgaatcagtaggctgcatattataaaaatcgagctgctgaaaataaggcgatttcggcacattggccagtccattgtaggacgacgctccggcacttttggtatcataatttgacggatatggtatctgattttcattactcatacccagcatcagcaacgctgatgctgcaacaagcagtgcggcaaacaatttcttttgtggcattagcttcccttctttctagtgacgtttctgccagcctctgactgcttcctctaaagcagacctttcgttaggcagattggtgctttgcactctatgtaataaatatcgcatagcgtccctgatcttgcttttatcttctaacagcacaagcacatcatggccgctgatcgccagatccttagtatgaacaggcattttactgcgggacagttccagcaccgccgttcccaaagcgcgtccttccgccatcagttcggtattcttaccggcgtgagtcgcacccatatctgctaaaaatactgctaccagctgttcaaaagcagcagtcatttcatgactatctttaaaattaccgccggccgcctcgctgcgcagccaacgcagcaatgtgcgctcacctgtcaccagcatcggtgcgaagcgcatatgccttgacaccagccatactactctttgcacaaaaggagccggataacgcagccgacttaaaataacttctgccataacggcgctttcagcttcgtgaccatgatcaatgggctgaccttctttattaagcctgcggataccaggaagacctttagctacatcgtgcaaaagcagggcccagcgtattgccagctgacgcggactgttatcaacagcagccagagtatgctcccatacatcatagcagtgaaaacgctggttctgcggcaatcccgccaaatgctccagctccggcaaaacatctatttcccgataagttccctgttcacgcacacggcagcgtccggccgccagccctgtcgccagcagcagcatcagtcccttgccggcccatttgccgagcagcagcttatccagctctgtccgcacacgttccaatgatagcccggcactgcggctaacaggaaagctgtagctctgcggcaggtaatacggcgtctgcggctgtccaaatgccgggccggcgccctgccgctgtacataatcaaagcccagctgacctacaaagcggcaggctctgtacatacgcaaagcatcttcctgataacgggctggcgcatcaccgacagtacgcagtattttctgctgcaggtcctgcctgccgccgtgataatcgtatacattaccggactgatccaaagccatggcattgacggtaaaatcgcgccgcgacaaatcagcctccaggtcgtcacaataccagacctgctccggtttatgcgcatc

SEQ ID NO: 10039 - DNA, 1330 bp, Unknown
  gut microbiota DNA sequence
ggcaataaaaatcgcctgttttcagcagtcataatctcactttttttagttaatttattctatcataaagtttcaaatcatagcaactttttccaaggcaaaatttaatcattctggtcaataccgccattaggaagcggataatcgacggcaataccaaaatactcccacagcattccctttaagtcgtattcagtattgatggtatagcggtatttgacacgtccacccagataaaactttaaaagatttccccgtatcgtgatattgcagtcttcgcgaaaaacagagatcgctttacctttattgagcggcgaatccggatgaaggtctgtataaatgcaggcgggaataaaatccatatccagctgctgttcttctgtaaagccaaacagccttttccatggtttacgccgttccttctgccacagcagccagccaaagaacggatcgcggctgaatttatattcgcagataccgtcactctgcactttgccctctgccatttcgagcggacagcgcggactttcactgttgacgccaacatcagtcagataacgtttatcttccagttcgatgcacattacccgatgccggcggatctggtattcctccagccggtcgataaaacgggcagcataacttgtgactttatagcccagggattccagcagccaattatacaggccgttcagctcaaagcaaatgccgccgcggtttttcataatgattttggcaaacatatcatcatgctcgagcgaagccagcctgccgctcaaaatatccagattctcatagggcacatatttcaaatgcgcgtcctgcagcagcttcagcgtcgccaggtcaggcggcggtacgacctgcggcagatgcagtttacgcagatattgacataattgccaatggttcatcaatgcggtttgctttttcattcccatcactccatccgcaattattctctttcttttattgtaccgcaaaaatatgtgttcctgcagaaaattttacaacgctgcgccttaacctgaagttaataaaatatggctaaaagatcataaataggttacaataaagttagaataaatcttgtcggtgaggcgataaaatgagtagcaagcgttatgcgcaagttgataaggaatattgtgtatcctgcggcacctgcactaaggcctgtccgcttcaggcgatcagcgtgcccgatggtatcagcgcagttgtagaactggctcgctgcatcggctgcggtctgtgcgcccgtgaatgtccggcatctgtgatcaaggtggtgactgctgatgtctaaacgcaatcactggtatgatta

SEQ ID NO: 10040 - DNA, 207 bp, Unknown
  gut microbiota DNA sequence
tgccaaagtattggccagctgcattgtagtcatttggaattatctagcccgtaaaaagtggattttttgacagcgcgtatctgccaggtaatatcgggtagattgtgctatatcgatgaagtaaggccagttgtatttgctggattgatgaaataggagattaggatatgccgaatcgtgtcgacattgcagcttttcaaaaagtaa

SEQ ID NO: 10041 - DNA, 2279 bp, Unknown
  gut microbiota DNA sequence
ggtgctgcggcctgcggatcttccaacagttcctgcaaacctaaagcattaagaattttttctaatttaccacttggcatatctctaacctcactttgtttaaatttattttttaccgcttcactattagcaaaatggttcaaatcataagacactgaattgatcaccaaagtattgccatttaacgcagcagtaactcctccgatgatctcgtcagcaaaacctttttccttacattctgcggcgcccatccatgtttcgttggacatcatcgtttcgatttcttcgtccgataccttacaacgcttgcgataggcagcgacaatgcttgttttgatcgtagccagcgcttctaccaacttcgtcagttctgccgcaggatagtatccgctaagaccgatagcggggtcgtggatcatcatcaacgagttggacggcataatgattttatctgcagccacggctacaaccgttgctgcgctggcagctagtccgtcaatcaccgctgtgacacgccctttatagcccttgagcaaattatgtatagcatgggccgcaaatacatcaccgccgccgctgtttatgcgtacagtaacatccctgccacccagcccgttaagatcctgggcaaactgctgcggcgttgcctcatcaccaaaccaggaccgctctgctgcgattggtccatagatcaatatttcagcgtcgccactaacatcattcctcacctgccaaaatttttccatcattatcacccccattcccaccagtattatcagccttaggcggttctaatcctttagctcgccatgtttgctgttctatagctatctgatcgatattactatcgtaatcagtccctgtaagttccgcagattcacgttcaccggtagagaaaccatattttacgcgtaaggctgcgccagttacctcttttaccggatccagcatccccataacagggccaaaccaatcagcattactccatgccttagttatgattggatcactaccatagccaggagcactaattctaccgatagcaaccgcctctgccagccaagcttcataaacaggctgacaaaaatcacgtgcaaaccaggtacgtctggttttaaaattactggcagcttgtaataatgccccacgtgccgcagagtatgaagattgaaaacgactaagtaacacctctgccggtgtgccaatagctgcaccgatctggctgatcatcatatttgtaaatggttcaaaagttgacattgtacggcttgcgtccatcgactttacatcgacaccaggaggcagcagattaagcgttcctggaccaacttcaacatgagccaggtcttctggtgttacggcttccgcttgaccataagttgaacttagaacatcattcatatcatcaatattgttattagtcgtaaaaaacaaagtataaaacgatttaatgatggcagccgtaagctccgcattagtatagcggctgacctgcttcaatacctcgattaccggcgccaatattggtacgcctctgtactgctctggtcgttcttcatgcgatatctgtaaaatatttggccggccgcttaacttgccaaatgcttccactcgctgccactttaaaactgctgcaggatcacttaaatcaaaaggcaccctgtttgcgacccaataagccacaacagccccatctgaatctatttcaataccgttgataatacgattcccgtttttattattagtcatttcaacatcgtaataagatggagaaccatacgaaccactgctgtttgggttacagaccctactggcctcaaaaagttgtactctcaaacaatacggattatcaggcaccggcctgcgatacttgatcgctgcccatccgtcaccatctacaagatagctcatatatgcaatatcctgcatatcaaaaaagttattttttcgatacaaatcacaggccgtgctgtttgcccaaaggttaaattcacgaaacgcctgacgctgccactctttagcttcctctgcagtcaatcccagcaacctataatctattttaggcgaaactttaagaccagcgcctataacattgctgcgcgaagtattaatagcacttgaaccaagcggagagttacatactaaatctgcactgcggtttcgtaaagttaccaaatttacatcgacatctgctttagtactggatttcaagggattatagccacgtaaagtacttcgtgtcctactggcgccgccttctgaatagccgctgttcacta

SEQ ID NO: 10042 - DNA, 973 bp, Unknown
  gut microbiota DNA sequence
catgattatttaatatcacctgaatcacagggatattgtaacgggtggcagtagcgatctcgttcatattcatgcggaagcagccgtctccggcaatattgatcaccgtcttgtccttacagcccatcttggctccaatggctgctcccaggccatagcccatggttcccagaccgccggaggttaaaagggatctgggatagcggtattcataatactgggccgcccacatctgatgctgtcccacctcagtgacgatcacagcgtctccctttgtcatctcattgatggtctgtatgataaacggccctgtaagcacagacttgtcgtaacgcagaggatacatatccttcatccgctcaatatgggcgatccattcgtcatggttgatgggatccagcctggcattgagctttctcaagatgaccttggcgtctccgatgatccgggcatccacatggatatttttattgatttccgcacggtcaatatcaatctggagaattttggcattttttgcaaatttggaggcatttcccgtcacgcggtcgctgaagcgtgctcccactacgatcagcagatctgcctctgtgataccgaaatttgaggtttttgtgccgtgcatgcctaccatgcctgtataaagctcatcggtgccgtcataagcaccctttcccatcaggctgtccgccactggagcctgtatttttttggcaaatgcccgcaattcctccgatgcattggagatcacagctccgcctcctacaaaaataaagggcttctgagctttgcggatcatggaaatagcctgctccacatcctcctctaaaatggaatcgctctgacgcacaataggctccggagcctgaggctcatattcacatacagccgcagtcacatcttttgtgatatcgatcagcaccgggccgggacggccggtctgggctatcgtgaaagcacggcgaatcacctt

SEQ ID NO: 10043 - DNA, 267 bp, Unknown
  gut microbiota DNA sequence
gcctgtccctgaaaatgggtgctccgcttgttggcctgaacgattccggcggtgctcgtatccaagaagcaattgacgctttggctggttacggaaaaatcttctttgaaaacactattgcatccggcgtagttcctcagatctccgctatcatgggtccttctgctggcggtgctgtatacagcccggcactgactgacttcatttacatggtaaagaacacttctaaaatgttcattaccggccccgcagtagtaaaatctgtta

SEQ ID NO: 10044 - DNA, 249 bp, Unknown
  gut microbiota DNA sequence
cgatcaagggagcgaccgaaatcatcaataagctcaaaaatacgattgttaaggctaaagcccgtatttatgtttcggcaacagattcggctatcgaagctttacgtggtgaattgactgaggcggtaggccggggattaaaggtggtcattatcaccggcaggccttttgttttggagggtgcgattatttattatgcgcataaacccaatagccagatccgtctgatcgccgattcacaggaggttt

SEQ ID NO: 10045 - DNA, 594 bp, Unknown
  gut microbiota DNA sequence
ggagcatcattaacccatccaaagccaaaaacgtaaaacagactttttatcggacggttcagttggttaatattcatatatacctcgtacttctcaatatccttcctatcaagataaaatccaactttacttctccatttacattctacggctattatctctccgaccttataaatcctgctcctatctacagcacattccaataacaaatccggagatgaagaagacagaggccggtatccctcaacatatttatcacctcgccaatccagaagccgccagaatatttttcctgtatccaagtcggaacatccatctttactgatattagaatttttcacaacccactcttcaaacctgtctcccaaatatttattcttgttcctttctttaaagtattgaaaggtgtccatgaaccgatattgaaaaacattcacacagtcatctataaacctatttaatattttcattgtcataacaaactgcttctatatcattattcatcatctatgaaggtgtttcagggagcttcataatctcggtacagatgtggctcgcaataaaccacctgcaaaaataaagtaatatttagtt

SEQ ID NO: 10046 - DNA, 357 bp, Unknown
  gut microbiota DNA sequence
tgcgctcacataccttccgttatggcttcttgctgttttttacaacgatgtttgtcaatatgctggtttctacctacctggtctttacccatgctatctattttcataagacagtcagcctgctgtggacttttgacgtaccatggcactgggcttacagcggcggtgcgcagccatgggtcgcgcaatttgcttttggattttacagcatcatgctgacctccagcattctcggtatcattacgctgctgctgttcaagccgcgttcctggtgcgtttattgccctatgggcacgataacgcagctcatctgccgctggaaacatcgtaaataaacaacagctaaaaagcagtaca

SEQ ID NO: 10047 - DNA, 40573 bp, Unknown
  gut microbiota DNA sequence
ctcaataacttgttttttgaaaaccagttcttatccaaactccagtttaagtactgtttaacattaaatatttctaatatatttaattatataataccgctattgacaaatattcacttatagaatacgatgaaaccatactgaaagttcagcctgtaaaatacaggtatgtcctgcagataaatctattaagaaaagaggaattttttatgtttacatatggtacatcggatattgcgcagaccgggaggtttgcataatctaatattttgccgaacctcccaaaaggctttaatataacctttaggaggataaaaaaattgtctaaaataaatttacaaacattaggattttccgcaaaattcgctgaagaagcagccagttttggctgtttccctgtcggacgcgtttcagcccagtataaggatctttaccgtgtcataaccgaaaccggggaagtactggcagaggtttcaggcaagctgcgctttaatgccgccgcactttcagatttccctgccgtcggtgattttgttctgcttgaccgcacagatactgttgaaggaagagcgatcatccatcatgtactgcgccgcaaaagcgcgtttatccgcaaagctgccggtacaggtaactctgagcaggtagtcgccagcaatatcgatacggtattcatctgtatgtcattgaacagcgattttaatctgcggcgtctggaacggtatttagccattgcctggagcagcggcgcactgccgatagttactttaaccaaagctgatttatgtgatgacgtagctgctaaaacagcagcggctgagtccgttgccatcggcgctgaaatacttgtcacttcttcactggccgatgccggtcacgagcaaatacttccctacttgaagtgcggcagtacggctgccttcatcggttcctcaggcgtaggtaaatcaactcttatcaaccgtttggctggcaccgaatttgctaccaatggtttgcgaaacgatgataagggtcgacatacaacaaccagacgcgaactcatcacccttacaaacgaggctttagtcatcgatactccgggaatgcgggaactgggtttagaaacggctgatttatccaaaagctttgctgatatcgacgaactgtcccagcaatgccgttttcgtgattgtacccatacccacgaaacaggctgtgccgttcagcaagctatcacagacggaatacttgccgcggacagactggccagctatcaaaagctgcagaaggaagtacgctatgaaggccttgattccaaacagatcgaactggaaaaattcagtaccatgttcaaagatattggcggtatgaaaaaagcccgcaaatttctgcatgacaacgacaagcgcagacgctgaaaactgtgccggtaatattatcaaccgtaaatgaccgacaataaaaagaaaccagcgtgtactataaagtacacgctggttttttattgctctttaaattttacaaagtcaccgattcccaaaccgggagtgaccatcggctgtaccatatttttagggtcaagagcaacttcgatgatataaggcgcgtccagctgcatagctttttcaactgctgctgccagggcttcaggcgtatcgacatgctctccggctacgccaaaggcttcgccgtatttgacaaaatcgacatagccgggcatttcgcaggaagtaaaccgtttattgaactgcacggtctgcaactgacgaatcatgcctaagccgctgttattaaagactatcgccgtcaccggcaatttatagctggcgatcgtaaacaactccgagccggtcattttgaatccgccgtcaccgctgatactgatcaccctgcttttggggcgggccagctgtgcgcccatagccgccggcaagccaaagcccatcgttcccaatccgcctgaagaaatccactggcgggcaaactggatcctgatatgctgagcagcccacatctgatgctgcccgacgtccgtagtgataatataatccttatctttgataaccgggttcagggccttgaaaaactgcggtgcagcttcgccgccgaagtcctcgtccatactgggccagctttcgatcagctgccaccaggcatcaagatcatgcttgacgctgcctgcctccagcatttgcaaagttgtgttcatatgaccggaaataccgatactggaataaatatttttatccagctccgccgggtcgatatctaaatggataacagttttattcgcgctataactgctgcgttcaccggtaacacgatcgttaaaccggctgccaacagccaggatcagatcggcttccttaacggcgttgttggcgcgttcgtgtccgtgcagtcccgtcatccctaaaaacagactgcggtaggcactgatagcgcctaatcccatcagggtgctgacaaccgggatacgcagcttttcgcataaatgcatggcatcatattccgcatcggcattgataacaccgccgcctacaagcatgaccgggcgctgcgaagcattgattgccgccactgcggcagctatctgtttttcttccggcagctctttcaccagcggttccagctcgcccggctcataatcaagcaaagcggtctgcacatcacgcggcacatctaccagcaccgggccgggacggcctgttttcgccagctggaaggccagccggatcgtctgcgctaaatgttcaggacgcttgaccaggaaattatgtttggtgatcggcatggtgataccggtgatatctacttcctgaaatgcgtcgcgtccgatcattgccaccggcacctggccggtaatcgctacgacaggtatcgaatctaaaaaagcattggcgagccccgtaaccagattggtcgctccggggccggaagtcgctatacagacgccgacctgaccgcctgcacgggcgtaaccgtcagcagcatgggcagcaccctgttcatgtgccgtcaggatatgccgaatgtcagccgcttcacgcaaagcgtcataaaaaggcaggatcgccccgccggggtaaccaaaaaccgtagtaactccttgctctgccaaacatttgaccattacttctgcgccggtcatctgcataaactcacttccttccaatactcaaaaatacatcaggccagttctgcggcgatcagctgccccatctgcgaggtcgaaactttagtcagaccttcaccgcagagatcaggagtgcgataacctttttccaaaactctgtcaattgccgcttcgatagcatcggcagcagcatcctgatccaaggaataacgcagcatcatagctacggaataaatagttcccaaggggttagcgatgccctgccctgcaatatcaggagcactgccgtgaataggctcatacataccggtgctgtcaccaaggcttgcagaagggagcattccgatactcccggcaatcactgacgcttcatccgaaaggatatcgccgaaaatgttattggtgagcactacatcgaactggcctggattgagcaccagctgcatagcacagttatctacatagaaattattcagttcgatcccgctgtaatcctgcgcctgcatttcaccaactatacggcgccacatcctggatgaagccaatacgttagctttatcgacggaagttactttaccgcggcgctttttagcagcttcaaaagcaaatctggcaatgcgttctacttccgggcgggtatagatttcaacgtcagaagccgtctctacgccatcagcatcaggagcagcttcatttttagcgccgaaataaatgccgccggtcagttcgcgtacgatcaaaagatcagtgccgctgacgcgttcatttttaagcggcgataaatgtgcgacaaaacgggaaaccttgatcggacgcaggttacagtacagacccaacgctttacgaattccgagcagccccttttcaggacggatctcgggagcaacattatcccatttaggtccgcccacagcacctagaagcacggcatcagcagtttttgcagatgcaatagtagcttccggcagcggtactcctgtagcgtcgatagcagcgccgccgatcagctgtttatcatattctatagtcataccgaattttttggcagcggcatcaagtacttccacagcggcgtcaacaatctcgacgccaatgccgtcgcccggcagtaaagtgatcttcattcttggtgttctcctttgacatagttgataaggccgccgcagtcagcgatcttttgaataaattccggcaatggtttggtttggatagtaatgcctttgttaacgattttgatctcgccagcagccatatttacatccaattcatcaccggctgcaattttttcaacatccttgccaatttccagcaccggcagcccgatgttgattgcattgcggtaaaaaatacgggcaaagctgtcggcaataatgcattttacgcctttaactttgataacgacaggagcatgctcgcgcgaagaaccacagccgaagtttttgccggcaacaacatagtcgcccggctgcacgttaggagcaaaagtagtatcgatatcttccatagcgtgctcggccaattcgtcaaaatcagcaatattcaaataacgggcgggtatgataacgtcggtatcgacgtggtcgccgtaacgccatactttactcatttcattacctcctctgggcttgcgatatagcctgtgatcgcactggcagccgccacataggggctggccagatagacctcgctgtcgacatgacccatacgtccgcggaaattacggttggtagtcgaaacagcacgttcgccagcagccagaatacccatataaccacccagacacggtccgcaggtaggggtagaaactgccgcaccggcatcgataaaggtatcaatatagcccaaacgcatagcttctttataaatttcctgagtagcaggaataataatagcgcggacatgcggatgtaccttacgcccctgcatcacctcagcagcctgctgcaggtcttccagacgaccgttagtgcaggaaccgacaacgacctgatcgatcttgatatggccggactcaaacgccggatgtgtattttccggcagatgcggatacgaaacgaccggcaccagatcatctaatttgatagtgataacacggtcatatactgcgtcagcatcggcagtaaccgctgtccactgacggctgacacgaccattgagataggcaatagttttttcatcgaccgggaaaataccatttttgccgccggcttcgatcgccatattgcagatagtgaaacggtcggacatttccagttcggcaacgccgtcgccgcagaattccaacgattgataacgggcaccatcgacaccgatcataccgataagcgtaagaatgatatctttgcccttgacatatttaggcagtttaccggtcagctcgactttgatcgtggcaggcaccttgaaccaggtagtgccgctggccatagccgcaccaatatcggtttgacccatgccggtgctgagcgcgttcagagcgccataagtacaagtatgagaatcggcgccaataatgatctcaccgggagcaacaagaccgctgtcaggtaaaagcgcatgctcgatacccatgcggccaacttcaaaataattggtgatttcatgctgacgtgcaaaatcgcgcatgcgtttacacatagttgccgacttaatatccttacacggagaaaaatggtccggaactaacgcgatcttatccttatcaaaaacaggacgtccgattttttcaaattcagctatcgccggcggtccggtgatgtcgttagctaaaaccaaatccacctgagcaaccagcagatcgcctgcctggaccgcatcgcggcctgcatgttgggccaggattttttccgtcattgtcatacccataactataaccctcctaagtttatacgaagcagatcgcggggcctcagccccgctctgcctaaggtgtgtactgattattttttcatccagctcatcatgccgcgcagatttttgccgacttcttcgatcggatgctcggcgcctttgcggcgcatagcattgaacgccggacggttagcctggttttcaaggatccagttcttagcaaatgtaccgtcctggatctcggccagaacctgtttcatagcagctttagtttcgtcggtgatgatacgtttgccggtcacatagtcgccgtattcggcagtatcagagatggagtggcgcattttagccataccgccttcatacatcaggtcaacgataagtttcatttcatgcatacattcaaaatatgcgctttcaggtttatagcctgcttctaccagagtttcatagcctgcagtgatcagagcggtaacaccgccgcaaagcacagcctgttcgccgaaaagatctgtttcagtttcttcgcggaaggtagtatcaagcacgccggcacgtgtaccgccaatgcctttggcataggcaagcgcaatgtcgtaagctttgccgctggcatcctgatgcacagctacgagacagggcacgcctgcgccttcagtaaagacgcggcgtacgagatgacctggtcctttaggagcgaccatgaacacgtcgatgtcagcaggaggtacgatttgcccaaaatggatattgaacccatgcgcaaaagcaagagcagcaccggctttcagattaggcgcgatatcttttttataagtggcagcctgtttttcgtcaggaatcagcatcatgactacgtcggctgctttagctgcatcagccgcagtcataacagtcagacctgccgcttctgccttggcccaggatttggagccttcataaagacctacgataactttagcgccgctttcttttaagttaagggcatgtgcatggccttgagaaccatagccgataatggcaatagttttaccattaagcatttcccagtttgcgtctttgtcataatacatttttaccattgtgtctacatctcctttttgtttaccagatttatttaaatttgagaactgacatattactaaatagctgaaggtttacaactgctttcaggccaggaataacgcgatttgctgacatccatagccgcatcgccccgttccagcgccacaaggccggtctgtaccatttccaggataccgtagggacgcatcacgtcgacaaaagcattcagcttatcatcgatgcctgtagccagaaagataagcgattccccggtcacatcgacagcgtgggccctgaaaacatctgccagccgcagcagctcgagccgtttgtcaccggcgtgcaccttgaccatgaccatactgcgtttggcacttgccttaggcggcaggactttcacagcctctacctcgaccagcttggccaactgtttgcagacctgcttgatagttgcatcgtcagcctgcatggtaacagtcatccgcgaaaattcaggattctgcgtaatgccgactgccagactgtcgatattaaagccgcgccgcgagaacatgcccgcgacccgcatcagaacaccgggctggttacgcactacgatagataggatctgctccattttgccacctcccatggaaaattggtataaaaaaacgcccccacctgcttagcagataggggcgactttcaccgcggtaccaccctaatttgacctcattgtctcagagccttcgctctaaacgcctaacgctgcgccggcgtcgtttcctactgctggttcagaaacgcggctcccgggtgagtcttatcgctgtaccgctacggctttcaccaaccgccgtctctctaaaatcggtaacatcagcaactttgttcccattcaatgcctttattatcaagttgtacaaacaaaagctaatttgttcgtgctatgttttacattatgccagcattttctatgcttgtcaagatttttttgtatcattcttttgtgatttttctgaattttgtttttcttttacaaaaacactggactaaatgtcaataatatcatattctataatattataagaaagtaaaaagttcgaggtgcttgtccatgaaactgctcaaagaaaaaatcatgtccgaaggcttggtcttaaacgacgctattttaaaagtcgattcttttttaaatcaccagatcgaccctgaattgatgatggagatcggcaaagaattccaccgccgtttttcaggctgcggaattactaaaatctttacgatcgagtcctcagggatcgcctgcgccctgcctgccggtctgtgtatgcatgtaccggtagtattcgcacgcaaacagaaatcggcgcttatgagcagcgaggcttacagcaccaaagtatactccttcaccaaaaaagtcaccagtgatgtgaccgttctcaaaaaatttttaccggccggcgaaaagatcctcatcatcgatgattttctggctaacggcgaagcggcccttggtctggctaacatcgtccagcaggccggcagcgaagtagtaggtatcggcatagttatcgaaaaatcattccagccggggcgtcagcgccttatcgacgccggcttccgtgtagaatcactggcccgtgtccaggcctttaaggacggtaaagtaatttttgccgaataatttatcggatatagatactaaaacacccgttactcaatgagtaacgggtgtttttttaatcgttacgacgtttatatttgatgaacatatggcaaacagcaagtcccatcacgatatatgcaagaaggttgatatcctcgttcaagtccttaaaagcgacataacccatcaaaacgacgataccaatttctctgttgaagctcgtaatcacagttttacaaggttgacctgcaggataccgtcgagcccctgcagaagtttcagtgtttctttacctacttcgctgtccacggtcataaacatcatggcgttaccgtctttaagattacggctgacctgcatggtcgcgatattgaccttgctcgcacctaaaagcgtgccgatctgcccgatcataccgggtttatcctggttgcgtgccaccagcatgaacggagccggagtaaggtcgaactggtaaccgtcgatttcgatgacgcggatctctttttcaccaaagacagtaccggctacggtaaagatattacctttagaatggatcttgacctctaaaagattatgtttgcctgcatgtttgctctctataacgtcgactccgcggctttctgcagtcagcgcggcattgacataattaacgcgttccttgaggatgggttcaaaaacgccttttaaaacagcacgcgtcagcatacctgtttccatttctgcaacctcgccggtatagatgatctctaccttttcgacagctgctttttccagctgataataaagcttgcccagatattcgcccaaggtcaggtagccctgcatttctttcagctctgtcggctgcaaagtcggcagattgactgcattcggcaccatttctccatgcaaagctgcaatgacctcttctgcaatggcaatacccacattatcctgcgcttctgttgtatcagcaccaagatgaggcgttaagacacattccggcagatcgatcagcggcgagatcggtttcggttcgtctaccagtacgtcgataccggcgctggcaacgatgccttccttgatagctgccgccaggtcattttcattgatcaggccaccgcgggcgcagtttactacacgcacgccacgtttgcattttgcaaattctttggctgtaatcatatcaaaagtttcttccgttttaggcgtatggatactgataaaatcagcttgttccaacaattcatccagtgtttcacatttttcggcgctgtatttacggaaacgtgcatcggcaatatacggatcataagctacgatcttcatcccgaaagcctgcagtctggtagccaccaaaccgccgatacggccaaggccgatgatgcccagagttttaccaagcagctcgctgccttttaaaccggtacggtcccagaccctggattcgatcattttatgagctttgacgacattacgggcagaactcagcagcagaccgatagtatgctcggcagccgatacgatattagattccggggtattgacaacgataataccgcgtttagtcgccccttccatctcaatattatcaacaccgttgccggcgcggccaaccacctttaaattagtggcgtgcttataaaattcttcattgatcttagtaacgctgcgaactacgatcgcatcatattcaggaatgatcttcagcagttcttccctttcgatatcaaaacgcacgtctacatcaaaatccggcactgcctgcagcaaagccacacccttgtcggaaattttttcagttacaataattttcattgtccatcgctccattcacctgtaaaataaaaaactcccggcttgatcaattacaatcaaggacgagagttctactcacgtggtgccaccttttttcgccgcacagcgcggcctcattgccgatatatcggtcggacccggacaggttgctacccctgtctcctccggagcggaattcagtttttagacgttacggcttacactgaccgccgcttctctttgccgcctgccaacttacttttctccatcgtcggataaatgaactatgtaattttcaagcttgtatcaattatagtccgacacttttggcttgtcaagcagcacaaaaatgtttttgtgtaatacatcttacagtttttccaacatttttatcaaaggataaataccaactgtcaaagcaacagccatgctgacactgtcaatatctattttgccaatgtacaggctgttcagccctgcagcaaagatcatcgtcagccagaacatagcgtacaatgccacaaaaatctgcacccaccagggctgctccttataaagcggctgttcctgttcgttattattctcgttcatgcaaaacctcctcctgccactccaaagtatcttcttcgtctttcctgccgtcaagacgtttattgattacacggctgcgtctggctgcagcgtcgatatgcccgctggcttcctgcagtttcttttttgttttatcgagcaataagctgaaagtcacaaaatcctgcttaacggcagcgatcgttcgccagacttcaccagtacgtttttcgatagccaaagttttaaaacccatttgcagactgttgagcagcgctgccaaggtagtcggccctgccacgcaaacgcggtacgttctctgcagctcatccagcagtcccggcaaatttaccgcttcggcaaacaacccctcgatcggcaaatacatgatcgcaaaatcagtcgtctgcggtggacacaaatatttattctggatatccctggcttcacttttcagccgccgttcaagctgcttgagcgcaatatcggcagcagctgtatcagcctgctcgcgcgcctccagcaggcgctgaaaatcctcctgcggaaatttagcatcaatcggcagccataccgtttcatccttgctgcccggcagcttcagcgcaaattcaaccctttccgcactgccctgcttcacagcaacattttcggcaaattgctccggtgccagcaaatcacgcagcaaaactcccagctgcatttcgccccagataccacggttctttacattagaaaggatgcgtttcaaatcgccgacaccgccggccagggtctgcatttcacctaaccctcgatgaacctgctccaaccgcaggctgacctgctgaaaggattctcccaaccgcctttccaaagtcgactgcagtttttcatcaacagtcaggcggatctgttccaaattagccgcagtgctttccgtcagcttttccagttttttatccagctgctctcccaaacggtcagaagctgcctgactttccattctggccgcacgggccagagtgttttgttcgctgcgcagatcgcgtacattctcataaaaacgtcgttccaggctttccagctgactgttcacctcagctcccagttcttgtccctgctgccgccgtgtctgcagaagccgccacagcattatgaaaatcaccgcctgcattaaaaccagcagcaataatagtatcgtttccactgtcatagccaaactctctttccttgatatttattaatttattatagcagattagcaagtattctacactgtcttttcttatttttacatatttacgttacgatccagttggtgatataattattaataattaattgtttaattaatatttaaaggagtgttctatatgaatccagttgaagcatctgcctcttcagcagaaaaaattcttttagcagcaaccgatttatttgcagctaatcactttaatggcgtttccatcaaagaaatcgcaaaaaaatccggggtcaacagcgctttgatctcttactatttcggcggcaaaaaaaatctttatcaggaagttctcaacgaacagtcaaatttatttttaaatctgatcgcccgagtcagcagtaaggacatagctcctctggctaagctgcgcgaatatatcactgcaatttccgaggtacagaagctgcatcctcaccgtatccatctcatttaccgcgagcttttgacccccacttttatgtgtgacagctttattaaaaaccgcttatacaaaatccataaatttatgtccgagctggttacagaagccatagctgacggcagtatccgtaataatatgcagcctacacatgtagcttttactttggaaagcatcatcgttttcttttttctcacacatgatcagatccgtgatctgggacattttgaaaatggtactgaaagcacttatttggaagaagctttaaacacttatttgtcttccattaccaattagttcaggagggcaccgacatgtcgatcaaagaaattttcagcaagcttccatttacaaaacgtcatttgtatattttggcagcaacagtggctatattgctgctgtaccatataatcagcaatgttttagccaagcccgatatcgtaaaagaagttccttatgtccgtactgtaaccgtcggtaaagaaactgtcgataatacatcttcctatcccggcgaggtacgcggtcgttatgaaagcgatctggcctttcaggttgccggtaaaatcatcagccgcagcgtcaatttaggcgatacagtaaaaaccggcgatatcctgatgcaaatcgaccccaaagacatcgagcagagttttgaagccagccaggcagctgtaacagccgccgaagccaattataagctggcccgcgacaatgcatcccgttacacggccttatacaacagcggtggtgtcagcaaagccatgatggagcaatataatacgcagatggaagcggccgcttccagcctgcgtcaagcccaggcccaactgatcaccaacagtaaccaattatcctatacgcagcttattgcagaccatgacggcgtagtagccaatgtaagcggcgaagtgggtcaagtagtagctgccggaactcctgttgtgacagttgtccaaagcggcgaacaggaaatccagatctatgtccctgaaaaccatttggataaaatctatcctcaacagtcagccaagatcaatttctgggctttagaaaacgtttcggcagatggttatatccgcgaaatagcaccaatggctgacagcgttacccgcacctacaaagttcgtgtagccgtaccgcaaatgcctgcagcagtcaaactggggatgactgccaaagtacacctgcaaaacggtactgacagcagtattttgctgccagccaccgccatttatcaaacaggaggaaaccctcaggtctggctcgttaccaataataaagtacatacccatgaagtttctatcggcggttatgaaggcaataacgtcaggatctctgacggtctgcagcagggagatatcgtcgttgtcggcggcgtcaacaaactggcagaagaccaaaacgtccgtctggaagctggtgtcagccaatgaaaaacaactgggccgcctggtcgatcaaacataagcaaataatttacttttttatgtttctctgtctggtcatgggcatctattcttataattccttaggccgcagcgaagaccccagttttactatcaagcaaatggtagtttcggcagcctggccgggagcaaccgctaaagaggtggaagaacacctgacagacaagatcgaaaaacaattgcagacagtacctaatattgacaggataaccagctattcacgtcccggaactgctgttatcaatgtttatctgcaggatacagtaccggtcaaagaaatcaaacagcgctggctggaattgcgtaatattgtcaatgatggcaaaggtgacttgcccgatggtgctttaggaccgtttttcaacgaccgttttgacgacgtctatggaaatatctacgcagtcacctctgacagcttctcctatgaggaaatgcgcgtagtcgccgaaaatatcaaagataaattttttcagatacctgatgtcaaaaaagtagaactggtaggagtacagcctgaaaaaatctatatccagatgtctaatgccaagctggcacagctgggcataccgattgatacactggcttctacgatccaggcagaaacagctgtcactccgtccggcatggctgaaagtgacagcactaatacctatctgcgtctgaccggttcccctgatacactggccaatatcagcaatattccgatccaggctaatgaccgtacctttcgtctgggtgatattgccgaaatcaaacgcggctatgctgaaccggctgaaccgaaaatgtactttaatggtcagccagccgtaggtatcgccatttctatggaagacggcggtaataatatcaaattgggtgcaaatcttgatcaggctgttcggcaaatccaacaggaactgccgctcggcttcgaactgggacaagtcgccaaccagccgcaggtagtaaaaaacgccatcggtgaatttaccgacagcctgcttgaagccatccttatcgtgctggcagtcagtctgctcagtctgggacggcgctgcggctatgtcatttcggtctgcataccgctggtacttttaggaacttttatcggcatgtatgccatgaacatcgatctgcacaaagtatctctgggagcgctgatcatttctctgggcatgctggtagacgatgcgatcgttgtcgtcgagctgatggaagtcaaaatgtcagaaggctgggaacgcactaaagcggccagctatgcctttgaaacctgtgccatgccgttgctgacaggtacactgattacctgcaccggctttatgccgatatttttcgccaaatccagtgccgccgaatttgcttcttcactttttcctgttatctcaacagcactgctgctttcctgggtcatttcagcaaccgtagcgcctgttttgggacacgcctggatcaagcctaaacagctcattaacgaaaacgatgtttacaatactgctttttataaaaagtttcgcagcgtcctttcctggtcgatgctgcaccagaaaatagttattctgagcacggtcagtatctttatcggttccctgttattagtcccgctgatcaagcaggaattttttcctgcttctgtgcgtcctgaacttctggtagagctcaatttacctgaaggcagcagtatcaaagccaccgatgaagccgccctgaaactgaccaatatgctgaaggataatcctgatgttgaaagcatcggttcttatgttggaaaaagtgctccgcgtttcgtcctcgtaatggaccctgtccaaccgcgcaacaattatgcacagctggtagtagttgctaaagatattgatgcccgtaaacgtttagaaccgcaaatacgcgagcttgtagcagctaatctccccaatgtcgtcagttattcacgttctatcccgctgggtccgccggcagcttatcctgtgatgctgcgcgtaaccggtccggatgacaatattgttaaagaatatgcacaaaaagtacgcacagttatggctcagaatccagccgtgaccatgacgcgtttcgattggatggagcaaaacggagctgctaaacttaccatcgacaacgataaactgcggcagatgggattgagccgtaaagaagtcgccactgctttgcaggccgaaatttccggttataccgtagctcaatatctggaaggagaccaggctattgacatggttttccgtctgcagcctgttgaccgatctaccgtcaccgagcttgagaccttaactatccccacatctgcaggtgcggtgccgttgtcacaggtagcccgtctcagttacgaatcagaaaacggtatgatctggcgccgtaacctgctgccgacaatcacagtctgcggcggtatcggcgaaggcgttaccggcaacgatatcacgcagcaggtttacgatgacctagcagatctgaggcaaaatcttccgaatggcgttacgatcgaaatcggaggcagtttggaagacagcgctaaaactttaggttatctgttagaacctgtacctgtaatgctgctgctcatgatgatactcctgatgctgcagctgaaagatatccgcaagctgtttatcattctttgtaccgcaccacttggcgtaacaggcgttatgctgggattgataattttcaacgcaccgcttggttttatggccgaacttggtatcctggccctgactggtatcatcattcgtaattccgtcgtgctgatagatcagatagacctgcatttgcaggccggcaaatctccctgggaatccgtactggaatcagctatcgtacgtttccgccctattatgctggctgcacttacaacgatcctgggactgataccgatgtttaccagccccttctggaattcgatggccgtagccattgcctgtgggctgtccgctgctacattgctgaccttgatcgtattgccggtcatctatgcggctgtttttaaaatcaaacccgaataaataaaataaagcagactgcgagctacagctcgcagtctgctttattattgcaacagctttaatcctttttcaaaataacacgtgccagtttgcaaataacctttaattcttccatatcggctctttcaagcactgttttcaactcatcattaaaaataacctgactgttgctgacagtatcactcaaaaattcatcaacagaagtgttcaaagcattagctatggcaaccagtgtctccagtccaattttagtatgagcagtttcaatattgctcatatgcggtttggaaataccgatcttctctgccagatctttctgcagaacaccttgcttgatcctcgtcaatttgattcttttgccgatggaacagtaatcaatcatcatgaataagcctccccatatattttcctaatattcatattagcatataaatttcactatcaggtatgcaaaatttgctatgcataaattatataacataaaatttaattttgtaaagttcttgaaccctatttattgtttatttttgatgtttatatactagagtatattgaaattaacaaaaattaaagcacaacccagttgtgctttacatcttttacttctttttcagtttttataagcttaacccttttccgccagcgctctgagcgctaaagcataaccctggaaacccaacccgcatatctgccccaggcaggcagcagccgttactgatctatgccgaaattcttccctggcatggatattgctcaaatgcacttctatcgtcggcaaagccactgcttttatagcatccagcaaagctacactgtaatgcgtcaatgccgcaggattgataacgataccgtcaaattttccataagcctgctggatcagcgtgactaattcaccttcaaaattactttgccttacttctacttccacatttaatgccgcagcttcctgcccgatatattcacacaaggctgcataatcctgttgaccataaatatttttttcacgtacgcccagcatattgatattcggaccattcaaaaccaaaatttttttcatcagctttctctccttgccaactccagtaatgcctgtaacgctgcttcccgctcaccgttattatctatgatatgatcgtgatacctgcggtatagttcgattcgttccgcatacaagtcaaaaactttctgccgccctgctgctaataaagggcggctttctgtatctatgtcctgtacaattttttctggcagcctgtctataaaaacgataatgccgccgttttttaatacctcgatattctctgagcgtttgactacaccgccgccggcagcgatcacacacccttccaattctgacagatgcctgactgccctggtttcagcatcgcggaagcacgcttcgctgactgcgaacagctccttgatagtcttgccttccagcttttcaagcacattatcagcatcataaaaaggacgcttcagatgctgcgccaacaatctgcccaaagttgatttcccgcagcccggcattccgatcaagacgatatttttcatagctgtttttccatctcagcggcaacttttaaaatgacatcgtttgaaatttctctttgcagccagatctcctctgctgctacagcctgagctaccagcataagcatcccgttcacagcctttttacccagctgctctgcctgctgcaaaaacaaagttttagcgggattataaatcagatcgaccgctgtttcaaaatgctcgacagtttccagacctaccggcgatacatcggtcttgggatacatcccaacaggagtgcaattgatcagtaaatcaccggtataacgctctaaatgtacgtagttgacgaattgcgtcggtacactactgcacaaggttttcatatacggagctatgctttgagtattacgggaaactaaaaatatcttagaaacaccgtgatcgatcaaatattgaagtacagctcttgaaacgccgcccgtacctaaaacagccgcgcttttgccctgtacttcgatgccgttattttccagcaaacgcccaaaacctgcataatcggtattatagccgcgaattgcaccgttatgaaaatggatcgtattaacggctccaatagcctgcgcttccatacttaaagtagtcaaagcagccattacattgatcttgtgcggaatggttacattgactccgcagtatttaccacgcaattcatgcacgctcgcatataattcttcaggaggtatctccagcagatcatatgttccttcgacacccaattctttaaagatcagctgatgtatctgcggtgataaactgtgtcccaaacgcgctccaatcaagccaaaatgaaccataacacaaacctcctatctaccatcggcaggataattgcctaatatcttacaatatgcgcagctgtcggaaagctgttctaatgcctgacgtactctttcttcacgcaggttgcctaccaggtcgatgtggaagaaatattcccatgatttaccttcgatcggccgggattccaaattcatcatatttaaaccgctgtgataaaaatgtcctaaagtcctgtataatgaccccggttcatgttttactgccactactaccgtaattttattagcattaggcgcctgttccgcttcgttagaaatgacgataaaccgggtataattattggaattatagttgatattggcggcaagaatctgcagcccatacatttccgcagcctgcttaccagccaccgccgccaaatgcttatcctgcttttccctcactgtttctgcacttttagatgtgctgaaataaggcactaactccatctgcggatactgatgaaaaaactctttactttgtgcaaagccctgcggatgtgaataaacagtagtaacatcttcgagcttagcaccttgaacgcccaagagattgtgctctattttcacgcactgctcaccaacaatagaacaatcgtgatgccgcagcagatcataaacttcggtaatacctccggtcgaagaattttcgatcggcaaaacaccgtatttgatctcaccgtttttgaccgcctgcactacatcctcaaacaaagcataatgatgtctgtttatatgctgtcctgcaaaatatctctccaaagcctgatgactgtaagaccccggcattccaaaacagccaacctccatgacctcctcctgcggcagaactcgcggctctgccagcagtacatgctccaaagccttgctctgctccatgatggtcgtcatcatcgctgtaacagccggtgcatactctttatgctgtaaacgcatacaggcctttgagagcacctgagcttcccgagccgcatcaagcacaggcagcccctgctgttttttataggccgcaacttccagcactgcctccatccgttcttccaacgccgcaaccagctgggcgtcgatcttgtcgatacggcggcggatcgcctctaaatccaatttttccatgctcacacctcaccgtcaatatccgcagtcaacagtatatctaaaacagtccaggccgtaacaccttccacgacaggtactgcccgctgcacgatacagggatcatgacgacctttaatttccaataccgtattcgtatgctcagccacatttatcgttttctgcggcagggaaatagaaggcgttggtttgaaccctaccttgaatacaacaggcatgccattggtaatcccacccaaaataccgccgttattattagtttcagttcgcacagaatctccatcataatacagcggatcattagcctgtgaaccggtgctgcggcagaaaccgaagcccataccaaactccagcccctttaccgccggaatagaaaacagcacatgtgccagacggctttccagtgaatcaaaaaatggttcgcccaaaccagccggcaaattaagcgccatgcactcaatactgccgccaatagaatcctgacgctcacgcgcttccaaaatcagcgcctgcatctctgccccacgtacatcgtccaatacggcaaattccttctgccgcagactcatcaataattcagcatcttctcccaatgggtcaaacttcctgtcaaaaatctcacccacattattgatatgtgcccctataacaattccataccgagccagagcctgcttggcaacagctcccataaaaaccagcggcgcagtcagtcgtccggaaaaatgcccgccgccacggtaatcattgaagcctttatatttgatcttaccggaataatcagcatgccccggtctcatattatcttttagaatactgtaatccttagaatgactatcgctgttagggatcagcgcacacaaaggtgtccccgtcgtccgcccttcaaaaacaccactctggatcaaaaaagcgtctttttcctgacgctgggtcgaaagcagattgcggcccggagcccgcctttccatctcgcgtttaataaaatcaatatcaattcccagccccggtggtaacccgtcaatcacaagaccaatagaagcaccatgggattcgccgaaaatcgtcatttttatttttctgccataaacaccgctcatatactttcacccgttcccacagtttttatcattccgcctaaggctgtaaaatcctgccaaaattcaggatatgatttttgaacacattcgctgccactaataataaccgcctttttgcaaaccagactcgctaccgctaaactcatcgcgatgcggtgatcgttccaggaatcaacgcagccgccctgcagaccttccggccgccccttgataatcagcccgtcagacagttctgtaactgcagctcccagtttattcaattcactggtcatcgctgccagacggtcacactctttaatacgcagccgtcctgcattgatgatttcagttgtaccttcactgaccgctgccagtaccgttaagacaggaatgatatcaggacagtctgccgcatcgataactacaccattagtcgacgcactcgaggccgtatgattaccttcggcatcacaggttatttttcctcccatccggttgataatatccgcaacgaccatatccccctgcaacgagtccctgtttagtccagtacaggtaatctgcctgctcagcgtgccggcaacaagccagaacgccgcctgagaccagtcaccttccaccatgttcctgccgcagcgatacttctgaccgccgccgatatgatatttataataattttcgtgttcgataacgattccgtattttgccagacacgacaaggtcagatccacatagctctgcgactccagtgcagaagtaattttcaaaacagaatcgcctgcaagcagcggcaaagcaaacagcagaccgctgataaactgcgagctgacattaccgggaagctcgtaatcgccgcttttcagcacaccgttcaccgtcaaaggcaaatacccgttagaggcagttgtataagacagctcctgcctgtcaaaaatatcataataagcctgcagcggacgcgttaccagctttccgtgaccagtaaatgtcagcggctcaccgcacaatgcccccagagggatcataaacctcaatgtcgaacctgattctccgcaatcggcagtactttgcgaaactcgtacattaccactgccattaatagccaaagctgtgcgtcctgatctttctgaaggaactttttgaaaaccgatccccaatgcagtcagacagcgtagagtagcttccatatcgtcagacatactgatattatcaacaatactggttcccgccgacagtccggcacagataatttccctgtgccccatgcttttagatgacggcacgcaaacactgccgttgagctttgccggtgtaatcttcaatgtcgtcatgagctctcctatccaatataggcaggtatatcctgccagtctattttatgcaggcgtccgacgcctattttttcaataattaccaggttaatttttttaccgctcttttttttatccaaagccattgcctgtaaaatttcctgagcatcaaatactgcacttaccggcaaagcaaactttttcagtacgcggctcaactcctctgcagtacctgctgccgtaagtcccagcttctccgtttgacgcgtcatttgtaccataccgatgccaacgccttcaccgtgagtataagtagtaaaaccgcagcatttttcaatagcatgcccgatagtatgcccaaaattcaacagcatacgttctcctgtgtcaaattcgtctttttcaacgatccgcgccttgatattacagcaggtctcaataataatgtccgcctgctccagcagctcctgatcacttttaacagcagcgatctgagcaaacaggccggcatcgcgaatacagccgtatttgatcgcttcagccaaaccatcatgcaaaaaccgcagcggtaaagttttcaataaatccggatctataaatactgcttttggctgataaaagctgcctgccagatttttgcctgacggcaggtcaatagccaccttgcctcctacgctgctgtcgatctgcgctaaaagcgaggtcggtacctgaataaaatcaatgccgcgcaaaaaggtagctgccgcaaatccgcctaaatcgcccggcacaccaccgcccaaagtcaggatcaaatcactgcgcgtcaagcctgcccgtgccagttcgtcataaacctgacccagcacagttaaatttttactttgctcaccggcggcaaaaactatcctcgtaacctcaaacccgctggcagccaggctgcgttccagcctttcgccatataagggatctacgttgctgtcgctgatgattgccgcttttaccgcctgagaaagcactctggcctttgccccgatctgatccagcagcccggctgcgatttcaatattatatgttttctcacctaacgctactgtaatcgtacgcatcagtacaaatcctttcttttaatcgcagcttcccgcatcatttcctgcaggagctgcgcgtcggcagctgtcagagcttcgcgccagcgttccaactgctggctgaatgcagctaattcctgcagaacgttttccctgttcgccaaaaacaaatcgctccataaagacggattgatatctgcgacccttgttccatcgcgaaaactgccggcaataaaatatttcgtattttcattataagaagcactgttgatcagcgctaccgctaaagcatgaggcaaattactggtataggcgataatgcggtcatgctcaacggcatcaacctgcactacctgcccgcagccaatcgcgcctgcaaagctgctcacccattcgatcgccccactgctgttaaaagctgccggcaccacgatataattggcaccgtcaaaaatctcggcctgggacataccaaaaccgctgccttgacggccggccatcggatgccccgcaataaattccatccttccggtaagcagtcgctgcacgtcctcaggcaagctgcctttaatgcctgtagcatcggttatcaaaacatcactctgcaaaaaaggcaccgcactttttacaaaatccagcgtagctgccggataaaccgaacagatcactacatctgccgcctgcagtcctggacctgccccgcaaagagcttcgtcgataacagcctgttcctgagcctgccgcagcaccttgccgtcagtatcgacaccgatgatcttctttacgcccaggcgcctcagcgctttggcataagaaccgccgataagtcccatacctaccacagcaaaagtaagctgctgccaatccgtgcttctaaaaccactttccactacgttcacctcgttaaactttctccattctacaatcctacgataatttgaacggcttcttgttttttatcaagcaaacagccgtttctaacattattatactatatcctacatctctctgccgattatttgcgcaatgcccttcaattcacccatcaggtgtgcaaagcgttccggcttcagtgattgtgccccgtcacacagtgcatgctcgggatcgttatgtacctcaatgatcaatccgtctgcaccggctgcgatagcagctttggccatcggttcaaccatccaccacatgccggaagcatggctcggatcaatgacgatcggtaaatggcttagtttttttactgccgggatcgcgctcagatccaaagtattacgggtataagtttcaaaggtacggataccgcgttcacacaaaataacattatcattaccgccggccataatatactcagccgacatgatccattcttctatcgtcgctgataaaccacgtttcagcaaaattggtttatttgtcttgccaagctccttcaaaagctcgaaattctgcatattccgggcccctacctgaataacatccacatcttccacgaaacgttcgattttatcagctgacatgatttcggtaacgatcggcaggccagtttcctgtttagcgatttttaagagctccaatcccttttctttcaatccctggaaagaatacggtgaagtacgcggcttgaaagctccgcccctcagcatagcggctccgccgagctttaccgacttagcaacggaaatgatctgctcttcggtctctaccgagcatggaccggccataacgatgatttttttgccgccgatcttaatcccgttgacatccactacgctgtcttccggatggaacatcctgtttgcccgtttgaacggctcctgcacacgcatgaccttttctacccaatcgttaacgcgcagcagattgatatctaaagtactggtatctccgataacgcccaggatcgtcatattcacgccgacgatctcattgatctggaagccgttattgatcagtccgtttttaatcttctcacattcctgcatcggtgcgcctggtttcattacaataatcatttttgttctctccttttaatttatatggttaaatttaattataacctgttatagctcacgtccaacggctcctgctatgatcttcaaatcctgcatcaacctgccgaagcgttcaggtttcagggattgagctccgtcacataacgcatgctcaggatcattatgcacttcaatgatcagtccgtcagcacctacggctactgctgccttagccagcggctctaccatccaccacataccagccgcgtggctggggtcaaccaccaccggcaaatgactgagtttttttactgccggtatcgcgctcagatccaaagtgttgcgggtataattttcaaaggttcggataccacgctcacataaaataacattatcattaccgccggccataatgtattcagccgacatcagccactcctctatcgtcgcagacaaaccgcgtttcagcaaaatcggtttatctgtcttgcccagctccttcaaaagctcgaaattctgcatattgcgggcgcctacctgaatcacatccacatcttctacaaaacgttcgatcttatctgctgacataatttctgtaatgatcggcagcccggtaacagctttagcctcctttaataaatccagtccggtttcctgcagtccctggaaagagtatggagaagtacgcggcttaaaagcgccgccacgcaggatcgcagcgcccatttgcttcacatcctccgccacgccgataatctgttcccgcgtctctactgaacaagggcctgccattaccgtgatctgtttgcctcccaccttcaccccgcatacatctacgatactgtcttccgggtgaaacatcctgttagcacgtttataaggctcctgcacacgcataaccttgtcaatgcagtcatatactctcagctgattcatatcgaaggcagccgtatcgcctactacaccgaacagggtaaaattagcaccgcggctttcatggatctgaaaacccttaccttccatcaagctttttactctcaattcctcttctgcgggaatccccggtttcattactataatcatttatctccactccttaatttcatttttatttacacaagataataaaaaaaatcaggcctcgtaagagagcctgattaaaaattcatcttcttatttacagcagcatatctcagctacggtatcggcatctgtttacggtaatagaattatgcagttttgagcaagtaaaataaccagcgctaaaataaaaatagccccggctaaagtcaaaagcatattcatttacccaattagttctcaaaacagattccacgatcaacccacctaatttaaatttcttgtgtaaaacttaattgttgttattttagacccgtatcaaaaaggtgtcaagcaaaagcataaaattcaaaaaaattaatttttatgcaccgtctattgtaaacaatgttacaacaaaatcaatggagcacaccgttgatgccacttcccaaagtcattaccccgcctatcaatactacaagcagcgcaatacgcttaaataaatgctgattgatacggaaaaacattttttctcccagccaccagcctaaaagtactgccggcaacacatacagcgacaaagcaatcaaatttccaccctgaaatgtacccgcaacaaaaaaactgcctaaagtacaaaaactgccgatagcaaagatccagatcatattggcgcgcagcaaatttttctccatattctcactcaaaaaatataaagcgatcggcggcccgctgatactggtagtcgcactgaaaaaaccgcttaaaaaaccagcagaaacacgtcccagctttttatttttgacctcaggcacaaaatttaattccatcaaaagcgttacaagcaaaagcgctatccctaataaaatctttaaatgattagcatcagccactttcagcagatacgctccgggaataatccccaacagactgccggcagctgttatcaaaactgtcggccactcaaattctccccaggtacgccacatcatgatcacccgcacaataacaccggcgataataacaaatacaactgtctctttcggccccatgaccatcgttaatacaggagctgcgatcagcgcaaagccaaaaccagttacagtactgaaaaaagtagcagcaaataatatcaacgaagcaactgtcaagacaaaataatccatggtttctctccgctcttttctgaaatagatatctgcattataacacaaaaaagaagcccctacaaaacggagcttcttccagtcgtcttatttcagccattgacgtattatttttttcaaaagctttagttcaaacggcttggctatgtgtgcattcatccccgcggccagcgccattttcacgtcttccgaaaaagcattcgcagtaatggcaataatcggaatccggaccgcatcactgcgagaagcagctctgattgctcttgccgcttcatagccattcatagttggcatctggatatccataaaaatcaaatcataatatccttcaggcgccgccaggaatttttccaatgcttctgcaccatcaccagcggattcacaagtcaagcccaacagcttcaaaaactctaaagcaatttccagattgattgcattatcctcaactactagtacccgtttaccgctataatcaatatcagcagcattttcgttatcaccggcaggttgttcatactcgaccgcaactccgttctgacgctgcaccttcagacaaacagaagcagtgatcttactgcccttaccaacacagctctcaacatcgatcgacccgttcatcagttttgccaggttcaaactgatcgtcatgcccagaccagttccctgtattttactgacccgagaatcttctgctcttataaacggctcaaaaatacgctcgataaaactttgttccatcccaatgccgttatcttctacaataaaatcaaaaacagccagatcatgcggtaacggcttaacagtaaccgtcagctttaccacaccttcatcaggcgtatatttaacggcattggacaacagattaagtaatatctgctgcagtctcaacgcatcacccagcacagttatatttttcagtgcctctgtttccacaatcagctgatgccgtttctcctcaacagcaggtttaatgatatctaatgcttcctcaactttttcttttaataaaaatgcttccgagttcaattctgttttgccgctttcgatcttcgacatatccagaacctcattcaacagctccagcatatgtttgccagaagtgacaatttttttcaaataataatctacatgatctttgtcgtcgcaatgtgccgctaaagccgccagccccataatagcattcatcggcgttctgatatcatgcgacatttttgaaaagaattcacttttggcctgattggcctgtaaagccagctgatatgcgtcactgatgatttgtttatttgcttcctcctgcatcgtgcgttcatggatatcgcgcatcgtcaaaagcagccgttcttttaatttaccaaaatatgaaagcttaacttctttatatctgtacccgtctttagcggatgaacggaaatacagcataacagcctcttcctgctccaggcacttcagcaaactatcaatactccagctttttaaatgctcacaatcttcttcacaaacaaactcttttataaataccggcagctgttcattaatgctgccacgcagcggcaagccgtaatgagcgcaataaccggcaaaacgcatcacataatcaccactgtttaaatcacagatgcaaacagcatcatagtcatgttctatcgtaaaattataaatagactgcagctcgattttttcaagctccattcctttttgctcgctgatatcctcaatgataccaatgacaaaagtcggctgctgctgatcatcccatgacataacagtcattgttacccgcacccagcactgcttgttcttgtcacagaatgtggaagatgcagttttagccccattatgaatagcttcgtacatcgcatagcaatctgccttactttcaccgctcacaaaatcttccacaaagctttccggaatattcctgtattccatactacagttaaaatatttactggttcttaccggcataacttccagacgtttttgcggataataataaaaatggaaaatttttgttccttccagaacctggcgcagcagttcctgagtacccttatcctgctccagcaattcctgattaagcagctccatctgctttctgttatcaatatccagaaaaacactttgaataacacgttctccgtcaatatttttgatatattcaccgctgccaatgatccagcaataagtaccatcggccctcagcgcccgatattcaaaagactgtttccccttgcccagcagtatcgcgttcatgctctgatatactctatcacagtcttccggcgcagccagatcttctatccgccaggatttacgcttccagaattcttctttttcataaccaaaaatcctgatagcttccatattggcattttgaaaaacaatacttccgtcagcctgtggcctgtattgaacgataccgcacaatacggactgaaacagctcgtcataataatcacgtttacgtacaacttctatcagctgcctgctcttttcgatattggcctgtcttaagacctcaacatcgctggcattctgatgataaccgcgaatataataagcattatcgtcttctttatataacttgccgctgcagcgaataaaaattgtgccccaccatggatgcttccagcgatactgaacctctaccagccttttggtcgtcagcatctgttcaatatatttctgcactatttccagatcttctgcaagcacgccttgcgcaaaatgtttataattatcttccagcgataaactcttctgcagccctaaaagttctaacattttatcatcggcatacagacgcacgtcagtattatttttgtttatttccaaaagccataaaccaatattactgatttccaatatttcctgcatccagctggaactgtaaaaaatatcttcttttaagccgctagagtccataatagttcctctttctatttcaaacttcttattgtctacattataccttactcttaaacaatttccaatatttgttctttaagaaatgttttttaacatccacaaataacgcgcataaaaaaagactctcgcccaaacgagagtctttacttatttttcgctttgcagtcctttttcagtcagcatagtccagccttcttcctgcacgatcaggccatccttcatcaaatgccccaaagcacgtttgaaagctgctttactgataccaaatttttccttaatgatttccatcggtgtagtatcacagtaaggcattttaccattccgtttatgtaaaaaatttaaaatatcttccgcatcggcgatcatagcattttctttttgctggcgtaaggacagatttaccctgccatcctcacgaatataagtgatgcgagccgtgatctcctgaccaaaatccaaacgcccgccgggaacttcactgcgatgcagaaacgccaaaaagcgctgattagtaaaaatgaagaagccttccggcaggatattatagatagtacctgtcacgctgtcgccgaccttgacaccaacagcaggtttggaagccttcagcatttcttcttccacccgcatactgacagcagggcgtcctgttttatcgcgatacagctttatccagaccagctgacccggcgacacatgccctcgcatttcgctgtacggcaaaaatacaccgcgttcagcgccaatatccacaaacccgccgtccttggtcacacttaaaaccttaacgtaaccgatctgcccttcgcgcattttcggtaatttctggctcgccgtcaaccggccatgcggatctttatacaaatagactttaacttcatcgccaacattgaccgcttccgtctgctgcagcttatgcagcaggatatcatcagaagtatcgcccgtaccagcgtcaaggaaagcgcccatttcgcccagacgtgccacttttaaagtaacaacgtcacccgcacgatatttaagctgctttgccatgtctttttcatcagtcatttttgctctccacaaattcttccgacggagcatcagcccacagttgttccagattatagaactcgcgttcttcttcaataaagatatgcgcaacacaattaccataatccaacaaaatccaacgaccttcagcatagccttctttgtgagtaacaaaaatgcctgcctccgccaatttatcttcgatattgtcagcaatagctttaactagaatattatttccagcgctggcaataataaaataatcagttacaggagaaatgttctccatattcagcagcaaaatatcctttgcttttttatcgcaggctgccgccgcgatcttgtgtgcaatttctttagtagtaaaatccatcttttcgcctcctttattcttgttcatcttcatcatctttcatatagggaatgccgatttcgtccaaagatttttgaacttcctcgcgtgatgtagcccaatagctgataccttctgtatcgtcaaaattaccatacagcatacccgacttgaccttttcgtcaccaaacagcttaaagctgtttgcagccttgatcatcgtcaaagtgttcatatcggtctccacatgtctgtcaacagtcgaaaacagcgccgggatcttagtcaccgtatcgatattgaaaatctgtgctgccgccgctttcataaacttctgctgcctttgcacgcggccaatatcacccagctcatctttgcggaaacgcacatattcgcctgcccgcttaccgtccagatgctgatagccatgtttaatatcaataacaagatcggcgtaaggatcttcataatacatatccttttccacatataaatcaacgccgccgatcagatcgataacatcaataaacgcacgccagtccactaaaacataataatggatcggtacctgcagcagattggctacagtttgcttggccatcatcacaccgccgtaagcataggctgcattcagcttatcccaaccagcccggcccggaatctgcaccttggtgtcacgcggcagcgaaagcagcgcaaccttattatcgccgggatcaaagctggccagcatcatcgcgtcagttcgctttggttcatccggagcagcatcactgtcaccgtcatctatacccaaaagcaaaatattgatgcgcttgttcaatttttcattttgggttatcttgtcgctggcaccaacaacatcaaccttcggcggattgataaaattgtcatagatccagactgttccccaaaaagctcccgtcagcagtaccgccaaaaccaacagtacaaataccagcctgccccaacgtaatttacgtttcttgcggacaggcctgatttctctattttcttccacagacattggcatctcctacaaattcaatttaagccttttaaacttagccgccaattcgttatacccctctatgcaatgagggtgtaccaaaaggtcgtattccagcaaataacgtatcgtctgcgcataagcctttatcatggcctgttccaggtcaaccttagccagccggcgcatttcatcgatacctgcaaaatcacgggtcggctccagcagatcagccagatagacaaccatcgccatcttgctcatgcctgccgcaccagtagtatgaaaacggatagcatccaaaatttcctgatcggtaacgccgtatttttcccgggcgtaatatacgcccagtttggcatgcagtaaaataggctgattcctttcgacatcatccattggtaaacccaaagcaattgtatgcatcaaaagatcacgcgtaggtatctcacgcccgcaatcgtgcagtaatgcccccacgccaaccttttccttatccagtccgtaaacagctgccagttcaagagcagtatcgtatacagccaaagaatgtttaaaacgcttatgaggcaaagatgctttaagaagttttttcatttctgtgatatccagcatgataacaactcctctcactaccattaagactggtagagatgctcctctaaaatatacttttctacactttccggcaccagacccttaatagaaagtcctcgtctgacacgttcacgaatgccagtcgaagaaatatctacttcaggagtatccaaaagtataattttattcttagcaggctcgccaaaaaattcgcaaaccttgtcaatagtctgcccataaccgggcctgtcagcagctataaaagtcacttctgccagcaattccctgatgcggtgccaggtgttcagcatcggcacagcgtcggcaccaataataaaatacagctcatattctggatagcgggcctttagctccataaccgtatcataagtataggaaactccgctgcgctgcaattcaatatcagtaacttcaaaataaggataaggctctgttgccagctccgtcatccgataacggtcagcagcaggtgcaaactccagaccaaccttatgaggcgcaataaacgcaggaacaaaaattattttttccaagcccaaatgctcgtaaataaacttggccgtctgcagatgccccaaatgaacaggatcaaaagtgccgcccataatgccaagctttttgctcttcactcgtttacccaccttccttattatcactatattataccaaaaacaggcaagcttgcacaactatatgtaaatattaaaattacgaaaaacattttatatttatattacaataaaaaagtaccatatctattgtagttatggtacaaatcaaatctctatttacctaacacacaaatgccttaattatttctcgaaaaatctcctctttgttcatatttccagaactacttttatgatacaaataaaaaaagttatcccgctctctttcagagccgtttaaaagtgcaattacatctttaattttcacaactttttcttccgctcttgatttaaaaacaatattaatactagaaacatccggtttattaaaaccactataaaattgtgcagcacttaaaattacaaaatcaaacgtctcttttttagattgcgcataatttttgagagccgtcaacactttcattatatctgtttttgtatttaactgcatttggcgggaattctcactaatcttgatagcatctgatgattcaagctccttaatttcattattaaatttatccattaatttttcatccagagtccaactatcataactcatagttacatatcgttctattgccttaaaagttttctctattctatcaaggatttcaccaccagttatttttggtaacaaatatgccttatattcagcttcagatttccataatggatgtctacgatccctgcgactaaaatattctttacttaaatcatctgtatgtttatttttaattaaatatatgatgtcatcatcacataaaagtgaaattttcaaattgtctttaagacttattcccgtttcgcctaacgcttcaactgaaaataaccttttttcttctgtacctgtatctttatcaatttgcaatattatattctgcataatatatatctcatacaggacaactggatgattttgtatccattttctttctgcatcatgagcataaacaacattttcaattacacttatagcacttttcttataggctagtttgtactccatcaactgtttatcttcatttaccggctgcttaataatagtcaatgaagttaataatctcttatggtcaatatttatcgtctcaaaccctgtaaaaaaagcatccctaatcaaatagtcaagtcggtcaacatcaattactttagaattaagcaaagaaataaaacaattcaacaagctatttctttcattaacttcagaatatttataaccggttatacatctagcaaaaaactctttattgaacgaagatggaaagaacatatcaaatgttgtaattccaataatagcactcattatttcatggggtgctgcagagcgactatcttcttttggtacatcatttgaaaaaatttggtctcctactacgttctttaacctttcatgcagctctgtatattttccactttgtaggtcatttaaataaaatttctctccagtatgagaaaatggagcatgaccgacatcatgcaacaaacacgctaataaaaaagttgctttcacctcttctaacgagattaaactatcaatattagaatactttgattgtaattctcctaatatagtattaactgctatttctcctaaatgaaaaacgcctaatgaatgtataaaccgattatggatagaagaagcatataaaggcgaataacttgtttgagttattcgccttaaacgctggaaagcagccgtatctataatatcacgcacatactttattggtatatcaatatatccatatattgggtctttccattgttttacatccattacgcacaagcacctagtttcgatatggattgttcgtctacaaaagctcttaaaacatctaacgaaatataccctctaaaatatttttctaagctttctatagaaatcccttctttaagtaatataccaaatttcccatttgattgttgttcttcaaaaaagtcagaataatttctaaacattgcctcagtacaatcccttgataaaattaaaatagccttttctcccttttcacaaagaaatttcacgacttctgcaccataattttctaattcctcatatgaaacaaaccttttttcggagttcttagttaaaatttctattaatgcatttgctgctaaatcttcaattccaatgtaaaaacacataatatacctccatattcaaaacaaaattaagtgtaatcgtaataaacacattcacaaactattttacttattatatcacatatttgagataacaggtgtatttaaatatgtactttttcattaaaatacaccattattttttgcttttgcatgttctttgttttttcttattttctcttctctatttttattaaactcttttttctgaaattctttatcataaaaatttactttgtaggtttcctcaacttcacatctagtacttttaaaaaggaaattaaatgtagcataataattcttatcttcaattgcatcaaaaatcttaaaaatactttgagttttctttttttgttcagtatacggaaaaagaattcctgaaaatattaaatatccattttctgaaccatatggatctaactttatcggtaatgtcaaaacaactctttttttactagcagaatattctttattatagacagacattaatatgctatctatttttttacttccacctgtgctgaagttaattgattcaatatttttttgtgacattaatttaggtggtatctgatttctatcatatttttcatcataccgtacagaaaaaacaggataattaagtaatatctcagttatttcaagcggctgattggacttattttcaaatcttacctcccctactaataaatgcataccagataactcgttttcatttatcggaatcaattcaaaattctctgcatttacaacaaatttagcttttgtttcactaaaagtatcaaactgaattttcgctaagaataaagttgcgattaatgctatcagactaatgcacaatgaaatattactttttatttctacactcactcttttcttctcccgaataatttcattttatatactaattatcacagcctgcaattctttatacttaggctcaataacaaaatttccagcttcgtcaataatgccccattgctcgccttttttgaccactgccagaccacgggtataacttccgatatcagtaatacccggtaactcggccaccgtatcaccttctctgctgatcaggcgccatttaccattaaacttggccgcagccaccttttcagtaaagaaattagcttcatcaaatttaggccgtacaatcggtaaaccttctttgctcacatatccccatttttctccgattttataagcagcgatgccgttggaaaacggtctggcatcattataaacgctctttgtcaccgacggcccctgcaaatcgataaactgtactttatcaccggttttagccacggcaataccttcgttaaacgaagaaagctcatcatattcaataggaatgatcacttcgccattcttgttgacataaccgctcttctcatccttcataaccaaagtcaaaccgtcgccaccaccattataaggccccacaaaatcatatttagtggtaattaccagatcacctttagtattgataaaaccacgtttctcattatcagcaacagtatcaaacatactgacatcgtatttccctggatgctttacataatcatagtggtcagttatagaactcatcgccatagaatttaaaatcgtattgccgataaatcccagcggcgaaaatttgctcacccgcaccttgacctgtgcaacgccatcatgaaaagacgatacctctttatatttagttacaaaggctacctgccccatcttatcaataaaagtcaccttaccgtcaacaagcgttctggccaagccttcgctaaaaggcgcagcctctttatacttgccactgataacctctgcccctgcagaatcaatgtaactccaaaccttgccttttcttgcagccgctaaaccctctgcaaagctgctgacatcgtcaaattgtgccgggatcaccaatttaccggtcacatcgacaaatccccactgcttgccaatttttacagcagctaatccttcgttgaaaagtttcacatcatcaaacttattttgacctattagtatgccattagcgtcataatagccaaactttttctctttcgaagcaaaataactgccatcatcattttgccagatagtgtcaaactccattggcaaaatcaccctgctgccggcatcataaatagcgaattttttattttcgcccttcacccgcataatacctttgcctgtaataactatctcactgaactcgaacggtaaaatcaccctgccctgctgatagacaacgccccagtttttaccgtctttcaccttcaccagagcagcaacatcagcagctaaacagctttgcaccatcatcaacaatgccatgcacataccaactaaaacccttaccatacttttcaacccaattcatctcccaattaaggtctcctgtgatttaaatctctcatagaaaacattaccattatatttttacacatctctggtcaaagccgttttaacgcttcttaccaaaaatctgcagcagccgtaaaaacaggttaataaaatcaagatacaaagtcagtgcacccagcaccgcaaatttagcaatactgctttcatcgtcatctatgctgtgagctattttttttagcttttgcatatcgtaagcagtaaggccaacaaagataacgatccccacataagtaagaatccacatcatagtgtcatttttcaaaaacatattgacgaccgaagcgatgatcagaccaatcaaaagcataaacaagatactgcccattttgcttaaatcctttttagtgacatatccaaaaagagctgttgcgccaaaagtacctgccgttatcccaaaagtcgttgcaatggactcctgcgtatacataagaaaaattgccgacagtgtaacgccggttacagctgaataaacaaaaaacaaaaagctggccatactcgcactcagcgaattgattttgctgctgatgatcataaccaatacgatcggcgcaaacaaaaacgcataaaacgttatttgactaccaaagatcagatttaacaatgccggagaatgtgccgtataataggcgactatccccgttgataaaagtccaaaaaacatccacccataaacctgggcaaaaaagctttgtacaatacttgtacgcttaactgattccacatatgattgattttccataaatttaccctccttaaaacactaattatataatactaaaaatactccacttttccaaatttagttaattgcaaaaaaacataaaattccatcaaaatctacttttataatgccttaacttataatagcgcgcaatgcggccttttgttcaagtgtgccataaatattatgtccttgattatatgcaaattcaccactctcataggtaagcatataaataggacaaatcatagttttacgtaaaaaaagatattctaattaccacatataagcaaggattaatatcttggcgggatgcaaatg

SEQ ID NO: 10048 - DNA, 44289 bp, Unknown
  gut microbiota DNA sequence
gttcatattgctaaattatcgctatattatactaaaaacaggtaagcttacacaactatacgcaaatatttaatatagtcaactaatatttttactaaacaactgataattcaataatcagcttattttcaaactccataatgttcaagttgctgaataagttttgttatttcaaaaatactttccctcctttttacatccaatttgtatttttttataacttttctataaacacattcccaaaatgcagcaaccatattattttctgatatttcaataatagaaattggttcttttttccttaataaaataacatatgcaccctctttgatatgaataatattctgacaaatatcatattcatcatccagtatcacataataatttacatttctttcaagcaactctaacaaattaacaaggtgttttttgtaatcatatgcagaataatagtattgttttccaaatataatttctgatccggcaatcggaactactccttttagtatatcgttgaaagcggccaatggcattatgtctataaatagctgttcttctattacattatacaaatggcaattatcccgcatcataatctctaaaaatgttctgttagaagtaatcccgcaactatccatcaatctattcaagatatcattaggtatcgtagtaaaagatagtgatctgcttctagaaatacaattaggaaaattgccagttctttccaacgcatgcctaaaaaaaatagatctgtactgctcaaaatcataagttcttccaattttacggcacaacataatatatccgtcaaattcattttcaaacccactaattacttttttatcaaaacctaataatgtaagactctgttctttacaacatgaaattgaggtagacgaaagtacagcacaatcagaagctataaacaaggttcgacgaaaaagtccatcctttaaacgtggataataatacatgtctatattaccgcttaatatataaggcaaccataaattcattaattcaagaataccatttagatttgtaacagcaggtattattattttaaagtaacatttcatattgattaacttattcaatatctttgataaatatttagtatattcagaattctccagcaaccattctgtattttcatctgttgttatctttataatgcaagattttttttgctccagtatcctgcttaaaaaaagttccaatgcctgccttttgccttcattgccaaaaaaagtatttattccatcttccacgtgtttaattcttttggagtccaaattaaaaacatcatttttatcaatatcactttcccctttattattaggaatcatacaacaatctattgctctcaaaaacaaacctgcattatttattccgtcattcatcgttcctgaaagccactctaagagaacatcctcaataagctgttcctctgtaaaagttcttattctttccattcctaaaatttcagctaatgtaaaacgttgatactctccattacagcgcttagcaaaatattttgccattgcttttatatgattgatattcctcggtatgttccgccgaccctttctcaatctgctaatcattgatggatctacattgatagccttagccaatttaatgttcgaagtatgcgtaaccgataataaaaatactaatttatctgcgaaattcataatatcacctctattataatacgataacacagacataataaagcaacaataaaattgccatattatgtcaatgccaaatttgaatttagggttttaaaaatccaactttcatatataattatttatgaatttaagcaaataataattattatttcatttggagtacacaaaattatgaaaacacatttttcaattgctgaaataaaaaccactatgaaataccttgaatctttatttgatgttgtaagattagtggatccaatcgaaaccgctattctaacaataaaaaacggtaaaattcatcgcgaaaaatattcatgctataaagtatgggataaaaaaaacagatgtgaaatctgcagcagtatatgtgcattaaccgctcaatgtcccaaaacaaaacacgaatttttgtcaaataatattttctatgtagtttcgcaaccaatttacattatcttgacagaaaaagaaattgtaaaagcagtattagaaattatcagtagaacttctgatcatcttctggaaactcctattcaacaacaaaatttttttgctttgctcaacgaaactcagcgaaaactttatgaagacgaattaacaggagtatataatagacgctatttaaacgaatttctatttctacagcataaaaactctaaaattccagaaaaattaactattatttttatggatctacaaaattttaaactcattaatgatacttatggccatttaatcggagataagcttttaaaaaatatagctcaaaccttagtagctaatgtaagaacccaagactctgtaatacgattcggtggcgatgaattcattatcatactaacaaactgtactgaagaccacattcaatataaaattgataaattaaaggcaagattatatgcaatatgttacgatacaaaaagcaatttacatataacagcaaatttcggctattcacattctaataaatttattctttctgatgcaatgctacaaactatgatccaaaaagcagattcaatgatgtataacgaaaaaaaattagcaaaaaaatctttaaacagtacttttatttaaaatatattaaattttcaaacaatgaaatatacggtgaattatgaataatttaaaaatatttttatcattttgttggattataatttactttagtttttcaatcatcactttcccaacaattactgcagctgaaaacaatactataaaaatcggttatatcgattacactggctttattgacaagaaaccagatggatcttattctggttatggagttgactatcttactcaaatatcgcgaagtacaggttggaagtatgaattcatttacgattcatgggatacccaacttaaaaatttaaaagaaggctctattgattttctttgtcacgcacaaataaccccagaacgtcaaaaaaattatctattttctaaaaattccataggttatgaacacaatatagtttatgcagccttaaattccaattactactataacgattatcaaatgtttaatggcatgaatatagcctttttagccggcagttcccaaaatgatcaattcttggaatggtcaaagatgcataactttttttataccagcaatctttatcccacagaagaagcagcattcgatgcccttaataataattatgttgatgccgttgttatgggcagtttatcaaaccaaaaaggttataaaataatcggaaaattcgattatgagccattttattttatgacatcaaaacaaaataaagaattgctcatagctttagataacgctattacaaacatcaaagtttccaacccaagcttcgaatttttattgcataaaaaatattatgaaaatagccatattaataaagatccattgtttacacgtcaagaagctgaatacataaaaacttgtggtactataacaatcgggcaactgccaaatcgctatcctttatctcattatgactacgaaagtaataaacttgaaggcataaatgaagatttgctatcgctcatcgctgaaatcagcggtttaaaattcgaatataaacctattgctctgacagagaaaccattatcagcgctgaaagataataaatttgacatggtagctggaattttaaagacagaagaattgcaaaaagacccagtattttccatatccgatactttatttaaaagcaatattgttttagttactactaatggaaatcactttaatccctataagcattataagatagctgtaaaaacatcctttgaagcaatgcagaattatattaatagtaactaccctaattttgatattatttactatacaactgatgaagaatgtcttgacgcaatcgtcaatggtaacgctgatattatgttacaaaatgtttatgtagttaactatctcttacaaaaaccaaaatatgagtcactaaatatttttcctcaaaactttattgatgaaaatagctgtattgcaacattaagcaaaaataaccctttgctcctttccataataaataagactcttgctgtcatagatgaccaacaacgcagaacgattgttcttgacaacactatagcaaagccttatcaatttacgttaagtgacattttatataaatacaaagcagtattaatagttggcattttatctttattaattttatgccttatgtttctggtcatctttaaaatgaaaattaaaaattttcaaatgatggaagaaaaaaatcaacaactaatggacactctaatacaggctgatgaagcaagtcaggcaaaaagccgctttcttgcccgtatgagccatgaaataagaacaccaatgaatgctattgttggtctgaccgaaattgctaaaaagcaccttactgacccaaaccgtattgagcagtatctatctaaaattgattcagcttcacatgttttgctgaatattatcaatgatgtactggatatgtcggcaatcaaaaataataaattgaaaatagctcatgaaaaatttgatatgaaaaaaatcattaattccattactgcgatttactataaccaatgcaaacaaaaaggaatcaaacttgaagtaatttcagcctgtttaactcatgaaatacttattggtgattcgctccgcgtcaatcaaattatactaaacttgatttcaaacgcttctaaattcacgccagctggtggtaagattcgttttgaaataaccgaaaaagcatacaaaaaacaaaccatattcatacgtattattgtttctgatacgggaataggaatgaccccggaaatgttaacaagactctttaataccttcgaacaggaaaatgctaatacagcacaacaatatggcggtagcggacttggcctgtcaatagttaaaaatctagtagaattaatgcatggatcaatctcagtagaatcaaaaaaaggaattggatctatgtttactgttgatttgcctttttctattcctaaaattgatgaactttcaagctcaaaaagtattaatgatctacgcgttcttgtagttgataatgactgcgcatccagaatttatatgacaagcatcttagacaggataaatgttcaatatgatattgccacaactactgagcagacggtaaagatgctatctactgctgataaagccggcaaacattatgatatttgttttattgattgtaaagcttcttttgcagacagtataactttaactaaaaatatcagaaaaatttatgataaaaaagcattagtaatcatattatcggcttatgatatttccgaaattggtgaaaatatggaaacaagcggcgctgacatatttctgcaaaaaccattattccagtctactgtttttaatatgttaatatcacttaccgataaaaattatattaaaggaacttttcacaaagagagttatgattttcatggaaagaaagttttacttgcagaagacaatgctcttaatactgaaatagcaattgaactattaaattcagtcaatcttaatgttgatcatgccgaaaatggtcaaattgctgttgataagtttttaacagcacctattggtacctatgatattattcttatggatatccaaatgccagttatgaacggatatcaggccacaaaaacaatccgttcaagttctcatcctaatgctaaaagtatacctatttttgcaatgacagcagacgctttcactgaaaatgttgctgaagctttatctgccggaatgaatggtcatattgcaaaaccaatagatacacatatactttaccgcacactatgtaactgtctgaggcaggcataaaatccaaataaactcttttggcattatgcgtcactttttcttgtgctgcaagcgtttatttcagaagcaaataaacgtttataattacgcacaaaaaacaactataccaattgcagctacagcttacatacatactttttttaataacatccacaatatactcattataaataaaatgacaattgccccatcagaagttttataaatacaatcaattacataatacaacacccgccccttttcataaggtcaggtgttaaacttttataaaacaaatcttttcagcagatactgaacgccaataatgatggcaactaaaagcagcagtgctttagtacggtcctttaaatcaaaaacagttttaggccttcttagataatctaagaaggcccgcattttttcgtgacaggttacttttttagtgatattttgcttaacttcatgttcactgcaataatttttactcatagcgcaacgcctcgataggatctaaaagtgcagctttacgtgcagggtagatgccgaagaacaaaccaataccaacggagaataccaccgcaatgataatagtcggtatggagatcaccgtttgccaaccggcaaaatagctgatggcataggaggaaccgatacctaaaatcacacccagtgtaccgccgacaacgccgatcaccatagcttcgatcagaaactgcagcagaatattgttgtaagtcgctccaagtgctttacggatacctatttcccgtgtccgttcggtaacagaaaccagcatgatattcataataccgatgccgccgacaagcaggctgatagcagctatgcagcctaacagcagggtaatggtattagcagtttccatcattgtttccatcaaagctgccagattacgtacggtgaagtcatcatcatcgcctgctttgattttgtgccgctggcgcagcagctgttctacttcgccctgcacctggtcgataacattttcattttcggcctggatcgttatcctgttgatgtgggtaatacccatcatgcggttttgcgccgttgtcagcggtatgtataccacgtcatcctgatcctgaccgccagccgattgacctttggcttccaggacaccgattacctgaaacggtgctttattgatacgcagagtttttccaacagcatcgccttcggggaacagattatcgacaatcgtctgtccgataacacaaactctggctctgctgctgagatcacgttcagtcatattacggccttcagctaatttatagctgcggatatccagtacattaggtgtcgttccttcaacactggcagtccagttttggttgccaacaactaattgataagatgaagaaacagccggggcaatataagcaatgccttcgatctgtttttcgatggcgtaagcatcttccgccgtcagacgcgcaccctgaccggctgccaagcgtgcgccgctggcagtacgtccgccggacataacgataagcaggttactgcccagactggaaatgttatttttgacctgttccttaacgccaaagcccaaactgaccatggcaataacagcgccgacaccgataatgatgcccaagagcgtcagcaatgtacgcagcttattggaaatcattccgtcaatggccattttgatagattcgttaaacatggtcagccctccattcgtcactgaccagcttaccgtcacgcatagttaaaatacgtttggtctgctcggcgatatccggctcatgtgtgaccatgactaccgttttgccgttatcattcatttttttaaagatatccataatttcatagctggatttggtatcaagattaccggtaggttcgtccgccataataatggccgggtcattgatcagtgcgcgtgcaatagccacacgctgacgctgaccgcctgacatttccgttggattatggtcgatcctgtcacccagtcccactgcttccaaagctgttttagcccgttccagcctttcctcttcgccaataccggcataaactaaaggcaaagctacatttaattgtgctgacagtttcggcagcagattaaagttctggaaaacaaagccgattttagcattgcgcgtacgcgccagttcatcgtcactatagccggcgacttctttgccatccagataatattgtccggaggttggtctgtccaggcagcccagaatattcatcattgttgatttaccactgccggacggtcccataatagaagtaaattcaccgacaccgatttctacgctgacgtgatcgagcgcatggactacggcatcgcccataacatatgttttcataatatcttcaagcctgattacagcagtcatatgcgcagctcctttcattttatcagtgcatcggagggccacccatgcgattactgttagtttgcgttgctttagcggccttgaccaaaattttatcgccttctttaagttcagggctgctgactgcgaccttatcgtcaccgctcagaccgacttcaacatctacgttgcggatctcttttgttgcttcattataaacctgtacataacggctggtgccttcagtccgcaggcaattagccggtaccatcagtacaccgtctgcttcattgacaataatatttgcgcgggctgtcattgttggcagcaatttaccttccgagttggctacatctacataaacggtgtaataaataacattattttcggtaacagctttacgggataccaatcttactataccttcaaatgttctgtccggataggaatcaactgtaaagtttactttctgccctacttttacctgtccgatatcagattcatcaaccatggtttcgatctgcatattatccagattggcaatagacatgatgacctgaggttcggaaataccagagctgatcgtctgaccaacgggggtaggtttgcctatgacataaccggaaatcggtgtagtgatgacagtatcattaacattagaagtagcctggtcataatttgctttcgcaactgtataatcggcttctgccagatcataatcagattttgaaatagctcctttggccagcagtgcactgtaacgattataagtcgctaaagcattttccattttggcctgcatttgtgtttgtgttgccgccagcgaagtatcatctaaacgtaccagtacctgtccggcattgacatgatcgttctcttcaacacagacttcaacgatacggccggttattttggaactgatatcgacattatctacggcacttaaactgccggtagctgatatgctgtccgataaatgtccatattcaacggtcgccgtccgcaccgtttctttaacttcggtactgcttttataataaccatagccaaaataaccgatcgctatcacagctatcaaaaatcccagcagatacttattacgttttatccatgctaacatcatacatccctctttactttcgtaaaattaacaattcttatcagctcgtactatgtttaaaattataacttattccattcttttggtcaaaacctatgataacgaatttctgtgtttttttaatgacattttttgcaaaaattatgacaaaaaagtgatttctaaaaacagaaaaagcagtctgcgctgggcgcaggctgcttttagtttaaaaatcaaccacgtatttgtccgtcgccgctgataagatatttgctgctggttagctccggcaaagccattggtccgcgtgcatgcagtttttgtgtactgatgccaatttcagcgccgaacccgaattcaaagccgtctgtaaaacgtgttgaagcattaacataaactgcagcagcatcgacacgctgctggaacgtgcgggcatggttatagtcactggtgacgatacattcagaatgtttagtcccatatttagcaatatgtgcaagagcctcttccaatccgcttactatttttactgataaacgcagatctccgtactctgtggcccagtctgcttctgtagctgcctgaattcgtttatcaaaagcctgcgtcttaccacagccgataatagtgacgccggcggcaaaatattctgtcagcatctgcggcaaaaattcagcagcagcgtcttcatgcaccagtaatgtttccatagcattgcaaactgccggacgctgtactttagcattgatcgcaatcgcacgcgccatatcatagtctgcacctgcatccacataagtatgacagacaccgatgcctgtttcgatgacaggaaccgttgcattctgtaccactgcctgaataagtccagcacctccgcggggaataactacgtcgaccagtccgttcatttttattaaatcagttactgcctgacgatcactgctgtcaacgaactgtattgctccggcagggatacctgccgcctctgccgcttgcgtcagtatgccggcaatgacaatattagactgcagcgcttcgctgccgcccttcaaaataaccgcattacctgattttacgcacaaaccgatcgcatcagccgtaacattcggacgggcttcataaataatcccgataacgccaagaggaacacgtaccttagtcacaattaaaccgttaggcagcctgcgcccgtctaaaacgttaccgacaggatcttcaagctgagctacctgacgcagaccttcagccatagcgttgatacgtacctgggaaagcgccaatctgtctaacatcgattctttcatattattagcactgccggcttccatgtctttggcattagccgccaaaatttccgcagcccctgcttcaagcgcgtctgccatcgccaacagagctttatttttgatcacggtagaagttactgccagttcaccggccgcacgatgtgccgcttcggctttagtacgcaccatttcataagttatcatgtcagatacctcctaacctaaaataaccagatcatcacgatgaataacctcatcgtaatttttatggcctattttatcttctatttccgaagtttttgcacctttgatctgctccagctcggctgaagaatagtgacttaacccgcgtgccagttcgtgccctgccatatcgacaacgctgacggtatttcccgcttcaaactgtccttcaactgccgtgattcctgccggtaaaatactgcagccgccggctttacgcacggccttggcacagccttcgtcaataacaagtttgcccatgatacgggcgccaaaagccagccagcgtttacgaaactgcagcctgttctctttcgaaacaaaaactgtacctatattttcaccttgcaaaatacgggctatggcatatttttcatcaccgctggcaattgccagatggatacctgaactggtagcggctttagccgcctggatcttggtaaacatccctcctgtacccaagctgctgccaacaccaccggcactggcctcaatttcaggagtaatatcactgacgatactcaccagtttcgcctcgggatgtgtctgtgggtttgcggtatataatccgtccacatcagaaaggataactaccagatcagcatcgacgatgccggcaaccagagccgacatattgtcattatcgcctattttcaattcatctaaagctacaacgtcattttcattgacaataggaattacccggtttttcagcagctccataaaggtgttgcgggaatttgtatagcggtgcctgtccaaagattctgttttagtaagcagcacctgcgctacgatctgtccatattcggcaaaaagcttctcataggtgtgcattaaaataccctgccccacagcagcagcagcctgcttgccgggaatagtctttggtttttcggacagccccagacggtctacccctacagcaacggcaccggaagtaacaaggatcatttctttaccctgattctgtaagtcggcaagttcccgggcaagtcggtctatctgttcaaaattacgtttaccgttagcgtaagttatggtactggtaccaactttcactacgatacgtttagcttctttaagtgcagagcggtcaaaagtcatccagctcaatcccctcgttaaaatcttagtattctttgaattcaaataccatatcgcggatacgtacggtttgaccttcctgaatacctttttcttttaaagccgcatcaatccccaggcttttccaaatcagctggaaacgatacaaagcttcgtcattatcaaaattggtcatagctaccaaacgctcgatatttttcccttttacttcaaaatcagcatccgcacaagcggtgatctcaaaactgtccgggtctatttcatccataatgatattctcttcttcgtccggttccggttcaaagttctgcagcatctcataagccttatacatcagttcctgcagaccttcgccggtagccgccgaagccttaacgatttcatagcctttagcttcaacatattctttaacacgctggaaattttcctggccttccggcaaatccattttgttggcaactaccagctgcttgcggcgtcctaaccgttcgctgtattgagacagctcaaaattgattttttcaaaatcctcaataggatcacgtccgtcggtaccggaaacatccaaaacatgcagcagtacttttgtacgttctacatgacgcagaaagtcgtgacccaagccaacaccttcatgcgctccctcgataagtccgggaatatcagcaagaacaaagctgcgttcagcatcgatacgcaccactcctaaaacaggggtcaatgtagtaaaatgataagcggcaatttcaggtcttgcagccgaaacctgtgcaatgatactggatttaccgacactcggatagcctaccaggccaacgtcagccagaagcttcaactccagctttatccagcgcagctcgcccggttcacctttttctgcaaaagtcggtgctctgttggtacttgtaacatagcaggcattacctttaccaccacggccgcctttagcaataacatattcctgtccgtcctcagttaaatcagccaggcgcacaccggtagcatcatcgcgcactaaagttccaagaggtacttttacgatcacatcatcggcacgtgggcctgtacagttggaattaccgccgtgtccgccacgtttggcaacaaattttcttttgtaacgaaaatcaattaaagtattgagatttttatcagcttttaaaatcacgtcgccgccgcgaccgccatttccaccgttcgggccgcctttttcaacaaatttttcgcgtctgaagctgctgcgtccgtcaccgccggcacctgcctcaacatatattctcgctcgatcaataaacatgatattctcctctatcttcaataattaaatattcagcataaatgccgcgttaaatttaacgcctgcctacttatctatttctttattataatacaaaaaggccggtgaaagcaaagtttctttatttactattatctttttccagccagtttctaagcagcggcgcagcatatgttcccatcgccctgtaaacggctgccgtcgggtgtacgccatccagataagcatccttcagttctgcagcagtcagtccaacagcaggctgcagatccagcagcaatgtccgctctgcaaaacatgcgcttattacatcccgcagcggtaaaatatattcgtttaacctgctttccgccgttacaagcggcaaaacaatacccaaatcaaagtttttactctgacaatatctcaaggttttatccaaatcttccagaataaatttctgcggatgcatttgaatgatatcattagctcctcccagaaacaaaatatgtttaatatgagccggcaaagtcattgttttcaggcgggataaaatatcgtctgtacaatccccgcatactccataattcaagaatttatctccagtgagtttttcagcttcggcaagccacgatatacgcgggccaaaagggaaaccataaatcaaagaatcaccaaaacatgccactgtctgcatttttccaccacctgccaattcttaatggcattttatcaagccttctcgtaaaaagcaaaataattttttgaggtttagcttgaaaaacttttagtcctaatataattatgtaattatattaaacagattatgtaatcattgtaagatgcaaaccctattgcaataatgtattatatagacaaggcaaaagcatttaatgcaattacctcctcccttctctctcaattattttcatcctttcaacctcaaaaagcggttgcgactacggtggtgcgagtcgcagccgttttttggttttataaataaaaggttccgtacttaacgtacggaaccttttatttattttgtgcattggtatttaccagcacagtatctttaaactgtaaatttttgacagtcgtttctaaaaatgttttttcgtccgctgtcaaagcccgttctttactcattatcatcagataaatcaaattaccgttcttaagggtggcataaatctgtccgtcatatttctgccctacgctgtcagctatatagctgctgaatttaataaaatacatcttcccattctgcagctcacctgagactaccggctcctgccaaccgctgttttgcagattttccgcaaaatagtccttcatcactccgccaggtctataattcaggtcgggcaattcttttgtcaatttactgctttccaccataacatgcattgtcatcgatttattaacagggtcacttattgaaagctgcgcgacctgaaccccaagttcgtcatttggatcggtcggcctttccacaactgttactgcatactgttcaggtaaactgacagtacaaccaccatcaggcacttcatatgttctttcagcagcgcagacaacgcccattgaaagtataaaaatcaaattcatcactaataaaattttccgcagcatcataccactccgttcttaagtgttctgtttaccattataacagaaagtaaggttctttgtataaacaaaaaaccttaccgaaaaattttattttaatgaatcttcaacatcccgcaaccttcctttaccaatattctgatacagattatcataacgttcttctgctaaatttcgtccttcttccatagctttttttatatcttcaaaatacgaatttactgcagcaggtgaccatgtctgcaattcacataacgcatactttctaaaaagttccgcattagcccgttctcttttaacagcatgtggatatttaaaggctaattcattcatccatttttcttctatatcaacgatcctttcgatctgtagattatcctgcagggttggtatctgatcgccaatcaaagcatatttttcagtcataacattacgtccgtcttttttcgctgtttccaaatcgcacagccacaaagcaactgttttatccgataaaacagaatatgtcatacggcgcatttccttaaatgcaggtatggtattagcaggaacagcttcttccgcattgacactcataaacatttcggtctccaaatcaatgatccgctgcatgatctcatttctctgcatatttttcactcctttacggcagcacgcttttgtgctaaagcttcaacttcctccaaatctttaaatcctaaattaccatacagatattggtaacgttcttcaactaaattacgtttttgtgtcgcggctaaaaatatatcacgataatataaatttaaagttgcatcagaatacgtttccaattcgcaaactgcgtatgtagtaaagccgccttcaacagctattgtcaaaggatattttttatgtacttcagcaagccattctctttcgatatctactattttgtaaatcagttcattttcatttaacgatggtatcaaattttccatacgggcatatttttctgtcattaagttacgccctgccgctgctgccgtttccaggtcctgtaaatacgatgtcagtgtatcagccgctaaaaccgaatggctcatttcacgcatcagataaaaagttttcagcatttcctgacaatcagcaggttcactggctttaacagcgataaacatccctgcttcacgggcgataatcttttccaaaagctgttttctatccatttacaacaccgtcctcaaataagcttatctgctgcagtaacaatcgtgccagtaaatttgccgcttctctggtaggatggataccatcactgcccaaaatacatttcacatccagactttttatcctgtcataccagtccagtagattaacgcttttaccaagcgttaatcttgtcagcaggttattatacagaacgatctttttttctaaacctgcatgttttaacagatggactttctctacaggaggattattgataacaatcactttgctccctctgctcttggcaaaatttagaaaaagctgcagattatttttatattcatcaggcgttacccaagggtcacgaccgtattgttcagagtaaagcggccagatttttcttccttccgccggccataaatctaccagacccaattgtaatatcgtataatccgggcgtaaaaattctatttcattggcctcgccttttataagacttaagcttgtattagcatggcgacagcgatttaccagacatacatcctcggtaaaatttgcgctgagcatcctgcgcagctgctcgggatatgttcctgcgtaatcgagttctacattaaagctgttttttgcatatcgcggtaaaccgtagctgtcgccaattaccaatactttcatatttccagcccctaaacaaatattttctaaatacagtactgttttaaaatcttatttattctgtatagtcttcgttttcttctaaaactacaccctgttgatcaggcacttttattttcagcggtaaaataaaagctataatcgccgaaagaacaaaagaacagagagcaaatttgatagaagcaataaagttaccagtagtatcggcaagatatccgcccataaagctgcccagcgccggtcctatacccataacaatcagggtggcaagcccccacaatttgcccagactgacgcgcccatagatagcaccggcatagccaacgacgccacccggttcaattgcccaataaactgcaaacagtacgcagatcaaagcacccaaagtggtagactgcggtcccattgtcataagcagcaaacaagctactgcgcctacagccgggccgaaaataagcattgtttttctggctttgatctcatttttcatcgctacaactaatttatcagatacgatacccaaaagcggcatcgtaaagataccggcgataccaatgatgatataaaggttagttgcattatctaaagtcattttcaaatctttggtccaataggtaacgacctgagtccaaatcaaaaattcagcaaccatactggtcaaaaatgccagaatcgaaccccaaatcggaaacgtgctaaaagcctctccaattttccagggatactcttgttgggctgccgtgcctttagcaggtggaacttcgccaaaagcatgtaagccatactgttccgggttcttttttgccagtaatgccgccagtaaaagtgctacgagcgaaatccaacccaaaattgtcattgcatcacgccattgtcctgcattttcgaccagcatcggtttcacgcccaaactgagtacgatctgcgccattggggcaccggcaaaagcaataccccacattttggcataatattttccaacgaaccatttacgaatggaaatggtagatgatacccacagcatacctgttccgataccggcaaaaatagcataagccgcataataagaatataaagattcaaccttcgctgtcagataaaagcccagcatacaaaaaactgcggcaatagtataaacaggttttgtaccccatttatccaaaatcataccgctaaagaacgctgtaatggcataaatgctcatcatcagcgaatagcctaacgatacctgtgccccggtccaacccatcgtctgcgacattggcccggccaggatagcaaaagttgagcggtaaccaaacaggcaaaatactgccagccacgcagcaacgactacaaaataagaggtttttttcgcatccatataaaccatcccttcgtctcaaaaatctataaaagattatgagttaatagtaattacaaatttcagctccattttgaaaagaggcggatgcaggctcctgcatccgccaacttactttagttaaggaggaagtattgtaatagacttatttacttgtaaactgttcgcaatatacggctttcaaatcaccgtaagtccagtcttttttcttaaagccatcgcagataccaatgttgttttcgtcagcttctataaagcatttgcagcatttacatttagcaataggcgtaaacatcggacaggtttcgctgtcaataaggataatactgtcgttattggcatggcagatacctttagcaacgtcaataggggtaaaattacggcaatcagcatgattatttttagccattgtgactcacactccttcgtattcggttcttgcaacaacttcgtcctggatcggtttaccgatttctacccagtattgagtaaagccggctacacgtaccaacaaatcacgatagttattaggatgtttttgagcatctttcaaaactttagaatcgacgatattaaattgaatatggaagccgccttttctcatgtaagaacgggtcagatccaacaatttcttagaaccttcgataccttttactgcattcggatgcagtttcaggttcatctgtgagttttgagatctgctgtgatcccagcaagtagcggattcaaataatgcataggcaccattgcggtcagtaccaggatatgcagacatagaagcgtcagcaaaagtagtaccggaaagacgcccgtcagcagatgcaagtgttgctgcaccttgcggagcatgggtagatacagacatctggcaaacatagaacggcttagcgtacaaggattcatatttatcgccgcagccacagtaccagtcttcaaattcagccagaattccatcgacttcaggaatatcgttgccatatttaaaggatctcaggcaatctgcgtggatctgatcgtaacgtccgtcatcatcatcacgtttttcctgagcttcaagcgagaaactgccgatttcatcagcatttttgaagccaaagttattaataagcgcatctgtaagttcttccagagtatatttcttatcttcaaacaccaattttttaatgttgtacaaagaattgaccatattgatagtgccggtgtcttcaatgttataagtagcattgtagcggtagcccatattgccaatatgctggccttttgccaggcagtcaggtttcaggaaggaatttaccagcgacatgttatgtttacgccatacatcatgctgaatattattggtagttacaaggcaatcgatgacgatatcataatattcaaggaattgttcatacaattcttcataagttttgaatgttttgttatgaggtggcagaacctgcaaatcaatacgcctgtcatagccattggtaagaaccatttccaaaactttcggattggaaataaaatgtacacctacggaagtcggctggcctgcgccgcccgggatccaatatttcttgccattcaattccagttctttccaaataccaggcgaagtttccaaacagccgccgatcgagaaggcacgggcatcttccaggttcataccttccggcccgtaatttttcatgataaattcgataccgccgcggttattcatccaggccggataaccggtaccgctcttttcgcactctacagctttcaacagaaattcttccggcaatttatcatcatacagtactgacagtgtcggttgtgtggtctgacaagtcataccagcttccagcagcagcatttccagtctgttggcagccggctgaccgtcacgggtcaaacctcccaggcagacattattgaaagtattgccggaaagtacgccgccaacaacacccattgaagcaaaacaatcaatacaggtcatttttacacggtagcattctaaaagttccaatacctcagcttcagtgatacgtccggcttccatatcctgctcaaaccatggccataatacctgtccaatacgtccgggcgacatacctgaaatagcatcttcattaacagaagccatatggaccatataaatcatttgcagagcctcacggaaattacgtggttgtttatgagcgatatgctccatgatctcagctatctcttcatattctttcttttgtttagcatttttctcagttgcagccaaacgtttggcttcatcagcataatgcagatgccatgtttggataccttccaaaacaagtttgaccgcttcgtagaaatacagcctgctcataccgataatgccatcaccgtcaggacgtcctgcagtttctgcaataccttcttcacacattttgatcaaaccgtcataaccatattgcagcggatagaaataattgattacttcacggccctgcggcagtgtatagccggaatcaaacatacaaatcaggctgcgcataacagcttctttaatcggatattccggaaccatttgttcataacgatgaccaacatcatccacagatttgccaacccactcacgagccagtttagttaaaacacgaacttcgtctttgcggataccatatttaccggcaatggaaacaacgttaccaaaactttcagttacgttgccgccaccagcgccataagcactgacctggtcagcactggcagaaccggaagctaaagcggcctggtacagttcgtcttccttcgccataaagaatccttcagataaccacggcatcgggaaagaaccacgatagtactgggtcttagcaccaacaagcaactcacctggataaatactgggagtcaaatgctcgaagcccgcctttaatgctctgccgcggcgcacttccataatgtcaccctcattagcctgaaatacacggttataccaatagggaaattcgcaggttacagaagacaatgtctgcagataaatatctttcaacttagcagctctttctgtagccccttcttttacttcgcggtcaaccatctctttcggcgcttcaccgccagcttggagattcaaggacataccttgctcttccaatacgtcaacgagttttcttgccataataaatcctccttttttacataaaattcactataagacctgcagcatttttagaagcagtcatccattcagtattcacgcttgctgcatccttaggttgacttaagtgtactatgcgaaaaatcttaagtattgagccgccagtaggagttgtaagtctgaaaaaatcaaacgctgatacacctcaggtactagcaggtcctaaacacaaaaacagcggcagcacactggtccaagcaaaaccaatgcgctgccgctgttttattgaggaattttaaaatggggtgtcagaaccaacataggctttgatgcctaaatcaagcagcaccttctgcaaagcttctaatttttcaggaggcgtagcttcatacatactgtaaggataaaccataccacaagacttccattttgaatcgccaagacgatggaatggcagaagattgaattccgttaaaccaacactgtgcataaactctgcaatggccgccatattttctttactgtcattaaagccttcgataacaggcgatctcaagaccagtcttcccggccaatctgattgtgccaatgccgcgatatttgctaaaataagttcatttggaactccggttttctctttatgcttatcagaatccatatgcttcagatcattaaatgcaaaatcaacatatttcatagttgtcaaataggtttcctgagggaaaaatccgctcgtttcaatcgctgtatggatataagcattacggcactccttcagtaccgcctgcaaaaaatctttttgatacataggatcgccgccgctgaaagtagccccacctttaccagaccagtaatgcctgtcacggtcaaaaattttcatcagttcggaaaccttcatatctctggaagccgggacaaaagcttcctgtaaacaagcatccacacattcatgactttcacaatgtctgcacttttcccagtctattgccaggggtatttctttttcatcgctgatagagattgcctgatgcgggcattttgggatgcacctgatacagccttgagtcctgttgatgcatttcattaccctaaataaagtccgtacacgattctctaaaccttccggattcgcacaccattcgcagcgcagcggacatcctgataaaaataccagcgtacggcaaccgggaccgtcatgtacagaataagactggatatcaaaaatacgacctgacaaatcctgttgaacacctataggggataatgatcttgccataaaaatcttcctctctgccaaaagctttgcgtatcattactttctgtttcgattgtacaatattttccagctgacttcttgagccttaggccgtattattaaatacaaaaaagccataggactaagactttagtcctatggcttcataccgattatttatcttttaaacttttcataaacaattcatcattgacgatttgctccaataatcttaccacatcatccgggtaggcatattggctgcattcctgccgcagttttaacaatgctttgttatcatcgccgttttcacttactaaaatactgccatagaggtctaaaacaaaactgataccggccagcttttctaaatggcattccttaatttttctctgcagggtttcatcaacaccgttcaaatagccgcgaatatacagcaacagtggtttaacccatttgtccattttcagcggctctaaaaaagtcatttcatcctcggggacagtccccttctgtttacataaagtagcaatgatatcctgtatccgtaccagcagcagtccctgctcagtttcatttttagatagattgagatagtcacacagcttacggcaataatgaaatttgcggtcagcaacaaccacagcttccgagggtaaacactgtttcagcaaaacattcagactctcaataactgtgcctctgctttccatttcatcaaacatgctttttttgccaaataaactgtctaaaatagcatgcagttcattgtagtctacaggttttaccaaaaactggtcagcgcctattttatagccatgaatcctgtccgcaatatcattaagaacagtaatcattaccacggggatatgctgcgtttttgtattttcttttaattctctgcaaacttcatatccactcattcccggcagcatgacatcaagcaggataatatccggcagatatcgttcagctaaactgatagcatctttcccctgctgggcagtaacagtttcatagccccagctttcaacaaaatctttaaacaagtccaggtttttaatattatcatccactatcaaaacagttttcatttacgcacctcacctttcactgtttcttcattccctgctgcagcggaatcaaaaaaattacttccgttccttcacctaaagcactttttaaatagacatatccaccatgcatctcaaccatcttttttaccagtggcagacccagtcctgtaccttcgtattcacgggtataagaactgtcgacctgttcaaattccacaaatacttttttctgatcctgctcggctatacctataccattatcgcgcacaataaattcggcaacatcttcacgcttataaacatagatttctatctgcccgccagttccggtaaactttactgcatttgataacagattatataaaatctgttttagcttggccgcatcagcttcgatcataaaatcatcaggttcaaatttcaactttacttttaactgtttacttgtcacataacttttcacgttttccacagtctgcaaaacaatttctttcaaataaaattcgctgtaattaagagtcattttcccgctggcgatcttggatatatccagaatatcattgatcagctgcagcagatgagtactgctgctgaaaatattagctacatattttttctgtttctgattcagttcacctaatatatcgtcctttaaaatttcagaagaaccgattatagcatttagcggagttctcaattcatgactgatattcgccataaactgggatttcgccacatctactttcttcagctcattcaatgcttcctgtaaatatttagttctttccgcaacattaagttcaagctgctcattgtttttttgcagttcaaacgccagttgcttctgttgctgatgctcacattccaattgctctaaatacagtttgctctcctgtttcctaagttctaactgagttgtaaacttttcgaacatctcctgcagcatagcaccctcgtcatcctttttcccattaagtattgctttgttaccaaaattcttttcataataatctctagtcaaatcggtaacatgcacaattggacagcttattttttcagccagcagctgccctaaaataagcatggcccacagacataagaaaaaaagacctaagacatacttataattattgctgacaattcccgaaaatttttcttctgggatgccaattcctacaacagcgattggttcatcagcactgttaaaaattttctgatctaaaaaaacatgtatttcatcatcgacatccacttttccaaaatactgtttatcgtcttccaaatatttacctgtttcatgcggggccctgctgccgacaaaattacttttagtatcagtctgaatattcgaggcaatccttatcccgtcaatggaaaaagccagaaatgaattatccagatttctgctgtagcgctcagcaaagtagttatcattattaagtacatcacataatacaatagctccaataacgtcgttatcagcagatttatctctgatcggtactacaactatacccatcagagctttatgcagatactcctgcgcccccggaaactggttaagtattttgatcgaaaaattgtcatattcaaatgaatctttagtaaacagttcttcaagcccgacaacttcttctgatacatgcgttttcccaaacagcatgctgctggcagccaggattttaacagcactgccatctggatataacagatagggagaactgcttgccaatatacggttctctcgatctacaataactacatagtcaagataattaaaattacgttttaaattatttaaagccatagcaagtctgtttctatcatcatacatggctttattaatatctgaatcacctgcgaaaagcaatcctgcttttctcatctcgtccatcctgttttccatatcattacgaacagttttcatcgcaacctgtaaatagttgcgttcattctcctggatctgtctgtcaaaaaaatgctgcgttgaaagtactaataaaagcatgggtaccaatagcaaaaccaaaacaaaaatactcagttttttctttatgctcatcttctttgccccattcgattttattacgcattaggtactatcctgcaatactccaaaatcaactgcatccgatctttaatatcaagtttgctcaggatattgctgacatgtgtttttatggttttttcactgataaaaagctgttctgcaatctgtttattactcaatccctgacagataagcattgctacttctgcttcacgcctgctcaaaataccgttaaaaacatttagatcagcttcagttttttccgccccaatattttcaacaacatttaaatcaaaatttaccagagccattgtctgcaccagcaattcccctatccgctgcagcttacgctgaggcattaagggtatattataacgttctataatttcctgaggcactgtatgcgcctctgtagcaatgccaccgccgtaggcaatagcaaccagcttgttattataataaacagggcacataaaatacgttaaccccaaataacacgtaaacaattttatctgctgagtttttttgagaaaacacattgatttttctttttcctgctgacagcgttttttattatttttaattatctggtgacaaagaagacttgagtttgaccacactgttaatggagtgccttctaaatcaaaaaagcataaactgatattatcaacacgggcaaaagaatcctgaaaggtttgtaatttttccttcccaataaatttcaaccactcctgtgaagaaaaagtgttgcgcatcattttcatctccttaagtacaacatcaaaacaactatacggcagtgtaaaatgattatatcgtttcaattgcctttttacaacaaaacaaatataatctcaaagaattccaaatacttatattgcatatttattcctttaatatcacttacaaatatttgcatactttgcactaaaaaatctttaaaagcatccatataccaaccatgtgaatattttcggcttatacttatattttaatagaagtctctatctgcaaatagactgccaaagttagaattatggtatttattttactccttagggatgattatagaaacaaacaccaggctatattacaaccaaagatgtataaaattactcctgcagttgtaatatttgagcataatttaagaaatctttgctaagtaaaaataaaaaccacccgtaaaacgggtggtttttacaaatactgccatacttatctgctgctatttttttaacaaaaaagcactcacataagtgagtgcttttaattttaaattacattgctgcttcttctaccggataaacactgatttgacgtttgtcgcggcctttacgttcaaatttaacacggccttcgatagtagcgtaaatggtgtaatccttacccataccaacattgttgccgggatggaatctggtaccacgttggcgtacgataatgctgccggcagttaccaattggctttcgtgagctttagtgcccaaacgttgagcattggaatcacgaccattgtgagagctaccggtaccttttttatgagcatgcaattgcaggatcagtttaaacattgcgattcacctcctgtatgtatgaatgcgaacgtacttcggatactgctctgctactcccagcaaaccatattccatagttgccagaatagcctgagtcaattcattcggagtattattcaagtttacttctaaaatgccgtcttcttcatctacgtgatatgacggctgacatttcaaatgctgttccaatccaaggattggtgtctgcgtcaaaacagaaaccgccccacagacgatatcttcgcctgctgctgcaaagcctgcgtgaccgctgaccttatagcctgttatcaatccctgttcgttcttaaataaatctactgtaatcattgctgttaagcttcgattttagagatttcaactttagtgaacggttgacgatgaccttggcgtttgcggtagttggattttgctttatatttaaaaacaaaaatcttctcagccttaccatgttcaacaactttagcagttactttagcgccgtcaacaacgggtttgccgattttaacatcgctgtcagcaacaacagtcaaaacttcgtcaaaaacgacttcactgccagcttcaacgtccaatttttcaatgttcagaacatcgccttcgctaacgcggtattgtttaccgccggttttaatgattgcgtacatctatttgcacctcccttatgatagactcgccaaattcggtactcctaaagagtttacggaacctctctgcgcggttggggacagacttaatcagtctatactcgaatattttattacaaacggcgttatttgtcaacaccggtattgtctaaaatagaaaaggtttctatgtgcagaccagtatctgcttctaccttaattttacaggccagttcacgttcccactgccgcagatctttagcccgcagccactctaccatccagggattggcagaaatcaaaatactgcgtgatgcgcatggcttagccagtaaagtccgcaaacgccgttttatttccaatgctactgtttcgcgtgattgcactctgccacccccctgacagataggacagggagcatacagaaccgttgaaagattctggcgagctttttttctcgtaatttcaactaaattcaaaaccgtaatatcctgaacacgcggcttcattttatcattcgaaagcgcctgctgcagcacctgcagaatttcctgctgatgctcctgcgtatgcatatcaataaaatctacaactataattccgccaatatcccgcagtctaagctgtcttgcaatctcgacagccgcttcacgattgatctgcataatagtttcttccaaattttcacggccgctgtaacggccgctgttaacgtcaataacagtcatagcttctgtataatcaattaccagataaccgccgcagctcaagtctatccgcctgtcagaaatagtatctatttcctcccgcagtccatagtacgcaaaaacatcttcctgcttttcatgcagcagaacccggcccgttgtacctcctggcatgttcttcagtaactcgcagacacgtccatatactgctttatcatccaggataatttgggaaacatcatttgtcagataatcacgtacgatccgtactgataagtctaattcccgatacaaggttgcaggagctttttctactttcccgcgtgcttctatgacacgccagttagcgcacaaatgcctgatatcctcaagcaatgcttcctcactggcaccaatagccgccgtacgaataaggattcccataccatcaggctttgcttcctcaataatagcttttaaacggtttcgctcctctttattctctattttatgcgaaactccaatataatccgccagtggcaaaagcaccacatagcgcccaggtaacgtcagctcgcgtgtcgcggaaggtcctttgctgcccctggcatctttcgttatctgaactaatatggacttaccttcagtaatatcattactttcacccagataaagaaaggcattctgctgcaaaccaatatcaataaaagccgcctgaatgccaggaacaacattatttacacgccccttaaaaatattaccgacaagatgtttttcactgctgcgttccactaaatattccatcagtctaccgttttcagtcagacccatacgtgtttcttctgacgtagcactgataatgattttggtttccatacaaaagcccctcctttcctgaactattgaatagacttgtccatatgttccaacatcggcaatctgcggccatcagcagctgcacgatacagatccagtctggtgatatctgccttttcaacaggcagctgcattccaaaatgctgatttaaggtatttaacagatctgctgctttcatactgccattaggtgtaatacgacaggaaaattttaacgtcaacatatcattttcctgctttgcacatatttccggtatataaaattttacatcaatttctttgattttgtttttaagctttggcgctgccttagcataaacgacactttctgccgcgttaaaggcagctactgcctcaacatactcaccggaataaggcagcacaacaagataatctgcacctccggcggaagccatcagcgccggtgcgttgttcgcagttacatctgcggccataatctgaatgccgcgaggtaaagccgctgtcatcttctgcacagcctcgtgtacttccatcggctcagccagttctatctctacaaattcagccatactgacaacgccaacaccaagcgccgaagccagagaaaactttaaatgaggattaaagccttcggaataagcagcaggcagtttagcgcgtcggatagctctttcaatagtccgcacatattctaaatgggaaataaaacgtatttctttctctttagttatctgcatccttaatttcatactaagccctgctctttccagtcgattatttttacgcccagcttttggcaaacaccgcaacctgtacagacaccgtgacgacaatcgttggtcaattcttctgccagggctttttcatattccctgcgcagaaaactgcgtgctacagcaggctggatatgttcccacgggaataattcattagctccgcgttcgcggcctatatagaattctttgtttaaacctgcgtcctgcaaagcttccagccagcgatcataagaaaaatgttcgctccagccatcaaatttggctccgcgctgccaagccagatataaggcttttcctaaacggcggtcaccacgggcaaaaacagcttcaagcacactggtcaccgagtcatgatactggaaggtgatattttttacttttaaggcatctttcaataaaaattgtttacgccttagttccgctatatcatcctgctgcacccattgaaacggagtatagggtttgggtacaaaagaagaagcactcacggttactttcgcaccgcgccgacctgtcacttcctgatatttatattgtactgccttcgccaatttagctatagccagtacgtcttcgtcagtttcaccaggtaaacctatcataaaatataattttactgatgaccagcctgcagtaaaagcagcaccaaccgcattcattaggtcttcttctgtaacgcctttgtttatcacgtcacgcattctctgactgccagcttccggtgcaaaagtcaatccgcttttacgtacagcctgcacttctttcgccagatctacagaaaaactgtcaatacgaagagatggcaatgaaacactaaccttttcatctttaaattcttcgatcatatcatgtatcatcggtgcaagacaagaataatctgccgtacttaaagataccagtgaaatttcgttataacctgtattatccaccagttggcgtgccagctcctttaaaagctccggcctgcgttcacgcacaggacgatagaccatacctgcatggcaaaaacgacagccacggctgcagccgcgaaaaacttccagcataattctgtcatgcacgatttctccaaacggcacgatcggagctgtcggataattaaccgtattcatatcagaaataactcttttttcaactgccgccggcgcagcatcacaattagctactactgctgctacagtgccatcttcattataagcaacatcataaaatgatggtacataaatacctttgagctttaccgcacagcgcaggaaaccttgccgcccaccaggcttaccttcacgtttccattttttataagcctccatcagctcgaccataacttcttcaccttcaccaacaacggcaagatcaaaaaaatctgccagaggttccggattatatacgcagggtccgccaacaataataaaaggatctttttctgtacgttcctctgtttttacaggtatacggcccaaatcaagcatattaagaatatttgtataagaaagctcatactgcaaagtaaagccgacaaaatcaaaatcctgcaatatcttttccgtttccaaagttcgcagcggaatagcatctgctcgcatttttgcttccaggtctacccaaggggcgtaaactctttcagcagcaacaccgttttcaaggttcaggatatgatataaaattttaaatcccagataactcatcccaacttcataaatatccggaaaagccagggcgatacttacttcagtttcctccggactttttacaatactgttaaattctccgcctgtataacgagcaggtttctgtacactgctgagtatatcgatcgttaattctttttccatactgttcctcctctaaaattgcagctgctgacgccgcatattgatgttcagcagcagcccggccaacagcatattcgtagtcagcgaactcactccgtaactcataaacggcagcggcacacctgtaactggcataatcccagcagtcattccaatatttaccagcacatggaacataaacatgaaagtaatgcccactgccagcaaggtaccgaaatcgtcttcggcgttcaatgcaatagtcagcccgcgccaaataacgatcaaatataataataaaataataaaaataccaatgaatccaaactcttcaccagctacagcaaagataaaatcagtatgattctcaggcagaaaattaagttggctctgcgtacctaaaaaccagcccttacctgtcaaaaggccagacccaatagctatttttgattgaatgacatgatatccagccccgaaaggatcaagctccggatctaaaaatacacgaatcctgtttttttgatattcttttaaaatatgccacaatgcaggcatcaaagcgataagcgcgccgctcatatacatcagccacctgaccttaaacccgctgatgagcagcatcccaagcaaaattgccataaaaaccagcgacgtacctaaatccggctgcttcataaccaatataaaaggtacaaaagcataagccagcgccggcaaataatcagtgaaactgtcaagagtttccaatcttttatttaaaaacgcagccagacagacaatcattattgctttagaaaactcagaaggctgaatactgagcgggccgatctggatccatctttgagcacccagctggctgtgtcctaaaaacattaccgctaaaagcaggataatattaaaaacatataagggggttgcaatatctttaagcagccgatagtcgaagcgcaacgaaaaaataaccagggccaaatctattgctaaaaacagactttgccgttcaacatgccatgctttacctgtcgttacagcaaaagaatgagtagcgctggcaatcaggcaaatgcctattccaaccaacccaaaaatagctataaccagccaccagtccaaattacgaaaatatctattttgctgcatttgctatcctttccgcagtttctgcttacttaaccgcttgtgacggtatcagaccttcttctctaaaccattcttcaaacactttatatacaatcggaccagctgaagtagaaccaaaactgccctgctcaactactgccgcaactaccagttccggagcatctgtaggtccataggctacaaataaaccatgatcgcgtccatgcggattttctgccgtgcctgttttcgcagccattggcttcggcaaattggcaaaataagaagccgttccgccaggttgtgccacacccatcaacccctgtttaatcagttcaagagttttttgtgatacccccaaagcatatggttcctgatgctgacgtacttcaaaaacacttccatcattattaaggactttatctactaaatacggttggtgataaataccacctccggcgatgcagctcatcatcaccgccatctgcagaggtgttgcaaggtctatcccctgcccgatagaagcgttaaaggtatcacccagagtccagtcctcccctgtaaatatcttgcgtttattttcaggtgtcggaagcagccctgaagcttcaccctcaagttcaatacctgttttcctgcccataccgaatttgcgtgcaaaatcaaccagattattgatccctaagcgattgcccatttcataaaaatatacattatccgacatgcttaaagcctgttgaaagttaatccaccccagggcttctccgccggcgttgcccatagggataagccagtgctgaccggagtcaaaaatcaattcttccggtgttaccttgccaagttccaatgccgccgtacccgtaatgatcttaaacgttgatccagggggatattcgcctgatattactttgttgcccataggatagttaggatcattatttataacctgccaatccttttccgatatcccatttacaaaaaggttaggattaaacgcaggcctgcttaccatagctcttaccgcaccgctgcgcggatcaatcgcaacaatagccgctgctctggcgttaggggcaatcccgctggaccgcagatatgccaattgctcatcaacagctttttccataaccatctgcaattctttatcaatggtcagctgcaaacttttcccgggtatggggtcacgctgacccagttgtttaacaacattaccggcaacatctacttcctcatcaaagctgccgtctattccgcggataactttatcaaaagttttttcaatgccaaatttaccaacaatactaccgcctggcatccctttatagctgccttcagtaatatcatattcactggcctcgccaacataacctaacgcgtgaactgccagttctttatacaaataattgcggattggctgtaattccaacaaaactccaggtaactccaacctgcgttcttctatttttgttacgatttcaggggaaacattgctttttaagcgggttggctcataactgttttgattagctgcaatacgctttctaatttggtcttccggcatatttaatatttcagacaatgtaccgatcactttttcattatcacgctgcccctgacgctgaagtgccacagcataaccaggcagattattaactaattcctgccctttataatcaaaaaacaggccgcgcggagcagtgatttttgttctgcgcaatctgttaccatcagcctgattgccataataatcgcctttataaagctgcaaataggccattctgccgagcaaaattaaaaatatgcatactgctgctgccagcataacttccaagcggcgcgcgtatcttttgttcagcacaatttgacctcctttgtttaatgcaatccatcatccagttctatccatttctgcagtctttctgtcagaagatacaacggaattacaaaaataatatttcccaggcaataagcaaacgtatcctgcagtgccagctctaacagtaaaacagaaaatcccttagccataataacctgcagaataaaataacagcctcgcaaagcaactgttattgtaacaatcgccacaatattgtaaaacatactgtctttaaataccttttcttttgtatagccaacataataccctatcgcagtccttgtcaaaatatgaaaaccaaaaataccaccggttaaaagatcctgcagcaatcctacgaaaaagccagctatcccaccggcaaatgcacctttcagcatagccaaacaataaataagcaaaagcggcagatcaaatttaaaccactgattttgcggcaaactcatctgtaaagataaacataacagaaacaggacgggccaaatcagtttcctcattgtgcctgtcctccttcggtattactatttaatttacctgttgctgctgcagggttgctatacccggtaacaacaaaaacttcttctactttactgctgtcaacagcaggatcaacatctgcgttcagtaaaagtcctgccgcctctgggctggtttctcttacagtaccaattaccaaacctgccggatgcctgccactgaaaccgctggtaataacaacatcaccttttcttacatccgcttccctgggtaaatgttccatttctaaaggcatattttccatgcttcttccgcagataacaccaaccgctctggaatcagccctcaaaatacgtgccccgatcttacaacggctgctggtaatcagcatgactttagcagcagcaggataaacttcttctaccagccctacgataccatcacccgtaacaacagccatctctttatccaggccatctgcagaaccacgatcgatgattacaacatcctgtaaatcgcccatattccgccccacaactttggcaggcagtaatttctgttcaggcacgtgctctttatattgcaaaagctttgtcagccgctggttttcagcgtaaaactcagccatagctatattagcccttcgcaattcagcgttttctttttttaattgctcgttttctgcttccattgtcgtaatagcttccagcttcttttccaaagaagaagctgcgcctgtaaacgtctgaatacaactgttgacaggacttattactgcaatcaccactctattcaacaccggaaatcgtactcttccttcaacagccaaggtcatcagagctaccaatgctatcacaatcagaagcaggctcatatttttcttactcacaataataattcagccttcatttattattagatgccataaatccttttttatagatatctacattttcaaccgcaataccagtacctaaggcaacacaggacaaagcatcatcagaaacatagacaggcattcctgtttctttgctcagtagacggtcaagattacgcagcaaagaagatcctcctgtcataacgataccgcgatccataatatcagaagccagttccggaggagttctctccagagtattacgtactgcatcgacaatattagccaccggttcactcaacgcctcgcagatctggttcgcattaataagcagatttttaggcaaccctgtcacgagatcacgaccacgaatttccatttctgtagcttcttcaagttccatcgcagtgccaatagtaatttttatttcttctgctgtccgctcaccaatcaacagactgaatgttttcctgatgtaacgtacaatagcatcatccattgcatcaccgccggtccggatagaacggctgataacgataccacccaaggaaataacagctacttcgcaggttccgccgccaatatcaacgaccatactgccggtggcttcttgtacaggcaaccctgcaccaatagcagccgccattggttcttcaatcaaatatgcttccctggccccagcttgtacagtagcatcaataaccgcacgtttttcaacctcagtaacgccagaaggaacgccaacaacaatacgcggacggactaaagaatgtttgccaattgctttttttataaagtatttaagcatcgactgggtaatatcaaaatcagcaataacgccatccttcatcggacgaatagccacgatatgtccaggagtacgaccaatcatctgcttagcttcggcaccaatcgccagcacctctttattctctctgtctacggcaactactgaaggttctctgataataatacctttacctttagcatgcaccaaagtattcgcagttcccaaatcgattcccatatcatgagcaaaacttttaaaaataccaaacattcttcaacacctcatttatctaaataaccttgctctctaaaactaaaaaatattccatcgccaattaccaggtggtcaatcagcggaattcccataattatcccggtctcattcagactacgagtcagctctttatcttcctgactaggtttaggatctccagaaggatgattatgtgctaccaaaatggcagcagcatggtacagtaacgccggggcaaacacttcccgaggatgcacaaccgaactattgacagatccttctgaaacttgttccattcttatgacctgatttttgctgtctaataataacaccaaaaatttttcatgttgttcgtaacgcaatcttggcaataaaatctcagcacctttttgcggagactctatttttaacttgacctgacttccagctgctgcaatacgcttgcctaattccaacgcagccaaaattgttgcagcttttgcgggccccagtcccttgactttagccagctctgcaacactgtgcacacaggctatattttgatataacccacttgaagcagtcaattcttctgcaattcttaaagcagaacgcttctgggtaccagtacgtattaaaatagctaaaagttcagaattacttaacccagcagcaccttgctgcatcaatttttcacgtggtctgtcatccagcgacaattcttttatacactggctcaaaagcccttcactccaatttgtgccatcatttgatacaagcgggtgagcggcaaccccacgacgttattatagcagccctctattttctcaactaaaactgcaccacgtccctgaattccataggctccagccttatcaaaaggttcgccggtcgcaacataagcattaatctcaatttctgataagcttctaaaccatactttagtctctactatttctactaaattctgagtcttataaaaaacagcaacacctgtcaaaacccggtgcactctgccagacaatttccgcagcatcacggctgcatcattgctgtcaaatggtttgccaagtatttcattttccaaaacaaccatcgtatcagcagcaatcacaggtatttcgctgccaacttgttcaacaactacctgccctttacctaaagcatttactgctaccactttttcagcgttatctccactaacctcatcaaaggcgctggtatatacatcaacctctaacccaatctgacgcaataattctaaacggcgcggagatccggacgctaaccttaccagcatcagctcatctcctattttttttcattttcatcttcagtatcatcaaaaactattgggtcaggtgcttctatttctataacaacaggctgtacaccttcacgtactgcatcacgtttaaaaatacgcgcataattaacagaaaccaacagccagataactacacccagcatcacaggcattgtcttatcaatatcgaaaaatacagcgatactgtttccaaaaacagcaccggcaatcactgacaatacaggaaagccatacaatatcatctgcatcttacgtttattcatttcctgatattcaacaccgactacatcgccaactttggcattgataggacaccaggcttctaaatatttaggtattttttcccctttacttttatctttatcaagctttattttcgctctttcgccatgcttctcaatcaataatcctactaattcagctctcatttctgccataaatactctccttaattataggcgtgtatgaaaacataccaataaccaaatccaaaaataacgccgtaaatagcgacaaaaatacctacaccctgccatgtaataggatagccaaagttaatatattcgccaaaaatacctcttttattgaaaaaagtgtatttcatacgtcttttgaaccattttgccttattttctgatccaactgccttagcaatcataaaaatataaaaaaaagcgccaacgaaaacttgaataatacgagcacaaatcaaagaactatctacatttaccaatgcttccattgttttcatcctttctcaataactcaatttaagtttaaaaatttatcaggcatctgtttgcgcagttcgcgcaaaaatttttcgctgcatttaaaaataataccagccagccttttattatctttaccttcagtaaacactaacaaacgctgttcattaggatctactgaagaatacctgtgaatataatgacggattttagttttcttaaaaaaacttttgatatatttattggtataactttcagttttagtcaaatccactttaaaactgcgtctaattcccacgccatggcttatgacttccatctcgccatcacgtagaatatatgtatacttaaaaacaacacgccatatccacatcagcagaaataaaatattaaagccccaacctaaagggctaaaatatcctgtattgacataacgatacccttcataaatccataataaaactataacggccaaaccgccatatgatatctgcattctgcgatcactgacttgagattcttctctatatatttcgttcaaacaaaacaatcccttcattctctattatccaaggactgaacacacctttagaccatttcttattataacaaatttttgctataaaggatacactctaaagccgttcctctaaaaaaattcacaaaaacaagtattaaaaaacaggcgtgatatacacgcctgtttttacataatttattttataaaatttactgtttttccgaagtaaatttaattaccggggaagaaaggccatacgataggaattacaaccagggatacgataaaggatacgataacaagaccggtacctgctttaacatagtccataaatttgtatccgccagggccaagaaccaaagtgttcggaggcgtacctaccggagatgcaaatgcacaggatgctgcaactgcgatagccatcaatactgctttcggatcagcaccaagttgttgagaaatcgcaataccaatcgggcacagcagagctgcagatgcagtgttggacataaattgtgttaaaccgcaagaaagaatgaaaagaattgcagtaacaactaaaggagacggagaaccgcccatcaggcttacagtccattctgcgatcattttgccagcgccggttttgtccattgcagtggatacaggcatcatacctgcgaacaggaagatagttacccagtcaatagaagcataagcttgtttttcagtcaggcagccagtcaatactgcaactattgcaccaatgatagcggccatttctaaagatacaccaggaatgccaatagccatagtcaaaactacacaaagtaaaattactgcggatacgatttgtttggaagcggaagtttcgttagcttcaacttcttgttcaatctcctgatcagcatcaatttgtttattcggaagcaaatatttgcctaagaacatcatgtagagcataccagctaaagttacaggaataccaatccaagcatattcaaagaaaccaaattgctctttcattccagcagcctgcaaagcaccgttagcaatgatattcggaggagtaccaaccatagtgatgataccaccgagaccgcaggcaaatgccaaaggcatcaattgacgggaagcgggaatctttgctgcagaacaaataccaagtacaaccggcagcagacaagctgcagtaccagtgttggataatacggcggacaatgcggcgccaacaagcataataccaaacatcaaactgttttcaccagtaccggaaattttaacaatagaagcaccaattttttgtgcaagacctgtataaaacatagaagcaccaacaacgaacatacctgcaaaaagtactacggtagaattagagaggccggaaaatacctgtttagcaggaataaaacctaacaggccgcacgcgatagcgccgcccatagccgttactgcaagcgggatgagttcggttacaaataacagagcaataacagctaacataataagacattttactgcttgagacatgagaatcctccttcaaaaagttaaaaatgttttaaggaagtaacaaattacttcctattatatatgtaagctagaatgattaaatttgctattttttgcatattattaaaaaacttatctttagttacaaaattgttaacaaaatttaattaacagcttacagtaacaagtgtaacagataagccaatttttttcaagattttttcacaattttcgtataacaaaaaagttcaaaaactgttaactgtcttcattatgcatatttataccattttgatactttttgacaattttttattcatagctaaaacataaaaaaacagacgtgatagttatcacgtctgtttaatttattgctcttataataatactttcgtctatcttcctaacaaattatttgccggggaagaaaggccatacgataggaattacaatcagggatacgataaaggatacgataacaagaccggtacctgctttaacatagtccataaatttgtatccgccagggccaagaaccaaagtgttcggaggcgtacctaccggagatgcaaatgcacaggatgctgcaactgcgatagccatcaatactgctttcggatcagcgccaagttgtttagaaatcgcaacaccaatcgggcacagcagagctgcagatgcagtgttggacataaattgtgttaaagcgcaagaaaggataaacaaaactgcagtaacaactaacggagacggagtaccgcccatcagacctacggtccattcagcgatcaatttgccagcgccggttttgtccattgcagtggatacaggcatcatacctgcgaacaggaaaatagttacccagtcaatagaagcataagcttgtttttcagtcaaacagccagtcaatacgcaaacgattgcgccgataatagctgccatttccaaagaaacgcccttgatgccgatagccatagtcaaaactacgagcaacaggataacgccggaaactacttgtttagaagcagaagtttcgttagcttcaacttcttgttcaatttcctgatcagcatctaattcagctttcggaagcaggtatttacctaagaacatcatatagataataccagctacggttacagggataccaatccaggcaaattcgaagaagccaaatttgtcagcaataccagcagcttccaaagcgccgttagcgatgatattcggaggagtaccaaccatagtgatgataccaccgagaccgcaggcaaatgccaaaggcatcaattgacgggaagcagggattttagctgcagagcagatacccaaggcaaccggcagcagacaagctgcagtaccagtgttggataatacagaagacaaagcagcaccaacaaacattaaaccaaacatcaagctgttttcaccggtaccgcagaaatgaactacagtattaccgattttttgtgcaagacctgtgtagaacatggctgcacctactacgaacatgcctgcaaagagtactacggtagaattagagaggccggaaaatacctgtttagcaggaataaaacctaacaggccgcacgcgatagcgccgcccatagctgttattgcaagcggaatgagttcggttacaaataacaatgcaacaacagccagaagaatgagacattttactgctggggacattataattcctccttttaaattaattttatatacagcgcgttcggggcgcgtatatcaaaataaagagaattttgtaaaagatccttagcattgctttctatgaattttcttgcaacaccttatgcttcattataccactatgcactcaaatttaaaagtgtaagttttatttaatttacagcttttttgacattaaggtatattaatataatacaataatactatttttacaatatttaagattctttgtccactcaaaaaacattattcaaaataaccaaaagaaaaattaatgtttttatcttggttaaccagcttcaggactgcattattacttgaaactataaagaaagcttgtacttctctttactacagcataatgatttgctttatatttttctttttccaaaaaaaataggtgcacgataaagtgcacctatttctgtttatactataaattatttgacaggtccaatcattgcaagcattgcacctgcagctactgcggtaccgataacaccagctacgttcgggcccatagcatgcatgagcaggaagttagcagggttagctttttgaccaacgatttgggatacacgtgctgccatcggaactgcggatacaccagcggaaccgataagaggattggttttaccaccatccagaatgcacatgagcttaccaaatacaacaccggcaaaagtaccagctgcgaaagcgatcaaaccaagaacaatgatcaaaatagtttgatagttcaggaaggattcagctttcatagtcaaacctgtaccagttgccagcatgatcgttacaatgttcatcaaagcattttgtgcagtatcggaaagacgatccaaacaaccagcttctttgaacaggttacccaacatcagcataccaatcaaagagcatacaggcggaagcaacaagctgataacgatagtagtaacaaccgggaatacgattctttcaaaatgagaaaccggacgcagttgttccataacgattttacggtcagcttcagtagtgcaaagtttcataataggcggttggatcaaaggaaccaacgacatataagaatatgcagctactgcgatagcacctaacaggttaggag

SEQ ID NO: 10049 - DNA, 1358 bp, Unknown
  gut microbiota DNA sequence
accaccgataataccgatagcggatgcttcttgcactgtaaatccgagcatcatagcgcccagcaaggaaacaaatacacctgcttgagctgcagcgcccaaaagcaaagttttcgggtttgcaatcaacggaccaaagtctgtcattgcacctacgcctaagaaaatcaaaggcgggaaaatttcatgattaataccataaagaattacctgcataacacccggttggtcttcaaaacctgttttaggcacgtttgccagcaaacagccgaatgcaatcggagacaacagcaaaggttcaaaacctttaccaatagccaaatataaaagaataatacctaccaacatcatgatggcatgacccatggtgaaagcggagaaaccgctgtcattccatacggattgtaaagcaactacaaatgcttccataatttcctcctacaaattttttagttgagagaccttttcaaggtctctcagcttgtttgtattacattacgatcataacgtcgccggtaccaacagtttgacctgcggaaatacggacgtcagaaatggtgccgtcagccggagccatgatctcgttttgcattttcattgcttcaagaatcatcaatacatcgccagctttaactgcgtcgccagctttaactttaacttcgagaactttaccaggcataggagcactgatagtagctgcgccagcagcaacaggttttgcagccggagccggtgcagcagcaggagctgctttgagtgctgctgccggtgcagcagcaggagctgctttaggtgcagcagctttaggagcagcaacgccgcccatttcttcaacttctacttcatatgcagtgccgttaacggtaatggtatattttttcacagggaataccctccttcaaaattgtttaaaatatattaaacttaagtgttgctaaaacctaactttgttttagaagcattctttacgtacgctaattgcttcaatacgagcattctgtgtccagccagcttcgggcagacgacgtacataagcgatatcttctgcagaatggccaagagcagctacagctgctgcaataacagcaattacttcactgtcatcctgcccaggagctgcaacagcagcaggtgctgcggcaggtgccggtgctgctactggtttctcagtttttttttgcgttggatctaccaattggatgattttcatcaaaacacccaaggctgccaatacgccaaaaactatggtcatattgatgatagaaatcaaccaaggattagtagttacaggacccattatttcacctcattcttcttaattaattaagcactatactgcaagctgcaaattacaaagg

SEQ ID NO: 10050 - DNA, 1196 bp, Unknown
  gut microbiota DNA sequence
caagagggtactactctacgccagaagatattgacaagctgaacactaataagtcagaaccattttgaggtgagattatgaattgcgatatatgccataaggatacaacggcgggtagtcacgtaaacagaggtcgatattttgaggtgcatatttgcccgagctgcttgatgtggtccgatgatacacgggccgtgaaggcacgggagacaattcaaaacttcaagaatttgagatctttggaagatattagtataagtcatgaagggactgaagcacaatgactaagcgtgaaacagtatacacattattatttatctttgctgcaggtttcctatggcagctcggttgtgctttagctgaggtttttgtagagtggcagatctggcgttaatttaaaacggccgcgcatactaactatatacaagcataaagggaagtatacccctgcggaggtgattagcccgtagggggcggccttttaatataagcagttgatgagattgagaggacgataagacgatatgaataaatttaagaaatactgtccaaatgtatgggtggcggaatgcgaagaagagtatgaaaaaggtgacattattcagcttgagacgaaatacggaaaagaagttgaatgcgaagtttataacttggtgttacaaaaagatgataaatatttttattctattgtccgaactgatgagcaaagttacgcagaacgcaaggcggaaagatacaacaacgctgccctaaaaaatcaagtgaaaagcaatgataagtggagagcggcagaggaaggtaaagaatttttatcattgggggaaccaataaaagttggacatcacagtgaaaaacgacatcgtgccttaattgaaaggaactggaaacggtgtgaaaaggctgtagaacttgcagataaggcagctgaacaaaagagcaaagctgagtactgggaaaccaaaacaaaagaaataacgttagcaatgcccgaaagcctagagtatttctcagctagacttgaaaaagctgttgaatatcataaaggattgaaagacggaagtataccaagaagccattcatactccttggcttatgccaataaagatgttaaagagctaaaaataaaagttgaaatagccaaaaagttgtggggataaaaaaggacggtgagatgtatgcactacatttttaaatta

SEQ ID NO: 10051 - DNA, 15951 bp, Unknown
  gut microbiota DNA sequence
ctaccgaggcaaaatggcgacccggatgggactcgaacccacgacctccgccgtgacagggcggcattctaaccaactgaaccaccgggccattcaaaccatgtaggcatattatatggcatttacatcaagatgtcaagagtttcagacaataaatttattacattcgttacgctttgccaagtttttgcaatgcctgttccagattattatccagcagattttccagatcttttaaatttcggcaatcaaattcatgtgttattcctgtcataaaccgttttttcgtttcagcaaaaaactcatcgcggaagctattatagaaaaacaccagctgattaccatgttcaaagtcactgtaatcaataaaaagcgttgaaccattgatataatcgatgggattgtcaggagttatatacaattcaaaagcacctattttctgcggcagcttgccggtatacgcccagttcagaagcccggcttcctctatcaaggttcccatctgatgcttcttttccctgttcacgtccgctaaaagctccggcagcttctcatgcatcattttagcaaatttatccctgtcgcggcaaaaatagcgaatatctctgaacgtatgcatgccaatcgtttttacaggtacataatcaaaggtttccgaagtataaatcaaatcaagcttgctgtgcattgcttcattactatatgaagcaatcgttaagatctgtccgtctattccctgtcccattgttaacttaaagccatctatttcctgcggcagttcttttaaaaattcccactcgccaagctgcgcctctatctctgtgattttaggctgtcccatgctaacacctctctatccttttatgctcaattactaatctataatttattattgtagcacaaatgcactgctgatagcaaagaaagctgctgcccaaaggcagcagctttttcaaatcctgcataaaatttttagaaggtcatttccgcaccaacacgccacaaccttcccgaataacgcatactggtaatctttttatcaaaaagattatcgattccggcataagcacgatatttatcgccccagcgtttattaacgacaaaattaaacgtattgatactgtgatcttcactgtctgccctataatcagaataccacttattccaggcagtaatattccattcctgttttacaggctctgtccacatcaattttgctgtataagtattacgggcgctgtaattcaaacgtgtattagtcttatcgttcatagcatccagataatcataattaccgattactgtaaaaccatttcccaagtcatgcttgatttcaaattcaacaccctctgaagaagacttttctatattcatatattgataattaggcgctaaactgtaatccatagcaatggcatcagtctttttgtttttgaaatatgttaatttaattgcagtatcatcgccaaattcctgttcatatgataactcatagccctttgatttttcaggacgcagattcggattggaataagtaccatataattctgaaatagacggtgctctgtaaccttctccataattagccttaagccttgagccctctgtaaaggaatatgtcgcgccaatattcggagaagtctcgctgccaaagctgtcatggtgatcatagcgaacagccggaatcagcaatagtttctcacccagtttcaattcgtcatgtataaataaagaatattgatcagaactttcgtcaatactgctgtctttgcgaccgtcagttctgaactcgccgccgaatgtcaaacgattattattgtctagcttgatcgtatcacgtgcttcaatattccaaaaattaaatttggagcttcccacactgtttgcgctcatagcactggtaacatctttttttaattcaccgtaagttgcgcttagcatataattactgttatcattctgtccgttataagtaaggctggcacttttcctatctacattatatatacctaaataagaaaaaggaccgctggcactggtaaattttttaaactgctgattggtattctcatagttcagatataaatttaaactgttgttttggtccatttcataatctacatccaagctataattttgagtcggtccaaaatatttactcatattggcatcatcccatttaaaatagcggactttagtaaagttagcatcaaaagcagcacttaacttaccgtctttgccgctgtcaaaatggtaataattgctcatttcacggctatttgtagctacacctacagccattgattttttttcagattttttcgtaataatattaataacaccagctgaggcctctgatccatataatgcacctgatggcccgcgaagcacttcgattcgttctatattgttcacattcagccgtgacagcacataggtattagtagaaacctggccatacccttcgccgggaatacgacgcccgttaagcaaaaccaaaacatcatttttcccgctgcctctgattcccaaagtgtgccctacacccgcagcttccggtatttctatgttagtcgccgtacgtaaggcatctataacattggttgccccaatattctggatatcctcttttgttataacttccacactctgaggaacttcttttctgctcaattctgtacgggtagcagttaccacatattcatctaaagtaaatttctgtggttcttcagcatataccgctgtgcccccccaaatgacatttgtgccaacaactaatgtcatcaatattttcctgttgaaaaattgtttgttttttattttcatcataatatccttcctctgatcattattctttttctactcttggaaaataaataatatattcgccgtcttttttatcatcagcataggtttccatatagtttttagattccggcatgtctttaggcgtaattacacctacttttaacgccggattcaatgcttccaatttttcgacagttcccaaatgtccgtcagaatgaaagcagccgttgatatgaaaaattaccttatcctgattatcctgccaataataaaaaatactttctgccatcttgtcatcttttatgcactgtgcggcaaatacctgatctatccgttcctgaggaattcgcatcggtgtttgccccttagtcatataagcagcaaatttctctttatactttcctgcaggcgcataggtcctgactggtaaatattgcttatccagctctgctactgcagctaaagttccctcttttgccaatttcgctgctaaaaaacgtggtatattgctggctaagactggcagcttatgtgcttttgcaaattctaccagctgacggtaatctgttttatatcttggccagggacgcgattttgccagaaattcctcttccgtaattctaccggctaaatactcatttaaaacgaactggttatctgcctcaaacatttccagtgacaaaacaagcttgtcaccatgaatggcatacagttgctgcagcatttcatattccagctcatgcagtacatcctgatcatgaaattcaccaaaaaaaactacatcataatcaacaaagttttcagccatttcagcaagattaacgtcttttctgtctgccgcagaaataatcaccgtatcttttactgttggtaatgcggcatgtgctgattctgccatactcataatgaggcacatgcataaaaattttaaaaaccgtttcattcgaactccccctaaaatttccttataatgaatactaaaacaacaacagcgtcagcctcctttttattataaaaatatagtatagaatctttcaggcccataacttaccggcatttagcctgtccagaaaaatttttcttacgcgccaagttagccttagctaaccttttgtttttaagtatcccctcacgtattatatctcgaggggatacttaaagttttcattattaagctaaagtctgataatatgcttcgatagtttccagtaagaaatctgtccccttttcgccaagcaacggcaaatgtgtcgctatctgggctccgtcaataaaaggagcacttactctcaatacggcattactgctatcacaaagcctgtgcgaaacatcgtctgccagaacaagtgtcttctgcattttttttaatatatcaattttttctttttccacagatatatactgaatatccaactcaggctcaacgatactttttaaagaatggctgcaaagtttatacttaacatcgatccctacagaccgaagaaaagcactcaaccctttaaccaggtcatactcgccgatcacagctgcctgaggtgttttttttctgcccatcatcatagcatacatttttaaagacgctgtattctgtgctttaagacgtaatctggcgcacattttaacgtcaggtagctgtcccagaattttaccgacgtcttccaaccatgccaaagttgctgcataaccgtaaggagcactgaaaacaaatggaatatcaaatttatttttcagaacttctgctgccggtaacccttcctgacgcattaccaaatttatttcagctgtgccgatatcggctatttcatcaacagatgtttcgtggcacaggcaggtatgcaattcataaccaaaggcttcacgcatcaagttctgcagctcccagacatccgatgcggcacgataactgcccattgacgcgccaatgatattaaacactttctttctctttttctgttctttacatggaagattattgaccagcaatttataaacttcagtcaggcctatgctgtaatcacccctaaatccgccctgctcaaatgcaaccagcttagcctgaacttctttctgcatataattacaaacgccttttatatcagtaccaataactgcggaaatagaagatgccacgacaaaaataacttttggttcatagcttttatccaattcgacaatagcttcttccaaacgagtaacatcgcccatgaccacatcgtcttcgttcatatgtgttgtaaacagcctctgctgccagtctactcctaaagttccataaaagcccatactaaaatgagttgtcccggccgggccatattcaagaatgatactgtcttttacgctgagcaaactccaaatgatacccattctgtctgacggaacaggcaaatatctgcataaactcataagcccagctcctttctatattctttggcttccctaacagacttgactaactgctgcagtaaatatcctgtaacttcaaaaccaagcatgccacttgctctgtcactgtcaacaatggcaatacctttttgacgcagtctgttgccaaattcatgtcctaaatataaataaggagacaatacatcatacacatattgcagcggcgcgatattagccgctttgcaaacataagggtctgtatactgcaatatttcttttgcataaggttcatctgcttctgtatatctgttggtttgaatcacctgaggcaccattcccagggaactgaggaaacagttcatttcaaaaactgcatacggcgtattcccgtaaatataagtaataccctccaattcacccttgtttttttcgattttctctcttgcgttttgataaagtccttccaattctcccggcagttccagatccaaatacacaaaaagatttttataggcttcatagattttttctggaataacaaatttattgaagtaaacgtaaggaataccaaatttttcctgcatcttttgggccagcggcagcgcaatatcattaacgacaatattcactttcgctgcagcagcattttttatatcgtctaccgaacagccgcagggcagctgcaaaccgatttttacgccagctttctgcagcatggcataaagctccgtcgttgcaaaatcacccattctctgccccagcaaattgacactgttctcacaatcacacgatttcatcatttcagcacaaacagtaatcgttcgttccagaccaggcaaatggtcctcacatttaaaatgctcagtatgaaccggcagcaccggaataccataaagcttactgagaccttctgaaatagcgtcaaagtcatcaccaattatttcaatgacacaggtagttaccaaaaatacacattgggggcgatattcttcaattatttctttaaaagcttcctgtaccttttccgcactgccaaaggttacatcatggtcatccaaaacgactgaaacacaacggccgtcaatgcccccaaatttttcagaatgtatggtcatacttttagtgtaataagtgcattcatccgtaccaaccacaacgatcaggctgtccttgatgccaccaacagccatagccgcacccatcagaggacagtgtgtccccgggaacaaagcatgagtaagctgtggtatatctttaatgctttgtacctgactcaatttagcaagtttttcaaccagctcttttccatccatcgccataaaaaactccttttatcaacttatttctttaaacataattaaaggcttcttacgcccaggaatctgcactacatcacaatctacgtcgtaaacctcacgcatcattttaggtgtgataatatcctgcggacgaccttcaccatacttacagccatttttcaaaactatgatccggtcactgatctccagcgcatgacttaaatcatgcaggaccatcactacgccgatccccgcctcatggttcagcctttttacaagtttcatcgtttcctgctgatgcgcaatgtccaaatatgtagtcggctcatccaaaaacaaaatttccggctgctgcgccaatacggtagctatccatacccgctgcgattccccgcccgagcattcctgaatagatttatcccgcagagcccaggtacctgttgctttcaaggcccactctattatcttttcatcttcttccgtattatgttcgtaccacttctgatagggtacgcgcccataacctactaaatctctgactttaaaatcaggaggtgcgcaatggcgctgcggcaaaacagcaatacatttggcaagttttttgctgtcgatattgtacagatcctcctgattcagatagacgcagcccatactacagcgcagcaatcgtgtcagcgctttcagcagagtagatttacctgaaccgttagggccgatgatagtcgtgatctcacctttttttacagtaatatccatttccctgactacaatacgcccatcgtaaccgatctctaatttttcacccttaacttccacttactttgcccttctttcttaacatatacaagaaaaacggtccgccggtaactgccataacaatacctacaggtatctccatcccaggtataagtgtcctccccaaagtatctgccgccagaagaatcaccgcacccaaaagcatactcaccggcagcagtgctttatagtcggagccaaccatcattctcgcaatatgcgggacaaccagccctacaaaaccgatcataccggcctctgctaccgtcgcagctgccaaaaaagcagccaccgcagataaaaagatacgtacaaaagttacatttacacccaggctttgagccatttcgtcacccagctgcaaaatgttggcattttttatacagcatacgcctaaaacaagaccaataaaagaatacaccgtaatgatataaacatgatcccaggaacgtcccgaaagactgccgttcataaaagataaaacactggaaagattatcagaattcaataattgcaaaaaggagttatacgctcccaaaaccgtatttatggcaacaccggacaaaattattctgacagtatcaatcccatcgcgccaggccagcaaataaataagtacacaggccaaagccgcaccgccaaaagcaaaaagcggcactgatgaaaccaaagtcggaaacaacagtagaatcgtcgttgccgcagtagccgcacctgcagagacgcctataatcccaggatcagccagagggttacgcatgacagcctgcaaaagagcacctgcaacagcaaggcaggcccctacttcgactgccataatcagacgcggtaaccgtaaattataaacaactaccctcaccggtccgctttcatcataaaaaagagcctgtatgatctgctgcagcgaatacccggcactaccaactcccaacgcaacaacagccagcaataataatactgccactaaaaccaggcaaaccatacttacccgcaggacatttacttctttacccattttgtttcagcttcttcgcatcaataatatcgatcaattcatttatattatcaataacattgatccctgctgtcgcaacatattttatcggcagataaataacctcacgttcgcgtatcgccttaatattgttccagtattcagggtttttggcaaaatcctcttccattacctgctgatgctctgccgcagttttagaaccgcctacacaaaacagtaaatccggttcgtaagataaagcctgctccagatcaatcaataccatcttattgttctgatacacattttcgtaccccagcatattcagcatactgcctaaagtaccatctttaccctgtatataatgacgcggcggggctgattgcagcaccataactttttgccctttattttcctgtcttttttcggccattctggcttccaatttgttgaacctgtccgtaatagcttcagcacctgcattatgttgaccaaaggctttgatcagtacgtcagtcaattccttgatcgactcataagatacaacatgcccggcatcaacataataaacaggtattttttcacgatccagaattttcccataagtatccttagactgataacctactatcaccagatccggttccaaagcaataactgattcgatatcaaaattagaattcatcgacacattcagcagctttgcatccttcaccaaatctgcaggccattccagcatcgccgcctggggcacagcaacctgcttaatacccatctcatgcagtgccaaaaccggagtatgcactaaagatacgactcgctgaggctttgcttttaaaacaaccggttcagtaaaaccataagtcttcagcgtaggtgtatactcaagtttataagtttcaccggcagcagccgacacatcttcacttttactgcctgtattaaagcaataatacaaaagcgcacctactataacgactactgccaacaacaacaatttatttttcattattcatcccccttagtatcttcactcatttctaaaactttatcagccaactcctgatagatcttgaccatcggcgaagcctgtacaaattcgctaaccgtaccgccatgattttcagctgtttgtatatctcccgaacgtggaacatacattacgacctcggtttcaatctcagcggcagccttggccaccagttcctgttcattctcaatatttttagcgttcaaaataatgcctttcaagcgagcataacctctgcgtccaaagtttttgatcgcctgagcaatattattagccgcataaagcgccatcatctcgcctgaagaaacaataaacacttctctggcataaccacccctgataggcattgcaaaaccgccgcaaacaacgtcgccgagcacgtcatagatgacgatatccggcttatagatttcaaaagccttcaactcctccagcttttcaaaagctgaaataataccgcgccctgcacagcctataccaggtgtaggacctcctgcttctacacacaggacgccaccaaagccttcaaaaacaatatcttttaattctaaagcttcccccttttctttaagctgttctaaaacagtaggaatacgcatccccttcatcaaattcttagttgaatcagacttagggtcacaacctacctgcattactttataacctttaagcgccaatgccgccgataaatttgaagtagtagtagacttgccaataccgcccttgccataaatcgcaatttttctcatcaataaactgcctcccttaaaaataaatagctcactgttttcaaccaaaaacattctatatttaaatcaatataaacaactttattcataaaataaaatgcaatagagttagccatagctaactctattgcattttaacactctttaactttagtgtcaatacaaaaatgcccgatcaatgtataaattctcacatcgaccggacattatttaaagataatatttttaaagcatcctaatacagctccggataagcatgccccttgatatagtgaagctgctgatatttttccagccaagttttaaaaacttcttcaggatgcagctctggcagatattccggatataaaaattttgcaatatagatcgtaccaaccaatttcgacgcaccgccatgcaaataatgcgaaagcagcaaaatccgatcattacgtacagcatcaatacctgcccaaccgctgcgtaaaacaagctcctttttgattgctttctcttcctctatagtcggcggctgataagaagaataagcattggcatctgctactttgacaatatactgaggatctttctcgattatcgcttcctgatcaacctgcgatcctttagcagcggcaaaaatattatcagcgcctgaatattcaaccattttataaaaataatcgcccggcactgctgtttttccaagagtccgatattcaaaatacaaacttctgcggggaacgccttgaagttgcttttgtatataagccagtttatcgttaaaataatttactaattcttctgcctgttcttccctgccaaaaattctgccgatcagcctgcagttatcagcaaactgatctgtataataagaatttatgacaattactttgattccaaacctgtccaacatctcctgcgcgtcccgccatgttccctcaccggtaataattacagcctgcggcgacaactcggccagtttttcataattcatcgcattttgactgataccaaatacctgtgcttcattaaatctgtttttgaagccagactgatctttaaaaatataattatcaacgccgacgattttatctatggcaccaacagcagtaatcaactctgcattataaacattacagacagcaactctttccagcggatacggaagctctaccttacggccaacgctatccgtgactacgatagttttttgctgctctgcctttctcctgccattatcatcagcacagccaaacagcatcattccacaacacagcagaagcattattgctattatcttactcatctttataaacacctatcaataaattttctattacactaacagtcatttcatatattttagggatatcagcctgagatgcggatctcctgctgatatttccatacattcatctgtaaatccttttttagaaaaacataggaagcgtttatcaacacctgtaaaatgttcacctttagcgagcaattttttcagtacgtcactgtcagcttttttattgctccaattacaatcaatcagacaaataacatcagtatcgtcagcaataaaatcaactgaaattttattactgccgctgccttgccaccacgggcttatttgctcaaaatcgcacataaaatcattgcgtttttttaatttataacaatactgcaaacagatctttttaaaaatatgggcagcaaataagtctattctcggcataatattattgcgcagaacctgatgcccgcgtccgatcgcaatcgaactcatatacggaaaaacaaactgataccagaaaacaaacatattattagcaatttcataatagcttattttgttactgctgctaaaagcaggattgacacgctgcaaaattcccattgtcagcagtacattcaagtattttgaaaccttgttgcattccatatcggcagccgctgctatttcgttcagccgccctgccccgcaggcaacagaacaaaggatagtattatatgtagcgggttcccttaaatcaagttttaagagctgtattggttccttatacaatggagctgctggttcaaaaaacaattttttcagattgtccttaaaagacagttccgcatccaaataactcatataatggggattgccaccggctgcgccatataaaaataatttttcttcttctgtaaagccttccaaaaatggctgtgcttcccaataatccatagcgcctaattttataacagcattaatgtaattttttatctgcatctcctgatttttcagcaatacccgctccatctcagcaaaaggcgctcccgaaaaaataactgatagtctcaactgctttttatatttttgagcatatttagcaaatgccgtaaaaaattccggtgcagaatcaaataaatactgtacatcatctattaccagaaccagccgctgctgtgtggccttaaaaaacaacgtgcttaatacactatcccagctgcggaattcattttttggaccccaaaggccctgctcttttaattccaggcaaaaagccgccaaatttacagttgacaacgcattgcgggcagcaaaataagcagcagattttttttgtaaaaactcctgcagcaaagcagttttaccgattttatattcaccgctcacaagtactacatttaaagaattttttgcatacaatttttctaaaagacctaattcttcactgcgtccaataaacatagcggcaccttcctactcataagttgtattttattttaacacaactcatagccggaaagcaaaagggaaacataattatgtttccctttgcaacttctaaaaattataattcacccctacgcggaaagtccttcccatcgtataatacaaattattgttgctcgttccgccaacattggcaatatccttacgattaaacaaattatcgacatcaaaggtagccgtcacgtttttggcaacgttataaccaagatgcaagttagacactaaaagcggcgaagatatttctgttacagtaattttttcactgctgacgccgtttttaaaacgattaccccaatagctcagatttaaggccgcactaaaatcacgattcacataatttacaccgccgtttatctgataacggcccaaagtatctatccaatcctgaccttccttatacatacgctgaggtttagcaaacaccgcacctacattataagtaaaatgtttatcgacatcctgttcataccgcagttcaataccggtattgcgatatttggcagcattagtttgataagactgattatccaccaaatttttaacagctactatttgatctttaatgtctattctaaaagcagtaagatttaaccggcgtccattttcactatacttataaccaatttcataattccatccatgttctgattccaaatccggattaggaacaactacactgctggcataataaagatttctaaaagtaggcattctaaacgattttccaacgctggcataaacagaattatgttcatcaaatttggttatagcctgtatctgcggcaaaaattcgttataatcaccagcctccgacctgattaaatcttctctggcactgaaaataatattcgtggcacggctcagttttctatcatacgaaccataaacagaataattattaagcgcataagtaccaaaatgtgccggatcctttaatatactgctgctatcgccaaaggttttaaatttttgattatcgtttttgtaagtttcacgtttagcgctgataccaatcaaccctgttgctttatcgctgcgccaaacttttttcgtatccagaccatactgtttatgatcacttttctcccactctacattcgtcggattcactacataataatcaggattttcgattcgtctctgattataataaattttagcatcccagccgttttcatcattgtatgctatctgtgcataatgttcacggtcatcatacataaaatgctgtaaaatattttcatttacatcattataattagttgtatatttctttttattgaacatataactgaatttaaaacggtcatcaaatttatagttaaaagccagatgatcttttttactgtcgccaaatccaatatagtagggaacagcagtaccatttatttttttagtgcctaaacgctccgtcatattgccagtagaaccaaattcatttctgccgagagccaggcttgctttacccatgcctatggtggcagcataatcacgctgtcctttatttccggcagctacacgcagcgaatttttcatctgatccttagttataatgttaacaactccgcctaatgcctcgctgccgtagagcactgcccccccacctttgacaatttcaactctttccacctcatcaaggttgagcatatccaaatgattaacattgttaaatgaagccggcactccattgatcaaaaccaaagtaccgccatcaataccgcgcaaattgatttggctgctgccggttatccagttctgatcatgcggccccatattagtaaaataaacaccgcctttgtacttcaaggcattcgccacatcgccggcacctgtttcctttaactgctcacctgtataaataaccgtgtcagcaggtgtgtctaaattgttcttttcatacccaagggcagtcacatttattccatccaaaacgaattccgacagattttcttctgcataagccgatcctgttaaaaagcttgttcccaaaatcactgtacacatcaaacgtcccaattcaaattttttcaccaaaatacagctcctttatcacttactttgatatcataaatcaaaccatttatcgatatttatttattaataagctcttatttatgatatctattcccattgagtttgaattttaacattcataatttttccagtcaatatttgtgaatttttccagtcaaaatatttttcgtgtgtacagttgatacaaaggcataaatcctgccttttaagcactacttataagtattattattgatgtcaaaaagtatttttaaacaagatactacttataaatagaataataaccgttgatacattaaatgtatcaacggttattattccgtatattcttttatttctgcttattcgcctcaaaaaaagcgttataatcctcaaccactttattagcgcttgcaatcgctttattacgctgctcgatgatcttatttaaatcattagtagtgccgtcaatatacttctgcacagcttttaaataattatcgacagcggcaatatattcagttacagccttagcatcttttaatgattccggctttacaggcactgccggaacagcatcctcaagtacaggatataccgcagttaaattagtagcgttaggatcgaccggcgcttcagcctgtttctcttcagcaaaacagacagctgccagactaaaagtcaataacaaagcaaaaaataaagttgtaaactgttttttcataatacgcaccatcctcattattttatattcctgtcatcactcttccgcttgcccttcattttttcaagctcagcttccgactgcctgaaacaagaataactgcagtaatatttacgcagcttgttgatcgttcttttataagtatgcaagcttttattgccaaaaaactctttaccgcagcaggcacaattcattgttctgctgtttaaagtactgtcaaaattatcatatcgtgtcatcatcgcagtttcaattccaacccttttcaaattcaccactccaacaaatcctaatgcagtacaaaatttaccggcatcgtaatataacaacgtacaggactgccatatgtatctttagccgggctgaaactccaattatatacagcctcaacagcagcgccgtc

SEQ ID NO: 10052 - DNA, 252 bp, Unknown
  gut microbiota DNA sequence
aacgaggatccgtactggatactaaatacggcggtgttaccggaacaccgctgccgcttccctgacctgccccactgccgctgccgcttccagaaccactgccagtacccgagccgctgccttcaccgctgccctgcccagtcccagcccctgttccttcaccgccgccggtaccagtaccaccggcttcaccgcttttaacattactctgagccgcttcactcgacgtactgctcgactgcggttgtctgg

SEQ ID NO: 10053 - DNA, 19460 bp, Unknown
  gut microbiota DNA sequence
acaatatgaactgcaagcgcaatggcaatacccttgcctaagcgtctgcctctatccgtcatttgccatcacccagatccgttgccaagccaaagcgtgttactcccgcgcccttcaactcatccatcagcttgataaccgttttataattagcctcgccgtcggcgcggataatcaccgaaaaagcagcgtcacgtttactttcagcagctgcgttagcaaccagctgttttatctcgatcttattatcttccagatacaatacgccgtctttttttaccgtcactgcaaaattacttttgcttacggtctctgaattctgcgccaccggcaacctgatcgggatggtttttatttcgctcatatacatcgtactgacgataaaaaataccagcagcagaaaaatcatatctatcatcgggctcagcatcagctgcggcggtaagctctgttttctaggtcgtctgcgcatcttctacaccgcccctcagtttttactgccgccgtttttggcctgaacgatatctatcaaaacatttgcaacctcgtaaatattcagcgaagcggtttttaccttgctggacaaatacgcatgtatacacatgcccatgatcgcaatacacaaaccaaaaacagtcgttatcaatgcctcgccaataccggcagttaccgccatcggattctgcgccctttcattcaaagcgttgaacgaactgatcatacctgtaatggtacccaaaagacccagcattggcgccaggccaataacaacgctcagataatcaagattctgctccataccgtcaatggccctgtcagccttagaataaacaatcgactccagccttttaccaagatcttcgttgatatccaaagtctctgtcgccagctctgccgcatcacccttattcataccggcaaactcacgtgccccgacaatattaaaatcattcatcaggcgacaaaactccatcacaaaatcagtactcgaaagcgcctttttataatataaataacgctccacaccaatagcgatagcggcaagcgaacataacaaaagcggccacatacaagccccgcctctttgaaaataatctatagctccggcaaaaatacccatttctgtatacctccaaaatcaattgaatttttcaggataagcggcttcagccagatccctgatcgcataaactatataatgtgtcgtactgtataaataagtgtcacgcagctgcacgacccttttattctttacagcattaacactttgataagctcggttctgcaaaatctcctcccgcatcttagacgggtcctgctcgttatcatacttccagctgggaataacaagcaaatcaggattcagcctgatcagcgtttcctcagaaaaagcagcattcggcggcaagtcatattccgccaccacattcttcacctcggcataattacagatatcggcaaaggtagtacccttaaccccaaatggccccatataagaaagcgccatcacactgatatgttcttcaggagcgatattgcctactcttgcccttacaaaagcaagctccttctccatacctgccacgatcttaccgccggcaacacgttcatcaacaacatttgacagctcacaaatagtctgtttgatctctttaacagtagtcggcgttttataaacataaacatttacaccagcaccgcgcaaaagctcaacaaaattcaaatctgtccagttcggcaccaaaaccaagtcaggtttctgagccaaaacagactccagactgccgctttgcacgcgcccctttacccatacagctttatctgccgcaggcgaaattccggcatcatctgccagatatgtcaaagcagcgatccgatcaggctctaccatatccagcaacacctcatccgcactcagtcccaatgatactatgcgctgcggcttatgctcaaaatccagccttgttttagttgcatccacaacactgtaaccaccacgtccggaagccggagtctcaatttcgggaggtttgccgcagcctgccataaacaacacggcagcagtactgacaactaaaacggcagcctttaataaatacctacattttgcaatcacgcattaatctccttcgtcatcgatagacaattttctgccgcaggcagtaagctgtacctcaatgtttttttcaaaatcgctgaaatccctataagcaagttcatgcaccacataatccggcttaataaaccttaaaagcttctgcacagccttatctgtaaaaggcctgtgctgatctatttttatcacatgcttcattcgttcaatattagagctttccgaatcaaaaacacgttcaaaagttttaacataatctccggaaagagaacagtttaaatgcagtcctctgatcagctttctgtcctcaccaagcgcttttactgtttttaaaatatactcgatcccatcctgttcagtctgcagctcgggattagtattcatcaaatgcccggtatcaagcatgatcccaacgttcttatgttttatcttttcaaaaaaggcgtgcactactgcagggtctgtcagccgtagtcccggccaccataaattttcaaataataccagaacatcttcggggacctcgtcagccactctgttaaaaacagcggcagcggcagtcacgatctccatatcgctgtgctcaaacttaaaagtaaatacctcctcaagagtacattcggctacatgccataccagatactccggcttttcaaccagcgccgccttaatattagcccttatattgcgcagccagcccatacaataagtagtaccgtaataatccttcaaagcatctttagacgtaaaaaatcgacttaagacttccttatcattccggtacatcgccagccacatcggccagtaattcaaatgcactcccacagccaaatgctcaaatgacttaaaatacggcacattcctgtaaaccagaagctcgatcccagcaagccccaaccctgcaacaaactgctccaaagtttttccggtttttaaaatctctttctcctgcccaggcataaaacagtaattgcataaatgctttgttttacgcctcataccatcaccgcctcaggatcgtcactgttatccttacaggccatttttttactgcgggacaacgcccctctttgagaacacttaaaccttaatctgttcacctcgcgcaataaagcaatatagctcgctttatcaacagtgatagtactctcgtcattgttttcaatctctttgataattttctttaatttcatacccgtattgggctgctgcagccaaaacagccctccctccttcaagtgacttgcgctttgtatccaaaaacaaaacaggaaactgccaatgcgtcagtttcctgtcaaaatacatcatcaccacgcaccaggatacatagccgccaagctgcaaaatacagcaaaaaagcgacagtactgttttccatcaaataaacagtacaaatgtatccaccttgtgcatcgcaagtctttacggatgttaaaacaggcagttctcctggcttcggatcgtcgctaggccacgccttctcaggtctccccaatggacgaatgtggctttgctacccgttacagttgcgggacagcgcaggtcttacacctgcttctctattaagtccttccagcaatagctttcagacacctgttttcttaactatatgaaattattagaactgaaatgcttagcttattcgtaatgcttttcaaataacttatataaccattataaacttcttgctttttgtagtcaagtaaactttcaccttaatatcctctgatcacgaaaaaattttttttattttctgtatgatcgtcacattatcacttttttttaaagcttcgctttcaaccattacaatatcctgagccagtaatccttttcgtacatataaaaccggtgtattctcttctgcgatcccctttaaaagcaatgccgccttagcctgatcaaaagcctgctgtaaattctgcccaaacccgatactggaataaaactgcgccgcaaaaactattgctgcctcgtcacctatctcggtattcattccaatagcagcctcaaccttatcgacaacagcctgagcttccttctgcgaaaaacaggcgttaaaaaaaatcatcctcacctttttagacgctgaagccacagcagcggccatagcttctttagaaaccatcgacatattaccgctgccatcatcaagaactatttctcccttttcagagccatgccccgaaaaatgaattatctccggatcagtttcattgatcgcctgcaaaatatccagcgattgtaccgcccagcggctaaaaaactcgatcccgtcacgtccttccgacttgcggatagcttcagttatcgacctgacctcctggtctaaagccagcttctgagtatcctgtggattagccgctaaaaacaaaatcgtcagcttatcaaccggctgctgcggcttgatcgcctcctctatttctgcgccaacctgcaaagcacgctcgcgcataagctgcgacttctgtccgcataaaagaataaacttattttcttcctccagcagctcattttctgttttggctatctcctgctctatctcattgatttttttacaagcttcggccctgtcatccttcagctgaaccagtttagtctttttattcatgatcgaagcttgggcctttgcaaattctttatcgttcatcatatttccgcctgcctgaaatactcgtcgataccggcggcaatagccccggcaaaagccggcatatcattttctaaaagctcaagatcatcattattatcaataaaagccagctccaccaaaatagtcgtcataacagtccggcgcagtacatacagcccctggcgctctttgcagccacggtctatcgtcggcaccttgctcaaaatcttcttctgcacagcctcacccaaaagtcggccctgctcgctgtaatataaagtttctgtaccgcgggcattgcggcccggcgaagcattgcaatgcagtgaaacaaaaatatcagccggccagtcgttagcagcagccaccacagcatccagatcatcactctgcagcaacatcacctcatgccccgctctttttaaaccgcgttccagcaaagctccggcctgtttggtaacatcagcctcacgtacatcataatcaatgttcacagcaccgctgtcaacgttcgggtcatgcccaggattaacaaaaaccttcattgcccacgccccctttaaatgtacaaatcctttaaaacaacagcttaattagttgtcgaatctactgcctctgcactccaaacaaccttcatcagcaaaggatactcttccaataaatgttctaagataacatcaatgctcacctgcagcagctcggcatcaaaaccgtcatccgtattcaaaaggcagcagtccagttcaacatcgccgctgacacccgtagaatatttaaacaacttatatttacgattctgttcatccaaatacttcaacagcgctgcctcattttcggctttacgtgccgcaggcgcaaccagtaccttgatcactgtatacaagctgtcatctgtatataccaaaagcggcagattctgaccattgacatccaaaatagttctgaacaaaaccgtatgcagctcgtcgcctacgatctgggcgccaaaacaggtaatattcttcttcaccaaaagctcctgccatttctgcgccttcacattcaaagcattgctttctggtggcttgttatcattacccgcaaatttcaaaatatcagtctcactcattctcattctctccttagttttaaatgatatattttagattattcttcgccttccagcctcaattgcgaagcaggaatatgcgttagaatctccagcatgatctccgcaaaactgtgcgctggaacaggcttccattcagattttttatcgctgctttgcaaaacagcgccgcctttgctgtaaacaacactgtgcagctcgcggtactgtttggcgcgcagattaaacagcagcacctgcgtacaggattccacgctgtcaccatctttcagcttttgggcaaatactttggtatccaaatgcttcttcaaatcttcgttcataaaaacagttttgacctcggcctgcaaaatattcctgtctttatcgccaaatgctcccctggtcataaaaacactatctttagctatataatatctaccggtcgaattttccataacctcagtccagcgcgccgcctctttttcagccgccgtctgctgcggctgcacgcttatctgccaatccataccgctgccgctttcctcggcagcgaagccctgcgctgctattaaaacacttaaactgaaaataactgccgcaatgaatttcatacgcttctcaccgctccttattctagttatgcttatcatttttcaataaaaatttcaacaaagtatcggcaaaactctgcccggggacttttttccatatacccgcgccgctgcgttcatcaataattcttccttccccagtataaaccttagtctgcacagttttataaagctgtttgcgcaggtcaaaaacaagcagcatatcgcaataagctgcttgttcacctgtttccagcttagccgcatagtttttattcaactgttctaaaactttagtatctttaaaaacagtacgcatcaaaacctgtctttcatttttgcttttatttccctctgtgtcttcgacaggcttgatactatcatattcaaacaaataattgccggtctcgctgctcatcagcagggtccaacgttctgcctccagttctgcctcagtctttttaggctgcacagaaagctcaaaagcccatgggtcggcaggtatctcttcctgcttttcggcagcataaaccggaagcagtaaagaacaacttaataataccactgtaaaaaatctatacatcactatccactccactcatactttatttaatatatatttgcttagtgcactaataatactgcactaagcaaatataacaagctgccgcattacccgccaaaagcaggcaatgcagacacgcttgtcagaaaatcaacttttaatttatatagggttcattatttctttgctttttcagccagttcgcgggcttctttggccaagcgaatatgggatgccaaagacttggaagcaacagccagattcaagccacgagtggtcgggatagacggagcgatgaagcaggcagagttgaggttaccaccagtataatcgctcatctcggtaatgctaaaggttctgtttgctgttactgccgtagtgggagttccgtcataaacagcgattggagtacctttaacaaaccacaagcggctgccgtcagcatggatgccccacaaatagcctgggtcattaactgccacaacttccgtccagttagccggagtagtaatattagccaaagtggtgtgataaacgctgcctaccagattcgcaaaaccactgtcataatgacctgcgaaaatataaacattattagcatccagaatagaaatgtcgcggaagtcgcctttttgagtcgggtttgtgatagtgacggtagttacaccagtttgtgtaaagtttgtcaagtcaacgatgcacagattagtatcagcattgccgctgccagcattctgcattccgcccagcgagcagacatatagcttattatcatacaaatcaagtgtaaaggaatttttaccgactgttacataagcattatcataagttaatgttcctcttgcgctaatagcaaatcttgccacaacactgtcgtaataagtagcataaccactgcctttattgacatagaacaaagcatacaatttactgccaactacagtcagcgcttcaccgtggaaaacgccgtcagcataaggattggcaaaagcaggaaaatctgccggaaaggcatattcacgagtttgggtgtaatcgctatccatatccacaacagcgattttggacaggtcataaccggtaccaaaaagccatctaccgctggtagctacgccatgcaggttggcaacaccagaccacccctggctgtatagcggcacggcccagtttccctgcggatcaatgatccggttaggctcagaggtagaagtataattatattggcgcagcaccagacggctgctgtttctatcaaaaaaattaaagaaagccggatcaccattaagcttaggattatcaatcttattttttacagcagacaaagcagtggcaaccgcagcacgttcaccattgatagcacctgcagtaccttcggaataaccggaatttgtagctgtataggcaaatagattttcactcattttttacacgctcctttaattttaaaatatttttaataatattacctgtatccatttataaaactctgccttagcccatgggcatcacctcctcggcatactgctgcctggtattttagtaagtatattgcaaagtcgcataataagtgcgcccctgaatcggatattggatatttcttatctcgccgttaccatacatatttaaatacatatcattggctttattcaagacatcattacaacccactgctaactgtaaggatttattaaacttatattttacgcccacatccatagtcgtcagcgaggactgcctctttacagcacctgtagtcagtggtatcgggtcagtaaccatccagtccacatacctaagctgcgtaaacaaactccagttagtatctggtcgatatgtcaaccgcgctgtgccttcccattggggctggtaggtcaagcttccagcaatggtattggagtcataaccaggcagtttagtcatatcatagaacacgtctttaggtttagtataggtcgcttgtaaattaacatcccatttctgccaagacatgtctgcctgtatttccaagccattgacttttgctttggcagcgttagtgtagaaaaagaagaaattccgactcatcaactgcagtaggttttcagaatcacggccaaaataagtcagctggaatttagccgtgtcggctcccaatgccttgccgtcccaaatagcacttacatcccactgtttgccttcttccggcatagggaacacgctgtcagtgccgcctacgttcggcataggccaaattccggcgccgtcaccagcgatctcgtacatattgagcagccggtagtaagtaccacctgtcgcccgcagcgtaaagtggtcgttaaactgctttttcaacgccagctgccaggtcactttatcatcagtttgctcatcctgttgatggaaccattttacattttgcggatcattcttttcgtcataacggtcgctgcgccctaaaatcttagaacgattataacgaacgctgggcgtcagccaaaaatcaccttttttatttaatgtgatcgtatcctggacttgggcattaaaaatctcctgctcataataattacgccacctgccgcgggtatcttcgctggaattttcaaaatcatgcattcgccagccgtcaatatccattttttctttagaggcatcgaccaaaaattctatcaagtgtcggtcgccggctttatagcttccgtctatcttcgcacccaatcgacggctgtcgtatttgctccacaaactattagcactcaaagtatttaaactgtttgttgcttcaagcaccttttccaaattctgccaatcatcaatataataatctttatcctgctttaaatagttgatactccagccccattccagattgccgactgtatcgcgccgacctaaaagcaattccttcgccgttaactcctgattacgaaaataatacatattaggcttgccgtaaggcatatttactgcccaatcctgatccacagtccaaagtggggcgtaattattatcaataggatgcggcagatgccgtctgatatttttccaggtagctttagccagccagtggtcatcctgccatttgataatggcatcggtgtttttataatcattagccttacgccagcgttcagcactttcaagtttgtctaattggtattgatcgcttttatataaattttctttgtaattaggatcagcatatttggcataataaaactcccaatcatgctccataacatctcttccaccatagtcatcaggattctgtttccaaaaaacttcataaatatcgccgcccggagcacaccttgttaccatctcatcaattgatgtaaccttacccaagctaggttcttccattccaaagccaacatcgtagctaatttgcttatttattctattagtggtattttccaaatctttataataatattgcaaacgctctttgtaggttctgtcattatcaaaattcttatatttaaaatcgccttcactctggtcgcgattgatgccaaccatcaatgcgccgccccccagaggagcgtcgatttgtaaactacccttgtagccgccaaaggagcttttgccgaaactggcctgcacgttagctttggtagggcgtttggtaacaatattgataacgccgcccataaaggtaccgccaaagcgcgccggtatgtaaccgcggtagacctcgatccgttcgacattatgtacaggaatagtagaaatatctgccgccgcgtcgccgcctaaattgaacaaaacaccatcgacaaacacaccgacctgtgcagccgttgagccacgcacactgaccgtagtatactgacctttaccgtttacctcgcgtacatgcacaccagggaccattttcaacaagtcgggcaggtctttctgctcacccttatagtcatcagggcgaataaccgttaccgttcccggcgacaattttgcttcccaatcagggcgcttcgcctcaaccgttacgccttccagggtaaaatccatgccatcaccatcagtttcatctgccgcagcttggacaccctgcacagctgctgttttagcttcggcttgcgctgtattgttagaagactctgccgcccataccctcggctggtccccccctaatgtacaaacgcccaaagcagctaaaatccccgctgttatggcagcttgccgcaagctgtttctttcatttctcatgcaaatcaatcctcccacttttgtaaaaaataacgccgcattttctaccagtccattcggtgaaagtgcagcgtctgtttttttacaaaacagcctgctccgcttttctggtcgaaaatactaaaatttccgcgctgctggtttcagcgcatagttatagcgtccgcagaaacatttgcctgacaaaatatcagacttaaacatctctgcaaaattttctcccagtccgtctacgcaggctgttcaaaagatagaaccagtcagcactctgactcaagatcattaccccagcatccctttgtgacaggactgcgatgctgaaattccctaatacagttgcgtgacagcgccggattcacaccggacttccctataaaaccacggatcattgatcccacaagtacccagttccaaattttcattttttgttttcaatgaacatgtcatttatcactccagtaccgtgaccgcaagcatggataccgccaccccagcggcaccacgctcaaaggtctgagttgagtggagtttgcaggctatgactaaacctgctggaaataagaactgcctccctgctgatacagggaggcagaaaaacttgcataacaagcgtataccagtttttctaactctctgtctctcgcagcggctagagtatcaggctgattgctggcttgggcataaacccttacagcgccgggagcgcagcggaattgcaccgcttatcatgcgattattcgcacctgataactattactatttctttttggtgtttaaatcatacaacttacttttgcatatgtcaatctattttttaagaaagtatacagtatattttcaattcacaaatctcttttgagttaaaaataataaacggtacaaagcaactttgtaccgtttattatttaattattaattccaaaaaatgctataaggtcttctagttcctcaaaggataatggtttaggaatagataattgggtattatggaaaatttcagttgccaaagcagcatatacctgtgcttgttttgacgtaggatcccattcgataactgtttttctatttatttctgccagattgacaattttatcacgtggaataaaagcaactatccgcgtgtttattttttcagcaaaagtgcgaagcaaattttcttcgttaggtacattacgtccattcccaattattcctgccagttttacctctcctcgtcctgcaaaacgtctgatccctttagcgatattgttggctgcgtataaggacatcaactcgccagacgaaacaatatagatatctgttgcatatccttctctgattggtactgcgaagcctccacatacaacatcacctagtacgtcgtatagtattatatcttcgtcggctgctgcatcaagctcctgtaatttttccaaagcaactattatacctcgtccggcgcagccaactcctggttcggggcctccggcttcaacgcattttattccgttaaaaccataatgcactatatcttccaagtttatttcatcttttatccgtaccatatccagcacagtatttttgcagatatgtcctaaaagcaatctggttgagtcgtttttaggatcgcaacctatctggcaaactttatgcccagccgtgcttaaagctgccgaaacattagcggcagttgtagatttgcctatgccacctttaccgtaaaatgctatttttttcatattgactccttttttagataaatgaataatcttaactgcctaaaaactgtttgcataaagtgtgtccaacctcgtatgcctgcatatgtggcactgggaacgctgattttttcggcaggcataacgctgtttatataaatcgtctgactgatatttcctatttcactacgttctctgtctgttccgcagagtatctgatattcattttcattaagtttgggcaggtcgccggcatattgccagcgttgataattacaatttctgttttcttcattgggtccatttatgcggacaaaacattgttctaccatcgacaaatccttttttattactgccgccaggctatgggcacaactactgccagcagatatgaccagccttttgagtgaccagctgttgtcaatatcacacagggctgagaagctgtcaaaaatattttcacgcgctgctgctatctcatgctctaatgcttctatatttgtttctatcttcaatgcagttgcaatttttttaagccagtttatgcttgcagtaaaaccatatggtatatcagcgataatatattgttgatttagatttttaaataaccattcagcaaccggcttacccagttctttgttgataaccacgtttaacgctgcttgtccaattttttgcagttcttgcagctgcgtaccgtttgtaagtaggcaaagattaacttttattcctatactgtttagcatacgatacaattcaagcatatctccttcccagttaggataacaggtactacagccgataatatttaccgttgctgcttctggcattgtctgctgcaatttcatatcggataatagtgctgttaaagcattgctccagccctgccaatattcgccgcttaatcctcctgcatccagtgcgataaccggacaatttgccgttatgcttttacaaactccttgtatatcatcgccaataaggctaagtgaacagcttgtaagtactgctaaaaatgattttttctgatcggcgcaggcttcttctacagccagctgtaatttatcactgacaccatacaaaagatctggttccaaaacttctgaacaaaaaagtctttcttcatattcttttacggccgttgccagttcccgttctgccaaaacagcgcaccaacgcggacaattcataatgactttactgtctgtaatacttaaaaacgctgatgctgccccggtcatttggcagtatccttgacatggctgccatttttttagtttttcattatttttcataaaccaatttccttttgtcgtttaaagtttcagccagttttagtaaaaaattttcaaccccacttctaccgatacgtctaaatgtgatgcaatattgcggcagtaaacactttttaggagtagtggtcagcagaatatctgccgtaagcttttgtaactctgcttcagaataaaactctgtctgtactttttctttaagcgattcataatgggcttgttgttcctgtttggttaattcttcacaaaacactattccctgcaattgcatccctgcttcatccaacatttttattatttctaaagggtcgaaatatctttgcggcaggcttatagcaaaaatatagtttttatttgaaatatgagtagtaatttgttgtaaaaatttattatagctttgtttttccagttcttctaacttttctgcctcagttgttctgttcaatactgttccaattgtttgcagccattcatagacggcatccatagtattaggtatttttaattttatatagtctatctctcttttttcggcaaactgttgagcaaatttttcaacttctaccagcgtttttggcaaaaagcttatagcggtaattgctgatacagatgccatatctttaaattgttctaaagacatgccgccaggtgggtaatatatttttgtaaaaccaaatagtcccagtagcctgtttatttcctgaatttctttggttgggctaaaaatactgttcatgcccacaaccgctatacttgcaggatctttagtcttttttagcagtgggtatacaaagcgctggcatatggctttagttatagatagcactccatctactgctttttggttcataaaacctgatccttcgacatacaagaccggcactcctgttgtttgttctgcttcctgacaaatagctgctacatcatctcctatcactccggcagcgcagccagctgccactataatgtattccggtttttgttctgccacaacgtccaacagacattcttttaagattttttccccaccaaaaatagcttctttatcagcaagtccagttacgaacaaattactacaatcatgttctgtttttaaatttttttgattttctattttccgacgcatttcccaaaaagcattataggcaatatgtgagcaggatttaggtgcatgaaaaactacagcagccttgggattataagctgctgctaaaaaaacactcattaaattgcaatggattactttttttctttctgaatttctaatcatttttatgctccgtttgcattttcataaactactgtatgtaatagctctatgcttttagctacattatgcgaaagacagtttacatagctttgaggaattattattgcttgacgtttttttattgctgtcatcccaacataagcagggtcactatatatttcttcaagttggtctttgctgttttgataggctccaccttgtgaccacgaacttatcagcaaaaattcagggtttgtttttaagacttcttctttactgaggatccgacttgtacctgtgtattcttgtgcagcagggcgcgcttgttgatagcagtcttctattcctgctgtgctaagaatatcattatatatacagccagccccgccaatagcaccaaagcgcaaaaataacatacccgttttacgttgtttttgcggtattgcggcaacttttgttttaacagcgtttattttaatattcatcgtctttattagtgtttctgctttttctttttcacctactgcctctccaatgccttttaccaaatccggtatctcatcaagtcttgagatatatttaaagacatatacttttatccctgcatcttctaaactgtcgatgtattctttcttcgctgtgtcggcaataaaaaacaggtctggtttcaaggctattacagattcaagattattttctacaatgcctggaacatcttctgcttgtttatgccccatcgacagtccaggatcgtgtacccatttactaagcccaactattttttgatggtcgacgagatccaataatatttcgtctgcatagacaaagctgctggcaattcgttctggttttttagcaaaggtaatttttttgcctctgatatcatgcactgtataattttgggtttctgctgcagtttcagtaattttatcagtcttaccgcagccacttataaccacggatagcagcagtagtatgcacattaaatatcttatcatcgtcgaccatctcctttacttaaaatgtacgttcataagtaagcatccagttacgttcttctaatagggctcctgatgtaccgctggatgaacctgttctgatatcatctcgattgagtaaattgtaaattgttaattttagaacgtctttatctgtaagtttatgagagacgttcatattaatgtccaacattggttttgtaccgtttacacggccagtcatatagttggcaaaaatattagcagaatttttatcaagttgataaccaatacctgcatttagtccaaatttaaagtcagtacgttcccattcactactggtgattgttttctgttgtggatttgcgtatgacattcctaaattgtagctaaattttttactaagtgctttttcatagcttaattccacaccggtgttgcgatatttttctgcatttttatagatgtttaaaccactggtagaatctttagctctatatattctgtcatctatatccatatgaaaaatatttaattttaacaaatcattatcggtaattttctttttccaacctagttcataattccaaccactttctgcttttaagtcaggattcattagttgagttgcagtgccccattgttcgttgatattaggcgcacgcattgatttgttaatattcaaataaatattttcattttctccgatgttttgcaaaagttgaaactggggacagaatttacttcctgattcttctacatacgcttcacgagcgcctaaaaacattttcgtcttagcgcctatttgtgtttctgtcataaaaaatacggctccactatcacgttttgcgctatcagtaccaacagtatttttagtattttcattttcgtaattagcgccagcagttatccctactttaccaatcaaccatttattttgaatatcagcacctatattgtgtcccttctggtgcgttgtcgtattatatttccagtctctactgcgcatatacacagctgctgacatgtcattattgctatagcgcatctgtccaaagtgatattggatatcgctgtgaaaccccggtgcatattgaccattatttattctggaacagtctgatatttttttgctatacatatattgcaacagtaagttgtcagttatattatattgcaaatttaaactgtctttttcaagattgtcacccatataaaagcttgtcggactcgattgataaacttttccgcggccttttgattgttgcctgctatagctgacttgcaatttatctgtagcgacattgactgcccctttaaatttatttttatctccccaacctatcaaaactttgtttgttccttgttttttattggtgatgatatttattacgccagcactggcattagatccatataatactgccgagccgccttttactacttctattctgtcaataatatcagtagaaatagattcaaggtcgtagtttccgtcttgattgagaggaatgccatttaccaatatcgcaacgttatctttagatacacctctaaatccaacgtatgtattacctgttggtgaagcagttagggtaaatccaggaatattgcgtactacttccataacgttgttagcacctaatttttcaatttttttctgatcgaaaatttcggttgcagcaggaatttcaaggtcacgggtttcataacgagtagcggtaactaacactggatctaattcaaagctttcaatattatttcgtacattgtcagcaaacactgtacccccccacaagacagaactcagaataactacactacttaaaaggtgattttttaacattcttttcatcatcagctctaactccttgctatttaatgtataatacagtaaaatcatattagtcactaatatgcatattttttctttttgacattttgttcaaatagttataattactgtattactctttaaatgataaagtatataatacttatagtgtcaaggtgattttatgaaaaacacggtaaaagattattttactcctggagaacttgctaagcttactggtatttctaagcaaatccttctctattatgataaaaataatattttctcaccaagctttgttgacgataatggatatcgttattattcgttatcacaatatttctctttggaaatattgataacaatgcgtaaattagatataccattgcaagatattatgttctatcttaaaaataaaaatcttcatgatttgaaaaaaatatatactttaaaattacatgaatatcaagataaaataaaacagctacagcagtacgaatctgctttagccaaacgattgatgcgattagaaaaaatagaaagtatccggctcaatcagataatgttatcggaacaaagtgaagaactatattatagaagtgccgatatcccattatcaataacccccaaaaaacgtattttaaaaattgctgaatatatgcttccccacttaaggtctaaactattagaggattgtgtcattggctttcaacttaataaagacgaatttatccaatgtcagaaattatccaaatataatatttttatacaaactgtagatatgaatacaaacaaagatacagatattctaaaaaaagaaagtggcctttacctttctctatattgcaattgtcattacggtcttattgatgatgatatcaaattaaacattaaaaacttcattaacatcaataaacttagtatttgcagcgatgtttttgtatttcctattagaaattattggtctgctacaacaaattcagaagaaatatcacaaatatgtatacaggtagaatatatgaaagacagtgtacaatagttgtacactgtctttattcaacttttaagaaaacactaaacagcactttttattctgctacttagagttttctatttttattgattttatagcatctaaaattatatcattttttaaatttttactatctttactatcatataattaattactttggcatttgctgatgtgtgataaagaagtagtagaag

SEQ ID NO: 10054 - DNA, 1180 bp, Unknown
  gut microbiota DNA sequence
tctcctgtaatttttttgcacttattttcatagttaccgctcctttaaactttagctaattcaccttgacgacgggttgaccgttttggtactacatcaggcactaacggagatatttataacaccgctcacgatcagcaaccacataagtaaatccgctttctttgtctactctcaaaaacggttgatgtccgctgtatgggcaatcaacagtgttaatacattcagcgcattttcgttcgacgtctgcgataaagctgatatcgttgtaattacgctttataaagctatcatcggcgtcagggaaaatcctctttgctgcagttctaactttctcacttattggctgccgtagttcgccaaatgtttttccggcagcaagatcagcaaatagcttctttacaaactcatttgccgctttagaattacgctcaatagctttcttctctgcgccgatcttattttgtcgtaggattgataacgtattattaatatctgcccacgttggccaatatttattattatcagcgatataatcaacagtatcgccccacatctcaatgtctgtgtatttataacgctccagggtttgcctttcgatagttttttttgcatcttcgcttccccagtttggctttaatcccgccgcctgccacacttcataagctgccgttatctctctaagttccaacatacggcatatccctcacttcctcccagtccagccccataaaacaagccagtctgtattttcttttctctggaggtatcgctgcccagcgctccttattttttgcaatccattcgtctttctcttgtgcttccctgtcagcagcttgcactgatttcggtaatttgatttcatccgtccagcgttcatcctgcaaaaacgtatcaggatcaggtatgtaccttccgttctcctcctgccactgattagtttttttgtatcgctcaacagcagcattaatcaatgcatactgttcttcagagtgtacacgcatattcatccatgcgattcttgcaacaggctttttccttttcgacggatacaattcccaaaataattcaaagcctttttcttttccgttaacctctaatccattttgggtttgctcgcgtacgtgtgcgttattattattatcattgtttatcattgttatattattatcattgttta

SEQ ID NO: 10055 - DNA, 341 bp, Unknown
  gut microbiota DNA sequence
cttccagtctttgttgattggtctgttaaaaaattcatattttcaaacttttttaacgcagtccttacattttggactgttagtccatttccgcaagcttttacgatattaggcaagctggttataaattgtcccggttggcaaataaattcttctccctgccaataccactttttttcactgtgatttgccattaaaagcagagtgattaaaattaccttttgctcaactgtcgtaacctgccaaatcggactatctaacaattttcgatgtaaagcaataaacccagtattcatagcactttactcctgatggtcatattttgtagacaaatacgcttt

SEQ ID NO: 10056 - DNA, 719 bp, Unknown
  gut microbiota DNA sequence
gctcgtggtgtggcttaactccaggctcaacaaagctattgcagtttacacacaaacaatcatcacgccgatatacttcctcgcagagtttttttagcgctttacccttaagtcttatcctctttatttttggaatcatctttaacgccccactccttgatcagctcatctaattcttcctgcggccttgtttctacaccaatatcttttgccatagataccaaacaatctataaaacggctcatctctttcgtgtcataagcactgctaccgtaatatacccttacattgctatagcctttaatgttctgacattcaccaagcaattcagctatccagccaacaccattgctttgccaaatttcaatagttctgtttacagcgtcagttggcactggccatattctgccgtaaccacattcccggattgccttcctgtaaacatcttccttgctgtgaaagctctcttctgacagcttttctgctatcctttggcataatacccaagcgtatttattagcgtcgttagaacgccctttgcgccattgcttgacctctacaacatactgcttttcaggatcgattttattgatttcttcttcctctgataaagggacaggtactactaaatttatgtatcccatcccttttaacgtctgtaaacctttaactgttagcttcattttgcgcccacttactttgcgttaatcttcatcttc

SEQ ID NO: 10057 - DNA, 313 bp, Unknown
  gut microbiota DNA sequence
atcggaataacgatgatggaaacgatgaagcagaggataactaaaggcacgccgacttttacatagtccataaacttgtaaccgccaggtcccagcaccaacgtacagggaggagttcctaccggagttgcgaatgcacaggatgctgctacgccgatcgccatcagtactgctttcggagacgcgccgagctgctgggaaatcgctacgcctaccggcgccagcaatgctgctgctgccgtattagacatgaactgcgtcaaagtacaggagataataaacagtactgaagtcataatgatcggggtaggag

SEQ ID NO: 10058 - DNA, 266 bp, Unknown
  gut microbiota DNA sequence
tacgtcctgatattttagtcaagggcggtgattataaacctgaggaagttgccggaagggaatatgcaggcgaagtcaggatcattgattttgaggatggctattcgacgactggtattgtggagcagatagctcaatttgtgaaggagggcaaactatgattattgtaaccggcggtgcaggttttatcggcagtaatatcgttaaaggcttaaatgatcgcggacgcgatgatattttagttgtggataatctgactaatatgg

SEQ ID NO: 10059 - DNA, 373 bp, Unknown
  gut microbiota DNA sequence
cctgcgcccggagtaccgtcggtagaggtgatttgtacaccggcaatttgaccgcccaatgctccggctacggaactggtctggtatccttcgatatctttggctgcaacggaagctacggaaccagtcaagtcacttttcttcatagtaccgtaacctacaactactacttcgtccagtgttttactgtcgggagtcagttggatagttacttgggttttaccttgcaggcgtacttcttgtgtcagataaccaatgtaacttatcaccaatgttgcatttttcttggctttgagagtgaaattaccgtccaaatcagcggctgcaccggtcgtttcaccttttacctgtactgtggcgccaattaaaggct

SEQ ID NO: 10060 - DNA, 195 bp, Unknown
  gut microbiota DNA sequence
taaggtcaggaacaacagctcctgctttatataaaagctcttttgtaacttttcctatcattgtcactgtttttacatcatttttcttcagagtgctgataatcttaccaattttccctatatgaatgtcataataagcatcaacagcctctgctaactccggatctatatcagggacaactccaacagctataa

SEQ ID NO: 10061 - DNA, 2784 bp, Unknown
  gut microbiota DNA sequence
cccgcaacctttttaaaggcattacgcactacattctgcaatacttcatgttcccagtcaccgcgcaccgtaacggcttcctcgatcgttctggtatcacgcaggtctttataataataagcaccggtaacagtattcagcgaagcaaatttgccgcgcagatccattttcaaagttgcttctttacgctgcggcatccgcttagcatccagtttgtccagctgcatagccactacaatgtcagcgccggtagcctgagctacccgctctaaagctgctttgctgtaatcagcaaggccattttcactgccgatagcttccagcactacatcctcacccaaaaggtcaaattccggataacggaacagtgccaaagcttcctgcatgtaaatggtaccggccagttcatcaccggcaacatgattagccagcggcacaacggctactttagccgcttcagccttaccgcctaacggcagagcaaagcaaaccgttactaacgccaaaagcacataattaaagaattttttcattatttacctccttcagtaaaaagcatctaaagatatcttaacacatttccgaaaaatcaaaaactgttttgttgaaaaaagcggctgcctaagcagccgcttttaaatttacagtatctaattcagttaaattagaaagtgaaggtcaggtcggtccagatgattttgtctttgtcgctgctgttcaatttagatttagtatcataataggcagcagtaaagaccatgtttttagcaacagtgtagttagcacctacgccataacctttaaaaccttcgccgtcaaaggtgtctgcatcagtagtgtgtgcgatataggtttggccacccaaatcatagtagttagcaaacagaccataggaaccagctttggcagcctcagcgcctttccaagtcaaaccaacagtgtagccatcatcatcaagaccatcaaggtcatgtccttgataactagcatcacctttcaaatacattgcatttaaaccaaaatctccgaaagtcgtgccagcaccaacgaaccagatcgcattgtcaataccagaatcttttttcagaatatctttaaagttatagtaaccagcagtagcatttacagcaccgaaatcagcagaaagagcgccgcctgcatagttaccaccagtggttccttcaagtacatataatttagtaatttcatcagttgctttaccagcagccaaagataattttactttatcgccataggaaagttcaacaccatcagcacggttatcatagatattaccgtcagcaaagaatgcattgtaacgaccagcggtaacagccataccgcctaatttaccctgtacataagcgcgttggaaatcagttttttcatcacctgtatagtcgcctgcaaaatcctgaatattttggatcataccggtgtaagaccagtcatcgttaacttgtccagtgatccaaatacgagaacgtaaatcaccaacataactgtcagctacattgcctttaccttttgaatctgcgtaacggaaacgagcttcaccagtgatttttacgttgtcagattttttctccaaagctgcaacgcgtacgccaaggctgtccagttcgtcagcaaattcagctgccaaacggtctacgtttgcgccttttgccattgcttttgctacgatttgtgccatttcgtaacgggtcatcaggcgatcgccgccgaaagtgccgttgccataaccgtcaacgataccagctgctgccagtttgtttacggaatcatatgcccaatgacctgcaggtacatcggagaaagggtttgcagcataggcagaagcagttacgcccaatgccattgccattgctaatactaaagattttttcattgttattcctcctcaggaaattattaagtttataattttgctgttttagaataacttctttagcaagcattgcggcgagttgccttgtttcctctgcaaatccaactatagagattattccttaatcaactgattataaacttaatttattttaccgcgtttttacgattttgacaagtattttttatttttatgcagtaaaaatgtaatctgattttcttttcatcttttattatgcaattttataaattataattataaatcgaacttataaatataataattaaaaccggcaatcgtaaagattgccggttttagaaaaaatattaaaatttagcaacttttttcagttcgcgaatcacatggttacggaattcattgtgttcataatcagtacgggcgatgacaggatattcaaccagttcctcatcgttaatacggtcttttgtgaccttcccggtaatgccgttgacatacatgatacgggctttgattttaaatttataataatcttcaatcatacccatctgcggctccagactcagttcatccaaactcatcatcaatgccatatcagcgcctgttttagccatgatacgtttgagcattgcttcgtcagggccatttttgccaacagcagcataattttcttccttcaaagctttgtcaagcacagcatcatcaaacatatcaaattcggggaatttgaaataatccatacattcattaaagaaaacctgactggaaagctcattatcagctacattattcgccagcggcagaatagctattttagcggcttcggctttaccgaaaacggggacagtaaaaccaatcacaactaaagccaacaataaatagcgcagaatatttttcattgatataacctcctt

SEQ ID NO: 10062 - DNA, 975 bp, Unknown
  gut microbiota DNA sequence
gccctaggaaaagcagattcactaaaattagaaagtgaaaacaacttcggaccagatagttttatcactgggttttttatcgccatagttgtttttagcatcgaaatcagaatattcaacagctgcaacgatatttttagctaaagcatagtttacaccaaccatataacctttgaaaccatatctaccaaaatcattagcaaggtcagtgttcatgccgtgatggatgtaagtgccagcgccctggtcatagtatttagcatagatgccataagtaccagctttagctgctttagcacctttatatgccaaaccgatcacataaccgtcatcatcaacattgttaacaccaattttgtcaacatcagaactcaaataggtagcatcaactgtgaaatcgccgaatttatagtcagcgcctacgtaccaaattttatcatcttgaccaagtttaacaacttcgtcagctttgacataaccagcgttcaagcccaatttgccgatttcgccacccaaagtagcagccaaatatttatcagcttttttagcctcatcaccactggaaattttaccatattggaagccaactttcaggtctttgccgaagcccaatttcacagcgtcagtacggttgctgaggatgttgcctacgccaaggcctaaagcagtattgttacgaccagcttcaacttttacgccgccgatacggccggtaacgaatgcgcgttggaactcagttttttcgttaccttcatcatcaagcaaatcttgttggttttgcagcataccaacatatttccagtcttcgttgatctggccgttgagccagatacgggaacgcagaacgctggtagcattagtatttttgctgtaagcgccacctttatcataggattgataatgagcccggatttgagcgttgattttaacgttgtcggattttttctccaaagctgcaacgcgtacgccaaggct

SEQ ID NO: 10063 - DNA, 4619 bp, Unknown
  gut microbiota DNA sequence
gatcgccaccgaaagtgctgtcgccataaccgtcaacgataccagctgctgccagtttgtttacggaatcatatgcccaatgacctgcaggtacatcggagaaggggtttgcagcataggcagaagcagttacgcccaaagccatagccattgctaatactaaagattttttcattgttatttcctccttcggaaatgttttatttttataaaacgtcccggaaaggaatctgtgcacatcagtttgcttcatgcgagttacctagtttcctctactcggcgcactgctttgcttcgatactttccttaacgcattataaacaggtaaaaaaacaattattatcctatatataattcattgtttggacatattttacattattttcagaattattgcaagttgttttgttaaaaatataattaatgattgtatttttctttattttcggataattcgctgtttttaccaaagcgttgcctcgtcctgtttgccaacgaaaaattatttttacaggctatgcttttataaattacttatttgcagccgtactgccgtatctgcaggctattttcaacatatttaaaaagtttttaaatctaattggtactgctattttccgcagaaataggttaaactatagatacagaaacttatctgcacagggtgaattttttaaacttctcccgggtaaatacctgtactaaaaaaccttttaataaggagggatattgtatgaaaaaacaagaattatcgtggaaggccggcggccagcagggcgaaggcttagagagcctgggtgagattttcgccgcagctttatgctctctgggctatgacgtgtatggttaccgtcagttttcgtcccggatcaagggcggccacaccagctataagctgcgtatcgccaaccatccggtagctacgatcgccagcagctgcaatctgctgatcgcgatggacccggacacactggaggtggatgcgcctgaactgacggccgaaggcattttagttaccgatgctgcctggctggaaggtaaaaaaccaaaggtacgcactgttgctctatcctggaacgaactgagcaaagcagacggtacaacactgccgaaaaacattctggctttaggcatcaccgccgctttactgggcatcgatactgccaaactgctgccgctgctggaaaaacaatacggccgcaaaggcgccgaggtcatggagacaaaccgcctggcgctggaaacgggctacgaatatattaaaaataattatcatgatctgctggcagcctttacgatgccggagctggaaaatccacagccgaagctgtttatgctgggcaatgaagcagtagctctgggggctttgacctcgggcgccaaattcatgtcggcctatccgataactccctcttcagaaattatggaatatatggtaaaatacgcacctgccgaaggcggcgtgatgctgcagacggaagacgagatctcggcctgcacgatggcgatcggcgcagctcatgccggcgcccgcgcttttactgcgacagcaggcccaggcttatcgctgatggcggaagcaatcggcctggcggaaatgacggaaaccccgctggtcgtgattgatacacaaagaggcggccccagtaccggcctgccgaccaagcatgagcagtcggacctgatggcagcgatctataatacacacggcgacactgccaaaatcgttatttcgccttcttctatagaagaatctttttacgacacttttgaagcctttaatctggctgaagaatatcaatgtccggtcatcgtgctttctgacctgcagctgtctttaggcaaacagtccgtaaccagccttgattacggcaaactgcaggtgcggcgcggcaagctggtcaaggacggattgccggaaatcaaatcgccggagtattttaaacgctatgatctggaagcagaaggcagcatttccatgcgagtcctgcccggcacgccaaacggcatcagcctcggcaccggtctggagcatgatgaggtcggccggccttccgaaaacagggccatgcgtacagcacagtccgataaacgcctgcgcaaggtccgcagcgttgttgatacatttgaaagcccgctttatgaggacgctccctatccgcaaagcgatctgctgatcattggtatggcaggcacccgcgccgtcatcagcgaagttgctgaggagctgcgcgaaaaaggcctgcgcgtcaatcatgtccagattcggctgttatcacccttcccggtctgcgctctcaaccattatctgcaggaagcgaaaaaaatcgtcgtcgtcgagcacaatgccacggcacagctggcacggctgataaaaatgaatgtaccgccctgtccggagctgcattctatcttaaaatacaacggtgatattttctataaagaagaattgctggccaaatgcaaggaggtgctgtaagatgtcgactttagctagttttcaaaatcaggtaaaacccaactggtgtccgggctgcggtgattacgccgttcaaatggctctgcagcaggcagcagtaaaactaaatctggaaccgcatcagctggcactggtttccggcattggctgcagcggccgtatcggcggttatctatacgcctacggtatgcatacaactcatggccgcgctctgccttttgcccagggcgttaagctggcaaaccctgaattgaccgttatcgcctgcggcggcgacggcgacggctttgccattggcacagcacatactatccatgctatgcgccgcaacgtcaatatcacttatatcctgatggataatcatgtctatggccttaccaaaggtcagacatctccccgcagtgatgttggctttaaaaccaagaccacgccgacaggcaatatcgagaccccgatcgctgctttggaactggctttagcttccggagcaacttttgtagcgcagggcttttcagcccagctgccgcagctggtagatctgatcgtcgcagccgtacgtcacgagggtttttccttcgtgaatgtgttcagcccctgcgtaacttttaaccataccaatacttatgaatggttccgcgagcatctgagcgacgtcaaagatattgccggctacgacccgcatgataaaggtgcggccgcacggcatattatggaaaaagaaggtatgctgaccgggctgctgtatgaaaacgaccgcgcttcttacgaacaggccagcggccttgccggtttcaacactattaaaaacgttgaaaaaatgccgcaggcaaactttaacaaactgctggaaggttttaagtaaaaacaaaataagcaaaataaaaaataccacccaaagggtggtatttttttattaacagcactttaaaacatattcaaaaacagggtaataataaaggcattgataaaatcaatgaacagactgccgaccaaaggtacgataaaataagctttaggcgccggcccgtaacgtgcaacgatagcattcatattagccatggcattaggcgtggcacccataccgaagccacagcctgcagcggtaataacagcggcctcataatcgcgccccattaaattgaaaataacaaagcgggcaaacaaagccatcatcgccgtctgcgccagcagcattaccaccagaggcaatgccagttcgctgagctgccacaatttcagtcccatcaatgccattgaaaggaagatcgacagcgacacgctgcccataacgtcgatttctttggaaaaaacttcgtaccttccggtcaggtcggacaggttgcgaataacagcagccgccagcatcgccccgatgtacgacgggaaggtaacaccaaaagatgttatcaggcctgtgatccaggaaccgatacccattgccaccaaaagctgaccgatgccgaaaaggaaatattctttatcgacagcataagcttccttcccgacaacaggagttttatgcacaggctcctgcacacattcaaaacagaaaagattgtctttatcgatcagataacgggcgatcggcccgccgataacgctgcccataaccagaccgaaggttgccgcagcaatagccacagtcgccgccccctgcgcgcccatctgttcgagcagaggaccgaaggaaccagccgtaccatgcccgccgaccatagggatcgaacccgttgccataccgatcagcggccccaaattaaaaacagaggccagtccgataccaacaaggttctgcagaacgataagcacggcgcagacagctaccagcttcaaaacgctgagtccgccttctttcagcatacgcaagctggccgtataaccaatgctggtaaaaaacatcgtcataaaaaatccctgcagcgatgtatccagcgtcaaatgccaaaagcctccggtcgtcatgacaagattcagcagcgaaaacagaacgccgccgataaccggagccgggatacagtactggtcaaaaatattgaacctgcgttttaaacgcaggccaacatagtatacaactactgctacagcagtcatttggtacatatccaaatcaatattcatcaggtatcacgatccttaaaaa

SEQ ID NO: 10064 - DNA, 14447 bp, Unknown
  gut microbiota DNA sequence
agctggcgcacctttttaacgcggccatcgccggcagcataaatgccgggacaggaagtcgcacaattttcatcagttttaatgtaaccataagcgtccagctcaaccaaagacgcgaaagctttattatccggaacatggccgatagcgataaaaacggcatcgacatccagcgtctgttcctcgccgctgaccttattgcggatgcccagcgactccagccgttcagagccattgatggctgttacttcactgtcaagaatgaaaacaacgttatcatgctcctgcagcttttccagcaaccgtttttcgccgctgaaagtatcgctgcgatggatgagataaacctttttactggtaaagctcaataccagcgcatcatcgagcgctgtattaccgccgccgacaacggccacgtttttatctttaaaaaaggctccgtcacaggtagcgcagtaggaaacgccggaaccaataaaacggtcttcattttccaggcccagcggacgcacccgcgcaccggtcgccagaatcactgcttttgcaagcagttcaccgccatattcagtctgtatgcctttatggctgccgtaatcctgcagtccggtcactttatcgtaaacgatttccgcacccattttgatagcctgattataaagtgcttcggcaaattcaaagccggcaatggattcaaagccggggaaattctctacatgcgaagcattgatgatctgcccgccctgcaaatactgctcgaccagtttaacagatttaccagcacgagcggcatagactgccgccgtcaagcccgcagtacctgcaccgacgatcaaaacatcagtcataatttgtttttcagtcatagtttcaccgcttcccagccgcaatttatttcagcattgccaaaatagccggcttcggctgtacgccgacagaacgtttcacttccttgccgccttcaaacacgaccagggtaggaatcgtttcaactttatactttgctgccagatcctgattggcatcaacatcgatcttgcagactttcacatcagtcagttcgctgcccagctgatcaataaccggtcccagcatacggcagggtccgcaccaggatgcccaaaaatctaccaggactttcccttcagcctgcataacttctttttcgaaagtttcattagtaatatgtacaactgccataataatcgctccttttatcaatatattttatttatatcttaattttaaccattaatgattataattgcaacaaataataattacattatcattgttaaaacatcaataaattttttctgatgcgccggaaaactaaaagcactttacctttatatacccggcaaagtgcttttatggtcatttgtgatatattttatactgtttcttgccgtttcttttggcttcgtacaaggccgagtcactctgacgtatcagcaggtcgacatccgtaagcgcattgctgacggcaataccgatgctggctgacagcacggcaaacttagcattgtcggcaatcgtctgctgcagactgctcaaaaatctttctgccaaaattgccagctccgcatctgtcttcgagcctaaaactaccgctaaaaactcgtcgccgccgacacgggcaataaattcagctccgaaggtctgcttcagcagcttggctaccattaccaaaaccgtatcgccggcctgatgtccatattcatcgttgatctttttaaaattatcaaggtcgatataaaaaaggttgacatgcttagacatgattttattacgcgtcatatattcataaaaataacggcggttataaagatctgtcagctggtcggtgttggcactgtaaataattttcttttccagcagccgttcaacggttacgtcgcggcacatacacagcatacctacagccgtaccgaaaacatcaaaaataggcttttcgtaaatctccagatttttttcacgccgaccgacaagcacttttgcatcggcatagccttttgcgttgatctcactcatatcagctaaattctgctgcttccactgctgatactcctgcccgatcatagcttcttttccttctgtaaaatactgcgagcagatatcattggcattgatgatcttgccggcctcgttagtcagcaaaaccgcaaaaggaagattacgcaggataacttccagctccgcccccatattttccagatcagtgacgtcgtgcgcgatgccaacagtgccgatcaactgctcattatcatcaaaaatcggcgacttgtaagtcttaaactgccgcattccatgcttagttttgaccttttcgtcgaaaatacaggttttcttttcctgcaggacgatctcttccgattccagacaaatatactcaccctgctcgtattcttcctttttcatatcccagatataataatggccgcggccctcaacatctgccttggtcttaccaacggcacggcaaaaactgtcattgacctttaaatgcgcgccgcggctatctttaaaccagatcaggctgggaatactgttgattccggtatcaagataacgctgcgccagatgacagtcttttatgatcttgatatgttcaaaaagtctgtgcagcctaaaagccacaaaagcttcagtacatggcctgatccaaagatctgtcagcgactggtaaacagctgcatccagctgctctgcagtttgcggctcagcacaaaaaactattgcggcatccggcttagagtttttgacaagctctgccaaaactgctcctgacaattcacagacaataacatcagcagttttaacagctgcgtctgccgactgccttaaaagcagctcgtgctcaaaaccagccagcggttcaagagcactgacagcatcatatatacgattatcctggcttaaaatcaatacctgtaatttataatggtacacgttttcacacccaactttttaattccccataaattattacacaagcatattattgaaattcttctaactattttatttatattacatcaaattatatgctattaattcttttttgtctacagtttcagcaacatcagccttcctatgttatactattttcaagaaaccgaaaaccgaggtctatcatgacaaatatcgccactcttttagaaactgcaatagcacaagccctgcctgataactggcagcaggagccggaaacacatttgcccgctctgtcgctgatcatcagcaatatcctgctgcccaactgctgccaaatgtcgaatttaaacagcctggcagctttgatagaagaatctgctgttttaaaacagctgcctgctgcttacaaaaataagctggcgcatacagtttatgatactttggcacgcttcaacggcctgggctgaaaataaaaccaccctgtttattacgggtggttttatttttttatgtttattctgctgtttcagaaaacagactccaactgcagatccagtttcggtgcttttacccttacagtgatattatcattcaccaactggctgatctgaatatcgcaggcagcactcaacagtctgtaggcatcagcaaaatccaattcttttttcagcattaaaaattctaccatgtcatgcactgctgtttggatagcttcctgaatatcagctctgctggccagcgtataaacagcatcaggagtttcaagcatcgggcgcgccagcttccggtctttgataacttccacctgcaggcatactctgccggctgtctctattcccgtcccgctcagctcgccgtcacccatacaggcatgcagatcgcccaacgccaaattggcaccgctgacaaataccggcaaatacactttggagccgaccttaatgagcttggtatccatattagaaccgtgatcacctggaacagcgcaatgcacgctgccttccgccggagcaacgccaagcacgccgatcatcggcgttaacggcagtcttattttttcattgaattcagcaaagccatttttgataggaattattttagtgtgcgcttctgtgattttttcacccagcactcccaaaccgggagatgtaaccatcaccccctgctcagccagctgaatagccagtacctcaacgcagagaacgtcacccggttcagccccgctcacagcgataggacccacagaacagtccataatgcttatatcgatatcaggtcttaaaaccgtttctgtttttatctgcccgctataacaatcatcggtttcgacccaaaacgtttctccgggttccacaaaatataccggctgattagctttactgaagttaaaaacgactttatcttttgcaaaaattttcattttcgtcatctccttaccaggctgcaggcagcaggccaaacaaccctaaaacagcatacaaagcagcaccgcagaataaaacgatcattgaccactgcacccaggcagacgctatccagccgcattgccatgaaggttccatatcacctgttttccttgccgaacgcagcatcaaaacaggaagcacggacataatgacaccgccgaacgtaccagccagataaatagcgtcgacaaagcttaccaagccgctatacgccaaaataaacggaggaataaccacacaggccaaaacaaacagcctggtcttaacatcgtcctccgatttaaaattaaacttatccacgatgttggtaagaaaactgccggcaaccgcccaataggaagtcatcatcgcagcaagagcaaacagattggccgtaaaaaaggcccattcacccaaagccttgccccaggcaatagttgctacctgcgttacattttccggccccgtcaaagaaagtactgccagcggcaccaaagccagcaaaaccatcgtcaatgacattcccgtaacaatagccggcgccagcttctgctgatcatgtgccaaacctcttgccagttcaggaacggcatactgagcgatataacaaaagatcgcaacattgaaaaccggtatcgcataagtccagtttgtaaaaatcgcattggacaaatcagagttctcagctaaaaaagatgctgctatgatcaccgccagcaacgccatcattccaaagctgataactttctctgctacgccggtcgctttcaggccaaaccagactacaatgacagccggaacagaaaaaagcaaactgccgatctgtgtagaaagaccgaacatctcgcttaaaatcctgccgctgccattagtataagcaatcaggcagccaatggtatttgccgccactgagataaagacaagccaggctcccagctcgcccacatattttttagcaagtcccggcagctgcatgacctttctggtccttaacgtagtttcagccacatacagcattgacgccgtcgtaaaaaatcctgctatgatcagccacagcatcaataccggccagccggattttctggccgaataggccagtcctaaaatgccggacccgatgttagcgccgacaatgatcatggcagcttcccaaaaggtaagtttgtggaccttgagcgcaccctcaacaatattattttctgatttcactattttcgccccctcaagcttaacaaagttatgttttcattgtattactaacttccaaatattcaactatttcttcataaaaagccactttaaatttttttctattcattttctgataagtttattacacagaaacagcgtatttaaaccagaaaaacttttaaaactttatccagacatagaaaaagagccttcgagaaaaatctcgaaggctctgaaacttttaatagtggcggagtgggtgggattcgaacccacgcacgagtcaccccgtctaacgatttagcaaaccgtcctcttcagccacttgagtaccactccgtttgacttacttggatagtatacactatcctgatatttttttcaagagtaccaacgcaaatatttattacgaggcccctacaacgctgttgtaaaaatatggcggagagggtgggattcgaacccacggaggcttgcacctcgctggttttcaagaccagagccttaaaccactcgaccacctctccgtgctattttgatattatacggcaaatatgccttctcgtcaagttccaacaaatacctcttgaatgccgtagactgcacagcacacccgaaaacaaaaaccgccgtcaaaaccgacggcggtttgttttttattacagcagggtttatgctttgccagccaaacgtttatagttgttcaaacgttctttagcatcctgttcagttttggcgaacagtgcttcagctgtttcaggatactgtttgagcagggaagaataacgaacttcgcccaaaaggaattctctgaaatcagcagtaggctctttagaatccaatacgaaaggattctcacctttttctttcaaagcaggattataacggtaggttgcccaataaccgcagtctacagcaagtttagcttccagctggctgcagcccatacccgctttcaatccgtggttgatacacggagcataagcaatgataagggacggtccgtcataagcttccgcttctgcaatcgccttcaaagtttgattcttatcggcacccatagaaatctgagccacataaacataaccatagctcatggccatcatgcccagatcttttttcttggtctttttgccgctggcagcaaatttggcaatagctgcagccggtgtggctttggacgattgaccaccggtatttgaataaacttcggtatcaaaaaccataacgttaacgttttcacccgaagccagaacatgatccagaccgccgtaaccgatgtcataagcccagccgtcgccgccaaagatccaatgactgcgcttgacaaagaattgtttttctttatacagagctgcgcatttatcgcattggtcctgatatttttccaaaacggccgtcaatgcttccgcacgttcacgagtgccttcgctgacgtccatattatcgagccaatcctgcattgctgctttcagatcagccggaatctcggcagccaaagctgcttttaccatttcagcaacacgttcgcgggattgttttacacccaggtacatacccaaaccatattcggcattatcctcgaaaagggaatttgcccagctgggaccatgccctttgctgttagtagtatacggcatggaaggcgcactggcaccccagattgaggaacagcccgtagcgttggcgatcatcatgcggtcaccaacaagctgtgtaaccagtttggcatacggagtttcgccgcagccggcacaggcgccggagaactcaagcaagggctgttcaaactgaacgcctttaacagtatttttgttcatcggattaggtttggccgtaacctgatgggcagtataatcccaatgagcagttttggccaattgactttccagaggtttcataaccagggctttttctttagccgggcaaacctgcgcgcagttgccgcagccggtgcaatccagcggtgaaatagccatatggaatttaagttctttagctccgatggcatctttgtattccagtccctgcggagcgttggcagcttctgcttctgtcatcagaacaggacggatgactgcatgcgggcaaacgaaggaacattggttgcactggatacatttatccatttgccattccggtacattgatcgcgataccgcgtttttcgtaagcggaagtaccgctggggaaagtaccgtcgacatttttattaaaggtgctgacaggcaggttatcgccttccagacgattgactggagtcaggatattatcgataaattcgttgccggtaactgcgatattggcgtcaccagcagcatcagcccagactgcaggtacatcgatcttcacaatagcatcgacaccgcggtcgatagccgcatagttcatgtcaagaatagcctggcctttcagtccgtaggaatgatcgacagcttctttcagatatttgacggcatcagctaaaggaataatatccgccagtttgaagaaggctgactgcatgatcatattgatacgtccgcccaaaccgatttcctgagcgatcttcaccgcgtcgatagtatagaaattaacagcatttttagcaatgtagcgtttgatattgcccggcagatgtgtttccagctcttccatagaccagttgcagttcaaaaggaaggtaccgccttttttcaggcctgcggtaacatcatatttgtctacataagactgattatgtacggctacaaagtctgcaaaagtgatcagatacggagcgcggatcggctcatgcccgaagcgcagatgcgagacagtgataccaccggattttttagaatcgtaggagaagtaaccctgcgcatacatatccgtatggtcgccgataatcttgattgcgcttttgttggcgccgacagtgccgtcactgcccaagccccagaatttacagcttttggtagaggcaggagtagtatccagcgaggtagttaccgccaaagaggtattggtaacatcgtcaacgatgcctacagtgaaattatttttcggttctgctgcagtaagattttcaaaaaccgccagcacttcagacggagtcagctctttactgcccaggccataacggccgccgatgatgagcggtgaaatctctgcttcgtagaaagcgccgcgcacatccatgtataacggttcgccaaaggaaccgggttctttggtgcggtccataacagcaatacgtttaactgttttaggaacagcagccataaaatgtttgatcgagaacggacgatacagatgcacagccagaaggccgaccttcctgccttcagcgttgagtttttcgacaacagtctggatcgtttcgcaggcgctgcccatagcgatgatgatttcttccgcatccggagcaccataatagttgaacagaccatatttacgtccagtcagcttgttgatctcgttcatatattcttcaacgataccgggcaaagcttcatagtaagagtttacagcttcacgggtctggaaatagatatcaggattttgagcagtgccgcgaacgaccggattatcgggattgagcccgcgattacggaaagcagtgaccgcatcataatcgatcagtttagccagatcatcataagccagagtttctattttctgaatttcgtgggaagtacggaaaccgtcaaagaagttaataaaaggaacacgacctttgatagcagacaaatgagccactgccgacagatccataacttcctgtactccgctttcagcaagcagcgcaaaacctgtctggcgtgtagccataacgtcctggtggtcgccgaaaatagacagtgagctggcagctaaagcacgggcagaaacatggaacacgcccggcagcagctcgcctgccattttgtacatattaggaatcatcagaaggagaccttgcgaagcagtgtaggttgttgttaaagcaccggactgcaaagaaccgtgtacggcaccggcagcaccagcttcagattgcatttccaatacttttacagtttgaccaaaaacatttttctgaccttgagcagcccattcgtctacaacttcggccatggtagaggacggggtaatagggtaaatagctgcgacatcggtgaacgcataagatatatacgccgctgccgtattaccgtccatagttttcatttttgtcatttgatccccttctttcttttaattagagtacaagatatgggaaccggccttatcggttccagtgatacgcaaaataaatgtgcggcaagacatagttcacccttgctcacacaattagtatacactatttaatcacttttgtaaatttccttcgcatgtatacatgtgaatattatgcaagtattttgtaaatttttaaaactactcaatttattgacaaatgctataataatgctacggaggtgttgaatttgcagacgattgttaactacattgcaaatgctcttcaagcccgtattcccaggattaaaatagatacagccaatgacgctgccacagctcacttgactataccaaacaaacacggcggaaaacctatcaacatcttagccaaagctcacgcaggcatcgtggtcgtttttaataaaactccacgactttttgaccaggatgccaaaggcattgacaagcttgcctttgatatcagcgaatatctgaaaggacgcagtgtttatcttgatctgctgaaaagtgacggcagtgacagcggcaaagactgtatcgctaattctatcgaagtacaggcggaaaactttactattctgacaaatcttattacccgcaaggggcttttagacagcacagaattagaaaaagctttacaagagggcgacattgtacgggtcaattattgggacccgcgcaaaaattacggctataggcttgacggcgatcatctcgccaaaatagccttatgaccaaataaaagaagagctgctttggcagctcttcttttatttttaacatctgctgattttcaggcaacaaaggaagacaagacagaagccttggtgataataccacggaatactttttcttcatcaaccacggccagcggaaaggcagcattagctgccaaaggcactatatcagcaacgggagcgtccagatcgttgacctggagcacatcgcgtatgatcgcttcgctgaaagtctttttcccgtcacggacagccaaagctccctccagggtaacgataccgatgaagttcatatggtctccgaccacataagcgctggacacgccgttggcgcgcatactggtaagtgccgtattggcaccatcgctgtctttaacgatacagctgggcgtagacataatattacgcacgcaaaagaccttactggtattgacattatggataaatttcttaacataatcatctgcagggtttgcaagcatctgctccggcgtatcgatctgcaccattctgccgtcgcgcaggatacctactctgttaccaagcttaaaggcttcgttgatatcatgggtaatgaaaacaatagttttacccatgcgttcctggatccgcagcagctcaaactgcagatcgtttttgaccagaggatcaagcgccgaaaaagcttcatccatcagaagtatatcaggatcattagcaagcgccctggctatacctacacgctgtttcatcccgcctgacaagctgctgagtttttcgtgctcataacccgtcagtccgaccatattgatcatttccatagccttattttcacgttcttctttgccgacaccgcgtacttccaagccataggccacgttacccagtacatcgcgatggctcaaaagcccgccgttttgaaagaccatggaaaccttcgtacgcctcagctcctgcagctgtttttcattatatttggtaatgtcctcgccatcgatcagaatttcgccctttgtcggcttatgcagcatattaaggcagcgtacgatagttgatttaccactgcctgataaaccgatcagtacaaaaagctcacctcttttgacgctgaaggaaacatcgctgatcgcagccatgatacctgtcgtttccataacgtccatccggctggctccaagctccaacagcttgaaggcagcttttctttcatccaggaagtcatagggaccaaacaatttatataagtttttcacttctaaaacagtatctttttcctgcatcatttaccctccttctgcaccaggctctgtgtcagacgatcaataatgatcgcaataataacaatggcgaaaccggcgataatgccgcgtccggattccatacggttaatagcgatcaaaacttccataccaagtccgttcgcaccgatcatggcacaggtaactaccatcgccaccgccatcatcatcgtctggttgataccggtcatgatcgttggcagcgcctgaggtatctgcaccttaaacaaagtctgccagctggaggaaccaaacgagcgggaggcctcaacaacctcctgatcgacctggcggataccgtgactggtcagcctgataacaggcaccacagcataaactactgttgccagaaccgccggcacctttcctggtcccagcagcataactgccggtatcatataaacaaaggtcggcatcgtctgcatcgcgtccagtatcggccgcacgatcgtatcagcgccgcgtaccgccgccagagcgatcccgatcggcaaacctatcagcaatgaaaaaattactgccgtgatcacgatagctaaagtttcattcatcatatgccaatacccgcaggcaccgatcataaacagcaggccgccgtaaatgatgccgtttctgtagctgttcataagtttttttgtggcaaaaactaccagcagaatcatcagccaccagggaatcatatccagtgcgccgttgatgccgttaataaaaatactgagcatctttttggcagcaacaaaaacctcgccgtaattaatattgatgtaacgtacaaattcatctatcggttctgctatattcagattgatattaggaaaattcaacaaccaacttgtcatatgcccgcccccttactgttcttttaacgcagcccgcatggtctgggccttatcgggcggcagccattgcgtaagcagattatcatgtttttgtaaaaaccaacgggccgcctggtcataagtcgccttattatcggcaatataagcgagagcttccgctgttaaagcactggaagtatgatactttttcaggaactctgtaaactcaggctgccgttttggaaaacggctgttagccgataccatgacaactactgatggcgcagctgtttcacctgcttcaaacccggcctgattatacggcgcgtcttctaaaagcaccagatccagcttgccgctgatccaggtcggttcccaattatagccaacgatcggcaaacctttttcgtaagccgttacaaaggctgtgcttaaggtcgcctcgctgccgggacggaaatacacataatttttatccagcccgtagtgcttatactttttaaacattacttcatcgactgcccaaccggggatagctccgtaaatacgccctttggaaggattttcttcatccacaaaaagtttactgtagcgggccagatcagaaaccttgtgcagatcaggcgccatcggcgcaatgccacgctggggatcaccttcgatcacataacgcggtacatacaggccctgtttattatcatcgaagttgattcccagatcgactatcccaccagcggctttatcagcctgataggtagcaacgttatccgtccagagctccatatttacgtccacatcaccgcgcaccagtgccgcttccataatcggcgtcgagccgttcatcgtttctacttttaaaccataagccttttctgcaatcaaaccggctaccgcgttatgaaacttcacactgtcccagccggcatcagaaaaaactaccgttttttcattattgctgccgcagcctgccagcaggcctacaaacaaaaccatacccaacagctgcagtatttttttcttcatcaaaactccccccttttcaatccgacaactttatgttattattgagttgcttctatctgttttttagtttaacttacttataaaagcttgtcaatttactttaattacttttttacactgcgaagatctgcagctgtcagttaacagtttgtttcggaaaatctccgcagccgcctgtcaggccacttgtggagtctgctgttgcgccttgccagcagacaaatataaattttaagcctgttgatttttactaaatttttactgtaaaggactatgccatggctaacaaacacaaaatagcagaaccaatctatcagaaaatcgctatcgatatcgcttccaagatagctgccggcaaatataaggccggcgaaaaaatttacggacgctccatgcttgcagctcattatgccgtttctcctgaaacgatccgccgcgccatgttcatgctgcaggatgtcggcatcgtcgccattgaatcaggcagcggcagcacagtgctttcggccgaacgggcctcacagctggtaagccgtttccgcaatatttctaccattaccgaactgaaaaaaaatatcgaaaccttatcggaacaacagaaaaaacaacaggacgatattttagataatgtccatcagctgcttgaatatattgaaaaattccgtttggcatcacctatcttgccttatgaagtaaaaataactcaagactgccgtttcctgggacagatgatctcggaaataaacttctggcaaagtaccggtgttaccgtcgtcgctatccgcaaaggcgaagagctgatcgtttcgccgggccc

SEQ ID NO: 10065 - DNA, 2007 bp, Unknown
  gut microbiota DNA sequence
acagcgcagtaatcgccgcacatggaacaagcttcatcctccgccttattcttcttgtcgcggtaagcctgcgccttcaccgggtcgagtgccagacgaatctgttccggccagtcaagatttttacgtgcgacagccatttccctgtcccaggctatagcctggggcagtcccttggcaatatcggcagcatgagccgcgatcctcgttgcgatcacgccttcgcgtacatcgtcaatgtcaggcagccccaaatgttcggccggcgttacataacataaaaagtcagcgccgctgaccgcggccagagtaccgccaatggcagaagtaatatgatcgtaaccaggcgctatatcagttaccaatggccccaaaacataaaaaggcgcaccatgacataaacgcttctgcagctgcatattagctgcaatctgattatacggaacatgtcccggtccttcaaccattacctgtacaccgcgctgccaggcccgctgggtcaattcccccaaattcaaaagctcctgaatctgcgccctgtctgtagcatctgccaggcagccgggacgcagtccgtcacctaaactgatcgttacatcatattccgcgcagatgtccaatatttcatcataatattcatataaaggattttcacgatcattatgcagcatccagccggtaataaaactgccgccgcggctgacaacgtccataacgcgcccttcgctgacaagagcgtgcagaacctgacggttgataccgcagtggatcgtcataaaatcagcaccgtcggcagcctgctgacggataacttcaaacaggtcctctttcgtcatttcaacaacggcaccgcgttttttaatagtttctactgttgcctgataaatcggtaccgtaccaaccattacagtggatgcagcaatgatagccttacgtgaagcgtcgatattatcgcctgtagaaagatccatcacagaatcggcaccggcatcaatagcagcgcgcagcttagccagctcaggttcaggatcaggataagcgctggaagtaccgatattggcattgaccttgactgccaagccctgacctacaccgcacggcacaagatttttgtggttgatattgcagcaaacagctattgttcctgccgctacaccagccctgatgacctcaggcgccaactgttcctgcgccgctacctgaagcatcgcttctgtgattatgccctgacgggccaactgcatctgtgttgccattattaaactcccccttcaaaataaaaagccaatctcccacaggaaattggctttggctcgcgcttacgccacttccctacgccggtattacccggaaatcaggttctaagggtcggccttgcggcctctcagcataatgcgcccccagtggatcgacttatgatattaaattaactttagcatcttttgccggcaatagcaagcaaaattaaattttatcacctggctcataaacatgataaccgcccttgcctctttcttttacaacatacgcggccacatcagccaaatgcaccagcttgtcaaaatcccggccatgctcagggaaatagcaaatgccaatgctggcagaaacagtaacgccatcataggcagtatgcaggatacggcataaatcctccgcccttttgactgtcgcctccggcgaaagccccggtgcataaatataaaattcgtcaccgccaaaacgaccgataatatcgtcggaacggaaaaactgctgcagctttgctgccatttcctgtaaaactttatcgcctgtctgatgccctaaggtatcgttgactgttttaaaattatccaggtcagtgaagataaagctgcccgaatcgctttctttcaacagtggttccaccacagttttaaagccggctttattataaactcctgtcagctgatcgatacggctcatatcctgcagcttttctttttcaagcatttctgcatcaatattatccagcttgcctaccag

SEQ ID NO: 10066 - DNA, 2330 bp, Unknown
  gut microbiota DNA sequence
agcaagcttaccaaaaggttcaaagccaaaaatcctgcgatacagaggcgaccaggcaatatgctccggcagcacatccacatcaaaaattatttcgttggaagcctgcactaaaagatcataacgctccttctcaagttccagttcctggatgatacgcttttgttcactgatatcaacaataacgcagtacattaccagcatgccgtctttatctatccccacgctgccacggatcaaaacaggtatataatgcccgtttttatgcagcaggcgcatctccaaatcgatcttatcattaagatgccagacaccatccagtaatgcctgaaatttaggcgcatcctcttcatatatcaaatgcgccctcaaaaacgaaggtacgttttccaattcttcccttgtataaccaatcaattttagaaatccatcgttagcataacggatgcagaagccggcatcattgaccagtgtcaaaacgcctccgttgatattatcggcaatctgacgcagtatttcttccctgtctgcaatctcacggtgggcctctttattttccagccatttttttacggcaaaaacactcagcagccatacaaaaaaggcaatacctgcattcaaaaaaattatattattaccaacccagccgcctgctttgtctacctctatgatgcagctggcattcggcagttcgatatcatatttcattccgcctgtcattgccattgccgcatggtcagaagcagcaatcgtcaatttggctccgttttctatcttgtataaatgataacgatatttctgcccctgcagtgcggcaaaattgatgttctgcaaagcatatttcggacttgccggattcatatccaaagtcacagcaactaagccccagggtgaaccgtcagaattttttacagcgaccctgcccgtcagtaccagctcattatcctgaatccttctgaacggtccttcgatcaccaactcgccctgcttgcgatacactttcctgatagcgtcatcccgtttcggctggatcatcagattttttcccagggcacttttattgatttcataaggaaagcaataggaaatcacagttttttcaggaataccgtcctgcagcggaccttctgccatagccaaagatacatttgtgatcaaagccatatcgtcaaaggctgtacagacattgttcattctctggataccaagctctgacatattgcgaaaacctttttcgtgtacggctatttttgtacctttggcatccagcataccctgctggatcagctcacgtaggacaaaagcgtcatcataaagatccatcagttcgtagcgcgtctgagagccatagctttccgccagaaaagctgctctttcacgggtatgcttataggtatcgttaatgctgatatatgcagccagagcgcacagcaacgcagctgctgaagtgaacagcaataaatattttatattataaccacgttttttatccatgcccggcctccttaataccgataatccatttttattttattatagcttattttcaattattaaacatcaagtatttttattaaataaatattaatacgctttcagtattgctattctgcatagtaaaaagcctgccgacataatatgccggcaggctttaaattttacgatcagccaaaaaccactactgcatctttgcatttgatccgcagcaaagctgtttcaaatacacggaattcgtgattcagcttagcagaacccatataaccggtaataaggtcctgacctataacaagatccatattctgcggttcagcgcagaccaatacggctttattaagacctaacgccggagtcatatataatccgccgccaaccagggttttgatgcgttcgctttccagtaatccggtgctgacctgtaaacgctgtaactgtgcatataggtcagggctgactgccaaagcataacggcctctcaaattcttgtccgcaaaatgctgcagacctttaacaacatcgctgaaagcattttcatctttgctccagtcggatttttttactttaaaagcaccttctgccgtagccaggccttcataaccggctttcggattccctgcaaaaatcatcaggtcttctttctgagcgcaggcatttgcggcagcgctgaccgcacccaaatcgatcggcataccgatctgtctggcctgttccatatctctccaggataatacaaaatcacgatagatcattggcagctctttaaaactgcggcctgtaacttttacagcttcctcttcctcaccgaagaaatctacactgcctttttcagcagg

SEQ ID NO: 10067 - DNA, 1623 bp, Unknown
  gut microbiota DNA sequence
attaaaaattccatgaccatacctcctatttatccagcaggctgcctacggtagtcgctttattggtaacttccgttttgtcatcggcaatcccggcagctttcataccaaggccttcaagcatttccttaacttcgccttcaccggaaatgaaatgttctgcttcagcaggatcaagataacgcagcaaagtcatcaactcaccgacatgggctttttcttcgtcacgaatatcggaaataaccatttttgccacttcgtcatcagtagcctgtacatgggcatcatacaagtaaatagcttccagctcacctgcaatatccagacgtacggcttggatcaattcttctttggttaactttctgttgacattaccttgaaacgggtttgcaaaatttggcattactgccaccacctttcaaaattttgatttatttgcagtgtgtaatcgcaacaaataaaaattatcttttactatattatagcactgagaatttaaaaaagcaattaacttttcggccctaaccgctgttttaaattctccttacagttttattataacaccgccacgtttttctacaagtccacaacctgttttatgacagctattttacacttttaacttatttttttgttaagataatcacttaaaaaaactaaaaaacggcctcattttcaaatgagaccgtttttactcaggaaaaacattttaaaagcagtgtccaaactgcaggaacaataagtgccggcagcatattcaaggtcttaaacttttttaattctaaaatcgcaaacccggagctcataataaaaactccgccgataatcgaaatttctgtcatcagctcagctgtcaaaaatggcgccagccaaccggccagcagatagatcgacccctgccagcaaaacagtacgactcctgccaaggctatgccgatgccatatgcggaagccaaaaccatcgaagctacaaaatcaagcgtagcattagtaaaaagataagtgttattaccatacagcgcgctttctatcggccccagaatagacagggtcccgatacagaaaagcagtattgccgtagacagcccctgaccaaggtcggacccgcctttgaaccgccctgccagacgctgaaagcggccgtcgatatcaagcaaagtaccgataatgctgcccagcgccagactaagaatgaacaagacgggaaacctgctctgcggcatattgctgactactgcattagctcccagagcaacagtagccaatcccaacgcatcaaagagtgcttttttgtaattttctttgatcccctgtctgaacacactgccaagcacgctgccggcaatgatcgtgcttgtattgacgatagtccccagcattaatccattcccccatttattacgcttcgtatctttatattatatgcgttccagcgtctataaacaactatagaagttctccatagcgcttgatataaagttttttcatcatcgtagccaaaagcatatatgccaaagtaatagcggccagccagctaaaatattcaccaggcagcgaagccagcccgatagcatgtcccaccgctgtaaacggtatcactgtcagcactgcgataccaataaa

SEQ ID NO: 10068 - DNA, 652 bp, Unknown
  gut microbiota DNA sequence
gacaaatgatgaaatacatcagtgcataggtcaaaatatcgaaaacagaacttgtaggaccgatccaaagcataaatttgctgacactggaagcatcccattttctgggcttggtcaaaaactctttgtccacattatcccagggaatcgccgtacaggagatatcgtaaatcagattcagcaaaatcagatgtatcgacgccatcggcaggaagggcagaaaagcactggcgatcaaaaccgaaaaaatattaccaaaattagacgaagccgtcatcttgatatatttaatcatattagcataggttttacggccttcaagaatacccttttccaaaaccagcaaatctttttccagtaaaattacatccgccgattccttggcaatatccacggccgtatcgacagaaataccaacatcagaggctttcatggccgccgcatcgttgatgccatcgccgagataacctacagaatgtccattttcacgcagcaggcgtactactctggctttctgcgccggcgccaatttggcaaaaacagtggtatactctgccgctgccgccaattcttcgttgctcatagcttccacctcagaacccaacagcattttttctgctgcaagtcctacatgacggcaaacacattttgt

SEQ ID NO: 10069 - DNA, 772 bp, Unknown
  gut microbiota DNA sequence
gcgaaggattggttttctgcgctacggcaatgactctcaagccatcggcattaagcgcatccactttttccataaccagctttttcatagaagccgtcagcggcactacacgccctgcatattcgacaaaagccgaaatattcagcatttcctctacggcgcccttggtgatcatttgcgttttcccattccggtcttctactaccacactcatccggcgccgttcaaaatcaaagggcagctcatctaccttctggtaaaaatgttccagatcgcccagctgatctttgttttcttcctcttccagtttcgtcctgctgataatggcaatatccatcaaatttttcagacccgtctgataataactgtttaaaaaggcatgccgcaatacccgcggcgcttctttgccttcaatatccagatgatattccagtacaaccttatcctgcgtcagcgtaccggtcttatcagtgcagagaatatcaatagatccaaggttctggatcgaatttaaatttttgataataactttttctctggacattgcgactgcacccttagccagacaggtcgtcacaatcatcggcagcatttcaggcgtcagccctacggccacggaaattgcaaacaaggccgcattcatccagtcacctttggtaaagccgttgataaacaaaactaccggcaccatgaccagcataaaacgtatcaaaacccaggaaacagaattgacacctttttcgaagctggttttcggaggcttgctgttcag

SEQ ID NO: 10070 - DNA, 250 bp, Unknown
  gut microbiota DNA sequence
ttatagaagctgcctgaacatccaggcaaagatatttctctaccggttcactttcaccggtcaatgccgactgactgacaaacagatccctggcaaaaataatacggatatcagcaggtaccatatcgcccgccgataaatgaacaagatcaccgacgacgacttcgtccagtggtatctcctgctgacccgtttccattctttccacacaggtcgtagtttcgatcatagccgataatttagccgccgc

SEQ ID NO: 10071 - DNA, 196 bp, Unknown
  gut microbiota DNA sequence
aagctttgcagatacgcgtgaacagagattctttttgtccatgcgtcacaacattatcgccataccgttcacgagcctgctctaccataccggacggcaatcctttgccagtcgttcccaaatacttcagaactgtgttcacgtcatgagctgcagcaaaacgcagtctttcattgaccttctcacgatgcaggat

SEQ ID NO: 10072 - DNA, 1995 bp, Unknown
  gut microbiota DNA sequence
accgcttcctggttcttcgccttttggttttatgcccctactgcctcctgcgtccattcttctcacctcacttttttataaaatatctataatcaaaattctgcggctggccgcggcaaataaaaaaaccgcgtcaatgcttaaacaaagacgcggcaataaaacaaatttaccttacagttcaatcagaaccggccctgttcaagctttaactccacagggcggtgaaattgcattagattatgccttgttgtcgacatagcctgttcaaacctgctcatggtgtctccaccactccgcggcagcaatccatatccctgtggtagcctcacctaccagaatatccagctcctaaattatatattaggctatttaaatttgtcaatactttattcatttacaaatcatattttctttattctgcaataaaccgcgcagtaaaaacagaaactgacgggtatcgaacggtttggcaacatgtgcatccatgccctgttccagtgactgttccacatcattttccagcacgtctgccgtcatcgctattataacaaccgagatagcatccggacgcggcaatgctctgatagcagcagcagcctgataaccattcatccttggcattctgatgtccatcaaaactgcgtcataagtaaacggctctgcctcgccaaataactcgaccgcctcttcaccatcgctcgctgtagcaaattcggccccgacattacgcaacagctcacaaacaatttccatatttatttcattatcttctactaccagcagtctgtaaccatgcagatcgatctcatcagttacaaacgtttgctgcaaaaaagaggccttggcaagacgcagatcaaaccagaagcgactgccgaccccaaatgtactgacaagcttgatctcactgcccatcatatgagccagcttctgcgaaatggccagacccagtcccgttcctccataaaaagcatctgtactgcgtccgccctgattaaatgcctcaaaaatacattgtctattgctttcttttataccgattccctcatcttctaagacaaaccggaccagcatgctctcatcatcctgttcaagcatatcgcattttaaaacaacttttttatctttagctgtaaactttactgcattggctcctaaatttaccatgatctgctgcagtcttctgctgtcagcatacacagaacaatctgcaacatttaccttccgctgtaaaagaacaccctttttttctgccagcggctgcaggatatccagggtcgaaaagatgatactgtgcagtgaaactatctgcggcgtcagctgcaatttgtcattttctattttggacatatccaaaacatcatctactaatgcagccagatgcctggacgcagtatcgatcttctccaaacaatctaatacgggctggctgtcagcagcgcgcagctttgcaatatcgctcattccgacaatcgcgttaatcggcgtgcgtatctcatgcgacatccgcgacagaaattcgcttttagcattatgtgcgtattcagcagcgcttctagcccgttccgctgcagccagtgcttcagccaaactattattaaacctggcctgctggcggttcttcaaaaataggaaaatacccgtaaaactcaaagccaataccgcaaaaaatactgttccggcaacaagaaaattatttttaataaattcccgccagtccaatgctctgtgtttaacgatgctgttatctaaaattattttatccagagcacctgcatccagcttttggattgatttattaaaaatactcaatacctccggcggacattttttagaaatgccgaaacctacaggtatttccatacttaccgtcattacaggcatcaggctggcatatttgctcagatacctgttagttgtcatcacaatagaattgcccagcataatatcggccttgccgttgaccaccatttccagacagctttctaaagt

SEQ ID NO: 10073 - DNA, 879 bp, Unknown
  gut microbiota DNA sequence
aattttcttttagaaagctgtctgtgtgcagaaaatcgtattgggcctccaattctttcgtccagacgattccggaaataacatcagctctgccgtcagccagcaattcccacgacgaggccatatcaggagtgtaggtcatttccatcgttaaaccgctgttctgagccaataatttcagcacatcctgataagtgcctttataaacgccgtttttaccgtccagccattccatcggataattatcggcatcaccgacacacgcagcggtgcggctgtctggatataagcaagttccgccctggtaaaccccttggccaacttgtcggcacgtccgtaaaaattctcgtacaacgcggcagtaaaataaggattttccagcgttatcgcccgcatcgcctgatccagctgctccattaatgccgtattgttttttcccgtaatgatatacgcaggcagataatcaaatttagcaaccagctttttatcttcgtcaagcacacaattcccactcataatagcatcgatcttaccggcagccaatgcttcattgacttcggcaccactgctgtaataaaatttctgaacgctgatgcctttactccccacaaacttgtcaaaacataaattaagatagttgcctttgatcatacctaatcgtttaccctgcaacgactgataatcctgatataaaatatcgctgttggtaccggacgtataaatagcagcaaaatctaaaatacagttctgcctgctgaaaaggaaatccgccgcccgctgctcgctgtactgggctggaaaagtaaaatcggcttcaccgtttttcacccactccagacactgttcccacgaaccgcttttatattcataagtccagcc

SEQ ID NO: 10074 - DNA, 198 bp, Unknown
  gut microbiota DNA sequence
ttttgtgcgtgtgctgtttgttcgtactgccttactttctttatcgttgtatctgtgaagcaggttttactaccagaatgcggcaaagtctgggcgggctgcgtgatgaagaaattgcttctgtggctcagaaggactgtatttggattcatggcgcttctgtcggtgaaattgttgcgacaagtccattagttaaag

SEQ ID NO: 10075 - DNA, 294 bp, Unknown
  gut microbiota DNA sequence
atgaaagtgaatcgccgaaaagaagtaaaaacacacagcgaactcaaaagtttgtactcttctatatagttttgaaggcttaaagaaaaccttcaaggatatcgtaaaatttcttccctgttcagtcaggaattttgcgttagcctgcggcactattgttagcgtcgcaaaagctgctcctaaacaataggcgcaagcgtcaatccggtggcgatagctaaggggatccacctgttctcatcccgaacacagtagttaagcccttaaacgtcgaaagtacttggctggaagcgg

SEQ ID NO: 10076 - DNA, 247 bp, Unknown
  gut microbiota DNA sequence
tccatggtaacgccgtgcagaacatgcgcggcttccatagtgcctttgcggtgtgtgataacaataaactgcgtgctttcggcataggctgccaggaatttcgcaaagcggtcaacgttagcttcgtcaagcgccgcatctatttcgtcaaggatacagaagggcgaaggctgatagctgagcagagcgaacagcagggcgataaccgtcagggcccgctcgccgcctgatagcaggaagaggctct

SEQ ID NO: 10077 - DNA, 239 bp, Unknown
  gut microbiota DNA sequence
gccatctggatctcatcgatcaagagcggcggtttataccgctgcagaaacagccccggttccgtcattgccaagctgcgtacgttgatatcgtccatcgtcacataagtcctgttgccttctgccagcctgcgcagcaaagtcgtctttcctacctgacgcggcccagtaaccagaagtaccttacaacaaccgctcagtttttcaattgtcgtctccaaatggcgtttgatatacat

SEQ ID NO: 10078 - DNA, 267 bp, Unknown
  gut microbiota DNA sequence
gcctgtccctgaaaatgggtgctccgcttgttggcctgaacgattccggcggtgctcgtatccaagaagcaattgacgctttggctggttacggcaaaatcttctttgaaaacactattgcatccggcgtagttcctcagatctccgctatcatgggtccttctgctggcggcgctgtatacagcccggcactgactgacttcatttacatggtaaagaacacttctaaaatgttcattaccggccccgcagtagtaaaatctgtta

SEQ ID NO: 10079 - DNA, 189 bp, Unknown
  gut microbiota DNA sequence
tcgacctgcagtagatctccgccgatctgtctggtaaaatcagccataggataaaagcttgccactaccggcagcttgccatcagcctgtttttgttcactgccgcagccgactgccgccagtaaaaccatacccaatattacaactaaaaacttcttcattcttacctcctacaaattaccgcagcta

SEQ ID NO: 10080 - DNA, 227 bp, Unknown
  gut microbiota DNA sequence
aataacgcagtcccagactgagagcgagcgtttcagcctgctgcagcaattcagagccggtaccgcggccgcgcagggccgggtcaactgccattcgatgcaggaccagggctttttccgccaaagtccagccggcatcagcataaacagctggttcggtctgattgatgcagatcaggccgcagatctgtccttcagcttctgatacaaaaagatcgccttgggtg

SEQ ID NO: 10081 - DNA, 194 bp, Unknown
  gut microbiota DNA sequence
ggttttgcagtgggcagcagcagtttgaataatggcagtctgacggtagacggtaataataaactgacgacagcaggactgacggccagtaaagtaactgtaggagctgtaacagtgagcggcggcaaagtgagcggactgacggacgcggctttgagtgctgtcagtacggaagctgtaacaggcaagcagct

SEQ ID NO: 10082 - DNA, 249 bp, Unknown
  gut microbiota DNA sequence
ctgccgtcaggtcgtgtgaatatttggtagctgcttcctggctcattgccagcagcaggttcgggtcggtcactttcgggaagtggatcgcttcatcagagataatgacctctgctttggaggcgccgcctctggcttccgggccataagactgagactggatcgccagcttgccgtctaaaagcgccgcctctgccagaatgatgccggctgtgatcaggccctggccgccggtaccggataaacgta

SEQ ID NO: 10083 - DNA, 4129 bp, Unknown
  gut microbiota DNA sequence
aaaggtcaaccaactcctggctgacctctgctgcaaatcttatttattgtcttaaattttcttcctcaaattttaagcatctttcctcataaccatctattttcatatctaaccgttccagtacagcctgcatagctactatcttgtcggcaagctgctgtctttgctctaccaaaagagctttacgggcagcaatcgtctccttgcccaagcggaacatcgccacatattcaatcagcatttctaccggaataccaacaccgcgcatgcacttaataaattctacccaattacaatctttttcatcataatcacgaataccgctgctgctgcgcttgaccggcggtatcaggccaattcgttcataataacgcagcgtatcagctgtcaagccaaacgttttactgacttctgcaatcgtcatagagcaacacctcctcctgcgattattttaacacctggagtcaactccaagtcaagcaataatttatttttaagattatttacgttattacataccaaacactttcactgcttcctgcatattttggataactgtaactttaaatggacagcgtttctcacaagcaccgcatttcacgcactccccggcatgatgccgcagcgcagcataatgttcgcgtactgtttcaggaacactgttctgcgctttggtaagattcaaaaatttagttactgctgccacatctattccctgcggacagggagcacaatgtccgcaatacatgcagtgcccttcccagctgattttcggtaaagcggcaaaagcagccgcataatccttttcaacatcagcagccgtaatatattcaagacatttttccagctcgtcaacagtatgcgctcccgacatcactgccgctactccgggacgcgtcaaagcatagtgcagacactgattaacagtcaaagcttttcctgccggcgaaagctcttcatccagcaaatcaccgccgccaaaagctttcattacggttatagcgacgcccaggcggctgcaggtttcatacagcgcttcccgctccggatccatattcacaagctgcctgtcataatttttcccatcccaaagcgcataaaagtcttcattcgccggctgcaggtcatagcagggattaacgctgaacatcagtacatcgatcaaaccgctttgtacagcctgcatagctgcggcaggattatggctgctcaagccgatatatctgatttttccctgagcctgcatttctcttgcatacgccattaccgggccaccagctaccgcttcccaatcttccagagagtccacataatggatcatcccaatatctatatagtccgttgccagccgtgtcagcagatcttcaaagctcgctttcacttccccgatctccctggtccgcttatactgtccctcctgccaaaccgtacataaatgtgcctgtaaaacaaatttaccgcggcggccacgcagccatttacccaaacggctgcgcatttccggctgcggcgcatacaaatcaatacagttgatgccgccttgctctgccgcattcagcagttgctctgttaaggcaccttcgttggcaacaaagccttcgcaccctaatgctatcacactgactttaatacctgtccgtcccaattcacgatattccatactctcaacactccttctccttaaagcaataccttactacccaaaatcaacgtcagcagcaagtacaaaagcggctgatgcagaagatagactaacaaagacctccgtccgaaaaaactcaggcagccgctgccataatcgaagatctgaggcaatccgcccagagtttcacaaaaacgcagacagtaataacctgccaaatataaaaagaaccagggcattaaagaaaaataatcactggaaaaaaatcctgcttctgtaaatcctacataagtagtgaatttattcagatacagctgctccggtattttgaaaaaattccattcctcaaaacctaaatagccgtcgttgatattgcgggtcagaaaaaataacataccacttgctgtaatgccccagacaggagccagcctgcacagcagccggtcaagcagcttcagcagcagcatacctgaccccagaaagaataaaacgccaaaggtaaccgcctggtccggcacaaaaatgtgcgttataaccatcaccaggacacttcccccaaaaacctgcacagcacgccgtacagcccttttccctaaaggccagcaaaagcctgatagaaaaataaaacgccagcaaatactttgctgccaccaataacacaaactgctatgaaaccatggcaaatcctgctcaaataaatacaccaggtcccaaaaaaaatgatagacgatcatctccaataacagcagccctcgcagactgtccagcaaggcgtatcttttttcattattcagcccccgcataacaaaccttcccccatatatactttaaagcagaaactttagctatctaatttcacgtcgctttaatattctctgctatggtaaaataaacactatttttttctacaaacacctatgcgttcctcttttatcaatcataacacttaaagctcactccaagtcaagatacaaataaaaattttccctgtatcctgctttaaattgctgttgttttattttcctccagtaattttaatatgaatatcctctaacccttcgtccatcttatcccaacaaaaaacagcaggccttataggcctgctgttttcattatttctatactatcattttttatagccgcacttcgggcaaacaccattttcattcaaggcaataccacacagcgggcaacgatcaatttgattcttggttgtgaactctgccgaagcagtattgacaccgctgacaaaagttattttcgcaatattgagtttgtctttaagcagatcataaacgatcttgatcatgccctcgacagtcatagtttcttttgtaaccacaagacgacaatccgggtatgctgttgccagctctgtcttgaaagccgcgcctttcatctggttctgcggagcgccattacggataccctgtttttcgtaaacatcaagtactgccggcagtagcggatcatcttccctcaaaatcagtgcatgatcgaagttctttaaaacgtcccaggcagttttttgaatttcattacagggaaataccatattgacacctggttcgacagaatcttccacctcaatagtcagaatacctgaatgtccatgcagatactgtgcttcacctttgaacccataaaatctatgggcatattgcaggtctaatgttgtaatacttctcatgtctttatcctcctatattttttatttacggggtcagcgcccgaatacgcatttgttaatcgaaatatccaagtctgttatctgctgttaatgatattttctttagtattaatataatattattttctgtttttgtcaataaccttttagtttttaattctattagaaaattaatatcctttattgtttcatatattatacattaatcttaattatttctccaacagttcctaccagcctcaaataaaaaatacactcgctagcccctgaactttaatagttcaataatcagcaagtgtaaaaaataaaagctgcagaatctaacgattctacagctttataatttgattggtgcgagtgacaggagtcgaacctgcacgccgaaggcgctagatcctaagtctagtgcgtctgccagttccgccacactcgcaaacaggcaaaaaaaatggtgatccacccgcgactcgaacgcgggacaccctgattaaaagtcaggtgctctaccgactgagctagtggatcacattggctggggcggctggactcgaaccaacgcatgcgggagtcaaagtcccgtgccttaccgacttggctacgccccaaggatagaaaccggataattatggggtgactggaggggatcgaaccctcgagtaacggagccacaatccgccgtgttaaccgcttcaccacagccaccaaattgtccaaacttaatagcttggcgacgaatgttattctaccatagccactagtttatgtcaatcttttttataaacttttttacatttttt

SEQ ID NO: 10084 - DNA, 7923 bp, Unknown
  gut microbiota DNA sequence
aaaaaacagtggtttttaccacatcgtcaaaagtcaaccctgcctcagacaatacgccttccatatttttcaagactctgatcgtctgcgcttcaataccttcatctactacttcgcctgtttcaggaaccaaagctatctgacctgacatatacaacataccattagccataacagcctgagaataaggcccgatagcagccggtgcattttcagtcttaataatttttttcatttgatttacctccatttaatacttatctaaaatatttttcaaattttaccatcagcggcaaaataagcctgtgcccaggccagtgcagttggtgtctgtgccagtccgccttccgccgtttccttgagcgtgcagggcaaacgatcgcctactgacttcatcgcatcaatggcttcgtctgcagggataaagcttgtgataccagccagagccaattctgctgccagcaacgcctgtgcagcggcaccgccgtttcgtttgatacacggcacttctaccagaccggcaacagggtcacaaacaagccccagcatatttttgaatactatcgccactgcatgtcctacctgttccggagtgcctcccagcacatctacagcggcaccggccgccatagccgcaccactgccgcattcagcctgacagccgcccatagcgcccgacagtgaagcgcggctggctatgaccataccaatattaccagccactaccaaagcttcagccatttgccgttcgttcaaattgtaatgctgcttcaatgccaaaagtactcccggcagaacgccgctggctccggcggtaggagcggcgacgatacgtcccatcgccgcattgcattcacctacagccatggcataagccacagcatcgttaacgacaccgcctaaaatatttttataattttcagactgtctggcctcctgcagctttttagcagcaccaccagtcaggccgctgtgtgaacttaccccggtcagaccgaatgctgccgattcttccattacctgcagcattgtctgcatctgctccagtatagcatcttcactcagttcaagctcttcgctgctgagcttcagcagataagtatgtaacggaacaccctgatcagctgcggcctcaatccaggtccttaaagaaattttctcgttaatcacgctgcacctcacaaaacattacagatgaaccgcaccgactgcataggttccaaagcagcaaccagattgattatcggctccggcaccacctggtcacattcaataaccatcgttgccaacccgcctttattcgcccggaaaacccgcatcccggcaatattgatacctgcacttgccaaagcgctgctgaccagggaaataacaccaggtttatccttatgcaaggtaaggatcgccggcagcttaccgctcagttctacagccgcaccgtcaatagaagttaccagaacctgtccgccgccaatagaagaaccaataacttcgcattgtctgccatctgcagctgtcaatttaaaataaaccgtatttggatgtgtcagatcacctagattgatcgtggaaaattcgtattccaagccctgcttctgagcaaaatccattgcctgcggaatcctggcatcatccggcagccagcccatcagtcccgcaagaagcgccatatccgtgccatggccgcggtaagtttgagcaaagctcccatgcaaagcaatctgcgcctttaccggccaggcccccagaatgctgatcgccaataacgataaacgtacggctccagccgtatgcgagctggacggaccaatcattaccggtccgataacatcaaatatattcataataacctcactgcttttactattgcgtccttattccacattatccagcgaacgatgcgccagacctacacacaactcattgagattgagcacgcctaccgccatataaatagcaacgcacaaatgctcaccgcagcgggcaataccgatcttgccgccgacattaaagcccaaagccttggttttcacctgctctaaagccgcatgagcagcgcctgctaccgcaccggcgccaacatgcgtatctgaaaccaggccctgcctctgcgctgccactacagcacgctcaacaatcttgacaatagacggaataaattccccgccaaaatcgaccgctgtcgaacgaataccctgttcagccagttcctgcttgatcctctgctcttcgctgcgtgaacctgtaacagctattttcagggccgcacggccgatttcaatactggtgagtttgctgtcggtcataatatcaagcctcttcctctacatattccggtactttaatcggagttttatcaacaactgccactattaaaaaggttacaatacaaataagccattcaaaataaattacatgctgcagaacatggagcgccggtacaaattcccagaccaccagccctaaaagtccgaccagcgttgtataaaaagcactgcttctgcggcacagccccggcgcaaacacagtaaataaaaagacacaggtcagagcggtagtcatcgacagaccggcaatcatggtcttcaaaatacctgcggcattgaaggcaaaccacaaggttatcaaaccaaccccgaaaatagtcagacgattgacagtgacaaatttttcatcgctgacagaaggattaataaaacgtttgtaaatatcctgactgaacaaagtgcccgcccccaaaaggatcgtgcaggcagtagaaacatcggccgcccacaaggcagccagcgtcgttcctgatgccaccgggttcagactcataacgactttcggcagagccatagtcgccgtaatatccgggaaagaaaccttcgctacaatgccgagcagcgcgcataaaaatccgatcgggaaaatcaaaatgccgcctaaaagaaaacctttacgggcagttttggcatcacgggcaccacaggcaatctgcaccggtccctgtgccgtgatcgcttgtgtgaccataactatgaaccagccgataatgaccgccatcggtataccagccaaaggatcgaaccaatccagcgtcggcggcagctgagccgcaatattctcgatcccgccggcattattgacggcggcaaagcaggaatacaggacaccgacataaatcagacaaacgctgacgatattggaaagacctgaggaccacagaccgccgatcagggtgatgccgatgaaaacaacggcactcatcatcatgccgcctttaaaactgaaaatgtcaggcagcagcgaagccagaatcgccccgcccgccaaatactgcagcgccgtaataacagacataataataacaagaccgaccgcgctgatgacacgacctttcgtatcatagtatttctcaaaaaattccgggatcgtagaaatcttcatcgcccgcagtttcccagcggcaacaagccccatcacgacagcccccgctgcccaggctgcattataccagcctgccgccatacctactttaaaggcattttcagcaacgcccactgtagaagccgcaccgaccgcaagccccgtaatattgaccgcgatcaggccggcacttaatttacgcccggcaaacaaatactccgtcgagcctttatcagcccgccttttaacataaaaactgataccaaacaaaagcgcgatatacacgcacacgataatcaactgaatagacaaatgccacactacctttctacgctgctacattgctgcttattaaaaccactccgcgcctcagaaggcgcctgctgccatactaccctcctacccatcaagtatggatataattatatcaattttcttctgcaaagtgaagtaaaacagctttttaaaacacttttttactttctttagctcatttacattcgctggctgccttgtaaaattttttatactttgctgccggcaacaaggattttagatttttatgtcgaatgtaaaaaagattacagaagatttatttatctgaaattccctgataagtgaggcttaaatttatgtattcttacaaaaccagcggcacctgctctcaacaaataaattatgacatcgttgacggcaaggtccataatgttactttcgtcaacggctgccccggcaatcttaaagctatcggcatcctggtagaaggacttcccgtcgaggaagttgccgcaaaactgcgcggcattcactgcggcaaccgcagcacctcctgcggcgaccagctggctcaggccctggagcagcatctaaacaaataacaacatcgcaaattccaaggaaagggggcacctgcaatgtataagatcctcaaaagtacaccaaacggcatcgatgagcttgagcttgaacaattagaaaagggctgctggatcgacattgtcagtccctcccctgaagaactgcatgaaatagccgccgctactaagatccagctggattttctgacggccgcgcttgacgaagaagaaaaatcgcgtatagaaactgaagacgaccagatcctgatcctggtcgatattccttttttacgcagtaacaaagactacgacacactgccgctcggcattatcatcgctgaagactttattgtcaccgtctgtctggagcctaacgctgttgttgctgacttttcttcctataatcatcgtttcttcagcaccttcaaaaaaacgcggttcctgttccagatcctttataaatcagctactttatatctaaagtatattcgtatcatcatcaaacgtactgatgaactggagcagcatctgcgtaaatccatggaaaactccgagttattcaacctgctggatcttcagaagtcactgacctactttactacttccctgcgcagcaattatatcgttactgaaaaactgctgcgtctgcgttctacaaatcagtcaggacatttgatcaagctctacgaagaagacgaagaccttttggaagacgtcatcattgaatataagcaggctattgaaatggttgaaatgtacagccatattcttaacagcatgatggaagtatttgcctctatcatcagtaataacctgaacttagttatgaagttcctggcttctgtaaccattattttagctatccccacaactatcggcggcttatggggcatgaacgttccggtgcctctggaaggtaacgaattcggttttgtcaccatcacttccatcgccctgctgatttctgtaggtacaggctactggttgtggaaacgccgcatgttctaggaggatattatgtcaaaaatactagcagaacaattattggccggtattattctcggcgataacgataatcaggaatatatttatcttccaggcggagaagtaggaagcgatactccctgctgtgtctttgaaagcaagtccggacgacaggacctgccgctggataaagccgtagaacaggccaagcgcctgcatctaaaacccgtagcgcatccggaaatgggccggcgctcatactgaacctgaagaagaagaccccgctgcaataatgcagcggggttatttttatgctttttatttttttacataacgctcccaaaactcgtcttcaggcagcggtcgggcaaaataataaccctgacccaactggcagcccagcttttgcaaaaccttgagctgctcttcattttcaatgccctcagccaaagtcagcgtatcgccaaattcacggcacatagaaaccgccgccttaaacaaaatctgcgttttaggattgtctacgatactgtccgtaagacttttgtcaaactttaccgtatcaaaatgcacctgtgacaataattccagattagaaaagctagtaccgaaatcgtccatggaaatactgaatccagcctcatgcatccgtttgatcaaatccacaagcagctctttttccagcaaaccaaagctttccgtgatctccacatctatcagacatggatcaataccatatttcttacagatagccacactgtttttgattgtatcttccgcaatcaacgttacccgcgaaacatttacagacatcttaaaaactctgccgccacgttcacgccagtctttcagcatccggcagactgtcttcagaacaaagatgtcgatataatttatcaaaccattttcttcgtaaccaggaataaaattatccggcgctattatcactccctgatcgtcgatttttctgaccagggcctcggcaccttctatcagacctgtctgcaggtttattttcggctgcaggtaaactttgaaccttccttccgcgatctcggccaacagccggtgcgcgctttctgctttatgattataatcggcggtcagatttttatagccaaacgattttgtcgcttccatcaccgcatttgcctgagatacttttttataaatatcccggcaattatcgctccataagctgccgaccgagaccctgaaatctgtctctgcactgaatttagctttcagcgccgctacttttgcttcaaaatccgctttatccatattcagcgccaaactgacaaactcatcactgccgacacgaaatgaattaacgccaaaaacacttttgataagtgctgctatcctgatcaggaccctgtcacccgaatgatagcccttggttgcattgatattgcgcagcccgttgatatccatatcgacaataccaatatgccgtatttttttaatttctatatccttcaacagactgctgtatttctctctattatacagtcctgtaagattatctacccaacggatctgttccaatttttgatccagatattttttctgctgttccagttcttcttccttaaaattatatagaatttcaaaacgcagacgacgccccatataattgaataaaatgctcttgacctgtaaatagcgctgtaccgacggctgatatatttcttccacaaacatgcgctctgtagtcagcagattattccggcagaacctgcacttgctgttcagtccctgtaaaaccgtataacattttttaccgcagtagctgtcatcttcataagccagctgcagcatgtctttcgcactcttattcatataaacaatttcacaggtatcaacatcaatcagatagatcgctcttgctgtttctgtacgcgctatttgaggaaattcgtcgaagcccatcattttcgagctcatttctgcacctcttttataaatattcccagtcgcaacttttactttagttaaaaaaagcttcttcaggatatttatttttaacatttttaaaagtttgcattttgtttatccatttgtattataacattattataatatctattcaatatttttggttttttagaatatttttattcttaaaacaacaaaaggcgctgtgtaatttatacacaacgcctcaaagaccacttttatttaattacaataactggcagttcggattcttcgatcaccgttttactgacactgctttttaaaagcccttccaaagctccaaaaccgcggctgccaataacaatgctgtcacagttttcgcgacggctcagcttaattatttcttcagctgctctactgccgatagccagcagataatcgcaggggatttcctgtttgtccattaagtgcttggcagcgcccagcacctcattgccgatctgcatcaccggcccattggcactgtagaccagttcttcttccaaaggagcaccgccgacagctttaatccccggcttaacgaccgtcaaaataaccaggtgtccacccgacagctttgccagcgaagcggcatattccatggcccgccaggaatattcagtcccgtcgataggtacgaggattttttttaacatattcatcatccttcatcaaaactttaaacacagctccgtaattattttacgat

SEQ ID NO: 10085 - DNA, 850 bp, Unknown
  gut microbiota DNA sequence
cgaccatttctttggccaattccaaaaccttatcaccgactttttccaattcgctgttaccctgattaatcgtagcatggtcaagcgggactgccaaaagagcagcattattataaggctggattacgttcactaccaaaatttcactctcaaattttttaccgatctccaacgcattattcaatgcgcgccatgcggtttcggaaccgtctacaggtactaagatttttttaaacataatacgcacctcctgctatcttaactgcttttagaatattcaaaatcaataataagcttattggtttcactgttaatttctctttttacagcctaaattcctgctaaagcaaaattatttaactttattttttttcgcctgatgcttcagggattttttacttacttttttgatctctgacggtgccggagcatcatccatactgccgcctttaccaaaacggtaatacagcagcattaatcctaaaagcagcatcggcaggccgccgataacataacggtattcggccggcgcagtgatcgtcagaaaatcataaccaatgatcgctatcggcacaagaatgatctgcgaataacggcttgcagaactcgtcgtccccataagacggatcaccagtccgtaagccaggaaggccacagcaaaagacacaaaagacataaagcataagaaaataaaaaattccataacagctctcctcgtttaacgttcttccctgtcataaggctgccccagcgcctgaggcgctgccagacggccccctttgcgggccagaaccaaaatcaaaaccactattgtaaaaatatatggaagcatattcaaaataaaaacaga

SEQ ID NO: 10086 - DNA, 1043 bp, Unknown
  gut microbiota DNA sequence
aatacgcgccgcccaaaccggctaaagcaccgcccatgatcacatataaataccgcagtccaaaaacattgacgcctacagcatctacagcagccggattttctcccaaagccctcataaacagccctgctcttgtacggtacagataaaaagcaacaacagccactaaaatataactgcagtaaaccagcagatcctgcctgaacagtaccggccccagcaccgggatctcactgagccccggtacagccagcttactgaaaacaacagtcgcctgctgccccacataatccaaacccagataaccggatagacccgtgccaaacaaggtcagcgccaaaccgctgacgacctggtttgcccgcagggtgacagtcagaaaagcgtgtatcagcgccatcaatgaacctgccagcagcgccatcccaacaccacttagaagactgcccgtctgctgagcggcaatgaacccggcacaggcaccgaccagcatcatcccgtccacacccagattggtaacaccagctcgctcggaaatcagttcacccagcgcagcaaacaaaataggggtaccggccgtaatagaggcagctaaaattgaaatgagcaatgtctcattcactctcttcgcctccttcatttttgatcaggcgcagctgataattggtaaagatatcagcgccgacgacaaagaataaaatagctccctgcagcattgttgccacagccgaaggaatccccagtgtctgcaccataaacccgccgacatggataatcgcaaacaaaaaagctactacgataatcgctgccggatgcagccgcgccagccaggccacaataattgccgtataaccataaccgggactgatacccggctgcagcttgccaacgatgccgctgacttcaatcatgccgcccatcccgcagacagcaccgcttagcagcatcaccagcaaaacatttctgggaatattgatcccggcataacgggcagccgtaggattggaaccaataacaagtgtctcgtagccccagcgggaatc

SEQ ID NO: 10087 - DNA, 1438 bp, Unknown
  gut microbiota DNA sequence
gtcaaaggaaaattcaagcccttgggatcacgccacgcaccatagaccagataattgacccataaaattgcaatataattcatcatcagcgtcgtaatcagttcgctgaccagccacttggttttgaaccacccggctaaaagtccccacatcccgcctgccgcagctcccagcagcagcatgcccggcagcatgatcatagaaggcaggtcaggataagtcagcggcagccagctggccgcacaggctcccatataaaactgcccttcagcgccgatattccagatctgcatcctgaaggcaatggcaatgcctaatccgcacatcgccagcggtatcattttgacgatcgtttccgaaataccatactcagaacctaacgcaccgctgaacatggcataatatacctcaaaaggatcgcgccccgtcactgcaaaaaagataccgcagaaaaccagagcggcgaaagctgccaccaccggcaccagcgagcgcatcagcggactgggtgccagacgtttttccattaccagcttcatacgcccgcacctcccgcttcggtaatacccgccatcaaagcgccgattttttctgtatccatttcgctgacagggaattcacctaaaatctgcccggcaaacataacgcctacacgatcagccagctttgcgatttcctccagctcttccgataccagaatgatcgcagtctgttcttctttcagctgcagcagcagcttgtgcactgcttcgatagcacctatatccaagccgcgtaccgggtacagtacaatcatcagcttgggtttagcggctatctcgcgtcccagcagcagtttttgcagattaccgccgctcatcatcttcaccggctggaaaatcgatcccagcttcacatcaaaatcttctacgatacgttttgtcgccgctatagcagcttcacgccgaatccgccagcctttggaaaatttaccgtcatattctttcaggatcacgttattgacagaatccagatttggcaccagccccatacccagacgatcctccggcacataactgatacctgcttcgatcatttctttcggttttttattggtaaggtcctgtccgtaaaaaaatatttttccgcccatcgccggccgcagtccggcaagtacctcagccagctcgcgctgaccattgcccgatactccggcgataccataaatttcacccgctctgactgcaagcctgacattgttcagtccaaccgtattcatatcattgagagctgaaacctgctccaactgcagcaccacttcaccgcagtgctcgcagtttttttcataggtattcagcacctcgcggccgatcatcatctgcaccagcttgtcgcgacgcatatcttcttttgcggcgctgccggttacacagccgccgcgcaaaacagttactcggtc

SEQ ID NO: 10088 - DNA, 6783 bp, Unknown
  gut microbiota DNA sequence
ggctgcgatgataaagcatccgcaatatctccacgcgctgtttttctcccacaccaagctgccagacataggcccgcggatctacctgcagtccatatttctcacccagactttcaatatctgctatgatctgctccggtttcagcaaaaaaccgcctttgctctggctcagaacgatattctcagctaccgtaaaagattcgatcagtttaaaatgctgatgtaccatcccgataccgctggcaatggcgtcagcaggcgaagcaaactttacttcctccccgccaaccatgatacagccttctgtaggcttgtaaagacctgtaaggatactcatcaaagtacttttaccgctgccgttttcacccaagagcgcatgtatctcaccgggatacaattccaaatttattttattgttggcgataacgccgggaaaccgtttcgttatctgccgcatactgataagaggcaaggtcatgactttgctccgttcatcataaaattaatccgctcctccgcatagccgcgcgccgatctggcgggcaacatggactccgctcgcactggcctgtgacaaccccctggtgataccggcaccgtcgccgacggcgaacaggttcgggatcttagtttccagcttatcatcaagttccagacgcgcactgtagaattttacctctacaccgtaaagcagggtatcggcattagccatccccggcgccaccttatccagcgcataaatcatttcgatgatattatccaaatggcgtttaggcagcaccaggctcaaatcgccgggcgtagccgacaaggtaggcttagtaaagctcttttccagacgtctttcattagtacgccggcctttgatcaaatcgccgaaacgctgcagcagcacgccgccgcccagcatattggaaaaagaagcgatacgtttgccgtattgatgcggttcagtaaacggttctgtaaatttattgctgaccagtaaagcaaaattcgtattatgactgtgcagcttgggatcgcggaagctgtgcccgttgactgtaatgatgccgtcagtattttcggccactacataaccgttgggattcatgcagaaagtacggaccagatcattatactgccgtgtccggtagaccagcttagcttcatagacttcgtcagtaatgtgtttaaagacctgcgccggcacctctacccgcacgcctacgtcgacctgattgttaataaaggacaatcccagtccgcggcactgttcggtaaaccattccgcaccggcacgtccgggagcagcgatcagataatcacagcgaatatcagctttatcctcgccgcgaacgcccagttcaaaaccgtcaccgtgccgtttgatagtttccacatgggtattacagcggatctccattcgctcagccagatatttataaatatgctccataataataaggttattttcagtccccagatgccggaccttggcgtttaaaagatgcagatcatgtcccagcgccagaccgccgatagtactgttctttgtgctgaaatattcgccgggagcgccatgacggcaattaagctcatcaacataatcaatcagctcgattacagtcttttccggaatatactcgctcagccagccgccgaattcagtcgtaaaattatacttaccgtccgaaaaagcaccggcaccgccaaaaccgcgcatgatatcacaagggacacaacgcaggcaatgatccactttttttgcagccagcggacattgacgccgttcgattggattgccttcctccagcatgatcagactgaccgtcggatatttcagagtaaattcataagctgcgaaaacagccgcagggccaccgccgataatcgctacatcatagttctcgtacataaaggacctccattcattatggtttgatcacaaatcgtattttttactttcatcacccagtggttcatcttttttagggtcatttttaaaaagctcaatatttttctttgcttcacgcaaagcatcatcatacacagttttaaacggactcaggtccgccggtttaccggccttcagccattcggtaacgacccgtcccagcgcataggtagtccctacagctacaggtatctgcaagggagcaaacgggatcagtgtcgtcagcgtactgcctacaaaataagctcctaaagaactcagcaggcttacggccgccttttctccgatttcttcttcataaacactgcctaattttatcaccagatacacatcattagcaatcagcgccattgttccaagcaacggagcaacaacgataaccccggcgcgggcagcagcccagcggcacaaagtttcagcttcctcctgacgcagccggtcgtcaatgacagtgaccttagtttcctgattcatatccatttgcataccctccttcaggcatagtaaaccacttattattattcgcaatcttcccgaaaaatcctgctaagtcctgccgataaatacgctgtcgggcataaaaaaccgcaggctgtaaaacctgcggccaaatttttttataagggcaaaacttatttttccagcccgtcagcctgacgtttggcaatcacctgacgcatatagtcagtaaccaaagccgtactttcttcaaacaacaccagcgcatgcgtagcctttttctctaaaaacgggatcagcttttccaaattttctttctgatcgacgatcgtcaccaaaacaggcaggttggaaacaccggtaaaaagtgataccggacgacggtcgatcccacgcacttcggtcgcataaccttcgatacctttaatgacggtagcgccggcgatctttaaacggcgggcttcttcaagaatcgttctgtacaggggatcgttgcctactataacgtcctcgcccgtataaattttaagcatccagcattttttgaattctgccgtcatataactcacaccttcccataaattattatttttcttattactttaattatagcacgcagtttctgaaaattcatgttttagagtataaataataataaataatttttgtaacactagctacactttattcgtccgcttaaatttcctgctgccgagtattggaatttgatataataaaataagcatttgactattcgaccacaaggaggcctaccatgtctgttacctgtcaggatctattgactttaaaatattttgaacgtatcaagctggttgccgggccaaacggcctggaccgtacggtcacctggccctacgtaggacagacttcaactgtctcgcaatgggtacacggcggcgagctgctgtttattaccggcattgtgcacagcgccgataaacttaaggatctcattttagaatgtatccagaaaaaattagccggtcttgtaatcttggtcggcaatgaatatatcaactctattccagaagaactgctggcccaggccgacgcagccgatttcccgctttttgaaatgccctgggacgtaaagctgattgatgtaacgcgcgaaataaccgacctgataatgcgtgataaatttgaaatcaaaaagtcaaaaaactttctgggccgcctgctttttgcttccgatgttgattaccggcaaatgcttgatacagcgatcatcaacgatatccaattactggaatataaatttattgctgtttttaacgtcagtcaccccgctgatgaaatcatgacagatgcaggccatgacagccttgaagataaactgcagcattctgtcgacagtctttgtaaagagaaacagctgccggtcatcacattggtctacggcaataatgtgatctgccttgccagcgcgcctacacaggaaaaagcagctgaggcggcagcttatctggaaaccgtctgcggtcttttaagccagctctacagcggcagcaacctttacctcagctttggccgtccttacgccgatgtcgaacaaatcaaaatcagttatcaggaagcgcagaaagcgctgctgctctggaaaaagatgggacgcagcaatcacattgtctactattcccagcttggtttataccgcctgctgtttaaaatcgatgataaagaagaaatccgcgaatactatcactataatctcggtgtgctcctgcagcatgacagcaaaaataattcggagcttctggaaacgctgcgtcagtacttatactgcaacggcaatcttgttaaaacatcacaggcactgtttattcaccgtaatacacttttataccgtcttaaccagatccgtgatctgctggggcgcgatatcgacgatgccctggtacgacttgagctgctgagcagcatcgtcgccaaagactacctggaagaatagcaaaagaccagaccctcaagcagcggtccggtcctttactgttgttttatttacaggaggatttgtaggtttactcaaatttatcagccttccggaacggtaactgcctcttccggaggctttttttgttttgccagtgacagtgtaactacgcccgtcataatcagggcacaggcaacgatcttgatcgtagtcactgtttctcccaaaagcagtacgccgcagataatgctggtaataggctcgaaggtagtcaaaatagcggcagtagaagcaccgacatgcttgatgcctatctgcagcagcgagagggctaccaccgtacacagcaatgcaaacacagtggaaataaaccaggcctgcggcgtcagagtcgtcaaagtcaattcacctgttcctatgccaaagatccccatagcgatcgaagacatcagtgctacataaaaagaaattttaaaaacaggctgatttttcaaaccgcttttatccatataaatgatataaaaagcatacgtaacgccggaagcgaccgctaaaaacagccccagaaaagtcccgccgctgaaaccggcgctcatatccacacccagaaaaaagcaggcaatcccggcagtagcgatcagcagagcaataaatttctgcagtcccagccgttctttataaaaaagtacgcagccgatagtcacaaaaacaggataaataaagtggatcgttgttgctacgcctacgtcgatcaatgaaaaggcaataaacaacatcagcgtagtcacagcattaccgataccgcctaaaatagtcaggctccacaattctttggcgctgacctgtaaagatatgccctgataccaaagaatcgccaaaagcaccggtaagctcaaaaaattacgcaaaaaggtcagggtcaccggattgctgccagcctcgccataggtcatcggccctagagtaaaggcaaacccgaaggtaacagccgacagcatcgtcagtaaaatacccctggtacttgtattagccatgataattctcctttatggaagacaaagcggcagatccgccgctttgtctaaaccggaattaaaattctttatcgcagattttgaccaattcatctaaaacactgtcaatgatcagctgtccgcgggcagctgaagaagaacgcgccggagcaagtacgccggtaggcggaaccgcatctttaggcacaggatagatatgatacggacagggagtcgctccctgggtatctaccattctttcttcatgcaccaattcaggggcgaaagccatcatcagagaggtttccgtaacagctgcgtgctcaaaagcccagcccgggaacggtacttcgtcaaacactttatcgatgatctctgccggcatcgggtcccaccagttagcgatcaaaatcttggcctgttctccatatttttgagctatcaggtcgactgcttcgcagacaaaagcttcattttcaaagtgacagctaagcaccatgatttttttcacgccgtctttaataagctcttccagaacatcataggtcaaacggacaagagtatcaccgttcaaatcaacagttcccgggaacagggggccgccgccggaaagaggtttagatttataaccatagttgattgccggcgctaccataccgccaacacgctccgccagtctttcggcaaagccgttagccagaaccgtatctacacacagcggcagatgggggccatgctgttcgcaggcgccgataggcagaatagtgatcgctccttcgtcgattttcgctttaaattccatccaggtcatttcgttcattctgatcatgatttatcgctcctttaatatccatattttaatgtcgtttacctgcatttttccttgttgctttgttcttttaagaaagaaagttgtgaggacctgcggcagtgccgcatttaattaggaacttacttgactaagagttttcgtcctgtccccgggccgtttatttttgtgcagcagctagctttactgtgctttcagtatacccccgcttcaaccttgtacacaacgtacaaaaaggccaaaaacattccagcctgcaagtgcattttttgcacaagtcagtactgctctttttgtatcattcatacagtgctttttatatttcgacttgctatactgattgcgacaagagttttcgttacgaagctcctccgccacaacattaagtttgtaaaggagactttataatgaaaagcatattattcaccaacgccaaattaaaaggtcagaacggcctgcaggacatttatataactgatggtaaatttaaagagataggccccggtcttgccgcaaaagtaacagctgagaaggtcgtagatcttgaaggcaaactcgccgtaccgccttatgtcgatccccacattca

SEQ ID NO: 10089 - DNA, 631 bp, Unknown
  gut microbiota DNA sequence
tcgacgtgactgatcccaagcttacagccctgcaggccatgctggagctgcgcgaagaagtcaaagatacctgcaccctgcagatcatcgccttcccgcaggaagggatgtatgcttatcagggcggtgataaattagttgaagaagctctcactatgggcgctgacctggtcggagccatcccccattttgaatatacacgtgaagacggcgttaaaagcgtccagaaagctttcgaactggcagtaaaatacgacaaaatggtcgatatccactgcgatgaaactgacgacgaccagtcccgctttatcgaagtcctggccgccgaagcactgcgcagcggcatcgccgaaaaagccactgccagccatacctgtgccatgcattcttacaacaatgcctatacttataagctgttcaaattactggggctttccaaagtcaattttatttcctgccctaccgaaaacatccatctgcagggacgttttgacaactaccccaaacgccgcggcctgacgcgtgtcaaggaattgaacgaagccggcatcaacgtctgctttgcccaggattccatgagcgatccctggtatcctgtcggcaacggtaatctgatgaatattcttgacgc

SEQ ID NO: 10090 - DNA, 3925 bp, Unknown
  gut microbiota DNA sequence
aagccggcaaaccggccaactttatcgttctcaatgccaaaggcgaatttgaagcagtctgcaatcgcgtttccgttgcctgttccgtccgcgacggcgaatttctttttgaacgtgcccccgaagttattactacaaccaacgggctcttaaaataatattcccggccccttaacaaataacaaaaagcactgccgttattaaatacgtcagtgcttttttatctgcagaaagaaacctgaaaaccagcattttctgtaatatttttcgcaaaaattttactggtttcaacagctcacgcagcaggatttttgatccgtttgtagaagtaagtatatacaaaaagaaaacaagatatcatctgaaaatcatctaaattttaacctgacttttgcggagtgttaccactaccgcctgtaacatttccgatctgatctataggcgcggatgttttaaggagggatttaccatgatgaaaaagattcttgtaccgttcgatggttccgaaactgcgctgcgtgcactggagtttgcagccggcatcggcaaaccgtttggcagcgaaattatggtagtcaatgttattgtaccttacgactacactaaagttccgccaagaaaacctaaaaatgctattgaagaagctgaaatggcagccaaagaaccggatccgactccgcttgatatcgctaaaggtattttggataagctgggctgcactaccgcatcctatcgtctgatcgttgatatcgacccggctgagaggattttggaatatgccaaaactgccgaagctgatatgatcgtgctcggcaacagaggtatgggcatgctggccgaactgctgatgggcagcgtgagcatgaagatttcgcaatatgcagaatgtcccgtagtgatcgtaaaatgatcagttaatatacatattcccgtcttgtgaaggcggtaatcccttggaaacggccccttacccgctggaggtaaggggccgaagtgtttttcagaatcacttatctgtcaatgtatcattcatactgccgctgcgaaacccttccagatctaaacttacatacaggaaccccgccttcctgaaagcttccacgatcttccggcgcagctgcggctgcgcaattttttcaataacggactcagcaacttcaatgcgcgccaatttgccgtgacagcgtacacgcatttcggcaaaaccaagatccagcaaaatctgctctgctgcttctatcatctgcagtttttctgcagtaataacttcaccataaggtatacgtgaggccaggcaggcataggaaggcttattccaggtaaaaagctcaaacgcccttgacagcagccgtacttcttctttagtaagtcccacttcccgaaaaggacttttgatccccagctctgctatcgctttcatcccggggcggtaatcaccttcgtcatctatattggaaccatctgcgacgcagctgcaatgatacatcccagccatctccacaacggtttcaaataaggcacgtttacaataataacaacgttccggaccattctctgcaaatcccggaacagcaagctgatcgacaccgatttcaaaatgcggtattttcagttcgcgcagcagctgtgccgcgtccctcgcttcgtgtcccggataacttggcgtccttaccgtcaccgccagtacgttatcacccaaagcctcgcgtgcggcatacaataacagcgaagagtcgacgcctcctgaaaaagccacggcaacgctgccgtaactgcgcagcgtatccagtaaatctaaatatttctttcgcaattctacttgcattttacaccgcctgtcttaattctgacgattaactaaatcttcaatagcattttcacgcaaagctgtcttcataaccttacctgtaccatttttaggcagctgctcgcagaagaaaaaatattttggtaccttgtaactggcaagacgctccattaaaaagcgccgcagctgcggttttgtcgccgccgcgccctccttcaataccagataagcacagaccgcctgaccgcgcagcttatccggcacacctactacagcgttttcctgcactgccggatgatgatacaacgcttcctcgacctcacgcggataaacattttccccacctgtaataatcatatccttgagcctgtcaacgataaaaatataaccttcttcatcctgatatgccaaatcacctgtatgcagccagccgccgcgtaaagctgcagccgtttcttccgggcgattcagatatcccaacatcacattgtccccccggacgcacagctcgcctaccgtgccgctggcaacccgtctgtcatcctcatcacggatctcaactcttacattcggcagctgcggtccaattgatccgaccttgattttttcagccggattaacagtacagaccggcgaagcctctgacaggccataaccctcctgtacgggctttccaaattttttcttaaaatcttttgccagcttttgcggtaaggaagcaccaccactgataaaaaatcgtactgatgccagctgcccgctgtcggcacccttttcaaacatctggatcatcgtcggtacgccggcaaactgtgttatttcatacctttggatcaaccgcagtgcttcagctaaagtataattttcctgtacaactatgcagcagccatgcaataaaggacatgctacggaaacagtccaggcaaaacaatgatacatcggcagcacacacaaggtcttatcagaagaatacatcaacaccctctgcgtaaaatctttcgcgttggcaaccaaattacgatgtgacagcattgctcctttaggatgccctgtcgtaccgctggtataaatgatcgtacaattatcattatcgtccatagctatatcttcataactcctgtcaacaggctgacgcagatcctcgaaatccagctgcttgagcgggccacagccacattcctgcaatgcggcatctaattccagcttttgccgcgtcaccattacgcgcatacctgcatcctgaacgatataggccacctccggcgccgccagttgaaaattaaatggaacaacaacgccgccggctttaatgatcgccaaataagcgatcacaaattcattgcagtttttgctgaacaggccgactttatcgcctttacatacgccgctgctctgcagatgcgcagcccataaagtaacttcctcacgcacttcaccataagtcagcattttatcttgacagatcagagccgggtcttctgccggatgatcgttgattatttcataaaaaagcatagctttcgctccccgccgcggcttcaagccgctaaaattaccgttgcctgatccgatccacttttccagcagcagtatattctttattatactaaataaaaacccacttgcacaatgctaaaaatcaggttaatatgtaagcagtatataaaatattaattcccagaaaggcaggtttaataaatgaaagttgaactacgacccggtcttcaaggacgagccgaagcaatcgttgacaccaccaatgttgcagtagttatgggcagcggcgatcttgatgtttttgctactccggccatgatagccctgatggagcaggccgcctgcaacgcgatccttccatgccttgactcctctaccagcagcgtcggcatcaaaatggacaccactcatgaagccgccacgctgcttggaaaaaaaattattgctacagccaaactgatagccgttgaaggacgcaagcttacctttaaggtaggcgcctgcgatgatcatggaccgatcggcaacggtacccacgagcgcttcattattgacaaagctaaatttattgctaaattacagtctaagcgctgaattattttttaacaaaaaactcccgca

SEQ ID NO: 10091 - DNA, 1873 bp, Unknown
  gut microbiota DNA sequence
aaagccatatttctgcccagcgtacgcatcgtctgtaagccttccaaatcctgttttacttcttcagcattgacgccatgtaccatattccaatattgcgaagctacgacaggcatctgcatcagcataaaatatttattcagctgttcaaaggctgccgtcgttcccgcacggcgggcagataccaccgcagacgccggcttcaggtaaaaagttttctgacctgaacaaacggcagtataaaaaactctgtccataaaagaagttatcgctcctccggctgcagcccaatgtacaggcgaaccaaaaatatagccgtcataagcagatgccagctccaaaaattcattgaccttgtcatgaaaaacgcagcggccagttttggcacagccgtgacaggcaatacagcccgtaatagctttagtaccgatccagaaaatatctgtttcgatgccctcctgttccaatgcagacgcaacttctgccagcgccgtatatgtgcagcctttttcatgggggctgccgttaaccaatattactttcatctttactccgctcctttactttgttgtctttccactgctcctgacataactatacaaccttgagcgcactctaggtcaagtgaattattttcaaattttactgcttttctgtctgtacataaaaaaacaacaggcggcaaacctttaccacctgctgtttttgactttctctattttattagtgatgccacaataaatgctgtcttaccgccagttccagcctgactactacaaggaggcaaatgataaccgcagcagcaaccatgccgataacaccgctccagccatagctttccaaaaatacgccgcctaaagtacccagtgagcttgcaccggcataatagaaaaacatatacatcgacgatgactgcgctttatcgccctgattaagttttcctacccagccgcaggctacggaatgtgaacccagcatcccaaaagtaaatatagccagacctataaatttaaatacaagcggctgcagtaaagtcagaagcccgccggtcagcattatcaaaaggcccagaataagtacgcgcccgttaccatgctgatctgataatctgcccatataggtagagctgaaggttccaaacaaatagactacaaacagcagccctactacagtctggcttaatgaataaggcggtgccagtaagacataggaaataaagttaaaaacagcaacaaaagaacccataatcaaaaatgcaaccaggtaaatccataataatttcttatttgccagagcggtatgaaaggtttttatcagctgcagtccgcctgactggcgctgccgctgatatttcggtttaggcagcagcataaaaaaagcaataccgacagcaagatataaaatgccgatcacaatcagccccatgcgccaggaaacaaaatcagtaatcgcgctgaccacaagccgtccaaacaggcctcccactgttgttccgctgatatagatcccaattacagtaccgacgttaaacggctcaaattcctcattgatgtaagcaattatcaacgaaggaaatgcagctaaaagcaatccctgtatcagacgcatccccagaatagcttcaaaactgccgctgaagcctatcataatagtcagtattgcagctcctatcaagccgacagcagttgccagtttacggtcaaaacgcggtgccaaaccggcaatcagcagcattgctgctgacatccccaccaatcctaaagatactgccagactcccctgtactgcattgagcccaaagctggaagcaataaccggtataatcggctgcacacagtactcggcaccaaaagccgccatacttcctaaaaaa

SEQ ID NO: 10092 - DNA, 741 bp, Unknown
  gut microbiota DNA sequence
cttttaattgtataccttctgccgtattagtcaattcctaaaataaataaaagcaccgatggcggccggtgcttttatttattttttcatctcattcacctttactgccgttattcacgcagctcggccagcgaaggcaatgcagcacgtacaggcttccacagcatgatcgaaacagtataatcgatcagcgaatgtaaaaatgtaccaacccctaccagaacaagtacgctcataacataaccgtcggcaagctgttccggtttgaaaatgctgccggccagaaagaaaggtgaaacgacggcaacctcagccagagcatgtacaaaggccagcccaccattaaacacagtgcttggcaatggcttttcaatgatttccggtatttttctgatcagcacagccccaagcagggcaaaacagatatggctggcagccctcagagcaataattacaggcgtcgtcataaaaaagcccagcgtcgttcccaagcaaactactgcggccagcttcggcgatatgaacatcgcaataaaaatagccacatggctggccagcgtaaacgacatcggcccgatcactattttaggcatcagaatcggcacaacgataccgataccacacagtaccccggccaatacaagctgattgatattcttgcttttcatttcgcagctctcccctcatcattcatccttctgcctcattgataacgaaaacagcgcctcagggcgctgtttt

SEQ ID NO: 10093 - DNA, 732 bp, Unknown
  gut microbiota DNA sequence
catcagccataaaaataactttggtcgctacttcgcgggcaaaacccatttcatgagtcactaccaccatcgtcattttttcttcagccagttcacgcatggtacgcagaacctcccctgtcaattcaggatccagcgaagatgtcggctcatcgaaaagcatgatcaacggcttcatcgctaaagcgcgggcgatagctacacgctgctgctgaccgccggagagcttccgcggataaacatccgctttttcggacaagccaaccttgcctaaaagtatttttgcttcttcgattacttgggcacggtcgcgcttctgcacctgcaccggtgcttcaatcaaattctgcagcactgtcatatgcggaaacaagttaaactgctgaaacaccattcccattttacaggcaattcggcggctttcgtcaccgggtgcatataccacctcacctgtgctgctggtatcagcaagcagctcaccgtcaataatgatcgtgcccctgttgatagtttccagcttgttcaaacagcgcagcaaagtacttttaccgctgccgctgggaccgatgacggcaatgacttcgccttcttcgacatcaagatctataccctgcaaaacgttcagttcctgaaaacttttatgaatattacgtgcttcgatttttttcatggcttactcccatcaatcgtacttcgaaaatcttttttccagtttgtcaaatccgtaggtca

SEQ ID NO: 10094 - DNA, 1671 bp, Unknown
  gut microbiota DNA sequence
agtaatactgaaatcacgctgcaccagattacgtgtcgtccgcagcagatcattcattgccaaaacataaatcaaagaagtatctttgaccagagttatcgtctcattgctgacaggcggcaggataatgcgaaaaacctgcggcagaataatacggcgcatggtctgtacataattcatgcccaaagtacgggccgcttcatactggcctttaggaatagcctggataccggcgcggaaaatttcgcagaaataagcggcataattaagtacaaacgcaaaaatagccgcctgaaaatcatccatcctgatcccgataccgggaataaatggaagtccgtaataaacgaataaaagctgcagcatcagcggcgtaccgcgcagcagccagacatagacaccaacggcactgcgcaggctgccaagtgacgaaaccctcgccagagccagcagtatacctaaaggtattgacaaaacaatagtaataaaaaacaattttaaagtttcgatcgttcccagccacatctgcggcaggatggaaataatataatccattatgagtctccgtatctgcattaaaaataagtagagtaaaagggccgacagctcatgccatcggcccggagcttattaatatttagtgatgtcaacacccatccattgttcagaaatctttttcatggtgccgtcttttttcatttcatccagtgccttgttgattttctcactgtattctttatcatccttacggaaggcaaccgctacgacttcgtcgcccagattttcttccaaagctacatatttatcaggatgtttgaccatataataacgagccagaacagcgtcaactaccatggcatcgatacggccggcgtccatatccatataaacagcagcaaagtcaggatattttctgtaatctttcagggaagtcctcagttcattatttctgtcaagaatataagaaccggtactgtcatcctgtactgccagaactttacccttcaaatcagcaattttagtaatctcagaccctttaggaacaactaccagctgagcatttaccatatagggctttgagagcgtataagcttcctgacgctccgggttgactgtaaagcagttccagatcgcatcgatacgcttacccttgatctctgcttccttggaagcccagtcgatcggtttaaattctacttccataccagcacgcttgcaggcttctttagcgaggtcgatatcataaccgacgatctcgttcttttcattacggaagcccatcggcgcaaaattgtcatcaagacctatcaccatttttttaggactgtcactgccgcagcctgcaaccaaagacaaagccatcagcagcgtcatagccaaaagtaaaaatttcttcatcatccatccccctctaaggtgttgttttcttactacgcttttgattatactttagtatgctaaatttgtaaagaggtaaattgattttttttgaaattttttgcaggaattttccttacagctgcgaatcttatttcaacagcagtattttataacgaaagaggggcttgtgatgatcgtcactgaaagaaaaaccgatatttttgaacgccgggccggcggtaaaggcaatactattatggagcacatcgtcgatgaaaaggtttacggcgg

SEQ ID NO: 10095 - DNA, 221 bp, Unknown
  gut microbiota DNA sequence
attgtgaaaatatcagaagcaataaattgttgttgacaaaataagttagcagtagtaaactttaagaggttagcgaaagctaactttttaaaagtgggctagttagcgtaagctaatgtgaggaggacaaaagtatgatgacattaaaagaagttcctatcggttctaccgtaactatcaaaaaagtttgtgccaccggacctttgaaacgcagaattgtt

SEQ ID NO: 10096 - DNA, 204 bp, Unknown
  gut microbiota DNA sequence
tcaggccctgttttacgggatgcgaagcactggcagtagcagcagcattcggcacactgcccataccagcctcgtttgagaacaggccgcgctttataccggtcatcagtgccgcacccataccgccgccggcaacagcctgcagatcaaaggccgaactgaagatagcgttgaaaacctgcggcagtttctctatattcatca

SEQ ID NO: 10097 - DNA, 189 bp, Unknown
  gut microbiota DNA sequence
cgacatcctcaattgcactgttatcacgcacagtaatcacatcgcgggtcattacgtcgcgtaccttcaggcgtgacagcagataattagcttcataacgtgataaagtactggcatcagaaggtgaagtgcgcccaacgtcgccatcagtgataatgcccatcactcttttgatatcatctacaaccg

SEQ ID NO: 10098 - DNA, 74667 bp, Unknown
  gut microbiota DNA sequence
ttattttttatattttctaaattaaaaatttgagataaaaaagagcagtaaccttaaaggttactgctctttttacattattcgtattttatttaaattctacttttaaatgctgtcgttctaccaacctttggaatttatatttcggataaccaaccattaaagtacccactattttttgcttagccggtacttctaccaagtcaagcaatggtttatatccggctataccacaggtttggataaatccggcaatagtcgttcccaaaccgatagtcggtgcataaagctctgcataagcccaagactgttctgcattgctaacgccagttgtatttaacctacgggccaatgcaaaaatcaacatcggtgcgttgcgggcaataatatcctgaccacgttcgcgataagctctcaatacattagtaaaatatctgctgttagaacttccttctgcaatttccttttccatccactgtgctgtagcttcagcaatagcactgattttttccttatcactgattactatataatacattccctgtgaattacctgctgttggcgcatagcgacatacttcaagcagtttacgtacatctgactcagttggtggctgcggtttaaacatacgaactgatcggcgcatacgtaaaaaattatatgcagtttcagcatctaaaacaggcattggcaagggcaattgttcttctagcggcacatatttattatccatagcagccgttgggcaaatggcaacacaatggccgcagctcatacagcctctgtcaaaattgcattcaggtccaagctctcccattgataaaatgcatgatggacacgcctctacacaaataccacattttatacatttatcataatcaactttcagtaagtccatcttctagcacctcaatcttcgaaatgaatgaattccaatccgctgaagtcagtataaaattgtgcatttttaaaagctttggcacataattctttatctttattaacaacaccgtcagcattagcgattcccaaataagcacaagcagactgtgctgcaaaagtttgagcatgttccaataatgcctgtttatcagaattggcaatagtacctttattgggataaacatcagtagccaccaaaataaaaatcaactgctcaccttgcttagcaactacatgtggaaactcacttttattaggttgagcgaattctatttcaaaacctttttcagtaagatgctgcagcaatacctgcaatccaaactcatgaatttcttgagtattcatcaactcaaatgccatgaatcattctccttcgctatattatagtttcattatatcataaaaaagcaatctatctccagcaatattctaagtactgttatccaaaaaactattgttacaaacatttagataacaaaataaaaagcctgcttaaaaagcaggctaaatttactggctccccgagtaggactcgaacctacaacaactcggttaacagccgagtgctctaccgattgagctatcggggaataagtcttccaacgaagaatattatattactctacgatgctattgtcaacgtttttatttaacgagtcagcttgtaaataagcgcgttacaaatagctgcagctacattactgccacccttacggccacgagcaactatataaggaataccagttttcataatgatttctttagattccacaacattaacaaacccaacgggaacaccaataacaagttcaggcttaatcctgccttcttttacaagttcatccaagcgtactaaagccgtaggagcattaccaacagcaataattacaggcccttctacttcacaagctttttccatacaagcagcagcacgtgtagaaccaacttctttggctctttctgctacatcagcatctgccataaagcaaactgctttgccgccaagcttatttaaaccaggcttatttatacccacgcaagccatattagtatcagtaactatagtagcgccctttttcagtgcttctaaagctttctctactacaccattcgaaaaatgcagagtacgtgcataatcaaagtcagcagaagtatgaataaccctttttataatactaagtttctctgggtcaagctggatctcccccaattcttcagcaataatctccatactgcgtttttcaatatccgctggtaacacattttgtaattccatgtttactaccacctttcttcaacttatttttcaattcctactcttgccggtataccacgatctttcggatgctttcgtttgcatacttcagaaacataatcggccatttccaataatctcttatcaggattacgccccgacaaaacaacttctaaagtatgctgcttattttttaaaaaatcaaccaatctatcttcattaaaaacgcccgtgttacaagcgccaatgacctcatctaaaactagcaaatcaaacttttcctcactaattctttcaattactttatcaaataacaattcatgctcttgcaatacttcttttttttcttcatcggtcatttgaaaagtaaacttagctgtttctttacctctcataacctcaatattttcaaataattttagtgaattaagctctcctgtaggcctgctttttaaaaattgtacgaataatactttattgccatgccccgcacaacgtatacttaatcctagacaagcagtagttttacctttcccgtccccgcaatagatatgaattaacccatgctccatcttacacaccggcttccaaaatctcataaatttttttcatatcaatattttcacgtatactatttgccaaaatatcatactgctgctttttataatcattaaaattaatagttttaatatcgtctggcttcataccctttttagcaagtaaagcttccaccacagatttagcaataccttcaccatcaaatactccatgcacatatgtaccatatacgttcatagtatcactaacattctgagatccttctggacttatttcacctgcttcgtgaataggtttcatcaatgtcaacgatttaccatcatcaaaattagttatgccggaatgtatttcataaccataaaaagagaggccggttaacgcgctgaaaataccttttactttgccaaaatatccatctacctgaatagtgcgttttttctcagcaaaaatggtttcaacatccaaaagacctaatcctgcagtatctccgccttcttctactccatatggatccgaaagattcttccccaacatttgataaccgccgcaaataccaaaaaccactgtaccagcatgagcgcgtttcattatctctgcttccaatccattttgacgcatccattttaaatcaccaatagtattttttgttcccggaataacaatcatatccggatttttcaactctgaaactgattgcacataacgcagcgatacacctggtataagttcaaaaacattgaaatcagtataattagacattcttggaatacggataacagcaatatctactgcctgtacttctgtatgtgtagttaaccgttctgataaactatcctcatcttcaatatctacatgcagcattggcaatacaccaacaacaggcacccccgttttctcttctatcattttcaaaccaggacgcagtatctcgacatcaccgcgaaatttattgacaatgatacctttaaccatcgctctttcatcttcctcaagcaacattaaagttccgtaaatagaagcaaaaacaccgcctctgtctatatcggcaactaaaagcaccggtgcttttgccatctttgccatacccatattaactatatcctgtgattttaaattgatttcggctggacttccagcaccttcgataacaatcacatcactactttcggataattgaccatatgctttcataatatcagggatcaaatttgttttaaatttgaaatattctgcagctgtcatagttccaatagcttcaccattaacaataacctgtgagcctgaatcactggttggtttcagcaaaatagggttcatcaaggcacttggttcaatgttggccgcttctgcctgcacaacctgcgctcttcccatttctgcaccattgcgagtaataaatgagttcaatgccatattttgagatttaaaaggtgctactttataaccatcttgattaaaaacacggcataaaccagctgtcaccaaacttttaccggcattagacattgttccttgtaccattatagctttagccacgcatatcactcgctctcattaaaaatgtcaggatatcctgataattatttatttttactggtatagcagcagtattgatttgtgcagcaactacaggaactgcatttttattatgtttgccattaatagaacttgttacatgatcaccacaaataacaatgcgtaaaggttcctgtatattatttataattttctctaaaaactcttcgtcaatagcacttataaactcagctttgctctgataatcatatctgtgtgctgcttcatctgcaccgttaaaatgcgttaagacaaaatcatgttctttcaacatatttaaggtcgctgttgccttggcagcaatatcagtatctatatccgctgtcgctccagcgattttaggagccgtcaaatgcaatccttttgcaatgcctctgacaatttctgcttcacaaattgctgcacctttcaacccatgcaaagcttgaaatccaggcaacgttttacgttctgaaggcccccagggataaagcatataacgaatgtcatcatggttaaaacgttccagccttttcgctgtacattcaataaaatgctttaacagcaaagactgctgttttaattctcctaaaagcaggtcaacattctttcccatactctcgtgaggcggagaaataacacaattgtccaaaatccttctgtctttatctaaaatcaacagattacgatacatagacaaatgcataaattctatgccctgccaaaactcatcgcatgctttagctgcttctgccatgttttctgccgaaagtccctgaccattaaaagataccagcgtattatctttgtctattgaaaccaggttacagcgtaacaccatctcatattccgaaatatccctaccatgcgccaacaattccaaatacgctctattggttgggaaatcccgctgctgtacaccaagcaagcgcaaaatacaactcaaactttcaggaatgaaatcattctcacaaatgcttacttcactgtatgttcccagcttaataagagtatcgatatttttatgttcagcatattggaaaggtgtcaatccattcaaagcaggaatatgatcatcacctaagccatcaataattaccaataatgagcgcattacgtctaacttcctttatcgctttaattaaagcccgatttgtatatcgtgtttttactgcaattcgataatacgttggccccaaattatggtaattattacactctctaatcaaaaagccatgcttacgtaaaagttctgccaaattttcaggtttctccaatttaaaaaatatataattggcctcagaaccaaatgtttttgctcccaagccctccaattgtgcagtaagatactgccgttcaacacgaatcaactctttgctggccagtaagtaattttcttcatctaaagccgcaataccagctgcttgtgccggaatagaaacattccagtcctgaccattttcatgcagtccttttatcaacgacacatcagacgtcatgcaataacctaaacgtaagcctggcatcgcatatgtttttgtaaatgctttcaatataataagattgtgatatttatctagtttcgaacatagcgaatatgctttatcgccatccacaaaatccataaagcattcgtctaatagcagctttgtacctgtacggcagcatttttccaatatctccagcaataaatcttcatctattaatttcccagtcggattattaggattgcatattacgaccaagtctactcggctattgattcttttcaacagatcatatcctgcaataaagtttttttcttcctgcaattcgtaataagtaaatttacaatcaactgtccgcaaagctttttcataatcagcaaaagttggagccaataatacagcacgaccgggcttgactgttaaggcaagtttaaataaaacatcagcagcaccattgcttatgaaaagatattctttttttatattcaaatatttagctaatttctctatcagttccctgcataaaggatctggataattaacgcagtttttgattgaattcttaatagcctcttttacagatacaggtaaacctaatggattaacgtttgctgaataatcaacaatatttttccctaagctgttattttgctcactgtaaatatctccaccatgtacagatttatacatattttccaccctttagcttttaataaaaagctccagtaaataaattaatgcaaaaactaaaatacttaaaacagctgtcatatacatcaaattattagtctggacgatatcttccggttcaacttgtctgatatcatcaccaatagtatctttaggcacccattttccaaaataaaaatgtccgccgcctaactgaatatgaagagcgccagcagttactgattccgtcattgcagaattaggacttaaatgattgtaacggtcacgtttaaaaatcttccaggctttttttgcatccaaacttaaaagataagctgcaactatcatacatattccagcaacacgcgctggaatataattagcaaaatcatctaattttgccgcacaacgcccaaaatataaatatttgtcatttttatagccaaccatggaatccatggtatttattcctttataaagaaacgcaagcggagctccgccgataaacatatacagcattggagcaataattccatctgcagtattttcagcaacagtttcaactgcccctttagtcacttctgattttgtaagttctttagtatcccgtccaactatccacgaaagtttcattctagcatctgttaaatcattattttttaacgcagtataaactttcatactttcttcacgtaaacaacgcgttgcaaaaatttgataacacataaaactctctacagcaaaagacagccacggattgattttttctgccaaagccaatactaaaaatggaacacaaaacgaaaaagcaagcactaatattactaatacagcgcctcctaccaataagccacgcgagctttttccaaaaatactgcgtagcagcttttctaaaaagcttatcaaatttccaattaaacaaatcggatgaggcagccaacgcgggtcgccaatcagcaggtctaaaataaagcccgctataatggcaaataaaagcatcataatccaattccccttaaataaatactaacagctaaaaccatcagtagatcaatcccgtttttttgcaaattcatcacaggcacgaataaaatttcgtgcaaaatttatatttccccataagtgaatgtgtggatagccagcatacagaactttattagcatgactacaactccattcagaaattcctgaagctttcaaggctaaaaaatcatgcccattattattactgtcggaataatgaaactcatgtccatttattttctcaccgattttgcaaaaaacattgtcactttcagcagtcaatgttatatatccaaaacggttaagctttgccgtcataaaagtttctccacttatagcacctgtccactcataaatctctcccgaagctgcttgaaaacgctccaaaagatacatgaatccaccgcattcagcaaaacaaggcttacctatttttagagcagttttaatgcttgtacgcattgatatattctcttccagctcttttgcataaagttcaggataacctcctcctaaaattattccatcacattctggcaattctttatcaacaagaggactaaacgttattagttcggcaccaaactcctgcaataaatctagagcgtcctgataataaaaacaaaaagctttatcctgtgctattgctatttttactttagctacacttgcaacaggctgttcttcataaacaagatcctcagcactgtttgcaatacccagcaattcatcaaaatcaatagtcttagctgcctgttctgctaatctgctgataatttcctgcaaatcaccaatttcttctgcggttaccaatcccaaatgtctgctttcaaaattgcaatcatccatatgaggcaaataaccgactaatttaacacctgtttccaactcaattacttctttataaaacttatagctcatagcagtgacattattaagtattgcgcctcgtacattcgcgtcaggtctgaattctttaaaaccttttattaaagctgccaaagacaaagctgcaccttttccattgatgactaaaataaccggcgttttagttacatgagctaaatcataagcactgcactgctctgttttacccataccatcataaaatcccatagcgccttcaagtacggctatatcacaatcacaagcattttttgccagcaaatgctttgttgtttccctgcctaacataaataaatccaaattacgtgatttagctccaattacgcgcgaatgaaacattggatctatatagtcgggcccagatttaaaggcggcaactttgtactcctgatcaagcaaagttttcagcaacgcacatactacagtagtttttccactgccactattaggggcagcgatcatgaaacgaggcaaaaacatttcagacattttactcaccctttttcaacgcagtcattatataaacagggttttggcccatcatcaaattatattcccctaattttttaccacgggcagcaaaaacattaacaatttctaactcatactctgaacgggttttataatattcaacaacttctattagtgtttctattgtaattgcattgataacaacccggcagtcagaattttttgtataaatagtatcaagcattttgcataaattaccgccgctgccgccaataaatacgcagtcaggagcaggcatatcaacaatttgttccgaagcttctccggcaacaatattcaaattatccacagcaaataacgctttatttttctcaagtaattccaatgccaaagggttacgttcaaatgcccatacactgccagcctgcgcccgtaatgccaattctatcgaacaagaacctgttccagcaccaatatcataaatattatccgtaacttttggcattaatttggaaattgaaacagccctcacctcttgtttcgtcattggaactttactgcgaataaaaagatcatcatttaagccgtggacagtatatttaaaatcattagcgtgttcattcaaaatcatcatcacagacaaagaaggaaattccaatttactgatttctgccgccgtaccataagttattttttcttctggataagaaagattttcaccaacatatacctttacatctgccatgccatgatcacaaagtttcaggcatagctgattaggagaatgctcgcctcctgtaagtgaaaatactttactgttttgcgctactgcagcaattagattttgatttctgccatgcatactgacaattttagcatcatcccaagcgatatttaattgttgagaaaaataaaccaagctgctgataccacaatatcttcggcattcacaatcagcaagtttaccagtaatcgtcttggctaaactaaaaaagccgacatcaccagagactaacactgctacaacatctttttcagcatcagctttttgacatatttcagcaatttctgatggttttatggtgtcaaaaagatgtttccctgctccaaaagcaacaagcatccttttatcgcctatcaaaatattactttcttcaatagcccggcgagcctgatttgttaaaagctctggattgcctggcccaatgccgacgatatttacacgtaacatattaaatctccttttatatttttacttaccactaccatatcgatctttcagcaactttactatctcactataaccagttccaaactctttgccattgcgtgcaatgactattaatttagcgcctgctttggcagcagcctgtgccttctcctcaaagccgccaatactaccagaatcttttgtaactaaatatctgctgttatactttctcatcatctctatattaagcaattcagaaaaaggcccctgcatgcaaatgatattagcgggcttataaccaagctctaacgctttacttaatgaatccagcataggcaacactcttagcgcaatacgctctttataatcaggaacagaagtaaactcctgcaatgttttactgcctgtagtcagaaatatattaccttccgtatggctcaataattcaacagcttcattaaaatcttgaactataatacagttttcatgttcttcagcagcaggtctcaccaacctcaaatattcacagccggtttcttcacaggccttttgtactgttgacgtaactatcgtagcatatggatgagtcgcatcaatcacacaatccggtttatttactgtaataaaattccgcattgcagacaaatccatacgctccaccattacatgaagattagtttgtgcttcaatcagacttgcaccataatcagttgccacagaaacataaagaattatatcaagttcagccataaacttaatcagattacggctttcactggttccgccaatcagccaaactaccggtttcattacagtttataacctctcggagttactaatttaccattaataacttctgtttgcgaattgccgatgataacagtagaaaacatatctacttctctatcacgcaattcctgtaaagtagtgatttcataattttcaccatcacgcccaatgttgcgcacaatgcccgccggaacatcaggacgttgatttttcagcatgatatcacaagctttctgtagataatcatgacgtttaaaactggatggattgtataaacaaatacagaaatctgcctgtgaagcacaatctaagcgcttttcaattttttcccatggggtaagcagatcgcttaaagaaatcaggcaaaaatcactgataagcggagctcctaaaacagcagcgcctgaacaagcagctgtaataccaggaacaacttcaatttccaattctggatgttctgctgctacttgatacataatccctgccatgccataaaccccggcatcaccactggaaatcatcgctacggttttgccttttaacgcttcttctatagcaagcttgcaacgatctacctctttacgcataccagtagtcaaaaattccttgcctgtaaaatcatttttaataagatcgatatatacatgataacctgcaataacatcacaactttccaaagcagctttagctctttgggtcatttgttcgataccacctggtccaagaccgacaacataaactttttgcgtcatattaattctccttcaaacatacattcaagataatttttcaaagtcaagtacaatatcggcttcagcaacagctaatgttactccattcaaactgcattttgatgaaattatactgccgttattggccgccaatactgctgaacgctcgcaaacattacttacgcctacaactgatttcacaaaatcagaactactgaattcacctgctgcattttgtaattcttcagcagtaaaaaaactaatttcccaattatatttagctgcgaaattcaacaggccagcctcatctttttttaaatcaacagatgccacaccaacgatagtacgtaagtctataccaagttctttcagttttggtaaaactaaagtttctatactttctaacgttgttccgcgacgacagccgattcccaaataaatatttctgggccaaagctgaaccgttaaatcaaaaggattcacatttctattttttgtaatagccaaacctgtaacccctttgtctttaagaacaatctggcgtggtaaggcactaataattggataatcggtaaaaagtccaacttcctgtccatctactaacgcagcggcaaaatctttcgctgctttcatactgttaataatcatattattgcgtgccgcccactcgtctacagcaaaaagcttattcacatctgtagctgtagtaactacgggagtagcttttattactttcgctaagacttttgcaaatccattagcaccgccaatatgacctgataataatggtataacgaagtttccgccttcgtctacagacaatacagcaggatcaactaatttattctttatatacggagctatcgtcctcactgcaattcctaccgctccaacaaatacaatcagctggcactccttaaacgcatactcacaagctttattatgatcgtccatcgcttccaaaaatattttttcttcagcaaattttggcatagttaaacatcgcacttcaaaatcaaacttttgcagtgcttcaccaatatttatacttagcattgctccacgtctggtaaaggagtatactacagccttcattttattttacctctggctttaaatccaatttgctgggatcagcagcacgatatccatgtgcaaaagtaggattatagagttcgctgcggtcataaatattgcctaaaaagtttcctactgtaatcaaagctgttttagtaatattatgttctttcgcagtttctgccaaagttcctactgtgcaacggcatactttctcatcaggccatgaggctttataaacaatagcagccggagtatcagcagtgtagccgcctgcaatcaattccttctgcaatttttctaacataccgctggaaagaaaaataaccattgttgctttatgagctgcataatcagcgattttttgcttattaggtaccggtgtacgtccttccatacgggtaataataacagattgactaacattaggcaaagtatactctgcatctaaacaggcagccgccgcacagaaagaacttacacccggaacaatttcaaaatcaagattataactgcgcaaaagatctatctgttcacgatgagcaccataaacacttgggtcaccagtatgcaaacgcacaaccaatttaccggcctgtgctgccggaaccatagctacaatgacctcttccaaagtcattttagcactgtccataataatgcattccggttttgcatagttcaaaagctccggattaaccaatgaaccggcataaataataagatcagccttttccaaaagttctttacctttaacagtaattaaatcagcggcaccaggccctgcaccaataaaataaatcattatttgtcaaactccttttctttaaccaagattacagaaaaatagctgctgttaggatcaatctcattaagatcacggtacactttttctcccggtaaaccacagcgttcaaccatggctgcattcttaatcaacccgcgttcttttaattcgtcacgtactctggcaatttcactggcagatttcattaataccttattaccaggtccatcaagaaatttagatgcttctttataactgccaggcagcacaataagcggttctgccctttcacataaagacacattcagctttgccgcgacagcacaaatagaagttacacctgcaaccaattcggcatcatagccagcttttaaaacaagcttatgcacataaatgcaggttgcgtatactgtaggacaaccaagagtaatgaaaacaacatttttgccttcatcaagcaattttattacagcatcggcgccctcctgatgagctttatccattactgccatatcttttgtcatcggcatataaataataagctgttcttttttatcaagatcaactacctgattgacaatatttttagcagtcatgacatcggtatcacctttaggcaaagcaacaacgtcacattctttgagcagacgcactgcttttaaagtcaataattccgggtcccccggtccgatacctacactgtacaatttacctctcatgtttttcatccttcctgtttgtcctttaaatgtaatttaattagttcgtcagcagctgctgtttttcctaaaataccatatacgttagaaaacatcagtgctgccgtttttattttaccatgcacgcgatgctgcatgtaaaaatcaatacgttcagtaacaccacttattacttcttcaaaaataccttcacgctgcaaaatcttcactacttcatctgtagtcggacaatcgataatttctttaccaacttccactttagcaccggtaagcagtgccaaaagagccattaactctgtgcggcaatcagcatattttgaatgggtattcatcacaccttgccccagttttaccagctttcctgaatggcctattaacagcaaggtctcaaaacccttataaaccgcataatctaaaagttccccaacaaaattactacaggtcacggcatcatcaatattaaatcccaatgtatcacgagtaaaatctgcaccataattgccaaaaaacaccagcaaatttttatttccagacgctgcctgtgcatcaatttccacatacattgtttctatcaaagctttttcactcattggttcaacaataccactggttcctaaaatagaaatgccacctaaaatacctaaacgtggattgaaagttttcttggcaatttcaacgccttcaggagctgaaattgtaactcttaaaccctgttcatatcctgcagacttcattactttttcaagttcgtaaacaatcattttccgcggcgtcggattaatggcaggtccatcaacagtacaggccaatcctggtttagttacatagccaatgccaataccgcctaataaatttatccccttttctgctgttttttctacagtagcataaatcaatataccattcgtatcatcggggtcatcgccactatctttacgaatagcgcatgttacgctcatttcagtaataacagcctcttctggttctaagttaagtataatacctttgggagtatctatctgaacaaaatcaacacgtttacccgtcaaaagcatcactgctgcagctttggctgctgcagttgcacaacttccagttgtatagccacaccgcaaacgtttcccttgggaaatctgatattcttccatacgtcaacccctttctgaacaaacatcttgctaaacacattctgtcatctagtattttttactaataattagaaaagacttctgccgtttccgacagaagtcatcaagatacaagcatacgcctaccgttaaaggttaagccagcttactatctccatcactcgtggatacagcttctacacataggcaggcatctgacttaaacgccgcagcgtcattacagtggcgggaccgtgtcggatttacaccgttcttgccatttacgccctcacgggcacctaataatatcaaattaccgtattattatagcatagaatccacaaaaaaccaatggagattcttattaagtttttatttatctcagtctaaatgtaataggcacatacgtataacaacgtatcttttgtccaacaccattttttgcaccgctaaaacgccagttatagcatgcttcaactgcagcatcatctaaagcggcattaccggaagattctgcaacagcaacggattcaacctcaccttcatatcctactaaaatacgaactgtagttgtaccttcaatactcgcacttctggcactgcttggataattaggctgacggcttctcagcaaacgtggaggaatagcagggtttgccgaaggatcaccacctgcatagccgccgccatctccagtacccactccagcacctgtgccgtcacctataccagtgcccacgccagcaccatgtccgccgcctgttccagttccactgccagaaccgctgccgcttccataaccacttccttgaccagttccataacctccgccgctgccagtattttcttttacgtcagcaccagcaatattcttgctctgtgttactgcttcctcagatattttttcgttaacttgagtattctgctgttgttcgtacaactgctctcgacgagtagttttttcaattatatcatcagtatttattgggtcggatttttttatctgctgttgttgctgcgaagcactctgctgtttattttgcaaggcattcgccttcgctgctgccaaatctgcttctgtagcatcggctggttttacaccgccgccgcctccgcctccgccaccaccgcctccgccaaaaactgcaatttcgacgattttatcatcaacatgattagcagagaatagaccggcaaacgccaaaacaagaaatacaaataaatgaaatcctaatgagccaataaaacctatttggaacctctttttggagtcatccatcatttaccagctcccacatctgttgctaaaccaaatctttgaacacctgcgcctttcaatctgtcaagtaaagttatgactttaccataatctgcatctttgtctgccctaataacgattgaaaaacgaggattgtttttctgttccatttttgcctgcatagttaaactggaaatgtcagtctgtttatcaccaagccaaatgctgccatccttttttacagaaacagcaaaggttgtctgagtatcaactgctgaatattccgctttaggcagctttataggaattgtttttaaatcaaccatatacatcgtactaagcataaaaaataccagcaaaaaaaacataatatcgatcatcggtattatcatcagctcaggttgtttaaggcttctgctatcacgcagtttcattagatgtcacctctgctttcagcctccagcaaagccgaaaagcattgttccatattagttatggaagtatccagacgctgagcaaaataagaatgcgcgcataatgctaaaatggccacacacaaaccgctggcagttgcaattaaggcttcaccaataccaccagtaattgccatcggctgaccttcctgcaagttaaaaatactaaaagaaccgatcataccaataattgtccctaataatccaagtaatggtgacattgtaacgataacgccaagataatgcagccgattacgcaattttgcaattacaagacctgcctgagattccatgtaggcggaataccttgcacaatcaccagacatagccattgtttcacagagaatacgtgcacactcacctgtagctgcagctgctaactgtgccgcacctgttacatcacctttaccaattaaagtacaaaattcctgagtaaataacgaaccagaatcagcagttttataatacaaataccgctctatggctatagtaactactattattgaacacaataacagtggccacattaccagcccgcctttatgaaaatactcgatagcttccttaattgcttccatcaaaaatgcctcctaaaatttttatattattaataataccaaatttaataaagtttgccaatgctaactcgccaaacaatttactatttttctatattatctcccctaaaataaaaaacctttccacaaaacagaaaggccatacctaatttcatactacctgttcctgtcactcgctggattaaagtagaaaaatctaggcagttcttctgactctgtttcatcgcttaccccgccttcccagtttcccagtggcaataagtgaagttcgctcaacattacagcggcgtgaccgtattggctttcaaccaatttttctattaagtattcacacctagatttccgcttattaagttttattactgataggcattatatcacgttaaattaatgtttgcaataaaaactataatatattcaacactaaatattttaaaaacatcgctctactcctcttttttcattttcagcaaatgacaggcatagctaaaaaatatgaaaaagtatgcaaacataataacaggccaataccactctattggcattttatttgcagatgctctcaacgcactgctggcaggagtaagtggtaagatacttaaaaagccttttattactgtaggaaaactatcagccttaaaaaatgtaccacataaaaaagacattggcaccaaaacataagtactaaagctactcatctcttcatggctgtcaatagtcattgccgcaacgacagctaacgacgcaaaaacaaaacagttaagaatcaatataggtataaaccagtcgcctaaatacaaatgcacccctaataattcagcaataatcactataactgccgaagaaatcaatccacgtaccgtacctgataaaatcttaccgaaaacaaatgcagctcctgaaattggggaaatcaagtatgtttcaagcgtatgatgatagatacgtgacatattcaaaggcgcagctatggtattaaaagaaatattcattgaattaagcgcaatcataccaggaataagaaaattcaaataacttccgccatcaactgatacattcttacctaatccaatgccaaatgcaaaaatatacagaaaaggagtaatcatccttgagcacaaaaatttaaagaatattttcttaaaaaccacccaatcacgccagaaaacggtataaacgtcatagaaaaaattactaatcattgacccgcctcccagttaattcaataaatacgtcttctaaatttgcatcacgtactattgcatttgttttcaacgctgtcacataagaagcggcctgctcacgactatcaaaaaatttattaatcattccctctgattccatatgttcaacaacaaccctgccaactttttctttaagcttttgcggggtatcgacagctacaaggcgccctttattcataacagcaacgcgttcacataaatgatcagcctcttctatatagtgagtagttaaaagtaccgtcattccatcttcgttcattttacgaatcagatcccacattttccgccgtacttgcgggtctaatcctacagtaggttcatctaaaaataaaattttaggtttatgtaaaagtgccataccaatcatcaaacgccgcttcatacctccagaatactttcgggatttatcatcggctctgtcggcaagttcaacaaaatctaaaatttcattaattctctgtttcataccctctttgtctttcaaatgatgcagtcttgcctgtaaaatcaaattttctctgcctgtcaaatcctgatccaaactcatatgctgtggcacaacgccgataagttccttaatcttctcgctgtcttcttcgatatcatatccacatatccttacagatcctgaattttttttcgaaagtaacgtcattatccttactgtagtagtctttcctgctccattcggccctaaaaggccaaatatttcgccgcttttaatttctaaatctatgccagcaacagcaatacgctcgtcaaaacgttttgttaaattttctatattaatcatcagatcacctatttgtcatcaatatatttttgggcattatataaattataatacaaacctcccattgacatcaaggtagaatgtgtcccaatttctgcaacttcaccattatttaagactattattttatctgcattttttattgttgacattcgatgagcaataataagggtggttctattctcagctaacctgtccaatgattcctgaattagcttttcagtatgattatctaaagaagaagtagcttcatctaaaattacaataggaggattttttaaaaagactcgggcaattgcaagacgctgtttttgcccacctgaaagcttaacaccacgttctccaatttcagtatcatacttatctggaagttcctggataaatctgtcagctgcggccattcttgctgctttttctacttctttttgcccagcttccggttttgcatatgcaatattatgtgttacagaatctgaaaataaaaaaacatcctgctgcacaattcctatattacggcgcaattcctgctgtttatactgacgtatatcaataccatcaattagaattttaccgcttagaggctcgtaaaatcttagtaacaggcttgctatagtcgtcttacccgctccggtctctcccacaaatgcaacagtttgacccggagttatttttaaattaaatcctttaatcactttcctctgttcagaatacccaaaaactaaattatcaaattctatctcaccacgtatttgtacacagtcaatagcatttttattatcaataatttcaggttgcatctccattatttcataaaatctctgaaatcccgccattccacgctgatacatttctgtaaaaacagtcaggcgtaaaagaggtttcataaataaattgacatataacaagaaagcaacaaaatcacttaatgacaatttatcttttgcaatcagcaagccaccgcaagccagaattaataaattagtaatattagtaaaaaaattaacactccctgaaaaatatgccagaattttataagactttcgccgtgtttctaaaaaatctaaacttttttccataaatcttgccagttcatattcttcttgcgcaaaagcttttactaacctaatacctcctaaactttcttcagccctggctgttatttcaccactttttattctattatctctaaaggccgctttcatttttttattcacatatactgtgtgcagagtcttagtaattaataaaagtgcaatcagaattcccagatagacattcatccaaaacagaattccaatcgtaccaaccatagtgatacaacaaacaataacgtcatttggtcctctaaaagataattctcctatttcggctatatcactagttaatcttgataaaagctgcccagttttagcgttatcaaaatacctaaacgacattttctgaaaatgctcaaataaatctctccgcatatcgttctctatttttgcactcatcaagtgtccataataattgacaatatataataacccatagttgcctaaatataaaataaataataccccactatcttgcagcaatctatttatatttttttgcggcaacacttcatttagtatctgtctcaccatcattggaaaaatcaaatccaataatgcagcaacaagagaaccgataacaacaccatacaatatccttttatatggtttataataatgcaaaaagttataaatcataaaatccctctttattctcaacgatgccaaatatgcagtttatatgcaccaattatttttccatcaggagttacggccggagcttctataccagcaacatttcttccattagtgcttattgccactgcctgtaacggaccagcagtatgaaagaaatttaattctgctccatcatttaaatcaattacaacagcaccatgagcagcgtaattatgggttctgacattacgtccaacggcacaagcagctatattaccagaaaaatcaatctgctccattgtccccaaagccttatatttatacttaaacgttccatcataattaaatacaaacatactattattgctgggatgctcaacaggagtaggtaactgccagttttctctattgaacgtgttgatcgttgtaaaaataacgcctgcgtcaacggcaaacccatcacgaccagaagcattaatccaagcatcatctatctgtgtaggctttgaaagctcacgctgccacaaaacttttcccgaaccgtcaaaaagcaaaccccttccgtcgctgcaggatgctgctaaaaattctccattcgcagaaaaattgggactgccgcgcataacagtattctcaaatggagcaacaggcagcacatcgacagaattaatcaactgccctgtctctttatttatcaagtacattgtatcacgatatttcatatcaggcctgatttcataagccgaagtcgacaatacaacttttccgttattgtcatttacatcgcaccagttaatccagctgtcaatattttcattttgaggaaattgccaaagctgatcaccatttttattaaaagaaacagctttaccattatagccgcggcttccgtctttggctgtaacaaatctgtaagcgttcgcataaacattatcattttgatcaatacaaatatggacaatacttggataggaacgttttgcaggctcagcgccaacaacattcgccgcagcaaacttccatagtatatcgccgccggcaatatcaattgcatataaattccccgatgggctctgctcacctataaaagcaattttctcgtcatgcgacacacacattgataccagttttccaattcctaaagaacgtttccaaatctgcttaccatcattgtcaaataaaaacaattcacccctatcagttcccaccaaccaggcgttttcattgtcaatatattcgatcaaacctttggtaaaacccatccgatcataattttcacttggtatatcgcctaaaaaaacgcttacttcatcacctctgtctgaagaagagaaagtctgccatggagtacggctaccagttatccaaaacatcagacaccaggaaattattaatataccaattgtaatacagccttttattctgctcataaatataatttcgtccaatcataaactattcgtaaattgccaaaatacataccttgttctgaaagtaaatatgctattttactaaaagctataccaagagtaaaaacagtcagtatgatgcaggccaatttttctttattccgccataactcgttctttcgtgcggcagatagaaaaaagcctctgctgacaacagaaagcgccaatgtctgcgctcttcgtaaacagcgcgctaataaaggtttggctatatatggtaaatgtctgacaacgctctttcttccgacctgtgtatcagagcgtaaacgtaaagcaataataacctctcctgcttcagcagccagaacaggcagaaaacgaatcgctgtcacaagcataaatgctatctgtggcgataatctccaggccataagtgcttttaacagttgacgcgggtctgaagtccaacagacaaacagtcctaacgccaacatcgtcgctgatctcaatccctgtacggcaccataaacaactccttcacgatacacatataatcctcctgtaattgatcctaaaacaggtactgttggttcaatcaaaacaaataacggcgttcttggagtctgagcaaaaaataatgcctgactaaacatagatccccataaacccaatagtaacaaaattgctaatacctgccatttataaacagacgtacgagcgaacaaatgcagtaataaagtcgcagtgaacagcaagaataatgttcttggattatcaacaactatagccaatacggcaactaaaaataaaccaagcaatttagttcttccgtccaatctctgcgcccagactgcagcgtcacagccttcccacaactgccttactgacataacgcccaaccccctccacagtaatacattccggtaatagcaaggcttctgccacatcaagcaacggtgggactatcagcccgccttcttttaaaagcactctatcggcaagtactatctccggaactccgtcagcaataatcattccatcagccataacaattaccctgtcagctatttctgaagccaattctatatcatgagtacaaaataaaatacatccgtgattttcggcaaaatcattaatcaaattttttatttcttctaagctctgctgatcctgcccagtggtaggttcatctaaaagtaacaatttaggttctctggccaacaacgctcctaagacaacccttaaccgctgtcctttactaagtgctaacgggaaatcattaacattattttctaactttaacttatttaataaatcccacaaatatttttcagaccttttagtatttttccaagtcagttcttcccatacactatcagctaaaagcattaaatctggttcctggcgcaaataacctatctcatgcgcatgttcagctacagtaccttgtaaaatttttaaacaaccggatgtaacataagtcaatccacctaataaatttactaaagtacttttacctgcaccattaaatcccataagtgctattctttcacctttataaaattcaaaatttaaaccatgtaaggtattgcttttagcgcctggataacgatatataatattttctccttttacaacacattcctgacttcttttttccctaacagtaaaattttgtttattgtcgatatcacattcattatttattaactctattatttttttcgtatcatcagcaaattcagtcaagttaagataccggcataattttattctctgaggttcccttaatccaaatttctccgcatgaccaatcttttcccaggccatttccgttggtccatcataaataaattcaccatcaaacattaccgctaaacgcgggaagtatcttgctaattcatttacacgatgttctacaacaataatcgtaatttcatcttctctattaagagaaaccaataaatttaaaaaatcctcgactccctgcggattcatttgactcacaggttcatcaagcaccagcagtttaggcttagttataagaacggaagccagcgccagcctttgcctctgaccacctgaaagagtatgaatactatttttttcaaatccctttagacctacacgctgtaaaactctgcttacttcttcattaacaatagtttcctctattccctgattttcaagagcaaaaccaacttcgtcagctacagtcattgcaaaaagctgatcgtcaggtgattgataaacggttcctacaagtattcctatttcttccggtttcataaaagcagtatcgttgccatcaagatatatcttcccgtacaattcacctgcacctgctgtatttaaaagtccgctcaccgctttaataagtgttgatttaccacaaccactgcgtcctgccaaaagtaacatctctcccttagcaacgtgtaaacacacatgttttaaagtagcgtcctcacgcaccttataacgatatgaaacgtcctctattatcagcatatcattcacccataacctgttgtaatttaataccaactttatagcccagccatgttccgacactactgtacaccaaaccatttataagcatataaagacctatataccaatctgcataatataaacggtaaaaaaacatcaactgttctaaatttatcatcgttataaatgcatcagccataccaatagctaaggaaacaaacagaacatagcctgaagttaaatctcttttattgtagaacccacttatatacaacacactttccaaaacgacaatatacaccatataactaaggattcctaatggtgtaaaacgtccaaacattaaccctgccaacatccattttactaaaaacatcaatgtaactataccaggtttacgataaatcacaagcagtgccataaccaataaatataacaaaatgccatttaatacaccagtaaccaaccctgaaaaaggccctaaaacaacatgcagcacatcccccagtaatgttgttggtacaacgatacttccaaatgctacagctgcaaataatgcaatagtaatagcacccttagcaccaatattaaaaatacacttttttaaattttgtgcatttaaacatacaatcaaaaaacaaagaaatgaaaatccaacagcaaataaccccatactacgttttttggcaattgttatgggtacttcctggattttttcctgaccattaccaaatacagttacacgtaaattatattctccttccactgctctaaaataatctacgtacaacggcaaaataaaagtctggcttttcttcccgtctaatgaaatcatagccgtagaagcatcttctatccctgattgaccagcccaaccatgctccgtttcattatcgctctgactggaagtacacaatcctatagctggttttccggtaagcttattaatcaattctgctttaaacttcaatatcctcgtatcctgctgagggttgcgcatttccaacaaaagatgtgcagccggatgattaaacactgccgaccaatttgttgctccatcgccagtcattctattgcggaaagattccaaagctgtatccctgatatatatagttccatcctttactctgtcatctttggtgccaaagttgtctacaggcaaagtaatggactgaatataccaattatatttacttttatcgggcattaaagactgctcatttataagcactggtaaattactttttgtttcattttcgtgggtgaaagtaataatactattcttctgccaattttcactactcactttaactataatctcatgattacctgcagcgagactgttgtcggcttttaaataaattaaatcaaaattctgcccataatccggaggcaatatccactctctttgaataacagaacctgcttcagattttatttcctgccaaagctcatctccaataaaaatcaaaccctgcggcagcataatctcaactttcacattctgcggctcagggctatcaaagctttcaatatttataaacaaaggattagtagcattaccattagttcggttaatatttttatgctctaaactataaggaaaaaccgcttccaaatttatgccgcctgccaaaaccgtctgacataatgcaaaaaaacataacaataaacttatagaaaaaatttttaacatatactacctttgcaacagatgagttcaagcaattctttatcacgctgacatcttccgttatcttctttcgtgcttatttcaattatttcattggtattatggctcctaataactctcacaggagcattatatgctttactcaaaattttctctgtaaaaacattatcaggtctgccatcagcaattaccgtaccttctcccagtaaaataattctgctacaatattttgctgctaaatttaattcatgtacaaccatcaaaattgtctttcccatttttgccaaagctttgctgaaacgaaaaatttcttcctgataaaccatatccaagccagttgttggctcatccaaaaataaaataggagtctgctgcgctaaaaccttagctaataaaatacgttgtttttgaccaccagaaacttcattgacaggtctttctgccaattcttttgttcctgtatattccatacattttaaagccaattcttcgtcagagatactttcacctttccaccatttcatataagggtatctaccggcaagcacaatatctttacctgtataaccaaatccaacttctacattttgctgcagataagcaacctcgcgggcaagttctttttcagaaaagctttccaactttctcccaaaatacaaaatctcaccgctttgctttggcagcaaaccgcggatcgttttcagcagtgtgcttttaccagcgccattacaaccaataataccgacaatctcacctttatttatctttgcatttacgtcttgcagcacacttttattgccgtaaccaattgataaattttttagttcaatgatagtctccgtcataacagcctcctgattttatataactattttacgataaatttatgttaaaagtaaatctcttctattttccaaattaaaagttacattaaagctactatctgaaattaagttatataggcggctctaaacgccgcctataatattttagaatttataattatagctcagtaagaaattgaaaggcgtagaatagtattctgagccactatgacttaaattgtcttctctattgagcaaattatccagtgttagcgaaatagaactttgtttatcagcattataagtagttgtcagacttgtgaggaaataaggtttttcactaaccgaatggtcactgctaggagttccaaccctttgagctaaataagttccttgtaaacttgttatccatttatcttttgtataattaatgccaccattcatttgccatctgccatattttctgtcccaatagggctttttacttcccttaactttaggatcaccataatttattccccaattataagtaaatccatctttaccaataatatcacaagttatttccacacctgtatttttaaaatcttcattagtatatttatattctgtttttgtaccatcccaggttgcagtaatattatctgtgatatcaatatgataaatggcagctttccaactatgattgttattaaccctcttccagcccaattcataattagttcctttttgcggcttcaaatcaggatttgagacagcactgtcactagcaccatacatttgtgaaaaagtaggcattataaatgattgtccaacactagcatacaaagaatcattttctgttaacttatgtaaatactgaccagacatactaaaattatcataattctggtctttataaccaccagtagtccatgtttcgcgtgccccaaaaataaattcatttttttcatcaaatttgtaatcatattgcccataaacagcataaatatttcttgacgttacttgattaggagatttatggccgtctttaccgtaatcatcataaaactcattttgataactacttcctaaaatcaaattagttttatttccaaactcccattttttttgtatatcggctccataagtacgatttttctcatctgtatcatacattttcccagaataagcaccacttgttgtgtaattagtatatccatctgccattaatttattctggttataatacaaattacccttaacactgtcatcttgatatgtcacctgcattaaattttgctttgttacatattctctattctgttgtaatgcaccgcttttaggaacgcttttatacccatcatcaaaccaagtatcatattttacatttgtttcaaaataattatataaaaaattccagttatcattaattttatagtttaaaaataaattatttttatgagaactggtcatatctgtatgtttgtcacctttatcatgtgaacgtgaaattgtatctacctttccccatttttctaaattataaccaacgcttaatttatcagcactaacagtagcattgtatttttgttgtccgtaattaccaactccagcagttactgaatttttaaaaccttgtttagttataatattaataacaccgcccatagcttcactaccataaagtacggatcctccaccttttactatctcaacttttgcaatgctatctataggtatagcatctaaaaaatatttccctctcaaattcataggagatccattcagcataatcaaagtaccattgcttacacctctaatagctatttcattagccattgtccccatagcaccaccaccaggtgcaaatgttttgtaaatcaatccaggtacacgccccaaagcaacctgcaaattctgagcacctgttgctttcaaatcttcactagtcaggattgttgttgatgcagggacatcaacatctcttttttctgtcctcgttgctgttactaccattggatctaacgtaaatacttgatttggttcttccgcgtgtactgtgtaccccccccagatgacattgccagttaccaatgctaccatcaaagcactcttacccatactcttttccaacatactcgacttcctttcagaactttttatatttattgaaataaaagcaccttctatacccattctttaatggccgtataatatttacttttatttgcaatcggctggtaaaaataaaaatgcctcctgctgaaggcaaaaggcataaaacagcttgactacaatagaaaaaccgctacattaccatactgtctcacgcagtagtaacgaaatcatcaggcagttcttctgacttaggttcaacgtgtttatctaagccttcccagatacatttccagtggcataagtttagattcactcaccattacagcgacgggatcgtgtgggatttacacccaacttctctattaagaccagcgtcacctgatttacgaaatatttaatttaattaagtataatataaatccatttatttttcaatatacactatcaaattcatatcatatcttattagggtaatgtttttgtatccataaaaatattattggtataacaatcaatgtaaaaacagttgacgttatcattcccccaattatgacccatgccatactaacacgagtttctgatccttctgtcatcgcaagagctgtaggcagcataccaaccaccattgttaaagctgtcataaaaattggttttaatctaacctttcccgcctctataacagcctccagtgcattctttccttgatgcatcaaagttaacgtataatctagcaaaagcgtgccatttttcgcaaccagaccatccattactaaaataccaatcagcgaatacaaattgatcgtattaccagtcagcaataaacaaacaattgccccgataatgcctaatggcagtgaaaacatccttatcagcggagtaaaaatagactcatataatactgctaataataagtatataagtaaaagtgacattgataatgccattgccatttctttaaaagaatcattcatgctcgtcgcctggccggtaaattcgtaggtgcattgtaaatcgctctgctccagtttactctttaattcctgcagaacttcatttaatggtctatctgttaaattactctgaatatttattatacgttctttattgacgcgcctgatggttataggtccgatactctcttctacatttgctatatcacccaaatatacatttccattttcagcaggaactggtatgctttttatatcatttataaaaaatccgtcactgccgctgaattttacagtaatatctgtatcatgtcctcgattatttggatcgttagccaatacatcagcatttttaccagatactgctgcagaaaaagactttatcacattggcaagagttgtcccgtaaaactttagcttatcgcggtctgctgtaactttaagttctgggacaccttctgtataagagctttttatatctttaatacctgcagtttcctggaaaattttctgtaccttttcagactcttttatcagtaaactcatatcactgccttttaactctatttgaataggtgatctgaccaatgttttaccaccagaaacaccggtcaccgaagactgtatttcattgacacgtacttttacatcaccaagattggttttagcaaaagtgcgtatgtcatcggcaatttgccaaacatctttgcttctttctcttctattatacaaactgattgatattttaccattactttctgtagtagtgacattagataaatggtgttctatttcaggaatatttaacaggtaatcatcaaataacaataatacctcattagtttgttcagcattgtagcctattggcaattcgatatttacctgaatagcgctttcatcagttcgaggcatatattccgaaccaactattcccatagggacaagcagaacagcaacaataaaaaatatccctactgttaccaaaacttttttaggatgcaacaaacacttcttcaatattttttcataagtgacaatagtgtttatttctgctttatctaaaaaatcccatattttccctttaggtaattttatacctctggcataaaatttagaagccatcatcggcgttagagtaaaagatacaattaaagacatcagcgttgcaaaaacaatagtcaaaccaaattgcttaaaaaattgtcctgtagaactctccatgaatgctataggcaaaaatactactatgtcacataaagtcattgctatagctgccatacctatctcattacgtcctaattcagcagcttcgtcagctggataaccttcgtctatataacgatgtatattttccaataccactatagaatcatcaactaaaataccaatacacaatgccatccccattaaagacatcatattaaaagtaaagccagacaagtacatcagaaaaaaagtagcgatcagagaaacaggaattgctatcataacagcagcagaagatttccaaccacgaaggaacaaatataataccaaacctgtagtaaataatccttccatcagagtatagaaagtattcttcaacgaatttctgacaaaatcggactgatcataaactacagtaaaaatataatcaggatattcaatttttaacttttccaattgaagcaatacactatcggcagcatcaacaatattcgcaccgcttgctttataaacttcaatagccacagcgtcattaccatcaacacggctatatgtaacagcacgcttatcacgtgcctgaactgtcgctacatcttgtaattctatgtatagtccattagctgccttgatctgaatagttccaatttcctcagcagataagtactgagcatttaacctaaccgtcgtttgttttacgtcagaataaacagaaccagatgaaaccaaaacattttcatcttttatagcctgaataatatcttttaaagttaaaccataataatttaaacgctctttatctacgtctacagcaatttctttttcacgcccaccacttaattctatatcagcaacaccagcagcttgctgtaaccgttcagaaaaagtgttctctgccatagaataaatatcagacgcgtcaaagggtgcagtaactgctatttccataataggatattcatcagatgaacgtttaataaccacaggttcgtcaatatcatccggtaattctttacgaatagaactaacctttttagttgcttctatagcaactaaatcagcatccgcattactgtcaagctcaacaaaaatttcagcacgtccaggtcttgtagctgaacgtacttgtttaaaatgagaaatagaagataagacatcttctattggttttgttacctgctgttcaacagactctgtacttgctccaggataactgacgatgacacttatgtagggggaatcaacttccggtaataattctactccaatcctgaaaaaactaaaaatacccaacacaacaattagagcaaaaatcattgaaatgccaataggcctctttatggaaaatctggtgatattcatatactaccacccttttcattttctatattgacctccaagccatgacgcaggcgagataaattatcaacggcgatcatttcaccatcattaagtccaccgactatttccacatcagaatcattacgaagtcccaatttaacttcacgctgttctaattttttatcagcatttacaataaaaatatatttttttccatttttatctaccacaacatctttatttacacaaagcacagaatccttctgtaaaaatttcaattcacttctggcaaacatacctgcttttatacttgcatcatttgccaacaatttaattctagcactataagttctgtcattcacgtctttatttggacttacaaaaataatctctccaggaaaactttttcccagtgcttctatttctgcatttatcatattacctgttgcaagtactgcagcatcatattcagatatagaacagtctatataaaaactgctattatcagtaatagtcaataatttggttcctgcctggacataacttccaacttctgcattacgataactgataataccggatctaggagcttttaaaaccatatcagatttcttatttctcagcaaaacaaattcctgatatcttctttgtgctacctgttctttagcataaagagatgccggaacaccatcatacagtttctggtctgctaaagactcataagctgcctgagcattcaccataacctgtttaatcttatcgtattctaattttgatacagcacccatttcatgcagctttttataacgttcaaaattaatctgcgctaattcataatcagctttatatttataataatcagcgttatattcggtatcagtttttgatgcagtagcatctgcttcccgatatcttgcctgagctttcaataactcagcatctacatcatgtaattcctgtattattaaaatatcatctttatttacgttactgcctaaatctacatttatttcttctattttaccggcatatttattaataatatctacttgtgcatcagaaacagttttaccgaataatgaaatagttttatacataggacggcgataaataacctctgtgtgaaccagaggctttaaaacttctttctttatagccttttcagaagtaaaaataagcctgcttagaaaaatcaaacttaatcctgccaggcagattatcaacaagcttctgtatttattttcaagaaagaatttctgtattttctgcttcactgtttcatccccactcacaataatttcaatgataagttcatatttttccaaatacaaaccaaatgccaaacaatcacaaatactttcttaatcgttataataggcggcacattgtgccgcctattagttataattttaaaaagaataattgtaggttagtgtccaattgaatggtaatccataattttcataatcgttcacgacatcttttttatctaaaatattatagaaatttaatgctacagaattattcttatctgcactgtattgtaatgtagcattcattatatttctatttggaagagcataatatctattaccactagaagtaacttcatgataatagctatcattcctgtctcctaagaaaagatagtttaatcctgcattaaacttattcttctgatatccaattcctgccacaaattgaagtctggcattgtcctgtacccattcaccagaatcatttatttctggattagaataggtaacaccaagattatatcgccaattatcgccaactaattttgtatattcaacttcaatgcctgtattccgaaaatcgcctttattaatttgtatttcagccttagtattcgtacctatacctaattcttcttcgcttgcccatccaaatttattactgatatccatattaaacacggcaagttttaaagaactcgaattagttatctttttcattccagtttcatacgtccaaccttcttgaggctttaacccacgtgattttttcaagttgtgtgcatctttatctgtcgtatagaattggctgttcattgcaggcataataaatgatttacctatatttgtataccaagtcaaattttcattaaatttatataatgtttgtaattgtggcaaaaatacattttggtctgtatcaaaatcattgatggcttccccacgcaatcccaaagtagcactaaatttaggtgcaaattggtgagtataagacgtataaagtcctaaacttgttctatcagacttttgaaaagtatatttataattttgataaaaatcacgtttaattgcaatacccgcaattaagctatctttatctccattaaaagaccaacccttctgagtatctgatgttatattgaacattttataagatccaccagatactgaaaattctttttcattactctttttttgatttgaagtaaaccagcggctattaaaagaaaatacagattttaatttgttacttgtatcatcataaactaaactagctgtgtcacgattatcgtcatatttatatgatgttcctagcttatcagcagctgctttagaacgagttatctgaaatctattaagatctgattttgaatggttataatttaacgtcaaattcttccctatattacctgtaataaaaatactttcttttctggattttcctaaagtattataattattttttttgcttcctgatgagcttgcatattctccataaggaaatttacgggtttgaggattaacttcatcataataatctttatcataataaactgaaaaatattcattttgatggccaactgaccatttatctgtataattaccaatagttccggatattgttgtttttgcagaaccagaagctttttttgttattatattaattaccccacccatagcttcggccccatacaaagttgcattagagccacgaacaatttctattttctctatgctgtccagtggaatattggatatcgcattataatttaacaaattcatcggagcaccatttactaataccaatgtgcctttatccaaaccacgaatttttgttctactagctgagccaccatattcttgcccattaggaccatatgacattccattaaacccaatttgttgggctaaaagagtatcaacatttactgcaccgctctttttaatttcttctgaagaaattactgttacagcagctggtgtatctaaatcacgcgtttccattctctgcgctgttactaccataggatctaacgtaaatgcttgacttggttcttcagcgtgtactacagtacccccccagatgacattaccagttacaagcgctaccatcaatgcactcttactcgtactctttttcaacatactcaacttcctttcacaactttttatattattgaaataaaagcgtttcctgtacccgttctgtacggccgcacaatactttacttttatttgcaaccagcaaataaaaataccttttgcctaagacaaaaggtatttacagcttaacagaatatataaagctgatagattacctaccgtctcacgcagtagtaaattcaataatcatcaggcagttcttctgactcaagttcatagcgcattcaagccttcccagatattaatccagtggcataaatttgaattagctcactattacagcgacgggatcgtgcgggaattacacccggcttctctattaagacctacgtcacctaatgataatatgcagttataatataaaattatatatgaaaagatttagtttttcaagtaaatatgactattatatgccatttggtttaaacatattttgcttttctgcctatttattattaacagtatcatcagtattcttaacagcctgagtacaaatctccagcatagcttctgcaaacgttttttcaggtacaggtacaagctcaccgttatttattttactttccagcttcgttcctttgctgccataaacctccatttgttttaccccataggttttagatgcaacattgaactgcattaacatttcgcaatactgtactttttctttttttgcaagcttttctgcatatgttttattcattttcttcaacaaatctttatctgtaaaaactgttttcacaaaaacattaactatatttttatctacaactccatttttaacttcttcaaaatgaagcgaatccatatcatatgcataaacacccatattattttctaaaacaatggaccaacgtgctgcttctatctcttcttctgtaggcttaggcatcatactgatttcccaattcattgggttatcagccttattctcttcagcattaactacaaatgaaaataagcacatcatacaaagagctaacaacattattatttttttcataagattacctcccactttaaacatccaaattacgcacaattcgcaaaatatgctcctgcgataaactgcgaaggctataataagttgctcccattgctttggcaacagctttggccacacccagtttaataaaatctgtttcagtatcgataacaacggaggtaattttagccttccgaattttttcagctatttttaaggcacactctaccggatcgccaccgttttcttctatggcattagctctgccatcagttactaaaatcagaatcggttctaactcgctgtcttttttattcaacattcccaaagttaaaagcgaagttgataaaccgtctgctaaaggagttttgccgccagtaggcatttctgccaaacacttttgtgcaagatcaacgctgcgtgttataggcagcaataattcagccttttgcctgcgaaaagcaaccataccaacacgatcacgtttctgatatgcttcctgcagcatatagaaaatagcgccttttacggcccgcatccgttcacgagctcccattgacccactggcatcaactgcaaataaaaatgtattgccaatacgtttttcgcgtactttttgccgtaaatcttcactcttaatattcagggcgcaaccgttatcttcacgcagacgctgaaacggcgcagcagccctgattgtagcatcaaaagccaaatcttccacttttattttcggcatttcagccctaacataacgcccttgtttaagatctgttttagtcgtgctgcgtttgccactgccacgacggacattgcgatctttgcctaaatccagaaccattttaggaagcttaaaatttttatcaatatctgcaatctgctcttccggtgctaactgatttttgtcattgtcaggagtctgctcttctttttctttgtcgtcatcctgattctcatcatcgtcgctgttatcttcctcatcaccatcgtcttcattatcatcaagcggcggtggcgccaacggtgactcctctgagtcttcatcattatcttcgttttcatcttgatcctgctgttcattctcatcaggctgttcttcttcctgctgctccggatcttcctgttgttgttctggtggcttccgcatacgatgtggcagcacaaacatggcagcttcttccacatccttaggtaaaacataatttctttccgctaaagcggctatagctttagcggcttccaaaagataaatttccgctctatgaccggcacaaaaagcctgtgcgcacatttgtgccgccagctgcatcatggcttccgatacttcaatctcttctacaatgctccttgccaaagcaatctttgccgctaatttttctgtttcatcaaaataactgtttctgaagctttgtatatcagaaccacaggcaagagaacgtctaattatttctgtgcgtattaccacatccttctcactttgggaatcaacatacataccaaacctatctaatatatgacctggcagaactccttcttcggggttcattgttccaataacagtatacgatacagaatgagtaaaagaaatgccatcacgctcaacctgattgataccagaagcgttagcatccaaaactgcagtcagcaattcctgccgcaataaatttgcttcatcaatatacaaaatattacctgtagctctgcttaatatcccaggcgaaaatctgcgttcacctttactaacagcatattcaatatcgatactaccaaaaagcatatcttccgtagcattaagcggtaaatccactatcttctgtgcgccaataatctctttagcggcgcgtaccaaggtggatttagcagtccctttttcaccgccaatcaaaaggccacctgccttttgatttactaaagcgatctgcagcgctttttttaactgctcctgcccaactactgccacaaaaggataaatagcattagtcagcatttataacgctcctttagccccagaggacaaaatactttcaaccttatcccaatccaattgtccttcttcaaaaggacgacgacgcatacgatgcggcaatactaatttggcagcattttttacgtcttccagttccacttctttgcgtccattaaaagccgccagtgtcaaagctgttttaattacagtaatatcggcgcgatgcccgtcaacaccaagttctacagctaatttagcaacggtttccaagagttcgtcgttgatatctacctgaggcaacaagctgctggcctgtgtaatttttgcagccagttcttcctgatcatgctgataaccggcaataaaagtatcggcatcctgctcataagccaaacgacgtttaattacctcaacacgctgcgcgggatcatgctcacctgtaacaactactgacaagccaaaacgatccaaaagctgcgggcggatatcaccctcttcaggattcattgtaccaaccaaaacaaaacgagccggatgagaatatgaaacgccttcacgctcaactgtattgattcccattgctgcagcatccaacaatacatctacaacatggtcatcaagcaaatttatttcatccacatacaaaatattacggttggcttgagctaaaatgcctgcctcaaattttttctcgccatgcttaatagcatgttcaatatccaaagtaccaacaacgcgatcttcagtcgcgcttacaggcaactcgaccacacgcatttttacggtatcggcaactaatttattatcctccgtatatttagatgcacaatcttcgcataacagattgggatctgccggatcacaatgaaatttacatccatgtactgcttccatagccggcagtaattcggccaaagcacgtactgctgttgacttggcagtacctttttcaccctttattaaaacaccgcctaatgccggattgattacatttaaaatcaaagacattttcatatcgtcctgacccacaattgctgtaaacggatacactgctgctcttttcactataattcctcctaaaagctaatattagtaacctatatccataagaaaaagatcacaaataacttactatattatactaaaccatataccacgtgtatagtcaaattctaaatactgataatttcaaatttatccgataaaattttacctgaattttcatcccattcaaataataaaatagcctgcttaccgttataactcagcttggttttgccattttcgataacaacgctctgacccactgtcatatccatccattctgttacaccagtctgattacacacaagcattggcagtccggtgacttctgaacatttttcccatgctcctaaaggattaccacaaaccgcagttggaggccaagctgctatatcaataattatttgagctcctttctgctgcattttctgtgcgtgttcgctataccaggcatcagcacataccaaagcacctactttaacattaccgcaatctacaggctccagcacatcagcccttgaagcccatgcttcagcaccgctcccatgtgaaataagtttacggtgtgttccacaaatattccctttaggaccaaagataatacaggaattaaaattacacttcaaaccatcatcatattcgccgcatcccaaaaacaaaaataaaccataagctttgaccaaggctaatagatggcttaatttaacagatggctgtttatctacttttgcatcagggtttaatttgtaaaaataatacccctgcactgccgtctcaggtgtaactacccattttgctccattatcggcagcaattcgaactgcattctctaacagttctatatttttatgttcaggtccccggctgatttctaaatgacatagcgctattttcataaagtctccctttaattaaaattttctggatatacggctttggcaatatcttctacagcattaacagtatattgtgaaactgctaaaacatgagctgctggaagcattataacatttttatttttaccagcttttgtagtttgataagaaggattagataaaatttctgctttcatctgcaccgggtcatgcttgccatcgtaattccatacaggtatcacaaaagcatctggatttaaacgtacaacttcttcctgagacaaaatcccagactgagtataatgtaaatcctctgtagcgtctttgacattcgcataacggcaaatatccataaaagaactttcaggtctgtaaaaagctccgttacttctaatgaatacaactcttttttgctcagaaggttttatgctaccaactctatttttaacagactttaatttactatccatttgcttaattaatttttcagcattggccggctcaccaaccaatacagcaatatcattaatggccttttttatttcctccatattattaggagttttataaacatatacctttaaccccaagtccctcaatgactgaatcatttcctgcttaaaaaaatcagccgcaataataatatccggatgcatggcaagcaacgcttccgcactatttccataagctctgttagatattgattttactctgtctactatatttgaaatttcaggatcatctgctaaataagtaactgctgttattctttttgaatcaactaaatctataagaatttcatctgtacttatcgacagcgaaactattttttctggttttttctcaaaatttattactgttcctgttgaatcagtaatactatatttatttcctattttatcattttcagtgtttttttcaatttggttactgcatcccatacaaaaattatagacgaacaccagtaaaataaaacaaattatttttgctataatattttcatctttttctaaatatttttttatcatttaacatcaacctttaaaattacatatgaaccgaagtaattgcttcggttcatatgctggtttttaattacttagaatgtatatatataagtgactttaacatttcgtggcatagaataatattcagtagatgcagaacttgtccaattccctattatatcctgtctgttaaaaatattttctatatcaagctgtactttactattcttatcaaacttataacttgtatagaaattaactggtatcatatttggccaatcgccagctcttgcagcagtaatgctaccagtcaaagcagcattcactttttcattattatactttatactacctgtatattgctgtctggcgaattttctattccaatttccgctattatcttttgcttttggattacaaaaattagctccaagtgcataagaatatctactgcctatttttttatcatagtttatttcaaatccaagattttcaaatggtgcgtttattatcttattaatactctctccagttattgggtcaattttactttcatatgatatagaatcgttatccatataatataatgcagctttgaacatactgctatcactagctttcttataccctatttcatatgtccaaccttcctctggttttaacaatggattcgcttcataattaggtgaaccactgccataaagctgcataaaagtgggcatcctaaaagatttagcagcattgatatatacgctgctattctcatctaatttttttaacaaagaaaattcaggagtaaaagcatcatacgtcttatttgcatctacaaattgttcacgggccccaatagttgcaatgaaatcatttcctaaatttttagtcatttgtacaaatagtgcataattttttctattgacatcaatatgtaaatttttcaatgaaccactactccatggagtatcattcttatatgattcctgtgatattgtagttccaataataaaatctgcgaatttactatcaatttttttctgcaaatctaaacctatggtatcgaatataatatattcttctttattccatttacccgtagacgccgttattgtcttgttttttctattacttctattataaaataaatttcctgtccaagtgtcatctttatactgtaatctagtataatcttcaatatatacataatgaccatcttcttttaatttgttccaatccggtaaaacatatgaattaaatttatagtcattgacattatgctgatgagacaatgttaaattatcattgaacttataacgaactaaaactgaacttttatctgcatcattcattcctctaccattattggctagtttctttatttcatcgccctgttcaaaagttgcagccaaacttaatttaccagctccaactgtaagcgcttctttatcttttccatattcacccttagtcaaagcaatagtatttttcatagattttttagtaataatattaattacaccaccagaagcctctgaaccataaagtacagatgatgctccttttacaatttcaactctttctattgattctactggaaatgtatctaagaaataagtttcattcatatttataggtgccccatctatcattacaacggtacctttatcagcacctctcattaaaattttcccattcattcctccccaagcttgcccgccagcaccatacgaatatgaagttataccattttgtaatcttaatgcatcgaataaattagcagcaccagtttctaccaattgctgctgagtaagaactgcaaccgatgctggagtatcaacatcccttttttcttctctctgtgctgttactaccataggatctaacgtaaacgcttgattaggttcttcagcgtgtactagagtgcccccccagatgacattactacttgtcaataagcccatcaaaactacttttaccaaactctttttgttccttaacaatttacatcttccttccacttttcaaatttatagcaaacagctttacgtatccaatctttcatggtcatacgcagcttaagctaacattatataagcattttaagtaacaaaaagaatttgtaaaagctacaatgttagaccggagtaaaactccggtctattaatttgttacttaaaatgtatattccattccaactaggaaattacgtcccggagcactccaccactgctcatctggatcactgctccagttatatctagcattcgaatgttctgcatagaatttatcaaaaatattattaacttttacatatgctttaatcgttttagacactttataattcaaccctaaatcccaaacccaatatgtcgtggccgggaagaaattatcaacagcatccgctgtctgcggaccaggtctatcaataatacctttgcctaacaatgatgcactaaattttccctcatcataatctacaccaatattccacgcacctttaggaacgtaaccgtcaacgttggcagctctttgggcagttgcatctactattgtatgtgtataacctacaaaggtcgaaatatttttattaaattgtttgcgtaactgcatgtcccaacctctggctttttcatcaccaacattagtatatttaggagctacgtaaccaatacgatctttagaattcctccagaacatatgtgctgatgcaactaatgtgtcatcaaatctatgattaatccctatttctttggtagcaccagtttcaggctttatattgggattaccgtatttggaactatataaatgcgttggcgtaggagggataaaatattcactatagcttacataaacattggttttatcattattaaagttataacctagatttacgctgggagtagtatggtcaccgaacccggaatttttgtcatgacgtactccggcagttaattttaattggtctgtgatattaaattgatcctgaatatagacagctttattaatcaacttcacgccattggcagtaatcactttatcatgactatattcaaatcccgcggaaacgatatgtttatcatcaaaattcttagtaaattgatcagaaattctcatagttctgactttagtcaaatatgcgttaaaatttgtatcataatctaaattgataaaagataattgatttgtagtcgtatcatcaaatttactgtttaaaataaatttatagttactattatctactgatccaggttttaaacttggttcccataatgcggtatacttataatcagctttatatgaatcataagtagctgttaaatcatgcttttctccaagtttctttgtaattttaaaactggtactcgtagcatttgaataggctggagtcgttactccgcgtccgtccttaaaatcactgattttatttttactgacataagcatcccaagaccaatctttttcttttccctggtggtttatagcataattttctgtattaaagcttcctaattcggcagaaattttagtttttattccctcaggtttagctgtaatgatattaataacgccaccttttgcatcagatccgtacaatgtagatgcagaaccttttaacacttcaattcgttctacgttatccagatttttcagcattacagcggatattttattattaacattatttatttttacaccatctacaagaacaacaatttcatcagcaccattaatttttaaattattactgttatcataaccagctacactataattgccaatgtatactcccggcaccatacgtaatgcttcagacagatcctgataatgtctttcttcaatttctttttttgtaattacgctaatattagcatttgctttaaaagcctcaacaggagtacgagttgccgttacaaccatttcatctaaaaagaatgcctgctgttcttcagcgtggcctaccgtgtacccccccagatgacactcccagttataagtgctgtcatcagtgtacttttgctcaaactctttttcaacatactcaacaacttcctttcaaaattttttatcatagaacaaatcatctgtgtccaatctcgcatggtcacacaaataattgatccagcaaaaataaaaatgcctttctcccaaaaacagagaaaggcataaaaacaccggtgttaaacaacaaaggcgcaacctcccatcgctcgcaggaatattactttattaaaacaggcagttcttctggctcagattcaacgccttcgctgcaccttcccaaggttatcctcagtggcatttgcagcaggctcatctttacagcggcgggaccgcatcggcttataccgatttctctattaagcttgcgcacctgtttttatattcagttattaaaatgctctactacttatttgctcacttatatgatataatgtcttatatggaattattgtaaactatatagtgactatattgtcaatatatttttcattttttattgaatattatttaaatattttaatggagatgtaataattatgagtaagaattcggaaagtttttttaccgccggtgaactggctactctctttaacataccaaaacagacattgctttattatgacaaaatgaaccttcttacgcctgaatttattgcggaaaacggctataggcattattctttaaagcagtatttgacacttgaagttattgttaatctacgaaaacttgatattcctatttcaaaaatcaaagaatatatagaaaatcgcgatatagatgcatttgataaacttttattagaaaaaaaatgtgaatgtgatgaaataattgaaaaaaatctaaaaataaaaaacagcttaaatactgtgtttgcccaattggagaaaacgcgcagcagcagattaaaccaaataactttagaatttcaaaaagaaaaatacttttttatcagcgacctcagtaaaaccagaattggtaaaaaaagaatcgaaatcatggcccatcataaccaaaaagctttttctaaacaacattttaaagaaaaaaatatcggctggatcataaataaagaaaactttttcagtactgataaagccaatataaacaacacctgtgcatttttttctgctgtcagtccttctcatgcaggagcaaaatcctgtatcagcaggcctgctggtctttatcttactttacggtttaaaggcacattctacagtcgggcttcagaacttgcacaaatgtttaaaaattttgccgcaaccaacaatttgcttattgtcggcgatttatatgtttctcctctaaaaaatcactgggtaacatcgaatccaaatgaatacattaatcagatatccatacaggtagaatacaaataaaaccggctgagccaatgtctcagccggttttatttaatcagctcgctcttctatttctccctcaatatccaggagcaatttctgcagctcttttttagttttggacttagcgttccacatttgtctttgctccgcctctagcagcacttctgcaattctgtgcaaagcccaaggatttacttcttccatccattgccgtatttctggatcaagtgcatattttactgccaaatcttcatacatccaatcatccataacatcgctggtcgcatcccattggtaacaatgtgctacataattacccatatctgccgcacctttatatccatgctctttcatgccattgataaatttgggattcataatttcaccgcgaaaaacccttttgacctcttcttctatagtacgaacgactacatgactttgatctgtactatctgcacaataagttcttggcattttaccgctgcagctacgaacaccagcaattaatcctccatggtaagaattaaaatcgtctgcgctcaacaaatttatttctctattatctatacccataacagtagcatcaattctactcaaccggcgtttaaacaaatccggcatataggctccattctcaccatcgccataaacatgtgccccccaacgaacatagacttgtgccaggtcatcgatcttttcccagtttttttcttcaagtaaatacgccactcctgccccatatccaccaggcgggcatccgaaaatacgatgtacagcctgttttgcggcctcttcttttacaattccctgctgctcaagatactctatatcttcttttaaatgtttactgatataatttatttcatcactttcatctaaactggcagcaagctttactgccttatctaataatgtaactacgcaaggcatactgtcacgcatcattcctgtaatccttgctgtagcatcaatacgcggccttttaagctcagcaatgctcatagcttccaagccaagtacacggccactgcctttttgccatattggccttattcccaaaagatataaaaactgggcaaagcttacgccgtgagttcgcatatccgatcccatcaccatgccaatagtttccggatatttcccctcgtcggcgatatatgcttctatcactccatccgctctggctttacctacttcccatgctacttttgtaggtaatgtctgtggatctacaccataaaagttccttccagttggcagcacatcagctctgccattagttggagcaccggccacagaaggttcaatgaattctccctttaaacctcgaagagtattatttaattcgtctattgttttcgcaagattcggtactaaattactgcaaatataacggcaaacagtagaaaaccgatcttttaaatcatcggacatcactgaataattcttcttttgcagcaattcaggtatatactcaatgctaaaatcaacttctgccaaagtttccaaaatatcaaggctttcattacgtatcttatctgccaatttaccataagttaaacctagttcaggtattttttgcgcactgttttccaacaatgtataatagtcgaatccataatgctctgcaagtacttttgctaaagaaggcactgaaccattttcaagtctgctcatcgccaaaagatactccagcaaatttttacctgtcggaggttctcctaaaatatgcagccccacacgtatttgcatatttttaatatctgtaagatagttatgcaacttactaacatatccatcaaaatcgttatcttctttgatatcgttattaagattacattccgccgcttttttccttattaattcggcagtatcacccaatttatcctgttcattatctttaaaatcaagatattcatctagcaacgattctaattcagccatgttgtcatagagccctgatgtactcatcggcggggtaagataatcgaccagacacgcagcactacggcgctttgcctgaattccttcgccgataactgtaactatataatgatataaattgggcaaatctccaatgcaaatgtccgggtaacaacctttagacaatcctgctgctttacctggaagccactcgacagaaccatgtgtgccaacatgtattactgcatcagcccgccatatttctcttatccaataataaaaggccagataatggtgggttggaggagctacaggatcatgataaattttaccgcattcttctccaaaaccacgtggaggctgaaccgtaataataacattaccatttgcaagtcccggtatcagtaatttttcatcatagttaaaaacattgccaagtggctctccccaagcttcagtcattttttctctaacatcttttggcaaattatcaaataattttttgtattcttccaagccaactttgcctaatgctcccttaatctgtttatccgtcataaatcttctatcattagtagcacaggcaattacctcttccataaaacacttactgttttcaggaatatgatctattacatatccttcccgcttcaatacagacaaaagcagtcttacactttcaggtgagtccataccaagagcagtgcctatatttgaatttgttggtggataattatgaaagatgattgcaatttttttatctttatttgctttatgccttaaagccgcccatttggaagctttacttacaagccgttctattctttcagccatgggcacataataaattatattatcttcatctctgtattttccagcaaccggaacactatgcagagcgccatcaaattcaggcatagttatgcttatcgcaacttcaaccgcactcattccctgaatattctcccgccattcttcggtagaacgcattaaagtatatgcctgtaataatggcacatttaaattttttagtacacttagatccagggaagcagaagctgtcagagaaaacttgattgtatttattaaagcatcaattatggttttaccatctttaataaagtatttgtttactgcttcttcgagacctggagcacccatttccggattttttacaccatggctgaatacagcaataatattaactttttgcttgaaacattcttctacaagtgctttttgataagccagattatccagcagccattcattgcgataaaaaataagtcctatggttggataattaggattacagaatttttcctgatattcttctaaagaagtatatactttatcggcattaggatgataaataccattccaaagcatttgctgtggttgattatattctagctccagggcgcaaaagcgctgtaaaagccacaaccataaatttttaaagttttctatgcctccatatacactgtatttggctgttaaaacatgatcatcggctttaaaaatattgctggcattgccctctgcttcgccaccggcatggatcttaaatgcgatatctctctttttcaaataatccagtgctccctgaaggtaaggtgtttctaacgttacccccatccactctataataactacttcgcttccttcaagcaactgttcccaataacagtcccataagcatccttccgttactaaataagcagcaccttcgtcttttaaaatattatcttttcttaagctatttaatgatttttttgccaatgcataatagccatcagtattacttaaaataacgacttttgccatttatttcagctccattattataatttatatcatttgattagttctaataatagctataataaactatatagtcattgtattgtcaatcaaaacaataagaatctccggattgtttccgaagattctttttttatctaatctttcaatagccctttatcagatgctcgttactcatatcaaaaatattgccataagcagcattagctataccttttattgcatagacacaattttgtgtcgcactatacagatatctatccgggatattctttatattatttaaacctcgaagtccctgcaaagccggatcattaaaatattccagttgaaaatttctgcttgcttccgttgccatctgacgtggagccgaaaccataaaaaaatcaggatcacaagctacgactaattctttgggaacgaactgcccattatataaacccattttagcaataccattacatacgcgggctttactgcacagttcatcaaacatacaccccttaccgccataactagtcatctgtgagacaagcatgccaacaggaactgcttcttttctatttttcagctctgccgcaatttcatccaattggcggtcaatttcagttattactctgaccccggcattttgttcgtttacagcatcagcaatcattaaaatagttttcttaacttcatcaacagtatctggtcctttacacacgattacactaaatcccaaatctctgtagccttgtatcatctcaggcttcgtccatgtagaagcaatgataagatcaggtttaagttttaaaactgtttcaaatgggtaaaaatataactttaccggtatttgcctgctttcttctactatccaggaaatgccaggatccggcgctgttttatgaacggcaaccaagcggtcaggcggaactagccctagcgtcattacatcaaaccctaatgagagagttagaatgcgttttggtttttctggcaattcaacgattgtaccttcataatctctgatagctcgcacattcccattattcatactaatatcaattttgtccgaggtgcagccggctagtaaaaaacttatgaaaataaatactaaaaacttctttaacatatcactttcatcttagttggaaaatagctgtatcaaatttttcctgattataagatacatctttcttcaactcagtaaaatctgtctgcatatccaatgataaagcaattttttttagccattgcaacaaattttgcattccatatggtagtgatgcaataatgtacttttgtcccaacatttcctgtaaaaattcagcagatgctaaacccaattccggatatacaactaaattcgaggccgcctctggtaattgactaatttccttacttttacgttcagactgtctgatcatatctgcctccgaaaattttattgctgcaatgaacaggcagctccaaacgcaactgtaaattgcgggtattttaaaacgcttacatccgtaaatagttcgtcttcaatagcttctgccaaagctgtattatttgctgatccgccgtctaaatatacaccttcaacactttctgttcccatcatcccagcaatacgtcttgctatagattcatgtaagcccttaataattgactctttaggtgtcccctttgccaagagtgaaactatctcgctttcagcaaagacgacgcaggtactgtttattgcggcagcagacacggcctgctcagacagtgctgcaaattcataaatagaagtatctaagatccttgccgccatctcaaaaaatctgccagttccagcagcacacttatcattcattttaaattctaataattttccattagcatccaattgtattattttaatatcctgtccgccaatattaataataactttcgccgcagctccgctcaaaagatgtagccccagagcattagcagaaacttcatcaataactttatccgcactattcataaggtttttgccatatcctgtagccgcaactcccagaatatcatccttagatatatcaagctcccgtataccttcttcgatcactttatttgccaaagcttcctgtcccggagctgttggtatcgctttatgccaaatcaatgtattattctgaacaaatactacttttattgcggtacttcccaagtctacaccaactgagtattgcatttacagtcctccctcttacaatgtttgtttaaatgcttccagccttgttaaaatattctggctgtcttcttttccatagtcagtttctatttttataaacttcaacccgtgctcttttaattttcgttctatagtgattgcttcaatatcatatggatgacacccttttaacaaattaaaaattactcctttaatattatattcctttgctgtggaaattatattgttcacacgccttgaattatcagcaaaggtaggacatacacaggctttatgatatctttctgcaatggctcttaacattccatattcggaagtatcattgtaaattattccccctggcataattctttcagaggaacaaatatcatcggctgtaatgctcataccagcctgctcaataagctgcagaagctttaagttaggaaatataatcggtgaaccggcaacaaagatcctgctgctgttttcctgtttttgctgccgatgtaatttttctatggttctatttacctgacctgaccatacttccaaattatcaagcataaaggtatttgtaattgcagtataccaaactcccgataattgaccgctgcgcttcaatttagttaattcatccattattatccagatattcataactttattaatggattcctgtaattgctttggtttaagttttttacctgttattttttctaaaagctgtttcaaacaaaatatttcttcaagccatctactttgacttttttcggtctctttcaaatgcggcaattccaggtaatgtacattctctgtatcttgctgcattatttctggcagtttaacaacccagtcgcaggtagtaggtaaaataacagctctgtaatccgcaaaactttcctgctgtaaatcaaagtttcccataaatgatttaagcatcggacacattagtaccggcagataagaagccgccagacgctgaacggtatgtgagcctccgcataattttacaggatgcaaatcaaacgcatcaaaaatttcgaaaggagcctgaatacaaaatagacctgccaatggtttttccactcgcatctgaagttttcgagctgaaaatgggctagcaagcaattgtaaaaaatattcatattcttctaaaaaatcttcgcggcttttaagtattgcgatttcctgtaaatactcttcttcagttttttgcagtactttctcatagcgtcttttctggcgttcatcaataaaatttaatttatcattcattttttctaccaactgccttcttaaattttttaatgaaataatctctggacgaaataaaaatatttttattaaaaaactgcagcttcaaaacattattttcaggacaggcctgcatacactgagtacacaaaatgcagtcttctgtcatcaccataccgttctttttttccaagtgaacttcacgtatatccattgggcatactctttgacagtttccacagccgctgcatccatcagcccatttcacaaaacgtacagggcttaatttattaaacaggtgaatcaaaggcagcattgggcagaccatacaaaaaaatctatctttaaaaaaactacctacaattgttattgctgcaaatgatacactcactatagaaatgatcagcgttgaccaattactgtactcaaggccaaatcttcttatatcacctgcaaaaatcggcataattggtctggcagggcaaattttacaaaataaaatataaaaatcgcttgataaccctaaaaaagcaatcaaaagcggaactactaaaatcactgctaaaaaaatatattttatcggttttatcattgtccgcacagtccacgaaaattcgatttcccttattcccatttttttccgcaacccacttaaagcatccagcaaactgccaaaaggacatatccagccgcaccaaaattttgaaagaataatagctgaaactgcaaaaattgaaaaccataataaattttgcagtccaatataggtaaagattctgtcataagctgcaataccgaagattccaactctttgtaaaaacatcagaaaacaataaccaccacatcctgcaacataaggacaggcaaagcaaggcaaagcatatccaagattgatgcctatacgcccgccataagttaaaatcaaaaaactaaaggcctgcactaataaacggatcttatttatgagcattcttaaaaggcctccttagataagcaaaaataccaacagcgctgataacgcttataacaaaaaataatactataccctgtcttatgtccaggtatccataacgcgagtcataaacatttatatttaacgtgctggttattttattaccattttcttcatctttaataatgaatataatactttttgacctgttatcaggcgttactgtaagcggttcagctttagcagctgtataagtaaaagctccgtcagcattcaatcgcagtttttctgtctgttcttctccgtcaagtaaaagccgcacttctttttcagtttcagacttatttagtacaccatcattgatatactgaaaaaacagtttttgcccagtttgcggatagtaattataatccatttcaaaccgtggagttatcaatgtcaagtcagaaggtttatattcagtaaaagctgttttatcccagccatcgccatacagagaaaaattgttttgtgctgtataataatgaccctgataataaagttttactaaaacattacaggatgtactaactggcgcagctactttaaataccgttttcgtaccaatattttctgcttgcagtgcttctattttctcgcctttatgactgcggcggaatcgatataaacactgcgccgataaaatatcgtgcttcataacctgaagatcagcagttcccttctttaaaacgacttcacaaaaagccgatccatcctcagaatattttatatcgctttgctgcagccaaatataattttcttctgcctgtgcgttattgcaaaacgatataaaaatagcaatgataaagagaatacagtaaaacagactcgcctgcccgtaaaaaaacttatcacgcttcatcatttattcaccaatttttaaaatttatcattcagaaatcttatcactgcgttcttctaattcaccttccatagataaatataatttttgcagttcagcttttgtttccggcttagcgtcccataaatttctttgctctgcttccagcaaaactgcagcaatacgctgcagtgcccagggattaacttgattaaaccaatcctgcatatctttatccagagcgtatttttcggcaaatttttcatacatccagtcttccatcacatcactggttgcatcccattgaaaacaatggtctacatatgttgccaaatctcctgcgcctttataaccaaactctttcatgccattaatatatttaggatttattgcttcgcctctaaacagccgttttacttcctcgtccaatgtgcgaataacgacatgctgcctgtcagagctgtcactgcaataattcttgggcatttcacctttgatacttcttacggcagcaatcatcccgccacgatatgaattataatcatcagaattcagtaaattcgactctctgttatcaatattactcaatgttatttccagtttggacattctttgagtaaaaagatcaggtcgataagcacctttttctccttcaccgtaaacatggccgccccaacgcacatatacttgagcaatatcatcaatattttcccaattccgtgctgctaaaagagcactgactcccgcaccatgtgccccgggaggatcgccaaaaagtctatacgaagcttgtttccacgcacttgcagcatctacgccttcactttcaagacgttgtgattcttcaataatatgcttacgcacaaaattatcttcaaaactttcatccaattcagcaaccatttttacagctttgtccagccagcaaactgctcccggcaaagtatctctaaacaggctgcttattcttcctgtgatatcgacacgtggacgctgcaattcctgcagtggtataacttctatgtcaataacttttaggctgcctttttgccaaacaggtcttacacccatcaaagccataaactcagccatacactgcccgtgagaccgcatattgtaagttgcccataacaaaatacccacactttcaggatagcgcccttcctcacttataaatttattgataacatcctcagccatttgcgagccaattttccatgccaccggagttggtaaaagctgcggatctatgccataaaaatttcttcctgtcggcaaaatatcacctccgccgctggttggcgctccagccgcgcttggttctatgtattctgcagcgagcgcacgtctaaaattactgcgttctaatgttgtaagctgtaaatttggatataatctatcacaaatatatcctgctaccaaaagcagatcttgccggtactgatcagaaagatttttaacaaaatccaaatcggtaatttgcttttcctgcaaaacgaaatcaccttcagccaaagttctgatcaacgttaagcattcatcatttactttatcaagcaatactccataactttttgaaccatccgggagcagtttactgctgttatccatcagttcataataatcatatccataagcagacgctaagactttcggtaatgaaggtatactgccattttccaatttagtcagcgcaaaaagatattcaatcaacttctccccagcgggaggatttcctaaaatatgcaggcctgtagtcatctgcatattttttaagtcagtaagatatgtgtgcaatctgccgacatatccatcaaaatcgtcaaactctgtctcttgcacttcatcattcaagtctgcatcagcagctttttctcttatctgccgtatcacttctgtaagatctgcatctttatcctgtttaaaatgtccatattcttccaaagctttttcaagctctgcaagttctccataaacaccagcaagacttaagggggcagacaaataactgattaaacaggccgcgctgcgccttttggcctgtatcccctcgccaatgtcaactatccaatacggataaatattaggcatatcaccagtacaaatgtctggataacattcgttagataaagcagcagctttgcctggaagccattctaatgatccatgcgtacctacatgaaccatggcatcagcaccccaaatatcacgcaaccaattataaaacgcgaggtaatgatgtgtcggggcacaatctggtgaatgataaatcttgtcaggatcctctccaaagccacgaggtggctgcacagtaataaaaatattaccgtttaaagttccaggtatcaacaggcagtcatcatatttaaaaacctcacctggcgcctttccccagtcaatttctaattttttctgaactttttccggcaagatttgataaaaatcctgatattcttcaaaagtcattttaccatcggaattttttatcagcttatcattcataaaactacgatcattagttgcatgttcaataagctcattgataaattcctgcctgtcagccggcaaacggtcaactttatacccctgatttttcagatcctgtaaaaacaatcttatactttcgatagaatcaatcgcgcaagcactgccaatattagaattagttggaggattattatgaaaaacaatagcaatttttttctcataattgctcttgcgttttaaaacagccagctttttagcttttctgatgagcatattaatgcgttccggtataacttgcgtaagctgattgccattctcatctctttcgttagtagtcacaggggtaccatgaataatcccgtcaaattcaggcaagctgacactataagatatctccattgcgctcatgccatcaaaattctcataccactcctgatatgtacgatataatgtataggcctgtaataccgatacattcattttctctaaatcatcaagcgcacaagctctgatagtaaacagagaaaacttgatcgtattgataaaaacatcagcaacagctttatcatcctgaatcaaatatctgtacatagcgcctctaaaaccttcacagccactgtcactatcaggagcgcttgtagaaaaaaagcataaaggattacaatgctgggtttcaatttcttttataatggcatcggcaaaaaccgtattattccataaccagtcatttctataaaaaacaacagctattgttggttgtccttcttggaaaaaatcttttttgtattctttaaaatcggtataaattttatccgcagcaggatgataaataccatcccagggtaaattgatcggcggttcagccaaattcttttcgttttcctgatcctgactgagccaaagccatagattacaccaattctgcaacccgccataaacataatattgcttgatgacttgtatttcatggtctgtaaaagcagcatgcaatacatcttccggattaccactcatcaaataaagatgttttatctgccgttgttgtaaaaaagctgatgattctgataaaaatttcgtatttaacccagtacccatccatggaaaaattattacttcatgctcagtaaaagttttttcccatacattctcccaagaggcatcactttgcagatagcaaacctgaccactaactgtttccggatactgcttctgtactttttctaaagcatcctgcaataatgctgctgtttgttccatattagtgacaaatagaatttttttcatcattagctcccattttaatttctattttaacagtaatttctgctgtgtctgtactaaaacagataattcggcaagattatcataaaacagttcatgaactaaatagctcggttctatacattcgatcaaactttttaaaccgctttccttaaaaataagatgctggtcaatacttgtaacatgatgcataatttcagtcatagagcagcactctggcactgctttacagctgtgcttttgataacttcctgacaaagaacaacttaaatgcataccatgaatatagtttttatacatacccaaattttcaacagtttggcaaataaagcttacagcctccagttcattactcaacgaaatattagtattcatcaaatgtcctgtatccagcatgataccaacattttgtttttttaatccgcaaaaaaatcgatcaactattcctggttcaataagccttaatccaggccaccacaaattttcaaataaaacaatgacattatctggaatacattcgctaactgcattaaaaacttctattgacgcatctataacctgcgcatcgttatagaaaaaatcaaaagtaaaaatttcttttaaattacaattgctgacatgccagaccaaatattctggatttactgccaaagcagcttttatattattccttattatctgaagccattcttcttgatttactgcacctaaataatactcttgcagctgctttttatcagaataattttcatttaaatgcttttgattaccataccaaaaatctaaccaataaggccaatattttaaatgtacaccgatactttcttctctataatcagaggtatacggtttttgctgatatacataaagttcaatcccatcaagcttgttgttttttagatagcccttcattccatctgcataagcatttacctcctgttcatagccatgtacagggcaataatttataagctgtttcactttatttccttctctcaattaatttcagctactgaaatatgacaattttccggctgtgaaaaaagttcaccatacgcagcacgagctacttcctgtacaccaaatactatatcctgcgaagaattataaatataaccctcccgcggatagaaaaaccgcttttcttttactgcatttaatgtctgcaatgcaggatcatctaaaaattctttgttatatttttcaatatcaaaagtattgtgatcattgtagactggcataatcagaagatcagggttaatagcaaccaacatctcttttgttaaaagctgtccattatgcaatccggcatcagaaacgccatttataacacctgcatactgacaaatatcatcaaaagtacaccccttaccgccataagatgtcatcaatgatatcaaaacgagcttcttcctttcttcaggcttaatattatccaccttttctttgatttctgctaatttatcatccatttttgcaatcataagattacctttatcttcctcgcctaaagtttttgctatcaatttcacattctccttaacatcagcaatacttttaggtccctttacaacaactaccttaattcccagttcccgtaaattatcaaccatttcggctttgccccagttataaataaatacaacatccggctttaaagataaaatttcttcagcagaaggattttttatttttctggtaattctattagccttatctacgatattggagcttacaggatcatcagccaaagaattaattgcaatcaatttttcttcagggagtatccctaacacaatactgtctgttcccattgccaacgtcagtattctttccggtttatgctctaattgaattatggccccctgatcatcaattatttcataagcggcattttttacattgccatcagtagagcttccacagctagcaataaaaaaaactactataagcagcatcactgcaaaaaaagttttcgaagccatctttctcattatctttagttccttttaatattatctgcaataatattcacaaacaactcactccaggctttcatcatagcttctaccgaaacctcattcagagcgatactttctgtatcatattccccagcgatgtcactcaatagcttttctgctgcattcatgacctcatctttatcaagtaatccccataaaaactggtccaacaaatgtatatataaagaagtatatgtcaacattacaggttcttgtgcaagcttttctgctgcttctaagaaatcaggctttaagacagctaactgctgctggaataaaagccagatactttgcgttgttacttgaaaacgttttaggcgtctaaatacattgtgctgtgttttaggattgagcccagactgttttgataatgccgctttaactgctttagtaactgtttttccaataagctcacccattttagaatgttttccggctccttcaaaatacagctcagaatctgaattagcaacaattattgtctggtccgtccctgatcctgtagcaagtcctgtagaatagttactgccagccagcagttcctgaattgcagccgtctttgcttcagtacatgtaaccaatgctctggccagcgttccaggaggcatatctgcgtctagtatcaaaataatgttaatagtacccaatttatctggtttttccgcaggtttataataatcggcaggatcaccgacacgtcctccatttgtttcaatcccgcctgttactatagcagtaacagtcagttctttataagtcaaggattctatagccacattttccatatcagcagcagttcccattccagttacaagctctggctctaagcctatacgcttagctaatatccgcatatgttcggtataagtatcagctaacatctcacacggcatccctgaaccaaccttaccatcatggttgaatacagctttataattttcatgataaccgccattaaaaaccgaagtgctaagtactttacgcgcacccttaaaaaacactacaatacttttttcataacgataagctgtatcgcctgtagacactgtatataatttcattctaacaactcccgtaaaaaaagtgtcctcctgcccaggcaggaagacactaatgttttttattccgatcatatcggtcattaatctcaatcctatcgctcgtaggttatccagagatcgaaaacggctgtttccagggattaaataaatacccagcgacgggatcgcggcttaacgcacttctaacaaccagattatgaaattttaatgatgcccacaaccgccggttgcttcaccagccatgatttttctgtataattcatgtgcttcttcgctacttttaccagcagcaattgctttttgagcatggataacggcactcctatatttggcatgcggtccatcagcaggtaatttttcaacatctttgatgtcaaattccattacttttttgaaaatagcatgaatttcttcagaagatttgccagcagctttagcagcctctacatgcttcatagcgctttcataacgatgtttggcatgcggagtattcggcaattcgtatttaggatgttctttacaagtcatttcaatcacctcttaataaattcttactagactatattcttatattagactatataccaaccatatagtcaagctttttttatttgtgcaatcgagaccctttttaatgcgcattcgctggaatatgcttctttaactccactgccataccagcgggcaaaacagccgccaccacacaatttaaaatcttcacactgcttacaaaaaaacattgaagttctgatttgctcctggactttctttaccaatatagtatccagcccattttttacattaccaatataaaaatctttattaccgacaagggaggaacaggcataaatatcgcctttggcatcaataaaagcagcttctccattcatcgcataacagtgaccaaattcatgggaagaatcagcacaaagtattttaactcgttcctgttgggcaaaatgaattttatagcctgttaaatatgctagctgacgtgctttttcgtaaacctgttccattgccttacgcatagctgtttcggaaggcggtttgaggacagctcctcttccctgccctctcaacaggtcaaagcctatcctgcgtatattccctataaaataagcaaattcgactatgccggccaattcgctgacattttcgtctgtaactacgcaggtaataccaactgctatattattacgctttaaaacttctaagccatataaaattgaatttgttgctccatctccggctttagtcaggcgcagcttgtcattgatattcggccggccgtctaaactgacaccaattgcaactttatttttgaataaatattgtgccatttcatccgtcatcaatgatccatttgtttgtatctgtaaaacagcaggcaggttattatcctgaacatatttaacaacagctttcaaacattcaaagttcagcagcggctcaccaccgctgaactgaataacaaatttttctccgctgcctgccgccaaattcacagctttaatggcatcatcaactttaagcatactgccgtcatgttctgcggcataacagtacttacaggcaaaattgcactgaccggtcaagctgagaacaagcatcttgattttaggagtgttcatcactgcgttcctctaattcaccttctactgataaatagatcttttgcaattctgctttggtttcaggtttcgcctgccacagaccacgctgatccgcttccagtaaaatctccgccatgcgctgcaaagcccatggattaacatcacgcagccattcctgtactttagggtcgaatgtatatttttcggcatatttttcatacatccaatcttccatcacagcgcttgtagcatcccactggaaactgtgtgcaatatagttagccatatcggcagcacctttatatccatgcttcatcataccctcgataaatttaggattaatagcttcactgcggaaaatacgtttagcctcttcctgtacactgtgcatgacgaccttgcttttatcagtactgtcgccgcagtacgaacgcggggcagaacctttgatactgcgtactgcagcgatcataccaccatgatacgcgttataatcatctgaactgagcatattagtttcatgattatcctcgtttttaattgttacgtccaagcttcccattcttttacggaactgctgcggtaaaaacttacccttgaccttgccgccataagcatgcgcgccccaacgaacatacacctcggcaatatcatcaatactttcccaattttttgcctctaaaagcgctgctacgccagcgccataaacaccctgctcatctccaaaaatacgaaaagcagcctgccgccaagcatcttcttttgttaaaccctccgcttctagttccagactatcggcaagcaaatgcttacgcacgtaattttgctcttcatcttcttcaagttcccctaccagtaaaacagctttgtccagcaaattcattacactgggcatagtatctctaaacaagccactgatcctggcagtaacgtcaatacggggacgtttcaattccatcagcggtatgacttcaagaccgattactctttgactgccatgctgccattgcggccgtacgcccaaaagatataaaaattctgctacgcactgaccgtgactgcgcatattggcacctgaccataaaactataccaacactttcagggtatcgcccttcttcgctgatatacctttcgattacctgatcgcccaaagtttttcctatttcccatgcagcaggagttggcagatttctcgggtcaataccataaaaatttcgtccggtaggtaaaagatcagcaccgccgctgcttggagctcctgacggtcccggttcgatatattgcccttctaatcctcttagcaggttttctctttcctgtgaagtaagcatcagattgggataaatattattacaaatatagcagcatatttgtttgagcgctaacttaaattcgctgcttccatcacatacccactcaagattttctaaattatacagtttttcttcatcaaaaccgtgctcaatcaaaagtgctatgatattgcggctgcgggcacgtaatttatctattaaagcgccataagtaatatttaaaggttcgtaaattaagccgctgttttccaacaggtcataatagtcaaaaccatactgttttgccaatacctgcatcaaagacggaatatcaccattttccagccgcgtcaacagcattagatactcactcaaattttcgtcctgaggcggttgtcccaaaatatgtaagccaatcctgacctgcatatttttcaaatcagtaatatagttatgcagatccatgacgtaatcattaaaaggcttttcttcatcaaaaaaaacttcatcctgcaaatttgcctgcactactttttctaaaatcaagctttgaagtttttctaaattttccggctgagtagtctcaaaatgacaatattcatccatcagtttttcaagctcttctaattcgtcgtaaacaccggcatcagtcataggaggcggcaaatgttctatcagacaggcagcaccacgtcttttggcctgaataccctcaccggtaatcgtgataagataaggatagatattaggcagatcgcccaaagaaatatccggataacaggtattattgagtccggcatttttaccaggcagccattcaagggatccatgagtaccaacatgcacaaccgcatcagcctgccagatatcgcgcagccagtgatagaaacccaaataatgatgagtgggagcgcagaaaggagagtgataaattttgcttggatcttcaccaaaaccacgcggaggctgcactgtaacaaatatatttccgttcattgttccgggaataagtaaatcgccatcatagttcataacttcacccggagcttcgccccaatcttttaccagctgcgcttttacgccctcatcctgcaattcaaagaattttctataatcagcaccacttaacttattggcagctgccagttgcttttccgtaagcaaagctctatcattagtagcatttgccgtcaattcattgataaattctttcccgtcttcaggtatagtatcaactttatagccacgttctctcagcgcctgcaagacaagtctgatactttctatagtatctaacccgacagcactgccaatattagaattacgcggtgggtaattgtgaaaaatgatcgcaacttttttatcagcattctttttgcgccgcaaaacagcccatttccgtgctttatttaccatacgcacaatgcgctcgttgataggcagataacgtacatcgccattttccagtagttttttattagctataggcacaccatggatcgcgccgtcaaattccggcatcgttacgctgatagaaacttccatagcattcatgccttcaaaatcatcacgccagttttcgtagggtgtcaataaagtataagcctgtaaaacaggtacattaaatttcttcagaaaatctagcgtcattgatcgtgcacctgtcaacgaaaatttcattgtattgataaaaacatctattgacggcacaccattttcacaaaaataatcttcaaaaattttaatcaggcttggcattcctaattctaaaacaggcataccgttactaaatacgcaaacagcattcattccttgacgttctatttcttcaatcaatgccgtttgataggccaggtcaccccatacccattcgtcacgataaaataaaataccaatagtcggttttgcagcatcgcaaaaatcttttttatatgctgccagatctgtataaacagttttagctttcggatgataaatcgcgctccaatacataggatctggcagttcgatatccgttttaccggtcaaaataccattagcatataaaaacaaattacgataatttttcataccgctgtacaaagcatacgcttttaatttttctaaatcatttttttctattccgcttaccagttcttcctcttcagtaccggcagcgtcaatataatatcgcagttgatgttttttaataaatggcagcagttttttgaaaaaaggggtgtcaagtcctgctcccatccatttaagcaatagaatatctgcatcttctaaaagcttctgccattcgtcattccagacagtattatcggaaagcttagcgcaaacagaatcgttgctcaataaattttcctgctgcagctgctgcaaagcaacctgcatcattgcaaaacgtctgtcgacattacttaaaaatactactttgctcattttcttcctccacatttcttactttaaaatacctgtttctgcattctacgcagcaaataaaggaaataaggcgttcctaaaagggcagtcataatgccgaccctgacttctgcaggtggaataatgatacgccctaaagaatcacaaatgactaaaaaagcagcgccggctaaagcactggcaggcagcagcacacgatgatcaggccccactatcatacgcatcatatgcggaactaccaggcctacaaaacctatattaccactgacacagacagatgtagctgtcgtcattgccgccacaaacaacaaacccattctaaatggcaaaacgggcattccaactgccttagcctctgtttcaccaagtacgagaatattcagatgacgcgataaagccaacataatcactataccaatacttacagggccaatagccatatatacatgctcccagcgtcggtagtcaagtccgccaaccatccagaaaagatattgctgcagtttttgttcattcataaatgtcaacaatccagatgtcaccgcaccaagcagcatccccacagcgacgccggcaagcagtaaagtcataacaggtattttcccattacgcattgctaaaaatactgttaatgcaacagcacaaacagaaccgcaaaaagcaaaagcaggcatcacaaacatactttccgtcgcccagcccaatgctatcgaaagtactgcccctgtcgcagcgccacttgaaacgcctataataccaggatctgccaatggattactgaaaatcccctgcataacggctcccgatatacctaaagcggcacctaccaaaagtcccacgaccatacggggcatccttatataccaaacaaccgccatctgctcctgtgtaaaatcgtttttatcaaaaaaaggcaaaccaagctgatagccaatggctgataaagtattatgcaacggtatttttatctgcccgcaggtcaaagatatcgccgctacaatcagcagacctataaataataagaagataaactttttgccggattttcgattaaacaaacttattcccccttggcaaacaattcaggataaacagcctttgcaacagcttctatactatctgtaacatgctgtgacgcaacataacgataacggtcagacacaaactcaagcctgttattttttatcgctttgatattcttaaaggcaggatcagcagccacctgctgtgcatatttttgcacatcattattagaatcaaaattccaagttggaagcaaaaaaacatccgggtcaatagcaatgatccgttccttggataaagcactacttccctgatccaatccagcttcagctgcgccattgcgaacatgagcatattgaaaaatatcatcaagcaaattatctttccgtccaatagcgccgataaatgaaaatgccattacaaccttttccttatctttaggaattactttcagcttactttcaagttcagccagtttgttatccatagtactgacaagcgcttcacccttagacttttcaccagcagcagcagctacaccaaaaacctttttacgcatagcttctatggttttaggacttccggcaacatatacaggaatttccatatcttccagatttttcaccaaagaatctggagtagccgtagaaacgaaaaccaaatcaggctttaatgctacgatcgcttcagtattttcaccaaccttattaccgacacggtctgcctgttccttagttataaatgttatttcaggatcacctgcccatttactaaaagccttaaccctatcaagggttacaatctcagctaaaatttcatcagtcccataagttgcagatactattcgtactggtttacctgcaatttttacctgccgacctttatcatctgtaacaacataagcagcggcagaattttcttcagtagtatctgtattttgaccgcagccactggttataagcaataaaaaagaaaataaaaccaacagtatctttttcataaatcttcactcctaatagggcagctgtgtttttatttttaaattccacagccgctgcagcatatgcccggcgccacgaatacctgcaaacggagctgtcgccagcagtacctcatcttgtacaggatacgcaatattacaacaccaaaattttttcccttcacgcaataaaacagagctttcactgctgcttccaagaataagcgtattatcagcctgctgcaatatctgttcaatttttttactgtctttttctgccagtagaatttcatctgcttccacaggcccccgtaaatctttaagagtgttttgacagataacagtcaatttttctgtatctgcccattcttcgcgcaatgtttgtgcaatgcaaaaagcagttgttccaggagcggcaacaataattttatcaaaccataattcgccccaggtgcatctggcttcattaactgcagccagtaattcttcctgagtttttacgcattcttctcggacactttccaaatcactgggtaatacttctgcaattttttccagccaacgcagcgtaccttttaatccataaggtatccctgctacaacataaggagtgccatatcgttctttaagatatttagccgtctctagacctaactcctcattgataacgatgttcaactgagcagcaggaattttttgcaatgtctcaagttcactcccggctccaggcaccgcaataactctataatttgcagtttctaaaatccttttaatttcttcaagatcgtttctgccgttaaaataagcagtagtcgctcctaataaattaacgcctaaacgacattttattttgatatcaggtaaatccaaatattgccaaagcctgatgctggctttgctgtatccttcagcaaaaccgccgcttagaccgccgctgtccattcctattacagaaaaaggcagctttgctttagcggcaatgccctcaatatcatcaccaatcaaactgacgctgcagctgttttcaatcaaaagaattgaaggtgccctattttccctaatataatccaaagcatctgttaaacattcttctgttccataaacgaccgcattattatccggctgcgagccatgaaagcgttctcccaacctgctgttagatttttcaaggtggcgcagggcataaaaatagcaccatagcggcccgttaaccaacacctccgcacctttaataccagtaaaaaaagctgctgcaccagttaaagcacaggtgtcgactctactgcacacattgccccactcggctgtttcagacatagactatacctcctttttcaccacggcgacataaggttttataaatacagtccataaactcaatctctccacttgtacctacaagtgggagcatcggtaaaaatatctgtttaatatcctggttattagttatttcatgagttgtaagaactaaatcaactgtttccaatagttgttgacctgctgtctgatcaatgatcggggcctgacattgtgctgaaacagcttcgaccattaattttctttctttcggattataattgtcaaacaaaataatcgcttccacctgcatctctaatctgcttaatgtttccagaatcccggccggatgaaaatacatcagcatcctgccaatacaaacgacgcaacgctttccctgagttattttctttactttaccggcaaaagcaaataatttatccttttcctgtactacagccttttctgccaaagcttcctgatgcaaaaagactcccaaatttctcagccagccgactgtattatcccatcctacaggatatccatcctgcaaataaggaacctcataattcatttctaacagcctggctattttagtcaatccgttataagtctgtccgcgtccaccgagaataatactaaaagacgcagctgtaatctgaggtaattcatttataggaacatatcccggaaactgtccaataaccttaatcgaaaaatatgccagtaaacgttttacctctttggcataatgtccccaaggtcctccgttgtcaccaataagcaacgccgtattctccacttttggctgcttatgtaaaaatctttcagcaagttgttctgctactgcaaaatacccttgataatattctccatctaaaaaaccataacacggaacagtaagaacaggaataccatatttaacttcgctttcctttcctactgcttcgacatcatcaccaataactccggccacacaggaattggcaattatcaggcacttcggcctataagtatttactacatcttcaatgcaggcacgcaaacgatctgcaccaccaaaaatagaatgtttttcctgcagcatacttgataccaccggtatagacttcagattttcagcagctccattagccaaagctcgatattgtgcgctgatatccatactgcgcgccacatgagcacatgctctgggactatgaaaaataacagccgcaccactgcagtaagcagcagcccgccaaactccgggcatactacagctgcagctttttgttttagagagcattcttttagtcttgattgccatagcttgctactaaatcctccagttcctcaaatttcagaggtgtaggtatagacagttctgtatttttcaatatatcatctgctaagtttctgtaaacctgtgcctgctcagagtctggtgcatattctataacagtctgtctattattttcagctttgtttacgatcacattgcggggaataaaggcaatcaatttagtattcagccttctggcaaattctgtcagtaatgcatgttcattgggagtatttcggctattgccaataataccgccaagccttacttcacctcttgcggcaaatcttttaacgcctttagcaatgttgtttgctgcatacaacgccatcagttcaccagaagaaactatataaatatcagtcgcatagccttctctaataggtacggcaaacccaccacagacgacatcacccagcacatcatataacactagatcctcatcgtctaaaacatccagttctttcaatttttccaaggcaacgatgatgccacgtccagcacagcctactccaggttccggtcctcctgcttcaacacatttgattccgttaaaacctgtatgtacaatctgctcagcttgaatatcatcttcagcatcgcgtaccagatccagtactgtctgacggcagatttgtcccaaaagcaatctggtagaatcatttttaggatcgcagcctatctgacatacttttttccccattttactgaatgcggcagaaacattagctgctgtagtagattttccaataccgcctttaccatagaatgcaatttttttcatcatccattacctccataaaagtgaaataaaaaa

SEQ ID NO: 10099 - DNA, 556 bp, Unknown
  gut microbiota DNA sequence
gtggtttttaaggctcgctcatcattacagcgacgggatcgtatcggactcacaccgatttctctattatgcgcagaaagcgcaccagatccaacaatataaaattttattttaccaggtctaccggaagtaatgccggcatgccattactgcagataaattcatcagcctcaactttaaaaacatctttcaaaagttgtgctgtgacaatctcctgcggcttgccttcggttacaagatagccttcttttataacagcaatatgatcggagtactgcacagcatgattaatatcgtgaataaccataactaccgttaattgtaattcacggttaagcttttctaaaagctgcataacctccagctgatgacaaatatccaaataagtagtgggttcatcaagtaagagcacttgcggacgctgcgctaaagccatagcaatccatgccctttgtcgttcccctccagaaagtgtgcttagcagacgatgctgcatccccagcatattagtttgccctaacgcccactctacatgagcatcatcttccatactttt

SEQ ID NO: 10100 - DNA, 30955 bp, Unknown
  gut microbiota DNA sequence
aggatgggcaggtgctcgtggcaggcaaggccgttggccacaggtgcggctggttgaagtagatgcagcggcggtcctgcatgatgttgccgccgacggtggcgatgtttctgatctgtggggacgccgtcagcgacgacggccacgcgatggccgatggtcagcggcccggtcgtcagcaccttttcatccgccatcagaagcggagggggcgggttgcccgagcagttgaagtaggcctgcggggcctcctccggcagggcgcagccaagaaaaccgggaaccttttccgcctcgctcacatcgatgctcaaaaccttggcatgggaatacgggcagcgcaccagcgcggcgtaggccatgttggggagctctaagtcgtcggtatacttgccgcgacccagcgccttatccatggactcaaggcgcggtgtagcgtggttgacaatgtcgaaatgatgctgctccatcactgctgtgccccctttccgttcgcgtactggtcaatgatcctggaggccgcaacgatggcctcctcgatcttcgtgcagcccgtgcagcggcagaggttgccggacatggcggcgtggatctcctcgcgcgtgggatgggagttgcggtcgagcagcgccttggccgccatgatcatgcccggcgtgcagtagccgcactggatggcgccggcgtcgataaacgcctgctgcagcgggtgcggctcgtcggcggtgccgatgccctcgatggtctcgaccgtactgccgtccgcctcaatggcgaacacacagcacgagttgaccgcgcgcccgtccatgatgaccgtgcaggcaccgcattcgccaaggtcacagcccttcttcgcgcccgtcaggtgcgcgcgctcgcgcagcacgtgcagaagcgtctcctgtggctccaccgtgaacgcgcggctctcgccgttgagcgtcaggtgaatcgtgtggttgttttcaagcatgatgttctatctcctgtgcagaatttgctgtttgttccgtattggccttattctcccgtttcagccgctccgtgcgctgcggcaggtctctcactcaccggagagcgggcgtctcatatcctctttttcgcccgcgggcatattctttcccgcgcgggcgcaacggccctcgagggccctttttttggtatgggcaacagtatactatctattttgcacaaaatcaagcgtttaaattacgtcgaattcattcaacttttgtacattatgtctcaaagcggttatcaacgctttttccaacgctcgaacggggcgtccccccctcgtctttctccacatcaaaaaaaggcacgggacagccttcgctgccccgtgcccttttccctttttgcgcaaaaaacgggccgctgaggtatcagcggcccgcccttcgccttttcacttttcaatgagatagctgccgctgtccgtcgcctccgtcacgatggggacgaactcgacgtcgtaggccttcatcgcctcggtgacgctctcgagctggtctgccgtgaccttgacgtacacgcggtcgaacttttccgtgagctcgctcatcacgatgccggagtttgcctcgctgcccgcaagcgcgatgtccgcgtccacgctgacggagagtttgcccttgtagcccgcctgctcaagcgcggtgtggatatcgtcggcgagcagcgcaagcgcctcctgctgcgtcatggtgcgcttgtccgtcttgatgcggctcatgcgcccctcgcgcgggtagtggaaatcgtcgagcagcagctcatcaaagcccatcttgccgcattccgtgacgatatcggtcacatactggcgcgcggcctgcttttcgggcgcgagccagtgggtgctgttcgtatcgtaccagacaaagcccgtcagctggcacacggcggcgtccgtcatgtgctcgtaggcgtacaggctgtcgtgcagcgtgctgatgcggccgatcgtatagtagtccgagtcgacaaggccctgaatggccgcatccgatgtgctgttctcggccaccgcgccgcagtcgatcgcgccctgcaccttggaattatagtagagcttgccgctcgcgtccttgagctcgaccgccacggcgttcacgtccttatcaaggccatcgagcgctgcctgccaatcgctgccgagcgcgtccgcacccagctcgactgcgcaggtatccttgatgacgggcttttgcaccgtgatctcaaggtcgtcctgcttcttatcgtcgccgctgtcgccgccatttgcggtgtcgtcctgtggggtcttctttatccaggggaactcaaagcggaccgagccatccgcatcgtataccatatagcgctgcgcaaacaaaaagccgcacgccagcagcaaaatgaccaccagcaccacagccagcacgcctctgccgcgcctgcgcccgcgataaccggtatagcccttcgttccgctcgttcttcttgccattgtccgcatccgcctcctttttctcgtgcaacagtttaccttttgagagcaaaaaaatcaacaaaaacctttcggtttttgttgattttccgtttttgtatgctttagccctcgatagcgtccatcagcgcgacgcggcgggcgtggcggccgccctcaaacgcggtggagaggaacgtctcaaccatggccgcggccagcttcgggcccgtgaagcccgcgccgatggccatcatgttcgcgttgttgtgctgacggcacagctgcgcctcgagcgtatcggcgcagtgcgcgcagcggatgcccttgaccttgttcgccgcaatggagatgccgatgcccgtcgtgcacacgacgataccgtactcgcactctccgctcgcgacggcacgcgcggcggcctcgccgaaaatgggatagtcgcaactctcggtggagtaagtgccgcagtccttgacctcgtggcccaggctctccagctgctttttgatgtcttccttcatggcgtatccgccgtggtcacagcccaatgcgatcttcatagtgtttctccttttgtcagtcagattttgtgaaagaccggttttttcttttcaaacgtgcacacatagttgaggccgcagctctttaaaagctcctgcgtctcgcgggcgcgcatgccgacgaattccggcgtatgcgcgtcggtgccgatggtgatgatctcgccgccgagctcgtgatagagcctcagccatttggcgtccggcagcggcgtgttgccgcggttgacgttgcactcgatgccgcagccattttcaatgagcgcgcggaacacctgcgccacctcgtcctcaaaaccgtcgaaactcatgtgcataccgtggttttcgttcatgtagcgaagcggcagcgtcaggtggccgagcacggagaacttcccccacttggccgtctccagaacgagcgttaaatagtccgcgatctgctcgcgcgcctcctgctccgtggccccgggcatgaagtagaggtcgttccaatcgtacttttccgacagctgatgctgcgagccgatgacaaagtcgagctccggcaaacgcgagagcagctcgtctgcgtaggcaaagtcgcgcatcgcctcgccgagctcgataccgcggcggacgatgatcttcccgtccgccgcctggtcggcgcgcgcaaaggtctcttcacgattcgaaaaatcgtgctcccagcgcgccgtctccctcgggcggaacaggtctacatggtcggtcaggcacatttcctgcaaaccctgcgcgatgcccgcgcgcaccatgtcttccaccggcgttttcgagtcgaacgaaagcgaacagtgggtgtgataatcggataaatacatcttctattcgttacagcttgaactttccgaaaaagctcttgtgttcctcataattcttctcgccgagcgactcgctgaacttcttgagcgcttccttctgctcgcggttcaggttgcgcggcgtctcgatatacacggtgacgtactggtcgccgcggccgcggccgttgaggccggggatgcccttgcctttcaggcggaacgtcgtgccgctctgcgtcccctcggggatggtgtatttcaccttgccgtcgatcgtcgggatctcaagctccgcgccgagcaccgcctgcgtaaacgtaatgggcgcttcgcacaggacactcgtaccctcgcggcggaagatctcgtgcggacgcacggacacgacgatcagaaggtcgcccgcggggccgccgttcttgcccgcgttgccctgcgcgcgcagcgaaatggtctgcccgttgtcgatgcccgcaggaatgctgaccttgatggtcttgcggtggcggatcatgcccttgccgccgcacttggggcagggctgatgaatgatcttacccttgcctccgcagcgctggcagggggccgacgtcgacatatagcccagcggcgtctggcggcgctgctggatcacgccgctgccgcggcagtcaggacatacctcggcggtcgtgcccttggcgcagcccgagccgcggcagtcaggacactgctcgatgcggtcgatgctgacttccttctcgcagccgaaggccgcctcttcaaagctgatgttcacgctcgtgcgcagactctcgccgcgctggggcgcgttggggttcgcgcgcgcgccgccgaagcccccgccaaagaagctgccgaagatatcgccgaggtcgccgaagtcgaacccgcccgcgccgtaagcgccgccaccggcgcctgcgccgtaattcgggtcaacgcccgcaaagccgaactggtcgtagcgcgccttcttgtctgggtcgctcaaaacctcgttcgcctcgttgatctccttgaacttctcctcggcttccttgtcgccggggttcatgtcgggatgatacttgcgtgcgagctttttgtatgcttttttgatctcttcttccgaagcgcccttggaaacgccgagcacctcgtaatagtctcttttattttcagccatagactacgctcctaaaaacgccgcaatcgggggcagtataaactgtccccgctgcgtcgatacgatttcaattactttttgttgttgtcgtcgtcatccacgaccttgtagtcagcatcgtaatactgctgaccgttcgggccggtctgcgcgccgccgttctggccgcccatgtcggggccggcctgtgcaccgccctgcgggttcgcctgctgatagagcttctcgctcatctggtagaacatctgcgtgagctcttcggtcgcgctcttgatggcatcggtgtcgtcgcccttgaggacttccttcagcttgtcgataccactctggaccttggccttctcgtccgcggggatcttgtcgcccacttcgccgagggtcttctcgctctggtagaccatctggtcggcctggttgcggacttcgaccttttccttgatcttggcgtcctcagcggcgtactgctcggcatccttgacggccttttcgatatcctccttgctcatgttggaggaagaggtgatggtgatgtgctgctcggtgccggtgccgagatccttcgcgctgacgttcacgatgccgttggcgtcgatatcgaatgtgacctcgatctgaggcacgccgcggcgggccggagcgatgccatcgaggtggaagcggccgaggctcttgttggcagcggccatctcacgctcgccctgcagaacgttgacttcaacgctcgtctggttgtcggcggcggtggagaagatctggctcttcttcacggggatggtggtgttgcggtcgatgagcttggtgcaaacgccgcccatggtctcaatgccgagggacagcggggtgacgtcgagcagcagcaggcccttgacatcgccggtcagaacgcccgcctgaagagcagcgcccatggcgacgcactcatcggggttgatgcccttgaagccttccttgccggtgagcttcttgaccatttcctgcacggcggggatacggctggagccgccgaccatcagaaccttgtggatgtcgttgccggtgaggcccgcatcgctgagcgcctgacggacggggcctgcggtggcttcgaccaggtgcgcggtcagctcgttgaacttagcgcgcgtgagggtcaggtcgaggtgcttcgggccggtggcgtcggccgtgatatacgggaggttgatgttggtggaggtcacgccggaaagctcgatcttggccttctcggcagcttccttcaagcgctgcatggcgaccttgtcgccgctgaggtcgacgccgtcggtacgcttgaactcgctgaccatccacttcatgacgcactcatcgaagtcgtcgccgccgaggcggttgttgcccgcggtggccagaacctcaataacgccgtcgtcgatatcgaggatggagacatcgaacgtaccgccgccgaggtcgtagaccatgaccttctggctctgctccttgtcgacgccgtaggcgagggccgcggccgtcggctcgttgatgatacgcttgacctcgaggccggcgatcttaccggcgtccttggtcgcctgacgctgcgcatcggtgaagtaagcgggaacggtgatgacggcttcgctcacggggccgccgaggtaagcctccgcgtcgctcttgagcttctgcaggatcatcgcgctgatctcctgcggggtgtacttcttgccgtcgacttcgactttataatcagagcccatctcgcgcttgatcgaagagatcgtgcgctcggggttggtgatggcctgacgctttgcgacctgaccgaccatacgctcgccggtcttactgaacgcgacgacggacggggtggtgcggttgccttcggcgttggggatgacgacggcttcgccgccttccatcacggccacacaagagttggtagtaccaaggtcaataccgataactttagacataatgttgtcctcctaagatctatcttaatttttttgttaaccactttatatgttcatttcgcgtccgcagacgcgaaacaaatccaaatcgttttttctgacgacagaaggtgaattgccgcaaagcggcaagagaagccgccctggggcgtgcgcgtcagaaaaaacacatctcagccctgaaacgtgcgagcgcagcgagtgcgctgcacagggctgcaagccctttcaaaaatgtgtgccacacatttttgaggaacttttagttggccacttttacaatggcaaatcgcagcaccttatcgcccagcgtgaagccctgctgaagcacctcgaccacggtattttcgccgtagttttcgtcttccacatgcatcacggcgttgtgcttttcagggtcaaagggctttccggcggcgtccatcgtttcaacgcccagctttttgaggctctctttgaactggttgaacaccatttcaaggcccttgcggtggggcgactcctcgtcgccatactgggcaaggccgcgctcgaggttatcgtaaacgcccagcagcgccttgatcgtgtcgatcttcgcgtcggcataaaggttttccttttccttcgcggtgcgcttgcggtagttgtcgtactcggcggcaaggcgcaggtatttgtcctgctcgtcggcaagcgacttggcaaggccttccatcttctccatctgctcgcgcgtgacggtgaaggtctcgggctccgcgctcttttcggcggtctcgtcagccttggcagtttctgcggtcttggccgcctcgtctgctgtcggctgctgcgccgtgttcttttccggcgtgctctccgccgcgttctgcttgtctttcttacccatttcttactccttatcttcttccttgggcggaagctcgttcttgccgaacatccgcgtcaggctgtctgcaaaataactcagccgcgccgtcacggtggcgtagtccattctggtgggacccaccacaccgacgaggccgcgcatcccgtcgccgatatcgtagctggcgacgaccacgctcgtttccttgagcgcctcattcacgttttccggcccgatcaggatcttgagcggcgcgccgtcatccggcacgggaagctcttccttgttatccacaaggaatgtcacgagatcgtgcgccttgtcgacatcgcggtactcaggcattttcaagatctggctcgcgcccgcggtctccacattgcgctgcgcgctctgctcgagcacaccgatcgcatattcgaccgctttggacaccactaaaaatagctcgggcgaaagctgctcggaaaggctcatcagccttgcactcatctcatcggcgctccggccggtgaagtgcgtgttcaaaagctccttgacgtccgcaagccgctggctgtcgaacgggaggtccgagcgctggagctggctcttcacgcggttatcctcgcccatcaccacgacgatgaagctcatttcatcgaccgcgatgagctcaaagcgcttgacgctcgcctcgcgccgtccgcccgtcacgctgtacacggggtaattgacgatgctcgacaccatctgccccgccttggcgatcacgctgtccgtgccgctgagcttggactttagctgctcgttgatctcctccgcttctgtttcggagacctcgcgcttttccatcagctcgttgacgtacaagcggtaacctttcggcgacggcacgcgtccggcggacgtgtgcggctgctcaaggtagcccatttcgaccaagtctgcaagctcgttgcggatggtcgcggagctcaccgaaccgcccatctcctcggccagcgccttggagccgaccggctcagccgcggcgatgtaatcctcgacaacgcgcttgagaatctgctttttgcgctcggtcaagtccatacgccgcgctcctttcatagctttagcactcctttccctcgagtgctaaacgcagtgtaccaccgacatttcccattgtcaataggaggcagtgtaaacagtttgtgaactacgcaaaagtcaggccaaggcctgccttttgaagcgttttcactccgctctgtgcctcgcctacggctcgacactcgctgcgcgagaagagttttttggcacgcacacgccccagggcggcttctcttgctgctctgcggcaattcactttctgtcgcgccaaaaaagatttaacattatttgccgccgtgcgcggcagtcctgggcagccgttggcagcttcgctgccttacggatgccgcgtaccccttgtgggtaaaagtctgcgacgcttttccatttcacgacagcttcgcagaattccgtgcccgcaggcacggaaaaattaaaatcgtaaatcgccgcgaccggcgcgtggcgatttacacttctcacggagcggagtgtgcgcgcctttggcgcgtgcatgcagcgcagtgcaaaccttctccaaaagcggcagcgccgcttttggaagaataaaaaaagaggaacgctttcgcgttcctctttttttagaacctttattcggccttgggcgcttcggcggctttcgcagcttccgcagccttggcttcggcggctgccttggcggcagcggccttgcgctcggcggcagccttctgcgcggccttgaacttctccttctcctcgggggtcgggatgggctcgatggcgttgcgcgggcaggccttggcgcacatggtgcagtttttgcacttggtgtagtcgatgacggccacgttgttgacgacgtggatggcgtcgaacttacaggtgcgctcacacataccgcaggcaatgcaggagttggcgcacaccttcgtgacggcggggcccttctccttgttcgagcagttgacgaagaccttctgcttgtagggcacctcgacgatcagcttgcgcgggcaggcctcgcggcaggcgccgcagttggtgcacttctccttgtcgacctcggcgacgccctgctcattgatatggatggcgtcgaactggcaggcggcaacgcaggtgccaaagcccatgcagccaaaggagcaggcggtcgggccgccggcgaccttcgtcgcggcgacgcagtcgtgaagaccgacatactcgaaattcttcacagaggcctcgccgccgttgcacagcacgtgcgcgacctgcttttcgccgctgggggcttccatgcccatgatctcagcgatcttggcggcgccctccgcgccagcgggcgcgcaggcggtgacgggagccttaccggcaagaattgcctcggcgcagcccgcgcagccggggtagccgcagccgccgcagtttgcgccggcgaggcaggcctggatcttgggcaggcgctcatcgaccttgacctcaaaggccttggccgcaacggacaggatcaggccgaacacgacggcgatcacgcccagcacgagaacagcaaaaattacattcatcatttcttcgttccctccttacatgggccacacctgcagacccgagaagcccatgaatgcaagggcgatcaggcctgcggtgatcagcgcgatggggaagccttcaaatgccttgggatagtcggcaaactccaggcgctcgcgcaccgtggagaacaggtagatcgccagcaggaagccaaggccgccggtgatgccgtaaaccacggattcgatgaagttgtagtcgttctgcacgttgagcagcaccacgccgagcacggcgcagttggtggtgatcagcggcaggtacacgccgagggccgtgtagagcgtcggcatggactttttgaggaacatctcgatgaactgcacgaggctcgccaccacgagaatgaaggcgacggtctgcatgtagtcaaggccgagcttgacgaggatgatgttcacgccgtagcagaacgccgaggcaaggcccatgacgaacgtaacggcaaggcccataccgatggcggtgtcgctctttttcgacacgccgaggaacgggcagatacccaagaactgtgagaagatgaagttattcgtcaggatcgcgccgagggaaatagcaagtaacttagtcacactcatttttatttaccctccgtttctttcttttccgcgttcttcttctcgcttctggcaagcgcccactgcatgatggcgatcagcgtgccgaggcagaggaagccgccgacgggcagcgtgagcatactggcgggaacataggaagaaggcatgacctggatgccaagcagcgtgcccgcgcccaagagctcgcggaacgcgctcaggatcagcagcaccaccgtgtagccgatgccctggcagatgccgtccaccgcggaggcggcaacggagttcttgctggcaaaggcctcggcgcggccgaggatgatgcagttgacgacgatcagcgggatgaacacgccaaggctctcggcgatgtcagggacaaacgcctgcaggcacagatcaacgatcgtaacgaagcccgcgatgacgacgatgtagcacgcgatacgcacttcgttggggatgatcttgcgcagaagggaaataaagatgttcgaaagcgtcaggatgatgagaacggagatgcccataccaaagccgtttgcaacactcgtggtgatggccatggtggagcacataccgagcacctgcaccagaacggggttttggtagatcagaccgtctttgagctgtttgttgaaattcatagatcgttccccctttctcagttcatggcctcggcggcagccagagcggcgttgacgcccttggtcacgcccttggtggagaccgtcgcgccggtgacggcgtcgatgttctgcttgacgacgagcgtgcccgcgccggacttgccgacgaactgatcgagcgcgccggtgcctgcggaggtcgcttcattgtccatgaccttggagccgatgcctgcggtctcggaagccttgacgatggaaacgcccgtgacagtgaggtcggtgtccacgccgacgatcatcacgatgttgccctgagagccgctcgcggtgaccttgaaggcatagccgatggtgtcgccgccggactgcacctcatagacctcgctcagcttgccgccctgttcgttggcggcgtcgatcatggcctgcgggatctcctccatcggggggaactcgcagtcggccgcagagacgaccttggcgagcgcctcttcggtcttttgcttgttgatggccgcgatcttgtccgcggtcagcatgttggtcaggcccagcagcagcgcgacgaccagcgagatcgccgtcagcgtaccggctaccttgaaaatgaatttaccttcgatcttcatttctttgccgcctccttcgctgctttcttatctacgccgaagcgggtgggcttggtgtacttgtcaatgatccaggtgcagcagttcatcacaaggatggagtagcaaacgccctcgggataggagccgaagtagcggatgaacaccgtgatgagaccgcagccgatgccgaagatcagctggcccttcttcgtgacaggggaggtgacatagtcagtggccatgaagaacgcgccgaggaacaggccgccgccgagcacgttgtagagcatccagctcatcgcgtcgttgccctgggggaagaggaacgtgaggactgccaccgtgccgatgtaggcaacggggatctgccaggagatgaccttgcggaaaattaagtacaatccgccgatgagcagcatcatcgcggagatctcaccgagagagccgccgatgttgccgatgaacatatcggacaggctgtactgtgccgtcacctcggcaaactctccgcccttcatcatcgcaagcggagtggccgcggtcacgacgtcagcgccgccgaagagcggtgccttgccggaggccgggtcgatccaggaggtcatctggctcgtgtagcacgcgacgagcgcggcacggccggccagcgcggggttcaggaagttcttgccaaggccgccgtagagctgcttgacaaggaagatcgcgaagaagttgccgacgatcagcatccagtagggaagcgtcacggggcagacgaacgcgagcaggacaccggtgacggcggcggacaggtcgccgatcgtctgcgtcttgtgcatcagcttacggtagagccactcgaaaaacatcgcggaaaccacgctcacgagcacggagatcagcgcgcggaagccgaaacggatgacgctcatgatgagcgcggggcacagcgcgatgatcacgtcgagcatgatcgagcgcgtgtcttcattgttgcggatatgggggttggaggaagcgatgagcttcagacccttataatcattcagcatctcttaagcctccttctttgcttcttcagcagccttggcagcctcagccgcggccttggccttggcggcggcttccttgaccttctgcttgccgaccttgaacgaatgcgtcaggtgcaggcggcccgggcagatgtaagagcacgcgccgcactcgatgcagtccatgacgtgggccgcctcgagatcctcgatgcggttcttctgcacatataaatagaggtacaggggctcgaggtgcatggggcacgcctcaacacagcggccgcagcggatgcaggtcgggtcctcggagaccttgttctcattcgcggcgaacgccagcaccgcgcccgtgcccttggccacagggaagtcggcggaggcctgcgccatacccatcatcgggccgccggcgatgagcttgaacgtctcgtccttcaggccgccgcaggcgtcgaacaggagcgaaacgggcgtgccgatcgggcactcgaggttcttcggctccacaacgccgctgccggacacggtgacgaccttgcgcaccacgggcatgccgtccttgatggcatggtagatggcgatggtggtgttgatgttgaacacggcgcagccgatgttcgcgggaagaccgcccgggggcacctgcttgccggtgatggcctggcagagctgcttttcaccgccctgggggtagcggcagcgcagcgattcgaccacgacaggagccttctgctcggcgatgaccttgttgagggcctcgatgccgtttttcttgttgtcctccacgccgatgacgaccttgctcacgccgaacatcttggcgaggtagcagcagccgccgatgatctcagcggggcgctcaagcatcgcgcgatggtcgccggtgatgtagggctcgcactccgcgccgttgatgatgacggtatcgaccttgccgatgccgctggagatcttcgtgtgcgtggggaacgttgcgccgcccataccgacgataccggcctgcttgaccatttcgaccatttcctccacgctcagcgcgtcggggtcggccggagcatggacttcctcgctcaagtcgtccttgaagtcattgtcgatgacaacggacatgaccttgccgcccatggaatagggacggggctccaccgcagcgaccgtaccggatacgcttgcgtgaatgggagcgccgagacctttgaattcgccgatcttctgtccaagcttgacatagtcgcccttggagaccgtcggggtgcagggtgcgccgaagtgcatcgacatggggatcaccacctgagcaggggcttgtaactgctcgatggccttttcattggtagcagccttcatatcactgggatgaacgccgccaaagaaagcttgtgccatagtcttcacctcatctttatactgccagagcagcggaaacactgctccataatcggatagattatatcccctttcttttctcttgtccagaaaatattcttcatgaccatcattttcctacataatttatcagatttcgccgtcattttttcgcaaaaacagcattttgccaaacaattttcctttcggcggcccgcggagggaatcacccatttttccgcttcttgacgtgtcccggacgcgatggtatagttatgtattattatttttatgaatttcgtgcattttccgcacattgccgtccgtttttccccgttccggcaagaaaggagcttttttatgcccatgcagctcgataccggcgcgatcaaggcagaatcgcgctcactgctgcgcaccggtgaggtcaatcccttccggatgacgcttttctatcttctcatcacccttgtgctcgatatgatcaactcgggcgtgagctatatgatcgactctgccggcggcttcacagtgctctcgttcagctttgtgagcatcctcgtcggtctcgtcgcgctcgttctgaacgcagggtattactgctactgcttcggcatcctgcgccgtgaggaaatgccgtatgagagcctttttgacgcgttcccctttgccgggaaggtcatcctgctttccatcgtcgagggcgttttcatcttcctgtggtcgatgcttttcgtcatccccggcatcatcgcggcctaccgctactcgttcgccatgctgaacctgtgtgaaaatcccgagctcggcgtgatggaggcattgaacctgagcaagcggcagacaaatggctataagatgcagcttttcctgctccagctcagcttcatcggctatcagatcgccgcggtgcttatcgcgctgctctacgaatacgtcatcatcagctacctgcccgactcgctctccggtgcggtgctcggtgctctgatctacggcgtgctctcggcggtcgtgggcgtctacctgacgccgtatctgaacctttcgacctgccgcttctaccagctcgccaccgcgccgcaggtaaacgagccgccgcacttcgactcctggaacgacaacttctgaacgcagcaaaaaagagggatatctcgcatgagatatccctctgtcattttttgttttacttcagcacgtagacgttcttgatgccgaggagcttgcaaagctcggtcttttcagcgatgtccgcctcgctctcgtaccagacgacgatcgtggagccgtccttttccttacagagaaggtacgagctgtcgaagcggttcgagcgcgatttctgcacggcgctgtcgttcaaatacgcgctcagctcgtcctgcgtcagctcgcgcagcgcgcccaccttgccgcctttcacgctctgcgccgcggggacggcgttgatgaccacgctgccgcccttgccggccttgaccgccgcgtcgtagacctgctctaccgccgcgcgcggggacagcggcaccgcaccgctcgtgcccgtcaggctctccgccggcaccgcgccggagggcgccgcgctcacgctcgtcacgctgactttggccttaaggccgttgtaggcgcgcagcagcactgccgcggcctgttcgcgcgtcgtgtcgtttttcggcgcgaacgtcgttaagttcatacccaccacaaggcccatgcgccaggcgagcgtgatatagccgggattcgtcgaaacatcggtgaacgggcactcatcctgcaccgtgccggaaagcgtgctgtaccccagtgcgcggacggtcatcgcggccatctcctcacgcgtgatggggtcgttcggtcggcaggtcgtgctgtggccggagaacacgtcgtgcgcgctcgcggtctcaatggcgctataataccactttttcgcatcctgattgtcggtatagctgcccttttcgggcgttacggtcttccagcccatcaggcggcagagcgccgcggcataggccgcgcgcgtcatcttctgtccgaggccgaacttgccgtttccgatgccctgcaataagttgtactgcttgcactgcgcgatgctttggctcgcccagttcttgtccggcacgtcggaatagccggatttgttggcggcaagcgcgagcgtcgtggtcatcacgagcgcaagaagaagcgccgtcaggcgcgttgcgatctgtttcattggtattttcccccttttgggtggtctttctgccgtattgtagcacaaagttgcgtggatagtcaaattttctctttacctttgcggtggtctttgttaaaataatagattgtattagtatgatgaggcagtattgcctgagatagtatgtccaaaagttctcaaaagaaagaaggtgagccgaaacatgaagtacgagcactggcagatccccgccgcgccggaggatgccatcaagacgctgatggacgcgggatacccctatcttgtctcgtcggtgctggccgcgcgcggcgtcaccacgagcgagcaggccgccgaagcgctcgagcgcgagaagacgctcgctcactccccgtttttgatgaaggacatggacaaggccgtcgcgcgcatctcgaaggcgcttgaaaacggcgaaaagctggcggtcttcggcgactacgacgtggacggtatcacctcgacctgccttctgaccgattatctccgctcgcgcggggcggatgtgacgatgcacatcccccgccgcatcgaggagggctacggcctcggctgtgacgccatccgcgcactctccgagtccggcgtgacgctgatcgtcacggtcgactgcggcatcacgggcgtggacgagacggcctacgccgcgacgctcggcgtcgatcttgtcatcaccgaccaccacgagtgcaaggagcagctccccgccgccgtggccgtcgttgacccccaccggcccgactgcccgtatcccttcaagcacttggcgggtgtgggcgtcgcgctcaagctcgttttggcccttggcgaggggcgcgaggacgcgctgtttgcgcgctactgcacgcttgccgccatcggcacgatcgccgacgtcatgcgcatggagggcgagaaccgcaccatcgtgcagtgcgggcttgagagcatcgaccgcagcgactttacggggctgcacgcgctgctgcgcgaggcggggctcacgtcgcgccccatctcgtcgatccagatcggctttgtgctcgccccgcgcatcaacgccgcgggccgcatgggccgcgccgagctggccgcggaattgttgctcaccgacgatcccgtccgcgcggaaaagctcgcgcgcgagctgtgcgagctcaaccgcgagcgccagagcgtggagcaggacattttccgccgcgccatcgagcagatggaggaccttcccgagagcgagcgcagtgcgctcgtgttgtccagcgaggactggcatcaaggcgtcgtgggcattgtggcgtcgagactttccgaaaaattctcctgcccgagctttatgatccacctctccggcgggtcgggtaagggctcgtgccgcagctacgggggctttaacctcttcaatgcgctcgaagcgtgctccgaccttcttgtgagcttcggtggacacgagctcgccgcgggctttacgatcgaagagcgcaacatccccgcgttccgcacgcggatgaaccagtatgtgcgcgcccacacgggcgagcatccgccggtgtcgatgctcgacgtcgacgtcgacttgcagcacccctcgctcatcacgcttgaggaggtcgaggcactttcgctcctcgagccctacggcgcgggcaacaaccgccccgtcttctgcctgcgcggcgcaacgctcgagagcgtgcagggcgtgggccagaaccggcacttaaagctgaaactacagaaaagccgcgtgaatttcgacggcattttcttctccgtcaccgccgacgagtgcggcgtgtgcgcgggtatgcgtgtggacgcggcgttctatctgcaggtgaacgagttccgctcccagcgctccatccagctccaactcatcgacctgcgcccctcgctcgaccccagcgggcgcgagaatgaggcgctctccctctgccgcgagctgatcagcggcggcacgctctccccgcgcgacgcggcgcgggcgctcccctcgcgcgaccagttcgtgcgcgcgtggcgcgttctggagcgcgaggtcgggcctgacggcgtcagcgagcccatgctgccgctgctgcggcatttgagctcggaaatggtcggcgcggagacgtttctgcgcacggcgatgtgtttgcaggtctttgccgagcgcgggcttctttcgatcgagcgcaaggacacgaccctcacgctccgcctgacggcggacggaaaaaaggttgagcttaacaagagcccctacctttccgccctgcacggctttctttcgtaattaaaggagacgattcggatatgacagcacaggataaagcattaaaagagaataccgcttcggctcccctccagatcgtcgcgcccggcacctgcgtggagaccggcgagcaggcggcgctcgtgctcggcatgtacgaccaccttgtcgagacgatccaccagtacaacccgagcgcagactttgcccagattgacaaggccttccgctatgccgacacgcaccacaacggtcagctcagaaaggacggctcgccgtttatcacgcacccgctcgccgtcgcgcagatcatcgccgaggagctgcggctcgactcagagtccatcgaggccgccctcatgcacgactgcatcgaggacacctccgccacgtatgccgagatcgccaaggagttctcccccgcggtcgcggatctggtcgagggcgtctccaagctgacgcgcgtgcagtacgccagcaaggaagaagagcagatggagaacctgcgcaagatgctcatggcgatggccaaggacatccgcgtcattctcatcaaattggccgaccggacgcacaacatgcgcaccatggagtaccagacggcggaaaagcagcggcagaagtcgcttgaaacgatggaaatttacgcgcccatcgcccaccgcctcggtatgcagcgcatcaagtgggagcttgaggatttgtccctcaagtatctcgaccccgtcggctacgacgagatcacccgctcgctcgcggccaaggaggccgagcacgaggcctttatggagcgcgtgcaggcgcagatcgaagagcgcctgaaggaccagcacgtcccgtatctcaaggtctacggccgcatgaagcatccctacagcatctaccgcaagatgtacgcgcagaataagacgatggacgaggtgctcgacctcttcgcgttccgcgtcatcgtcgacaccgtggccgactgctacaacgtgctcggcatcatccacgacctttaccgtcccattctgggccgtttcaaggactatatcggcacgcccaagccgaacatgtaccagtcgctccacaccaccgtcatcggtgcggacggcatcccgttcgaggtccaaattcgcaccgaagagatgcacgagatcgccgaatacggcgtcgccgcgcactggaagtacaaacagggcatctccggcaacgcaggcgagcacaactacgaatgggtgcgccgtttgcttgaaaatcaggagaacaccgacgccgaggaattcgtccacacgctcaaggtcgacatgttcgccgacgaggtcttcgtcttctctccgcgcggcgacgtgacgaacctccccgccggcgcgacgcccatcgactttgcctactccatccactcggccatcggcaaccgcatgacgggcgcgaaggtcaacgggcgcatcgccccgctcgactatcagctcaaaaacggcgacatcgtcgaaattctgacttcaaaaaacgcgcacggccccagccgcgactggctcaagatcgccaaatcgagcgaggcacgcagcaaaattcgccagtggttcaaaaaggagcgccgcgaggaaaacattatcaacggccgcatctcgtttgaagcagagctcaagcacctcggcatcccgatgagcgacgtgctcggcacggacatcgaggccgcgcttctcaagaagacgtcgttcggctcgatggatgagatgtacgccgccatcggctacggcggattttccgcgcagaaggccgtcaaccgcatccacgacgagatcgtcaagctcgaaaagcagcgcaaggaggagcgcgccgccaccgtgccggtggacaactccggcgcgacgcgtcccgccgtccccaagcgcacgaagagcgagcagggcatcgtggtcgaggggctgtcgaactgccttgtcaaattctccaagtgctgcacgcctgtccccggcgacgagatcgtcggcttcatcacgcgcggctacggtgtgtccgtccaccgctgcgactgccccaacgccgccattgagcgcagaaagcccgaggagcgcggccgctggatcaaagtgagctggggcacggacgtcaaggagtcgtatcagaccgcgctcgacatttacgccaaggaccgcctcgacctcgtgctcgacgtctccgccgcgctctcgtcctcgcagacgcgcgtggcgtccatcaacgcgacgacgaccgccgatggctttgcggtcattcacctcagtatttttatttccgacgcgcagcatctcgcggcggtcatgcgccggctgcaccagatcagcggagtgatgaaggtggaccgcccagcgggctaaattccgcgcatcgcgcggagagaaatgccgcctgcgggcggcaggaccacacccccccattttctttcccaagaaagaaaacgggcggtgtgaccgtccaaaagaaaggcgtttgattggcagccccaagctcgaacaacctttatgcctccggaatgcaactgtctgcgcgcggcgaagccgcgtcagctttgcaagacgatttgcctctgcttctactacccgctgttgcgcagccgttggcggctttgccgccttacggatgcggtacaccccttgcgggtgccgctctgctgatcttatagaagtacagtctaattttcgtctatcgctgcactactcaatgcggcgagcgcagcaatgccgcattccgcaggcagtctgccgccaagcaaacgtcactcgcgcctcacgacagtaaggcgcggttgcaaaatggtgacgtatcgcagggattcatggcgaagccatgtacaccgcacccgattgcgcagcgcgtgcagctcttcaagctacaaactcacaatgtcgggggtcgagggggactccccccgtccttctctgggggatacaaagggggtattctcttcgagaagagaataccccctttgacccgcgctccccacggcagtggggaccaaaacgtcgcccctttggggataaaaaggagaatcatcatgcgagcagtattgactaaggttcagcacgcctccgttacgatcgacggagagctcaagggcaagatcggcaggggctttttgatcctgctgggcgttgcgcctaacgacacggaagaaaaatgccgcaaaatggcggacaagctctgctcgctgcgcatttttgacgacgagaacgacaagatcaacctctccctcgacgatgtcggcggcgagcttctggtcgtttcgcagttcacgctctacggcaactgccgcaagggccgccgtcccgaatttttaagcgccgcgcggcctgagatcgccatcccgatgtatgaaaagttcgtagagatctgccgcgaaaagggctaccatgttgaaaccggcgagttcggcgcctacatggaggtcgaatcgctcaacgacgggccgttcacgctgatcgtggactccgccgacttagacgcaccgaaaaagcagtaaagaaaggggttatttcttcatgaaagtcatcaccactgtcgtcggctccctgcagacgaattgctacctgctcatcgacgaggaaacgaagtccgccgcgctcatcgacccgggcgacgaggcggaaaaactgctcgcgctcgtcaaaagcgagggcgtcacgctcaaatatattctgctgacccacggacaccgcgaccacacgctcgccgtgcctgcactcaaaaaggcgctgccggacgtgcccgtctacatcggcgaggcggacgcccactccaccggcatctaccactacccgatggccgacctcgtccccgatctcaaatactatggcgagggcgatacgctgccgctcggctcgctgacgatcaaagttctcgccacgccgggccatacgctcggcggcgtgacgctgctggtcggcggcgcgatgttccccggcgacacgctgtttgcgggctcgatgggccgcaccgacctccccggcggcaacgacgcgcagatgctcgcctcgctgcgccgtctcgcccagatcgaaggcgactacactgtttaccccggccacatgaattccacaacgctcgcgcgtgaaaaggcgatgaacccgtatctgcgccatgcgctgcgataaaggacacgaaaccacatgaaacttgagctcattgggcatgatgaaaaatacgcgctggagcagagcttactcacgctcttccccggcgaaaagcccgtttacggcacggtcgacaaaaccgccgacgcgcgctgggcgcgcgtgacgctcaccgaagaggacgagcgcgtgcaggtgacgacggagctgggcgtggacggcaagtccgccgcccacagctacgactatcccctctccggcacggagtatgaaaaggaagggcagcgccgccacgccgtcggcatcagctttttcggcgcggcgaaggacctgctcggcatctcccccgcgtgggggagcctgaccggcgtgcggcccagcaaggtcgcgctctcgctcatccgcgagggcggcaaaaaacgtgcggaaaaggaattgcaggagctctactgcgtcacgcccgcgcgcgcccgcctcgccattgaggcggcagacgccggcatccgcgccgcggcggagctggagccgaacgatatctcgctctatgtcggcatcccgttctgcccgacgcggtgtgcgtattgcagctttgtggcgcagagcgtcgaaaagtcgttctcgctcgtcgagccgtatttagaggcgcttttcgacgagatcaccgccgcggggcagctcgtgcgcgagttggggctgaacgtcaagtcgttctacatgggcggcggcacgccgaccacgctgaccgccgaccagatggaccgcctgctcacgaaattggagcagaattttgactttaacggtctcgccgagctgacgatcgaagcgggccgccccgacaccatcgaccccgaaaagctgcgcgtgctgcgcgcgcacaacaccacgcgcgtttccatcaacccccagacgatggaggacaacgtcctcgcagccatcgggcgccgccacacggcggacgacatccgccgcgcgatggagcaggtgcgcgccgcgggcttcccgcacgtcaacatggacctcatcgcaggtctgcccgaggacacgcccgagggctttgccaggagtctcgacgaggtcatctcgatgggcgcggacaacatcacggtgcacacgctgtctctcaaaaagggcagccgcatcatgctcgaaggcagccgcatccccggcgcggacgaggtcgcgcaaatgctggactatgccgaccccacgctgcgtaaacatggttttgccccctattacctctaccgccagaagtacatgtccggcagctttgaaaatgtcggctggacgaagcccggcggcacggggctctacaacatctacatcatggaagagctgcactccatcctttcgctcggcgcgggcggctcgaccaagatggtcggcggcgggcagatccgccgcgcgttcaacgccaaatacccgcgcgaatacatcgaccggcccgaaaagcgacgcgcgaacctgatggacttcgcccgcttttacgccgaacaaggagaataacgatgaataagagtgatttctttaccgccgacgcggtcaagccgcacttcacctatgatgattactgcgagagcgcggatatgatcgcgtctcacctcggcgatttccgtcccgaggtactgctggtgctcggcagcggcctgggctttctcggcgaccgcgtcgaggcgcgcacctgcgtgagctatgcggacatcccgcacttccgcgcgtccaccgcgccgggacacgagggccgctttgttttcggcgagctgcgcggcaagcgcgtggcggtcatgcagggccgcatgcactgctacgagggctacacgatggaggacgccgcctacgcctgccgcgtcatccgcttactcggcgcaaagacgatgatcgtgacgaacgccgcgggcgcggtgaacaccgagtattccgcgggcgatctgatgctcatttccgatcacatcaagcttttcgactttggcccgctctgggggccgaatatcgacgagttcggcacacgcttccccgatatgtccaacgtctactctccccgcctgcgcgagcttgccaaggaggtcgccaaggagcaggacctcacgctgcgcgagggcgtttacatgtacttccccggcccgcagtttgaaacccccgctgaggtgcgcgccgcgcgcgtgctcggtgcggacgccgtgggcatgtccaccgtgccggaggccatcgccgccgcgcactgcgggtatgagatcctcggcgtgacgctgtgcgccaacatggccgcgggcgtgctgccccagccgctctccggcgaggaggtcaacgagatggccgagcagtcggccccgcatttctcctcgctcatcctcggctgccttgagcggctgtaaaacagtttatttcagcgaaaaggaaaaggtcgaaattttaatggctacggaaaagaaacagtcctttttcggcggcgcggcggtgttggccgccggcgtcgtcatcgtgaagatcatcggcgcgctcttcaagattccgctcgcgaacattctgggcgagacgggcaacgccgacttcaacaacgcctacaacatctatgccgtgcttctgaccatctcgaccgcgggacttcccgtggcgctctcgaagatgatctcggaggcgaagacgctcgggcgcgagcgtcaggcgcggcgcgtgctcaaggtgtcgttcgccgcgtttttaacgctcggtgtcctctcgtttgtcatcatgtggttcggcaacgagaagtgcgcggcgcttctcaataacccgaacgccgcctacggtatcaaggcgcttgccccgggtgttgtgtgcgtcggctgccttgccgcgttccgcggctttgcacagggcagcttccgtatgacgccgaccgccgtctcgcagatcatcgaggcggtcagcaagctcttcatcggccttggcctttcgatgtacgtcgtgagccttgggtacgaggactacatcgccgcggccgcggccatcgtcggcgtgacggtcggctcggtgctcgcgctcgtctacatgctcatcgactacttgcgccaccgcccgcgcaccccgggcacagacacgccggatgcctccggcgcgatcttgaagcgcctgctctcgatcgccatccccatcacgctgtcggcctcgatggtgtcgatcatcacgctgatcgacacgtcgcttgtgcagggccagctccagaacgcgctgggctacacgctcaaggagacgcgccacctctacggcacgtattcctcgggcatgaacctctacaacctgccgtcgtcgatgatgacggcgctgacgatctccgtcatcccgacggtgtcggcctcccttgcgcgcaacgaccgcgtgcacacgtcccgcgtcatcaactcatcgctgcgcgtcacgggtctgatggccttcccgatgggccttggcctctgggcgctggctgagcccattatgaagctctgctacccgcgctatgacagcgagctcggcggctcgcttttagccgtgctcggcatcgcgagcatgttcgtctgcctgatgctcatttcaaactccatcctgcagtcctacggccgcgtgcatgtgcccgttttcacgatgctcatcggcggcgtggtgaagatcatcttcaactacaacctcaccgccgtgccgtccatcaacatccacgccgctcccttcggcacgctcgtgtgctttgtgatcgtatcgtcgcttaacctctttttcgtctaccgcacgatggaggataagccgaattacttcaaggtctttgccaagcccctcgtcgcgtcgctcgtgatggccgtgtgcgccagattctcctatcgcttcttcgccgcccatatcgcgcttggcggcgcgaccacgacgcagatcgtgaacgtcggccttgcggtcgtgctggcggtcatcgtgtacgtcgcgcttgtcctcgcactgcggatcgtcacgcgcgacgacctcgcgctgctgcccaagggcgaaaagctcgcccgcatcctgcacgtgcgctgaaaacccctgaaaaatcagggaaattgcgcaaaacaccttgcaatgagagggaatatatgataaattatcctgagaaagctgtctacacatatgacgaccttgttgacatcctgcgcattctgcgcgcgccgggcggatgcccgtgggaccgcgagcagacgcacgagtcgaaccgccgcaactttttagaggaagcctatgaggccgccgaggcctttgacctcgacgatccggagctgatgaaagaagaactcggcgatgtgctgatgcaggtgctcttcaacatccacatggaagaggaagccggccgcttcacgaccgacgatgtgaccgaccacgtggtgcgaaagctcatcttccgccacccgcacgtgttttcgaacacgcgggcggacgacagcgagcaggtgctcgtcaactgggacaagctcaagcggcaggaaaagggccagcgcaccacggccgacgcgatggattccgtcgcccgttcactccccgccctctggcgggcggacaagctgcagagcaaggccgcgaaggcgggctttgaattccctgatgtctccggcgcgctcgacaagctcgacgaggaggcgcaggagctgcgctccgccgtcgaaagcggcacaaactttgaagaagagctcggcgacgtgctgtttgctgccgtcaaggtcggccgcttctgcggcgtcgaccccgaggcggcgctttcaaagacctgcgaaaaattcatcgcgcgcttccgcaaggtggaagagacggtgaatgcgcgcggcgaggatatgtccgctctcccgctcgatgagctgatggcgctgtggaacaacgccaaggaacaactcagatgaccaaaagcggcaacgctttttgctcatatacaccccggaggccccgtctccggacactattcaggaggatcaaacgatgaacaagactgaactcattgctgccgtggcggaaaaagccagcatttccaagaaggagtccgaggttgtgatcaacgctgccctcgacaccattatcgactctctgaagaacgacgagaaggtccagctcgtcggcttcggctctttcgagaccaagcaccgcgctgagcgcaccggccgcaaccccaagaccaaggagagcatcaccatcgccgcttccaaggtcccgaccttcaaggccggtaaggcgttcaaggacgctgttgcggagtaattccccagtcaagctctttcatcatcaaaacggcggcgcgatgcgccgccgtttgagttggtggagcccctttgatcccgcacttttccgaaaaggagacgaattccatgcgtcttgacaaatatctcaaggtctcgcgccttatcaagcgccgcaccgtggccaacgaagcctgcgacggcggccgcgtgaccgtcaacggcaaggtcgcccgcgcgtcgtacgacgtgaaggtcggcgacgtgatcgcgctgcacttcggcgagcgcgtgctcgcggtcgaggtgctcgatgtatccgagaccgccggcaagagcgaggcctcgctcctctaccgcgaagtgaacgcacagtaaaccgtactattttgggtgcgcccttcatacgttatcgtatggagggcgctttctttgcgcccaaagcgaaaggacgggttctgactatgacttacgacacttcccccgcttctccccagcgcatcgaattatccggccgcgagagcctgacggtctccggcgtagaggatgtcgaccgcttcgatgagaccgagatcgtgatgaacacgtcgctcggcgtgctcgttgtcacgggcgacagcctgcacatcggcaagctgagcctcgacggcggcgagctgcatgtcgacggacgcatcgacgccatcgcctttgaggatgcgccgtcaagccgcggcggcctgctctcgcgcctgttcgggggttgaggcaccgtgggcgtgtcgctctccgagcaggcgcggtgctttctcgcctcgctcctgctcggcttcatcctttctctcctctatgacctgctgcgcgccgtgcggctgcggcgggcgacgaagcggcgctttacgagcgcactcgatctcctctactgcgcggcgttcgcgctgctgacgtttctcttcgcgctgcgcatcggcgggggcgagctgcggctctatatgctttgctcggcgttttttggcgcggtgagctacttcacgctctgcgcacggcttttccgtccgctatgggccttctgggcggaggtgctgttctcctttgcgcgattagcggcggcgccgctgcggtggctccaaaaagtttatggtaaacttgccaaactttgcaaaagatactttcttttttccagaaaccggcttataataaagtcgtatgagcgccgcgcccgttattcgctgcgccgcgcaaggaaaaaggaggctcatcggcatgacagagcaggccaaaaaaagcaaaaagcgcaccagccttctcacgatgctcgtcatcgcaattctgatcgcactggtaggggtgcagctcattcatctgcggagccagatcgacgacgcgcgcagccagctcaccgcgctgcagagcgatcttgacgctgccaagcaggagaacgacgcgctctcgtcggcgctcgaaaaggccgacgaccctgagtttttgcaggagcttgcccgcgatcagctcggctacgtaacgccgggagaaaagacattctatgacgtcagcaactaaaaagagaacatgattgaagcgcccgttgagggcgcttttttcttgcgtgaaataaaaaggagccgccggccaagatggcccgcggctcaaatgggtgggatattggaaagcttccgatgcttatgataccgcccgtccgccaaaacgtcaatgggagcttttgccgcattctgccgccttttgtcaattcgcgtcgtgtgccttatattttgtcaatatgtacaagaatgctcaattcatatatcgttcatttgaaattttcgttcatttgtgctatgatatagaaaaggaaacagaagagcccttcgccctctctttccttcctcaccaacgaaaggagccaacactatgaaattcacctacacctgcaaaaaagtctccctgaacgattccgtcaaggcctatgccgagaaaaaggtcggcaagctcgagaagtttttcaaggaggagcccgaggcttctgtcaccttctccgtcgagaagaagaaccgctgtgtcgccgagatcatgctccgcggcgccaacggcacgctgttccgcgcggtatgtgaggacccggacggcgacatgcgcggcgcgatcgacgaggccacggcccagatcgagcgcaagatccgcaagaacaagacccgccttgccaagaacctgcgcgccgaggccgtgatgccggagctgcccgaggagttcgaggcccacgaggagggcacgttcgacatcgtgcgcaccaagcgcttcaccgtcaagcccatgagcgtggaggaggccattttgcagatgaacctgctgggccacagcttcttcgtcttccgcaacaccgatttcggcgatgcgatctgcgtcgtttaccgccgcaacaacggcggctacggcatcatcgagaccgaggacgacgaggagtaagccgttcagaaagcatatagaagggctgcgcgaaggccgactccgcataagaaaacatgcggttttgcctgcgcctttttggctgaaatacaaccgaaaaaatctccccatacgccagtatggggagattttttcagctgatttca

SEQ ID NO: 10101 - DNA, 34116 bp, Unknown
  gut microbiota DNA sequence
cgccgccgccgtttctgccgccgatgttggacgcgagcagcttgaagcccagcccgtcctcggcattgcggacgaccgtccacgccttggaataggccatggacatcgacagtgccgccgcgcgcagcgaatgcagctcgtctacgcgcttcaaaagctgggacacgccggggccaaagcatttctggtcggaaaacacacgggcggagagaacaacgcggagctcacgatccatagggcggcacttcctttctgttgtatttcattatatccaggtgaatgcggttcgtcaatacggcaaaagctaagcgggagcatgccgctcccgctttcttcactttaaggtgttgtagtgcgtattttcgccgtcgaacaaaaagccgtccgtgtcgtgcacgcggccgttcgacagcatctgccggtaacgcacatcgttcgagattccattgatatttgtgcctgtcaaactgcgtccgttgctgcgcagctgcgcgtttgcgctcttttccgtctcggggttcagataggtcttgccgtagaggttgccgttttcgtgcgtgatggtcttgtcgctgccaaagtagcggctgcggtcgctggcgctcgcggcggcattgcggcggtcgacgctgcgtgtcgtattctctccgtcgccgtccatgtcgtcgcccatcatgccgtcgccggtcacgctgtcgtcttttttgttttcgccgctcatgtcgtcgcccggcatgttatccttttctttgccgctgtccgccgcgccgttgtcggtcgtaccggtcgacgggccgttggcggtgttgctgtccttcttctccccgcagcccgcgagcgagaagagcagcagcgccgtcacaaaaagcatggcaagggtctgcttcattgctgcatttctccttacgttcatctcccgcgatacccaagcaatagtatgcgcacgaagcaacaagaaaccagacgtaaattttgtcaaaacgcatgtcaccgacactaactcggcaaaaagcctcgcagagtttcgcgcccataggcgcgaaataattataattatttttctgacgacatgtgcgtcagaaaaatacttctcgcccgcaagtgtggaaattgcttgcctgcggcaagcaatttctgcgcgcagcaggtgtaaaaagcaaaaaagaggacaccttacggtgtcctctttttttgagtattttacttgctcgccttcgcggccttgaaggcctcgatcagcatcggggtgaccttgaacaggtcgccgcagatgccgtagtcggcgatctcgaagatcggcgcggtgtcgttcttgttgaccgcgatgatgcactcggactcgctcataccggccttgtgctggatggagccggagataccgagagcgacgtagaccttcgggtggacggtcttaccggtctgaccgacctgatggtcggcagtgagccagccggagtcgatggcaacacgggagccgccaacaacgccgccgagcacatcggcgagctcgtgagcaagcttgatgccgccctcgacgtccttggagataccacggccgacggagacgatgtagtcagcgccaaccaggtcgacgagcttcttggcagccttgacgacctcgacgacctcggtctggagatcggcagcgtcgagcttgacgtcgtacttggtgaccttaacggccttggccttcgcctcgtcgtaagcagccttcttcataacgccgggacggaccgtcgccatggagggacggaagcgcgggcagatgatggtagccatcaggttgccgccgaacgcgggacgggtcatcttcaggtcgcgagagacatcgtgatccttacccatgaccttcgcggtggccatgccgtcgatcttggcctcgggcagcgtggaagcgccgcgcaggaagtccttgtagatgggcatgtcaacgtcgaggtgggtgcagtcggcgcagagaccggtgtgcaggcgggctgcgcagcgggggccgaggtcacggccgatgttggtcgcgccgatgaggaaagcctcgggcttcatctcggagatgacgtcgcagatgaccttggcataggcgtcggtggtgtagttcttcagcagggggtggtcgcagacgatgacctcatcagcgccgtagccgccaatgctctcggcgagatcgccgacattgtcgccgaccagcagaccgcagagcttcacgcccagctcgtccgccagcttgcggccttcggagatcagctcataggaggtggacatcatctggccctgacgctgttcgcagaagacccatacgttcttgaactcttcgatcttggaggagtcatagttggggttagcaagtttcacttcgttacgcatcgtattgatctcctttccttaaatgatgtgtttttcgagcaggatgccggcgagcttctcgcaggtagccatgtcgttgccctcgagcatctgaccggcgcccttctggggaggcgtgaaggaggtcaggatgttggtcggggagcccttgaggccgatggtggtagcgtcgatgagggggtgatccttcagggcgttgtagtccagaacggtcatgggcttggagtagcactcaaacacaccggagacgctcatgtaacgcggggtattgagctccttgatgcaggtgatcaggcacggagtctgagccttgatggtcatgtagccgtcctcgagcatgcgcttgacggtcagggtgtcgccttccttcttcacatcggcggcgtaggtgatctggggcaggtgcagcttctcagcgatctgaggaccgacctgagcggtatcaccatcgatagcctgacggccgcagaagacgatgtcgtcgtcatcgagaccgatggtgtcgagagcggcggcaaggatctgggaggtggcgtaagtatcggaaccgccgaactcacgggcggaaacgagatagccgtcatcagcgcccatggccatcagctcgcgcagcataccttctgccggcgggggacccatggtgacgacggtgaccgtgcagcccagctcatccttgagcttgagagcggcctcaacggcgttcatatcatcggggttgatgatggtctgcatggaagcgcggttcagggtaccatcgggattgacggcaaccttaccggaggtatcggggacctgcttaacgcaaacaagaatcttcattatatctttacctccttttttagttcacaccaagatacttggcaacgaccatacgctggacttcggaagtgccctcgtagatctcggtgatcttggcatcgcgcatcatgcgctcaacgggatactcacgggtgtagccatagccgccgaagagctgaacagcgcggcgggtgacgtcggaagcggtctcggccgcgaagagcttggccatggcagcgtccatggagtaatcctcgtgattctgcttcttcatagcggcagcgtaaacgaggtactgggcagcctgagtgcgggtgtgcatgtcggccagctggaactgggtgttctggaactggctcaggcggcgaccaaactggatacgctccttggtgtacttgacagcctcgttgatggcgccttcggcaagaccgagagcctgggaggcgataccgatacggccgccgtcgagggtcttcatggcgatcttgaagccttcgccttccttaccgagcaggttctccttggggacgacgcagtcttcgaagacgaggtcgcaggtagagctgccgcggatacccatcttcttctcgtgcttaccggtggagaagccggggaagtccttctcaacgatgaaggcggtgataccgtggttgcccttgctcttgtcggtcatggcgaacacgacgaaagtggaggcaacgttaccgttggtgatgaagcacttgctgccgttgaggacgtagtcgccgttctcgttcttgacagcggtggtctgctggccggaggcgtcggtaccggcgccgggctcggtcagaccgaacgcaccgatcttgcggccggacagaaggtcaggcagatacttcatcttctgctcctcggtgccgttctcgaaaatgggagcgcagcagagggaggtgtgggcggaaacgataacagcggtggtgccgcaaaccttagcgagctcctccacgcacatggcataactgagaacatcgccgccggcgccgccgtactgcttcgggaagtaaatacccatcatgccgagcttggccatcttttcgacggtctccatggggaagcgctcttcctcatcgagttcctcagctaaaggcttgacttcattttctgcaaattcgcgatacattttgcggaccagcagatgttctttggacagatggaaatccatagtcttttgctccttcactataaaaataattggattgtctaatttttcacaaatcagttccgtgactctcattatatcctgtgcgtttcattttcgcaaggggaactatcattcctttttggaattcgtgctttttgccgaattcattaaagtctttttgacatttccgttccttttatgacagttttctgtcattttcaggaatcctttccattccaaaagagaaaaggagaggcagtttttgtaaactgcctcccctttttatccttttagggacggattacttcttgctgtaatcgtagaagcccttgccggacttcttgccgagctggccgccgcggaccatcttcttgagcagcagagcgggacgatacttcggatcgccggtctcgctgtagaggacgttcataatggcgaggcacacgtcaaggccgatgaagtcgcccagggcgagggggcccatggggtggttcgcgccgagcatcatggccttgtcgatatcctcgacagaggcaacgccggtctcgaccaggccgatggcctcgttgatcatcgggatcaggatcttgttgacgacgaagcccggagcctcagcgacctcgacaggctccttgccgatctccttggagaggttgtagatgaagtcgaaggtctcctgcgtggtgttggcgccgcggatgacctcaacgagcttcatgctgggcacggggttgaagaagtgcatgccgatgacggcgtgcttcaggccaagacccatctcggtgacagacagagaagaggtgttggtcgcgaagacggtgctctccttgcacatctcgtcgagctcgccgaggagctgacgcttggtgtccatgttctccgccacgcactcgatgacaaggtcggcgtccgccgcggcagacttctcctcgacgagaatgttgttcaggatggcgtccttggcctcttcggtcatcttgcccttctcgacgcgcttctgcagggaagcggcgagcttatccttgtggcgctgagcggaagcgacgctggaagcgtacatcagagcggtgtggcccttggccgcgaagacctgagcgatgccgctgcccatggtgccggcgccgaaaactgcaactttcattgtgtgtatcctcctacaatataaatagataattctatggaatcacttgttgataaagggctcgtgcttgcgcttttcgaggaaggcgcccatgccctcctgctggtcggcgctctggaagcaggagccgaaggccttctcctcgatcacgacggcgcggtcaatgtcgacctgaagaccgtcgttgatggcctgcttggacgcgcgcaccgcgatgggcgcgttgccagcgatctggccggcgagcttttccgccgcggcgtagaggtcagaaagcggatagaccgcgttgacaaggccgatgcggtaggcctcgtccgccttgatgttgcgggcggtgtagatcatctgcttggccatgccggggccgacgaggcgggcaaggcgctgtgtgccgccaaagcccggcgtgatgccaaggcctgtctcgggctggccgaagacggcggtatcggagcagatgcggaagtcgcagctcattgcgagctcgcagccgccgccgagggcatagccgcccaccgccgcgatcgtcgggatggggaacgcttcgagcttgcgcatgacgtcgttgccctgcttgccgaaggcctcggcctcctccttgctgagctccttcatctgcgcgatgtccgcgccggcgacaaaggacttctcgcccgcgccgcggacgatcaggcagcggatctcgcttaagtccaccgcgtcgagcgcggcatcgagatcggcgagcacctgagaattgagcgcgttgagcgccttttcgcggtcaatgatgagataggcaatgttgcccttgggttcatatttgacaaaagacatcgtgtgtctcctcctgtcttcttcaactgccccctattatatgggcggcaaggcatatttgcaagagaaaaatcacttttttcaaaaaagtttcacacttttccggtgtcattgcaagaaacgttgcatttttaatgatcttttctcccaatgcagcaactcttgtataaaatttttaaaatgacttgtctcttgcaccaattttcgatatgataggctttaattataggaaaacgaggttcattctatgcgaatgcgcaaaaagaaaaacctgcttccccgcatggagcggtgcggggcgtatcagatcaaggacccctacgagcgcaagggccgctggcacgacttgatgcccgaagcgaaggagatccgcgtggagctcggctgcggcaagggccgcttcaccgtcgagacggccgcggcggagcccgacgtgctgctcatcgcggtcgaaaaggtgcccgacgcgatggtcgtcgcgatggagcgcgcggcgaaggcagagctgcacaacgtcttcttcatcgacatcgacgccaaccagctgcccgaaattttcgatgcaggcgaggtcgaccgcatctatgtcaacttctgcgacccgtggcctcccaagcggcaggccaagcgtcggctgacgcacggcaatttcttgaagctctaccgcaaggtgctcaaggacaacggccaaattcatttcaagaccgacaacgacccgctgtttgagtggtcgatcgaggagatcccgcagtttggcttcgaactctctgaggtcacacgcgatctgcacgcgaacggacagcgcggcgtgatgaccgactacgaggccaaattctatgccgagggcaagaacatcaaccgctgcgtcgccacgatgcagccgtgggaagagcccgaggaagaggatacgcccgaagaggcggacgaaacggctgaataaaaggaaggctttcagccttcctttttgctttcttccagatacggcgaatacatcatcaccgcgtcgttcacggcgacaggcgtctccgcgagcagcttgccctgcaaatcaaacgtctgccggtagagctcgttgtggcggatgtagccgccccagtactgcgcgcgcatctcgtggctgcgctcgacgaccgcatagcgctcggtcggctcggcgctcacgcgccactcgccctcaaggtctgttttgccgacgcggacgcgcatctgataggtgtcctgtgtgtcgttgcggatcatcaggtcaagataggggtaaaagcaggtcgcaccgctgccgaagggctgcgtgcggttcgcgtcgggaaagacgtcgtagccgtggcggtggcgctcgacgaccgtgagcggcgtgtgcagcgtcatccagtagatgaggtttgagagctggcagagcccgccgcccgtcgcggccagatacccgccgttgcgcaggatcatgccgggcagataccccttccccgctgtcggctttccgatgagataccagtagctcatcgtttcaccggggcgcagcaaaagcccgtcgagccgcgcacaggcgaggcggagattcgtcaccttgttgcgctggagctgcatgtcgacgtccttgagctttcgcatgagcggcgtatggtgggaaaacgcctgatatgctaagtcttccccgctgcgctcgcgcgcaaaatgcttccgcatcgaaagccatctgagttttcgctgcgcgctaaaatacacgccgccgagcttcagccgcaaattagagcgttttttcggttcacggacggtcatatgcttccctcccctgtttttctgcttttatagacgcaaaacggcgggaaaaagttccaacattttcttatttcaggctcatcacgtagatttgacacgggttccactcgtcccagagcgtcgggaatacctcaaactcgccaaaaccgagggcgagatagaagcggttcgtcgcgtcgtactcagggtacttccccatctgcacggtcttgacctgcaaaaacgagtagtcaagctccttcgcccgctgcttcgctgcggcaaagagcatcttgccgacgccgcggcggtggtattctttcagcacacccatgacatagagttccgccgtatccctccccgtttcggcaaggtaaaggaagccgacggcgttctcgccgtcgaacgcggcgaaaaacggctgcttaacactcttttcgatgtattcctcgcgcgcctctggaatgccaaaccagtcgggcagcgattctaaaatcaagcgcgtaatgcgccgcttttcatcggaagtcgtaatttctctgatctccatagttctctccattttaaatattcagtctgcaaaaaaagcggtatggcaatgccataccgctttttgatgtacgttaccgctggcccttgtcgtaggggatgccctcggccttgggggcgcgggagctcttggacgtgaacgccagcacgagcagcgtgacgatgtagggcagcatgcggtagagatgggcgctgatgccgatctcggcgagcatgtagacgccgtcgccgttgatgtcgatgctcgcgtagctcgccgcgatgcacttgaagaggccgaacagcagcgaggaggccgcgatattcacgggcttccagttgccgaagatcataacggccagtgcgaggaagccgaagcccgcaacgtcgccgttcgaggcgcagtttgccgttgtcagcgcatagacgaagccgcccatgcccgcgagcgcgccggaaatagtcgtgcccgcgtagcgcatcttgtagacgttgatgcccagcgaatccgccgcctggggattttcgccgcaggcgcgcaggcgcaggccgaagcgcgtcttatagagcaggatcgacaggatgatgaaaagcagaatgcagacgtaggtcgcaaggtagaccttgttgacgaacgtctcgccgaaaaagccgaggtcggtgttcttgtcgatgccgagcgtagactttttgatcatgaaccagctcgccgcgtcgcccgtgagcatctgcagcgtattctggttggcgatgatgcggatgaagaacagcacgagtgcaggagccatcaggttcagcgccgtgccgccgatggtctggtcggcacgcaggttgatggacgcaaagctcagaagcagcgagaacagcgcgccgaaggccgccgcgaccagcatcgtgagaagctccacgccctgtagcgcgacccagttgccgctctgcttgagggagaggatggcatcgctcgtctgcaaaatgcgcacgaaccagacgccgatgaatgcgccgaagaccatgataccttcgagcgccaggttgatgataccgctgcgctcggcgaacacgcccgcaagcgccacgatcatcagagggacggcataaatgagcgtctgctgaatgaggaatgtcatttcgcgtcgcctcctttctccgtttccgcttgtgcaccggctggtgcggaagctgccgccggtgcgggctccgcgttggcatccgcgccgtcgtccttctttttgccgagcttgccgatccacatcttgatgaccagcgagaaggcgctgaggtacacgatgacggcgatgatgacgttcgtgatgtactcgttataggccgtcaggttcgtcagctgcaggcccgagatatcgagcatcgacatgaacagcgccgtgaagatgatgccgatggggttgcaggaggcgagcatcgcaacagggatgccgttgaagccgatggcagggagcgactggtacgtggaccagaagaactctgtgttgccggagagatagtagagcgaagcgcccgccgcgctcagtccgcccgcgatcgccatggagatgacgatgttacgcttgtcggcgataccggcgtagcgcgcggcatgacggttggagccgcaggctttgagctgatagccgaacgtcgtcttggacatcatcacgtaaacggcgactgcaaagacgatggcgatgaggatgccgccgttgacctgggagttcgggaagagcttgtcaaggcccatcttcgcggtggcaacgccgttgtaggtcgtcttgtagatgtagccggtcttggtggactcggtgacgttcttaaagttgctgatatcaaagagccatgtgacgaggttcgccgcgatccagttcgtcatgatgcaggcgagcacctcgttgatgttgagcagggccttgaaaaggccggggatcgcgccccagatcgcacccgcgagcgtgccgccgagaaaggcgagcagccagatgagcgtggtggacatcgtctcggacggaaggccgagggcgatggagagcgacacgagcgtaccgatgaggtactggcccggcgcgccgatgttgaaaaggcctgttttatacgccatgccgacggaaaggcccgtcatgatgagcggcgcggcacggaagagcatgttgccgatattcgtcgggttgaagccccacgtcagcgtgccggaggcgtcgcgtcccgtggagaacaggccgccgaacacgatgcggatgccgtcccacgccgaggagagcgagaggttcgggctcgtgagaccgacgatcaaaatgacgatgctgccgacggcgaggccgatcaggatcgagaggacggacgccgcgacggtcttaaagccttcgctttgcaggaagtgttcttttttcatacggccgcctcctccttcgccatgcgcttggcgccggccatgtaaaggccgagctcttcgacggtggttttcttcgggtcgagctcgccgacgatctcaccctcgtacatgacgaggatgcggtcagagaggctcatgacctcgtccagctcgagcgagacgagcaaaatcgccttgccgcggtcgcgctcggcgacgagctggctgtggatgaattcgatggcgccgacgtcaaggccgcgcgtgggctgcacggcgacgatgaggtccttgtcgcggtcgacctcgcgggcgatgatggccttctgctggttgccgccggacatggaacgcgcgcgcgtaatcgcgccctggccgctgcgcacgtcgaacttgtcgatcaggtagttggcatagtcgcgcacagccttgttgttgataaagccgtggttttcaaagcgcggctcgttgaagcgctggagcaccatgttctgctcgagtgtgaagtcgagcacgaggccgtgcttgtggcggtcttcgggaatgtggctcatgtgctcgccgcggtggcggatagaggcatgagagatatccttgccgcagagggtgatcgtgccggaggacggcttgtcaaggcctgtcaggccgtagacaagctccgtctgaccattgccgtcgataccggcgatgcagacgatctctcccgcgcggacggtgaaggaaacgtcgttcacggcgttacgcttctgcacgtgggagtggacgcagaggtggtcgaccttcaagacctcgcccgcaggcttggcctcgtccttcgtgacctcgagctgcacggggcggccgaccatcatgttggaaagctcctgcttggtggtctcgctcgtgttgaccgtgccgatgtacttgcccttgcgcaggacgctcacgcggtcggagacctccatgatctcgttgagcttgtgggagatgaacaggatggacttgccttcgcgggcaaactccttcatcgtggccatcagctcttcgatctcctgcggggtaagcaccgcggtcggctcgtcgaagatgaggatctcgttgtcgcgatacagcatcttcagaatttcgacgcgctgctgcatgccgactgtgatatcctcgaccttggcgtcaaggtcgacgttcaggccgtagcgcttcgagatctcttcgacctttttgcgtgcctctttcttctgcaaaaagccgcacttcgtcgtctccgcgccgaggatgatgttgtcgagcaccgtgaaaacgtccaccagcttgaaatgctggtgcaccatgccgatgccgagcgcggtggcgtcgttcgggtccttgatggacacgaccttgccgtcctttttgatgatgccctcctccggctgataaaggccgaagagaaccgacattaaggtcgattttcccgcgccgttttcaccgagcagggcgtggatctcgccctttttgagctgtaaggtgatgttgtcattggcgataataccggggaatttcttcgtgatattcagcatttcgatcgcatactgattctccaagttttttcgccctccttccgttttgatggcccgcacgcgctgcgctgcgaggacggaaaccataactacattatactatatcacgttttccgatgaaaagcaaaaggttttcgcatgtctttccctgtcagaaatgtgaaaaagaacggaagaccgaagtcttccgttcttttatgtatgcgctattgggaattagccgccgatgtagttgacgttgacgttgctcaagccggcggtggaggggtcagccatctcggagttgttgtcgatggtgatgtcgccgttgaggaccttctggaagaggtcttcatagtcagcaacggagaagttctccatggaccaggtagcggtcggcaggccgacagcattctcagcaacgcccagggaggtggcagcattgccgatctcgtcccaggtgccgtcgtagaccttggcgatggcccaggaggcagcgtcgctcaggcccttcatagcggaagtgacgacagtctcggactcgctggactggtcgacgtcgacgccgacgaccttgccgtcctcagcggaagcggcagcgacgacggactggaacatggaaccgccgcaggcgaagacgatctcagtgccgttggagtaccagccggagaccatggtctgcagctcgggggaagcctggaaggaagcgccatactcccaggagtagttcaggtcgacggtcttatccatttccttagcagcgtcgttggcgccctgagcaaagccccagccgtaacggatgcaggcggggttcgtgccgccgccgccgccggtgaagccgagcttctcatagccttccttgacgacagcgtaaccggcgaagtagccgcactgctcttcgttgaaggcgatgcccgcaacgttgtcaaggccgagggaccaaccgtcgatgaagacgaacttggtgtcggtgaattccttagcggccttctcgagggccgtgccctgcatgaagccggcgcagacgatgaccttggcgccgccgtccacggcagccttcatggcgtcgtaacggtcgtcatcggtagcctgatcgccgttggcgggctgatagtacttgtagctcaggccgttgttggcggcatagagcttcacgccgtcgaaggtgccctggttgaaggacttatccttcagctggccgacgtcggtgacgaacgcgatctcatacttgccgtcttcggacgtcatgttgtcgtcgatatcgtcaggattggtgtaagtggtggtcccgccctgctgatcgtcggtgttgttgtcctggttgtcgtcggtcttcttatcaccgcaggcaacgagggacagaaccatgacgagagcgagaagcagcgcaaaaaacttcttcattcttctatccttccttatttttccggtcggcggcgggccgctctccggtttattttgaagtgcggacgcacttcgtctgacagtatagcaaaagcaaaggggagaatcaagtccgattctccccaattttacttttttgtgataattgatgggattctttacaaaaagtccacactttttacacgttattttctcagtcgagcttcaggtcgccgtccttgacccaaccgaggcggcggcagaccatattgatgagcggagcaaggatggcgggcagcacgatggcgacgaggatgagacccagccagtcaaagcccgttgggctcatggccgccgcgcccttggcgacagcctcctcgctcggggagacccagcccgtccacacgccgatgaggccgcacaggccgcaggtgcccataccggagttgatcggcgcaccgttcatctcaagatggaacacgcacgtggcgatggggccggtgatggcggaggcgagcgtcggcgcgatccagacgcggggatttctgacaatgttcggcatctggagcatggaggtgccgagtccctgagagacaaggccgccccagcggttttccttaaagctcatcacggcaaagccgaccatctgcgcgcagcagcccgcgacggccgcgccgccggcgatgcccgtaagtctcagcacctggcagatggcggcggaggagatgggcagcgtgagcgcgacgcccacgagcacggagacggcaatgcccatccagaacggctggagcctggtcgcgttgtcgatgacgagaccgaaggcggaggcggccgtgccgatgggcggcgcgatccacttggcgagcgcgacgccgactaagatggtcacggcgggggtgaccaaaatgtcgatcttcgtctccttgctcacggccttgccgcactcggcggcaaggatcgcgatgatgagcacggcgagcgggccgcctgcgccgccctcggcgttggccgcccagcccaccgcggcaagggagaagagcaccatcgggtcagccttgagcgcgtagccgatggcaatggccatcgcagggccggagacggacatcgcataggtgccgatatccgtcagaaacggaacgcccagctgcgcgccgagcgtcttgatgatcgtgccgatgagcagcgagcagaagaggccctgcgccattgcgccgagcgcatcgatgccgtagcgcttggccgaaacttcaatgtttttgcgtttgcagaacgctttgaatttttccatgatatcctcacagcctaaaaataaaatagtgtcatgcgcaggtgtcttgacacgtgcatatgacactataatcgcttgtgtgaggattgtcaacccttaatttccgttttcctccagcaggacgtgcagtgcgcgcagcgcactcttcgtgcgctcgaaggccgcctcgtcgggacacgagagtgtgtgcaggtggatgccgtcggtgagactggacagcggctccgcctttttgcagcgctcaatgaactggctgacctcgtagcggttcgaaatttgcagcgggccggtgagctggccgtagatggggtggtcgacgatgacgtcgatgaccgtacagccgttgtcgacgatggtgttgagctcggcttccatctcctgcggcgtgtgcttcacggcgacacggcggagaatgccgcgtgcctccttcggcgtcacatagccgcgcggagtggcgagaatttcctcgcccgaggagcgcagcagcgcgatatcgcccacgatgatctggcgcgagacggagaatttttccgccagcgcggaggcgctgaccggcgcgtccgccgcgtgcagcacgtcggcaatggcctttcgccgctcgtcagaatgcattcgctcttcctccccttttcgcgcaaaagcgccaaatttcgattacgtttcgtattatcaaaatcagaaattacagttcgttgtcggattttgccgatttaatactcaaagcagctgccgccgacgaactctcgcacgatggagtcgcgcgggacatagtccgtgcgcagcgacggcacggagttgacaacgtccatcaggtcgctcagcccgtgctcggcgataaactgatcgtcgagctggctgtaaaactcggggatctccttcaaataccgcgcgaggatgcacggctcgtagtcgtggaacgtgtcgatgtggatgctcgcgttcggcttgttcggcatgatgtagttgagctcgccgcggtcgacactctcggcgcgctcgacggtctgacgcagcgaatggccgcggccctgatagtcgcggatcatgcggcgcgccacgcgcagctgctcgggacgaacgatgcggtccttgtgcgtgatgatacgcgtacgtggggcaacgtaaacgcccgtagcttcgcttctgagctggtcgaaaatcagcgggttgagcatgtggatgccctcggcgatgatgacggcgtccttgtcgccctgcatgggcttgtagccgccgacgccgccggccttgaagtcgtagaccggcagctccacgagctcgccgtccatcaggcggtggatatcctcgatgagtaaatcgcggttcacgcagtagggcgactcccagtcgctcgcctcgggcggacgctgatcaagcggcaggaaaaagttatccatgctgagcatgcagaccttgacgccgaggttttcgaggtattcgcgcaggcgcatcgccgtcgtcgtcttgcccgagccgctcgggcccgtcaggcagacgatgggcttttgccccttgttcattaaaatgctcgccgcggcggagctgatcttgtcgtgaaagacctcctcgcagcgcaggacgaagcgggcatcgtccttcatgttggtcacaatgttttcaatgtcgatcacgcgcatggcatgataatctccttactttttggattctgccgccatctttacggctgtttcgagcgcgattttcatcatggcggtgaagctcgtctgccgcgcctcgggcgaaagctcctcgccggtgaggatattgtcggagatcgagcagagggaaagtccgcgctttttcgtataggcggcgttgcagtagagggcggcggcctccatctcgatggcgagcacgcccatgtccgcccacttgagcgacgggttcgacgcgtcgtagaacgtgtcggacgagtagaggttgccgacgtccatgcggacgccgagctccttcgccgattcaacggcggcggagagcagctgaaagtccgcgatgggggcaaatatgccgccaaggccgtactgcgcggcgtagttcgagttggtgcacgcacccatgcccgcgaccacgtcaccgagcttcaagtccttttgcagcgcgcccgccgaacccactcggatgatgctctcgacatcgtactgcgtgaacagctcgtaggagtagataccgatggacggcatccccatgccgctggccatcacgctgacgggaacgcccttgtaggtgcctgtgtagccctgcacgccgcggacgttgttgacgagccttggttcatctaaaaatgtttcggcgatgaacttcgcgcgcagcgggtcgccgggcatcagaacggtcctggcgaagtcgccctttttcgcgctgttatgcggagtcggcatattgagccctcccctttcttaaagttcgcccttggcctcgagctccttgacggccttgacgatgcgggacgtgccgaggcggtcggcgccgagcttgaggaaatcttcggcgtcctgcaggctcgcgatgccgccggcggccttgatcttcttgccgttggtcatgtgggcggccatgagggcgacatcctcgcgggtcgcgccgccgccggcaaagcccgtggaggtcttgatatagtcggcgtgagaattggagacgacctcgcagagcttgatcttctcttcgtcggtgagcaggcaggtctcgatgatgacctttaagatgttgccgtggcaggagattttcacagagttgatctcctgaaggatcttgtcgtactggccctccttgacccagccgaggttgatgaccatgtcgatctcggtcgcgccgtcggcgacggcggactcggcctccatgcacttgatgccgctgggcgtgtagccgttggggaagccgatgaccgtgcagatgggcagctggccgaagccatagtgctgctgctcggcgacgtagtgcgcggcgtgattcacataggtctgcgggatgcagacgctcgcgcagccgtatttgatgccgtcgtcacagatctgcttgatgtcctcccaggtggcagtctgcttgaggagggtatggtcaacgtgcttgagaattttcttaacgtccatgatatatttcctttctgtcgttgaaagcgtatttgatcaaaaatcgttttattttagcatgtttccgtgcttttgtctaccgtttcggcaggtctcttacagtgcgctgccgaaatactccgtcatcgcgcggatcaggaattcatagtcctgcacgcccgcggtctcccacgaagagtgcatcgcgagctggggcaggccgatgtccaccgtgctgaccggcacgagcgtatcggagatcgagccgagcgtcgagccgccgggaagatcggagcggttggacatgacctgcgtgggaacgcccgcgttttcgcacacggcgcggaaaatagcgcaggagcggccatcggtcgcgtagcgctgattggcgttgaacttgatgacgacgccctcgttcatatacgggcagttgtcggggtcggcgtattcaccgtggttggggtgctgggcgtgcgcgttgtccgccgagacgaggaagctgcgcgcgagcatcatctggagctcctgctcgtcctttccgaggcacagggcgatgcggcgcagcgtgtcgcgcaggaacgtcgagcccgcgccctgcttggtggacgagccgacctcttcattgtcgaaaatgcagcagacggcgatatttccgctctccttcgccgcaaggaagccctcgaggcagccgcaggcgcactcgagatcgtcgagcttgggagaaaggatgtactcctcgttctcgccgagcagcgtcccctcgccgcggcagtagaggaacaggtcgctgccgaggatgtcgttttctgcaacgtccgcggctttggcgacgatgggcaggatgccgccgctgtctttaccgccgagcagcggcagcgtgtcgatattcgcgaggtacttcatgccgtcgttcgccgtgcggttcatgtggatagcaacattgggaatgacgagcaggtcgcggtcgacgctcacgagtttttcgacgatctcgccgtttgcgcgcacgaagacgcggcccgcgacggagagtgggcggtcgaaccatgtggacatcagcatgccgccgtatttttcggtcgagagctggacataatgcgcgctgcggcggtcgggatgctcttttaaacggaacgctggcgagtcggagtgcgccgcagccatggcgaagccgccgtcgatcatctccggcacgcggaaggcgatggtgctcgagccgttgcggcggacgaaatacttcccgccgggggctacctcccagcgttcgcgttcggaaagctcggtatagctgtttgcgaggagcttttggcggatgttctcggtcacatggtagcaggtggggctatttttgataaaatgcagcagttctcttgccggtgcatgttgcatggtgatgtcctccacagtttattttcgtttggcggtattatagcacacgtcatgcttctcggcaagcggacactccctctgtgccgcacaaaacgggggcagcatttgtgcatttgtccatatttggcggaattatagttgattcttttatcgaaatcctttataatacagttgatttccgtcccccctcccgcatcgagcgggcttttgtttgcgctcttaagccggaaggaggctatttctatgaacgaatcctcttctcccgcgccagttccggtctcaccgctgtggacgcgggatttcactatcatcacattgggcagcgtgatctcgatgctgggcaattcgatgtccggcttcgcgctgagcctgcttgtgctggactacacgggctcgaacctgctctatgccatctatattgcgacatttacgctgccgcagatcgtcatgccgatcttctcgggcgcgatcctcgaccgcttttcgcgcaagaagacgatctacacgctggacttcctttcctccggggtctaccttgtcgctgcactgatcctgagccgcggctggttcagctttccgatgctcgcgttcttctgctttatcatcggctcgatcaacagcatctactatgtcgcctacgacagcttctatcccctgctgatctctgaggggaactactccaaggcctactccatcgcgagcgtgctggagacgctctcggcgctcatcatcccgatcgcaacgtacttttataatctcttcggcattgcgccgctgctcggcatcaacgcgctgtgcttcttcatcgccgcgacggcggagacgcagatccgcgccgaggaacactacatcgaaaagcagcgtgccgcgctcgcgctcgaagagcagcattcctcgggccgccagctcctgcgcgacatcaaagagggctttcgctatctgatgagtgaaaaggggcttctgcgcgtggccatctatttcacattcagcatgctggcctcgggcgcgtcgcaggtcatcacgctgccgtacttcaagtcgacattcgataacggcgaatacatctatatgctcgtctggggcatggcgatcttcggccgcgccatcggcggcggcattcattataaaatcaagctgcctgtgcagcataagtattccattgccctgatggtttatgtcgtcatctcgctgtgtgagggcttctatctctactgcccgctgccggtgatgatgctctcgtgctttttaacgggtatcctcggcgtgacgagctacaccatccgcatctccgccacgcagagctacgtgcccgacgagaaaaagggccgcttcaacggcgcgttcaacatgctcaacaccgtcggcagcttcacgggcaatctgctcgcgggcgcgctggtggcgtttctccccgtgcgcggcgtgctgacgggcttcatgctcgtcacggcggccgcggcggtcgtcgtcatcggcggcggacgcagggacgtatccgcgatttataaccggcaagaataagaaatgtaacaataaaaatttgatggaggaaacaacatgaaattttccgaaatgacctacacccgccccgatcccgcggcgagcaagcagcgcctttccgcgctgacggcggaactcaaggccgccaagagctatgaggaagcgcgcaaggtgttcctctcgcagcaggagctgatgagccacatctccaccgccgcgacgctcgcgagcatccgccactcgatcgacacacgcgacgaattctacgacggcgaggaaaaattctggaacaacttcaaccctgagctggaggaatacaatcagacgtggacggcagcgatgctcgaaagcccgttccgcgcggactttgaaaaggaatacggcgatctgatgttcgtcaatgccgagatcgcgctcaagaccttctcccccgccatcattcctgaattgcagcaggaaaacgacctgacgcaggagtatgaaaagctgctcgcctcggcgcagatcccgtttgagggcaaggtctacacgctctcgcagctctccccgttcaagacctgcgctgacgacgaaaagcgccttgccgcatggaaggccgagggccagtggtacaaggacaatcaggcaaaattcgacgagctctacgacaagctcgtaaaactccgcgacgcaatgggcaaaaagctcggctacgagggctataccacgctcggctactaccgcatgggccgcaactgctatacgaaagacgatgtcgagaagttccgcgaggcggtcgtcaagtatctcgtccccgtggcggacaaggtgtaccgcgagcaggccaggcgcctgggcaagcagtatccgatgagctttgccgacaacgcgctcgaattccgttccggcaatccccgccccgcgggcacgccggacgacattctcgcccagggtatgaagttctacagcgagctctcgcccgagacgaaggagttcttcgaaacgatgctgcgcgacgagctgctcgacgtgctctcgaccgagggcaagcaggcgggcggctactgcacgagcatcatggactatgaggttcccttcatcttcgccaacttcaacggcacgcagcacgacgtggaggtcgtgacgcacgaggccggtcacgccttcgaggcctggacgaaccgcaagcgcatccccatcgactacatctggccgagcatggaggcctgcgaggtccactcgatgtccatggagttcttcgccgagccctgggcggacggctttttcggtcccgacgcgaagaagttcctctacagccacctctccggcgcgctgacgttcattccctacggcacgatggtcgaccacttccagcacatcgtgtatgaaaagcccgaaatgacgcctgccgagcgccacgccgtttggaaggagctgctcggcgtctatatgccgtggatgaagcttgacggcgagatcccgttctactctgagggcatgggctggcagcgccagcaccacatctattcgagccccttctattatattgactactgccttgcccagaccgtggcgctcgaattctgggcgatgatccgcaaggacgtggggaatgcctggcagcactacatggcctacaccgtgcagggcggcagccggacgttcaccgaccttctcaaaaacgccggccttgaaagtccgtttgacgaagcgtgccttcgcggcgtgtgcgccgaggcggagaaggccctcgcggactttgacctcacgggcatcgaataatgggtgaacagcacaaaaaacacaaccgccgcgagcacctgaacgactttcatctgaacgtcgcgggcgaatatgtttacgacggggcactctacgcctgccaaagcgatgatgcaaagcagcgcagatctaagcgcgccgtgtggggaatggcagccattctgaccgttgcggtcgccgcgggcgggtgcattcctgcgccggggatgcagaactgtttttacgttctgctcccctacctcggcgagtttctgggcgcggtgagcgtcatctgggcgcttgcaaagctcggaacggactggagcacggtgcgcgagtacaactacaaaaaaagcgtggccgttctgcccgtgcgaacggcggtcacggcggtcttttctcttctcggcgtcgtgtgcgaattgatcttctttttcgtcaatgaccacgcaggacagacgtttttcgcgctgctctatgtcctgctgaagctgatagccctactgagtgtccttgttctgcgcgccgaaattatgcaggcagaatggggcgaattgcctaaaaaagataattcctaagattttactctgtacaatcttcatcttttcatgctataattaaaaaaattccatgcgctgtttttcggcgcacaaatgtccatagaaggcgtacttccctttccgcgcgtgtatacgcgcgggcatcttactttgtgctgcacggggcgacccgttttagcaaaaatttataaaggagtagattcaatgaaaagaacacttgcactgatcctttctctggtcatgtgtcttggtcttctggccggctgcggcgacaagaagacggacgacggccagaccgacggcaagacgcttgttgtcggcacgcagaacttcgacggtaagttctcccccttcttctataccaatgactatgaaaaccaggtcatgggtatggtcttcgacggtctgtttctcgtcgaccgcgagggctctgtcgtcctcaagggcatcgagggcgacgtccgtccctacaacggcaccgactatacttacaagggcattgccgactgcgacatcgttgaaaacagcgacggcacggtcgactacaacatcaccctgaaagagggcgtcaagttctccgacggtgaggaaatgaccatcgacgatgtcatcttctcttactatgtcctgcttgaccccgcttatgacggcgtttccacgctgtactccctgcccatcaagggtctggaagcctatcgcagcggtatggagactgtgcagaacctgatcctcgccgccggtcctgacgcctacgccgccaacgacttctacaccgaagagcagtacaacgcttactggaccgccttcaacgccgccggcgcgaagttcgcccaggagatccttgactacgtggtcgccgctggttacgccaccgctgacgactctgtcgccgcgcaggctggcaactggggcttcgagctcgccgatgacgcgaccgtcgaagacttctgggctgccatcgttgctaagtacggctacgacatctccgatgacggtatcaacgctgagaccgccggcaccagcatctcctccttcctcgaggccgagctgggcgacgcctacaacgactataccgtcgccgtccagaccggcgagtccgctcccaacgttgccggtatcgtcaagaccggtgactactccatgaccgtcaccctcaccgaggtcaacgccaccgccatctatcagctccccgtcaccgtgtgccccatgcactactatggcgagactgacaagtatgactacgacaacaacatgttcggctttgtcaagggcgatctgtcccacgtcaagtccgtgacctccacgcctgtcggctccggcccgtacaccttcgagagctggtccaacggcgccgtcaccctgcagaagaacccgacctactggaagggcgagcccaagatcgacaccgtcatctggcgcgagatgcaggatgaagacaagatccccggcgttgtctccggcacgatcgacgtgaccgacccctcctactccaaggaagctgccgagcagatcaaggaagccaactctaacggcgagatctccggcgataccatccagaccgacctcgttgccaacctcggctacggctatgtcggcttcaacgccaaccgcgtgaaggtcggcgacggcaacggcggtgatgaggcctccaaggatctgcgtaaggccatcgccacggttatcgccgtttaccgcgatgtcgctgtcgactcctactacggtgagttcgccaacgtcatcaactaccccatctccgacacctcctgggccgctccgcgcgttaccgatgagggctacaaggtcgccttctccgttgacgtcaacggcaacgacatctacaccgaaggcatgagcgccgacgacaagtacgccgccgccaagcaggccgctctcggctacttcgaggctgccggctacaccgtcgctgacggcaagatcaccgctgctcccgccggcggccgcatggacgctgaagtcatggtcggcggcagcggcaagggcgaccacccctccttcatggctctgaccctcgcgtccgacgccctcaaggagatcggcttcaacctgatcgtctccgatatgtccaacttcgccgagatgaccaacgcgatcaacgccggtactgccgacatgttcgccatggcatggcaggccacgcccgacccggatatgttccagatctatcacagcaagggcggctccaacgagaagtcctactggatcaaggatgccgacctcgatgagctcatcatgatggcgcgtcagtccaccgaccagacctaccgcaagaccctgtataagcagtgccttgacatcgtggccgactgggcggtcgagatccccatctatcagcgccagaactgcgtgatcttctcctctcagcgcgtcaacctcgacaccgtgacgcctgatatcaccacctactgggcctggtacaacgacatcgagctgctcgacctgcagtaagctccgtcgctgcacaaaaacgttacttaggcgcatggctaccctgcggcttttgccgcggggtagcctgcctcaggcacatctgcttatgatccaaatgccccggtgcgtcggagcatttggctgatatgcagagagagacatatcaaacccgaaacggcgacaaggccccgggcgcggggcggccgttatcaaaaaacggagggattctatgcgcaaatatctggtaaaacgcctgctgctgtcggtggtgatcctcttttttgtgacattcatcatctacctgcttatgcgctgcatgcccagctcctacgtggagaatatggcgcggcagctctcgcaggctcccggctccaagccctatgaggagtggctggcacagctcaacgcacaatacggtctggatttgggccttatccccggcttcttcgtccagctcaagaacctgtgcaccggcaacttcggcgacagctggaagtataccgtgcccgtcatccagaagttcaacgaggtcatctgggtctcgttcatcatgggcgctatctcgctcgtgttcgagcttctcatcgcggtgccgctcggcatcgtggccgccaccaagcagtacagcgtgaccgactacaccgtcacgacggtcgctctgctcggtatgtcgctgccgacgttcttctttgcgacgctcttaaagctcatcttctgcatcaagctcggctggttcgaccttgtcggcctaacgggacgtgacttcaactccctcagccagtttggtcagatcctcgatatggcaaagcatctggtgctgcccatcgtgacgctggtgttcatttccatcggcccgtggatgcgctatgtgcgcacgaacatgctcgaggtgctcaacgccgactacatccgcaccgcccgcgccaagggcctttctgagcacaaggtcatctatcaccatgccttccgcaacacgctcatcccgctcgtgacattcatcggcggctcgctgcccggcctttttgccggcgcgctcatcacagagacgctgttcgccatccccggcatcggcttcatctcgtacaatgcgatggtcgcgggcgatatccccttctccatgttctacatgacgttcctggcgatcctgaccctgctgggcaacctgatctccgacatcctgtacgcggtggtcgacccccgcgtgcgcatcgcgtaagaaaggaggcgctaatccatgtctgaagaaaagaagatcaacgatcagcaggagagcggctcccccgagcagctttccctcaacgacgaccgccgcgtcaaggtcctttccccgggcacgctggtcgccaagcgctttttccgcaaccgcctcgcggtcgtgggtctgacgatcctcgccgtgatgttcattttctccttcatcggcggcctcatcagcccctacgggcaggacgaggtcttctaccgtgacgatatccagctcaaggaatacgccgccatgagcgagaacaccgagtaccgctatctcgtggccgacggccaggagttcggcacgatcctccaggcgcagctcacgctgcacatgggcaaggacgacagcttctcctacaagggcgtcacctacgacgtgaccgaggagggcgactcgctctactccgtctcgagcggcggcaggctccttgccattgcctataaggacatcatcagctcgaacgaccccagccagaagttcggcttcaacttcagcttcaacgccctcaaggcgcacgccaacggcgaagcggagtttacggccagcggcaaaacctatacgcttgatgaagacagcgtcatgctgaatggcgaggagatcgcctacatcagccgctttgtcatccagtccaaggtcagcggcacggtcatcaccaaggacttcaaagagcgcgtgcagcaggccgtcgaaaacggtgagaccgagtacacctatgtgaacgacgccggtcaggagcgcgagatcaagcttgaatacaatcccgccaagtaccagtggtcgatcaaggagggcacgtccacccgcgtgttcgacgcctattccttccccgactccgcgcactggctcggtacggataaaaacggtatggatatgctcacccgcctgatgtacggcggccgcgtgtcgctgatgatcggcttcatcgtcgtcatcatctctgcggcgctcggcgtggtgctcggcggcgtctccggctacttcggcggctgggtcgataacctcatcatgcgtatcgtcgatatcttctactgcatcccctccaccccgctcatcatcattctgggcgcagcgatggacggcatgcgcgtcgacccgcagatccgaatgctctacttaatgttgatcttgggcttcctcggctggccgggtatcgcccgtctcgtccgcggccagatcctctctctgcgcgagcaggagttcatgaccgcgacagaggcctgcggcatcagcgtttcgcgccgcatcttccgtcacctgatccccaacgtcatcccgcagctcatcgtcaactgcacgatgagcctcggctccaccatcatcaccgaggcaacgctcagcttcctcggcctcggcgtcaagttcccgttcgcctcctggggcaacatcatgaacgacgtttccaactcttacgtcctcacgagctactggttcatctggatccccgccggcatctgcctgatgctgacggtcctcggcttcaacttcgtcggcgacggtctgcgcgacgcgttcgacccgaagatgaagcgctgagaaaggagggaatttgaatggctaagaagcataatgacggctatctttccgcaaaggaatcccgccgcatttccaaaggaaaccgcaagatcacaaatgcgctcgaaaagaagcgcaagcgcaagaacgttcccgaatccgagtatctgaccgagatgcacgaccccaacaacgcggtcgaattcgacaacctgcacacctactttttcaccgacacgggcgttgtcaagtcggtcgacggcgtcacgttctccgtgcccatcggcaagactgtcggcgtcgtcggcgagtccggctgcggcaaatcggtcacgagtttgtcgctcatgcagcttttgcagcgcccgcagggtcaggtcgtggagggcgaaattcgcctgaacctcggcagcaaggcctacgacgtcacgaaggcgcctgacagcgtcatgcagcacttacgcggcaactatatctccatgatcttccaggagccgatgaccgcgctgaaccccgtgttccgcatcggcgaccagctcgacgaggtgctggccctgcacaatgaaaagggccacgacgaagcgcagatcaaggcgcgcaccattgagctccttgagatggtcggcatcgccaacagcgagggcgtttacaagatgttcccgcacgagctctccggcggtatgcgccagcgcgtcatgatcgccatggcgcttgcgtgcagcccgaagctcatcatcgccgacgagcccaccacggcgctcgacgtgacgatccaggcgcagatcctcgaccttctgcgcaatctgaaggatcagatcaattcctcgatcatgttcatcacgcacgacctcggcgtcatcgccgaaatggcggactatgtggtcgtcatgtacgccggccgcatcgtcgagcagggcacggcggaggagatcttctcccatcccgcgcacccctacaccatcggcctcatggcctccaagccggtcgtgggccgtcaggtcgacaagctctactccatccccggcaaggtgccgaaccccatcaacatgccgaactactgctatttcaaggaccgctgcgaaatgtgcgtgaacggctgcgagggcgactacccgtgcgaggtgagcatctcgccgacgcacaaggtgagctgctaccgctactacgatggcaagcgtcccgaccttgaggaggtcgtggaggaagagctggccgagggcaaggaaaacggaaaggagggtgaataagatgccgttttggaaagccggtaagaacgacgatcaggtcctcgatgaactgaaggaaacgcagaagcagaatgccgatgaatttgtcaagaagcaggagcacgccgacgaggcgcagaagtcctcactcatcatcgacaacaatttcacccccgtggaatatgacccgcagtacattctgcaggtcaatcacctcaagaaatacttcccgatcaagggcggtatggtgtcgaagacggtcggctatgtcaaggccgtcgacggcgtcacgttcaatttaaagcgcggcacgacgatgggccttgtcggtgagtccggctgcggcaagacgaccacgggccgcacgatcctgcgcctgtatgactccaagtccggcggtcaggtgctcttcaacggacaggaggtctatgacctctcccacaaggaactgcgcgccctgcgcacgaagatgcagatcatcttccaggacccgttctcctcgctctccccgcgtatgccggtcggcgagatcatcggcgaggccgtgcgcgagcacaacctcgtcccgaaggcggaatttgacgattatatcgaccatgtcatggacaactgcggcttgcagccgttccacaaggaccgctacccgcacgagttctccggcggccagcgccagcgtatctgcatcgcgcgtgcgctcgcgctcaaccccgagttcattgtctgcgacgagccggtctccgcactcgacgtgtccatccaggcgcagatcatcaacctgctgaacgaattgcaggataaatacaagctgacgtacctcttcatcagccacgacctctccgttgtcgagcacatctccgacaccgtcggcgtcatgtacctcggcaaccttgtggagtacggcgcgaaggaagatatcttccgcaacccgctccacccctacacgaaggcgctcttctccgccatccccatccccgacccgaaggtgaagatgaaccgcatcgtgctcgagggctccatcccctcccctgccaatccgcccaagggctgcaaattccacacccgctgcgccagctgcatggcctgctgcaaggaggaatcacccgtccagcgcgagatcgagccgggccacttcgtgtgctgccacctgtacgataagtgatgaagaaggacgacttctacgaggaggacgacggccgcacgatcgccgacatgagcggcatcgaacgccagccgacctttctcccgcactttcaccgcaagcgcagcaacttttccgcgcccgacgcgccccgtgcgaacgaccgcccgtgggaaagcgctgccggtgagctgacgcgcgaggagcgcaatgccgccatccgcggcgcgctcaaggcgggactgctgatcgcaggtgtgtatatcctcgccgctgcggcgctaatcgtcgcgatgcagctgctctggtcttaaatatggaaaaaggaagactctttcgagtcttccttttttatttttctgcacggccaacgacaaatagctctcttttcttcggatttcagattgttttcatctttattctatgatataataggcaaattgtatgtcgtaaaaaagagaggagattcttcatggatcataaaagaggttccttttccggcaagattggctttgtcctttcggctgcgggcgcgtccgtcggcctcggaaacatctggcgctttccttatctggccgccaaatacggcggcgctattttcctgctgatatacatcattctggcgatgaccttcggctacacgatgatcattgcggagacttcgatcggccgcatgaccggcaagagccctgtcggcgcttacaagtccttcagcgataagcctgcgctgcgcgtgggcggctggatcaacgccatcattccgattctgatcgtcccctactactccgtcatcggcggctgggtcatcaaatatctggcggaatacctgatgggcaaggcgcacctcgtcgcggaggacggctatttttcgtccttcatctccaacggcgtgtcctcggagctttgcttcctcgtcttcacggccatgacgctggcgatcatctttgcgggcgtggaaaacggcatcgagcgcgtctccaagatcatgatgcccattctcgtggtgctgtcgctgatcatcgccgtgtattccgtgacccgccccggtgcgctggagggcgtcaagtacttccttgtgcccaatcttgacaacttctcctggatgacggtcgtctccgccatggggcagatgttttattccctgtccatcgccatgggcattctcatcacgttcggttcttacatgaaaaaggacgtcccgatcgaaagctccacccgcaatgtcgaggtcttcgacacggccatcgccatcatggcgggcctgatgatcatccccgcggtgttcgccttctccggcggcgatcccggcgcgctgaaggccggcccctcgctgatgttcatcaccatcccgaaggtctttgattccatgggcttcggcacggtgatcggcatcgcgttcttcctgctggtcctgtttgccgcgctgacgagctccatagcgctgacggaaagcgccgtctctaccttgcaggatgagctgcactggagccgtaagaaggccacgagcatcatgggcgtctctatggttctcctcggcagcctctccagcctgggctatggcccgctggcaaatgtcaccgtgatcggcatgcagtttttggacttcttcgatttcctgaccaactccgtgatgatgcccatcgcggccatcgcaagctgcatcctcgtctcccgcgtcatcggcgtcgaccgcatcgcggacgaggtcacgctgaacggcgcgcccttccgcagaagaaaggtcttcaacgccatgatccgcttcctgtgcccgttcttcgcggcgatcattttgatcagctcgattgccagcgcgttcggctggatctcgatgtaaatagtcgcgctcaccgagcgtggcacgagtcaaagggggctattctcttttgtgaaagagaatagccccctttcaatcccccaagagaaaggttttagattggcagtctcaatctcgaatgacctttttccctccggaatggaaatgcctgcgcgcggcgatgccgcgtttagagctactatacgatttgcctctgctcctactacccgctgttgcgcagccgttggcggctctgctgccttacggatgcggcacaccccttgcgggtgccgctctgcccatcttgtagaggtacagactaatctcctgctgccaacaatgcataccgtttcgataatgcgtactgcggcgagcgaagctatgccgcttcggcaggcaataccaggattgatagaatccgaagtagaacgcagttatgtaagggtaatgaatcgcaggcaaagcgacagcgaagatagaagtaagtcaaatcgtttagatataaaacaaggcaggcagctgattcggcaagcattgcagttcttcgagctgctcgcttgcaatggcgggcaaagccccttgcgttctcttgggggtccaagggggatattctctcacgtgagagaatatcccccttttcccgtgcagcgcctacggcgctgctttcctcctccgcgcaatgtgcggaaaaatataataaatatcccccggcctagccgggggtatttcttagacgggcgaagccctatgttaccagccacgcctcatgcggctttggtacgatctgacatctgcataggcttgttaccagcagcccgtaaacaggcttagaagttgcccatcgtcagttgttcgcccatcctatcttcctccaattgattccggatgtactcttctattttcttcgcattcttccccacggtgtccacgtagtatccgcgacaccaaaattcgcggtttctgtacttgtacttgagatttgggaactgttcgtagatcatcagcgagcttttgcctttcaggtatcccacaaagctcgaaaccgcaattttgggcgggatctcaaggaacatgtgaatatgatccggacatacttccgcctctacgatattcacctttttccattcgcataactgccgcagtattttcccaatctccctgcgtttttcgccgaagaacactttgcgccgatacttcggcgcaaatacgatgtggtatttgcaattccacttcgtatgcgctaaactgttcgtgtcattcattcttgagtgacctccctttgttttgtagtttgcagttgccagaccgcatctctactataacagagggagttttatttttcctcatcggcagcagcctcttttg

SEQ ID NO: 10102 - DNA, 23482 bp, Unknown
  gut microbiota DNA sequence
tgtgtcattcattcttgagtgacctccctttgttttgtagtttgcagttgccagaccgcatctctactataacagagggagttttatttttcctcatcggcagcagcctcttttgaaccactcgcccagcgagtggttttcgggatacaatcaaaaaggaagcggcacgcgccgcttccttttttcgcttcttcgtgctatactctatccaaatcctttgcaggaggcatcattcatggaaagcatcaagcccgggcgctaccgccacttcaagggcaaagaatatgaggtcctcggtgtcgcacgtcattcagagacggaggaggaactcgtcgtctatcgcgcgctgtacggcgactttggcctctgggtgcggcccgtgagcatgtggaacgagactgtcgagcgcgacggcaagacgttccgccgcttcacctatatcggcgaatgacgggctatacgctgattcgcgccaagcgccgtacgatgtccctgcaattggaccgcgacggaaatgccgtcgtccgcgccccctacggcgtcaaaaaagagttcatcgaccgctttgtcgccgagcacgaggactggcttacccgcgcccgcgaaaagcagcaggcgcgccgccttgcccatcccgagccgacggacgaggagcgcaaagcgctcatcgcgcgtgcgaaggaatacctcccgatgcgcgtcgatcactggagcggcatcatgggcctcacgccgacgggcctcaagatcacgtccgcgcgcacgcgctttggctcgtgcagtgggaaaaacagcctttgcttttcctggcggctgatgcagtatccgcgcgaagccatcgactatgtcgtcgtccacgagctcgcgcacatccgccaccacgaccactcccccgcgttctacgcgctcatcgagcgctacatgcccgactggcgcgagcggatgaagctgctgaaagaataaaaagagacgctctgcaggcgtctcttttcatcataatatggtagtccgaccttctcttacttgttgagcttcagccggaagtcctcgccttcggcggcatactccactttataaccctgcttttcggcaaagcgggtgacgagccggcacgcgccttgaactccttgctcgcaacgctcatgatgaacgcgccgagcacgaggccgatgatctcagggcggacatactgcacctttgccgcgctgtgcaggcccaccgcaccggaaatatcgcgcagaaagcacgcgatgcagaagcccatgttcgtagggttaccgagcgccgttaagatgagcgccgcaaggcccactgcggcgcccgcaataatgacgcccagatgtacttttttattttctccaattctccttttttgatcgttgacaaaatcaacactttttgtcgaaaaccagtatatcggtttatcttttgataaacaaacgggattcatagatgaaagagggggaaccatcgttttttcgatggttccctctcttttcttcaaatcaccagctcgtaaaagccgtcgacctccaacccctccgcctcggtcagcgcggcgagcgcggcgcggtcctggacctccgcgcgccacgacataccgcagtccgccgtcagctcacgcgggacggggatgagccgcccgggcaggcccttcgcccggcagagcttttccatcgcgatggccgcggccgtcgtgtggaaggtgatgacgagccaaagctttttctctctcatgttgcgatctcgcggagcgcggtgaccgcggcgtccgcttcctcttccgtattgtaccagccgaagctgaagcgcaccgcgccctgctcctgtgtgccgagcgcctcgtgcaggcgcggcgcgcagtgcgcgcccgggcgggtcgcgatgccgtagttctcggacaggatatccgatacctcgcccgagtccatgtcgccgatgttgagcgcggcgaccgccgtgcgctcatggtcaaaatcgccgtagagcgccacacccggaattttcttgacgcccgcgacaaagcggcgcagcagcgccatttcatgcgcgtggatggcctcaacgccggtctcctgcaaaaagtcgagcgcggcgttcagccccgcgataccgtggccgttgagcgtgcccgcctctagccgcgccggcatctgcccgggctgctcgtggagataggtctgcacgcccgtgccgccgaccttccaggggttgatgtccacaccctcgcgcacgcacagtccgcccgtgccctgcgggcccatcagcgatttgtgccccgtgaagcacagcacgtcgatgtgcatctgctccatgtcgatgggcagcacgcccgcgctctgcgaagcgtccacaatgaacagaaggtcgtgttcgtgcgcaaatgcgccgatgcacgtcagatccagcgtgttgcccgtcaggttcgaggcatgcgtgcagacgacggcgcgggtatcgggacgcagcagccgttcaaaatcggcgtagtcgatgttcccctgccggtctgcgggaacaaagctcaacttgacattgttttcccgttccagccggtaaagcggtcgcaggacagagttgtgctcaaggtcggtcgagatcacatgctcgcccgcgtggatgcagccatggatggcgatgttcagcgcctcggtcgagttacaggtgaacgccacgtggtcaggccgcttgcagccaaagagcgcggcgagcttgcagcgcgtgtcgtagatcacgcgcgaggcggcaagcgcctcctcgtgcgtgccgcgcgcgctgttgccaaagctccccatcgccgcgaccaccgcgtcgatgacctgcggcggctttcgcagcgtggtcgccgcgttgtcaagatagatcatcttacggacggacgacgcggtccgcgccgctcatcttttcgacgatgacgtacatgttcgtcacctcgccgacggcgagcttttccttgaggtcgtagaagttgaggcacgtgccgcagctcatgatctccacgccgcgcgcggccatgcccttgaggtcttcgagagactccgagccctcgcacgtcagcttcacgccgccgttgtagcagaggatggtgtcgggcagggtctcctgctggctcagggcgaagacgaacgccttcatcagcgcgccgccgagctcgtcattgccgctgcccatcttgtcagacgacagcaccacgaccgtcttcggcttgccgcaggtgtagcactcgccgctctgctcctccaccttggcgttttcccccacggtgatggtcacgcggtactcgttttcgccaagcttttcggttttggacgtgcagcccttgcttgcggccagcttgccgaggttctgcaccgcagtctcgttgtcgaccagcgtttcgaccgttccggcgccgccgagctcctgcatcgccttctgcgtcttcacaacagggatggggcaggcatcgcccatggcattgactttgatcgtcatttctatcgctccttatcacagggtttgcacccgttatttctttctaactataacagattccgctcgaagtgacacaacttttttctcccgccgcgaattttttcatggtttttcccgttttaccgtgctgttatcattgtttttttcgatggcagtctccgccttgcgccgtttgcagcaaattgataaaatgagaaaaagtttgtatctttctgcgcattccgcgctctaacaggcagaaagaagcggaaaggaggccctgcatggacgaatttgacgagatctgccggcgctgcacacccgttgtctaccgcttcctgctctcgctctgcaaggacgcctccctcgccgacgagctaacggcggagacgttctatcaggcgtatctgcacatcgacacatttcgcggcaactgccgcgtcgaatcgtggctctgccagatcgccaaaaatgccctcacaaaagagctccgccgccaaaggcgcgccgtccccttcgaggaaacgcacgagctcgccgcgccggacgacatttttgagctgctggccgacaaagaacaggccatgcgcatccacgcctccctgcaccggctcaaagagccgtaccgcgaggtcttcacgctgcgcgtgctcggcgagctgcactttcgcgacattgccgccctgttcggcaaatccgagtcctgggcaaaggtcacattttaccgcgccaaggacaagctgatcgaagatatggaggaacaccatgaacattgactgccgtgtcatcggcgacctgctaccgctctacgccgacgaaagctgctcggacgcgagccacgctctcgtggacgatcatctcaaaacctgctcccgctgccgcgaaacgctcgcgcggatgaaaagcgagcagtttctccccgccgcgcaagtcatcgacccgcccgccgtcgccgactatgcgcaaaaggtcaaacaccgtcgccagaaacgcggcacctgcctgaccgtcggcgtcatcgccctgattgtgctgctctcgctcaccgccgccgcgtggatgaaccttgtccgcgcacagcacccctacatccccgtggttgaggagagcgtctgcaaccttgccgccggagaggtacgaacctttgccgacagctgcgacggccgccgtctttttacgaacagcacgcgcatcgccgtcaccttccgcgcggatacgccgcagaacggcacgatcacgctctggaacatcaccgatgtcacaaatccctacccggccatgttctacgaggtcgacggatgcaccgcgcgctgcgaattcacgaatctttcctccgccgaacgctactttgtcctctgcgacggtctttccggcgacgtgactctctccgacggacgcccgacggacctttgggagagctttctcgatctgctccacaccctcttcccgcgctgacggcgaaaacacggtggagttgacaaaggcgtttcgcttctctacaataaaagcagtttttcaaggaggaggtgcgcgccatgaacgacaagctgcgtctcacgcagatgacaaaggcggcgggttgagccgccaagctggggccgggtgccctgacagaaattcttgctgacttgccgaatgtgtcgaatcccgcgcttttagtcggctacgacagcagcgacgacgccgccgtgtaccgcgtctccgacgaggtctccgtcatcgagacggtcgacttcttcacccccatcgtggacgacccgtacctcttcggtcagatcgccgcggcgaacgcgctgagcgacgtgtacgccatgggcggcgagccgaaagttgcgatgaacctcctgtgtgtgccgaactgtctgccgaaagaggatatccgcgccattctggagggtggacatgccaaagccgtcgaggccggatgcgtcatcgcgggcggccacaccattcaggataacgaaccaaagtacggcctgtgcgtcacgggattcgtccatcccgaccgcatcctcaaaaatgtcggcgcacagccgggcgatgtgctggtgctcaccaagccgctcggcagcggcgtgctcacgaccgccatcaaagcagacctcatctcccccgccgcccgcgacgcggtctatgcccacatggcgacgctcaacaaaaaggcgggcaatgccgtgcgaagcgccaaaaatgtccacgcctgcaccgacgtgacaggctttggcctgctcggtcacagctatgagatggcgagcggcagcggcgttaccatccgcctgcacggcgcaacgctccccctgatggacgaggcgcgcgatatggctgagatgggcatcatccccgcgggcgcttaccgcaacatggactatgtgaagccgcatctcacggtgcagcccacggcgcagcaggtcttcctcgacctcgccgccgacccgcagacttcgggcggccttctcgtcgcgctcccgcgcgaggacgcagagccgcttcttcgcgagctccagaccttcgccccctggagcgccatcgtcggcgaagtgagcgagctgcgcgccaccgcgctggaattcgactgatccaaacggaacgcaagcaaaaaaggagctgaatgccaaggcattcagctccttttttatattcgcacctcatttcgcgtccgcagacgcaaaacattttctaatccgtatttactgacgacatgtgcgtcagtaaatacactttgcacggagtgagtgtcgagccaagggcgaggcacagaacgcagtgaatcttttacacaaacaagtgacttatgtcacttgtttgtgtaagtcacatgtagtagctcatggcaccgctcttccccgtattccgccatcatctgggcgaccacggggtttcgctccgcgcgcttgaacattgccgcgttgtcggaaaggtgcaggccgtcgccgcgcttttccttgctcttcttgaggccgtagggctggcccgcaccgccgacgcagccgccctggcaggtcatcacctcgataaggtgatagaacttcttgccctcgtcgatttcctttaagagcttttttgcgttggcaaggccgttgacgaccgcgagcttgagctcggtgtcgccgatcgtcacgctcgcctccttgatcggcgcgtcaccgcgcaggccgaggatgctgatctcgcgcagggtgtttttgctcttatccggcaggcagtggcgcacgaccgcttcagccacaccgccgctcgtgccgtagatgaccgccgcaccggagccgaggccgaacggcaggtcgggggactcaagctccagctcgccgagctggatgcccgtctcctgcatcatgtcgatcacctcgcgcgtggtgagcacaaggtcgacatcgggtcgaccgtcgtggatgaactcggggcgcgcggcctccatcttcttcgccgtgcagggcatgatggcgatgtgataggtcgtgcggccgtcggcggcgtccttcgcggcatacttgtcgcggaagatcgcgccgaccatctccatcggcgacttgcaggtcgaaatgttcttcaaatacttggggttctcattttcgagatacttcacccacgccgggcagcaggaagtgaacatcgggaacgggccgccgtttttcaggcgctcgaggaattcttcggattcggcgatcgtcgtaaagtccgcgccgaacgtcgtgtcgtacacctcgtccacgcccatgagcttgagcgccgtgacgagcttgtcgagcacgttttcgcccgcgggaaagccgaacgcctcgcccacggccacgcgcacggcgggcgcgatctggatgacaacgcgcttgctggggtcgtggatggcgcgccacgcctcgccgatctggtttttcaccgtgatggcgccggtagtgcacaccgccgcgcactggccgcagctcacgcacttcgtctcggcgagcttgcggtcaaaggcgggcatgacctgcaaattgctgccacgataggcaaagttcaaaatgcccataccctgcatctcctcgcacacgcgcacacagtcgccgcagaggatgcacttgttcgggtcgcgcagcaccgcgggcgacgagctgtcgatctcgtagtgctcgcgcgtatcggggaagcgaattctgcgcacaccgaactgctgggctagctcctgtaagcggcagtggccgctcttttcgcaggtggtgcagttgcagttgtgcgaggcaagcagcagctccagaatgacgcgccggtgcttgagaagccgcgcgctgttcgtgctgatgcgcatgccgtcgcgcggctccatcgagcagctcgcgtcgatcttgccggtcttttcatcctccaccacgcacatgcggcacgcgccgtaaacggagaggtcagagtaatagcagaacgtcggcatttcaataccggccttacggatgacggagagcacgttcttttccccatcgaagttgacgcgctgaccgtcaacgatcatcataccttttgccatgtctcagtcctcctcttcaatggcgtcgatcgcgccgaacgggcacgcgccccagcatgcgccgcagtggatgcacttgtcgttgtcgatcgtatgcggcatgcggatctcaccggagatggcctccatcgggcagttgcgcttgcacttgccgcagcccttgcacagctcgggcttgatgacaaggcggcgcttgcggccattgcagatcgggcagtggtggtcgaccacatggcgcagatagtcctggcggaagtggcgcagcgtgctctgcacgggcttgcacgcgctctggccgaggccgcacagcgccgtttccgaaatggtcttggagagctcctgcaaaaggtcaaggtcctcaaggcttccttcgtttgcgataatgcggtccaaaatctccagcatgcgcttcgtaccctcacggcagggaacgcatttgccgcagctttcgttctgcgtaaagcgcatgaaaaagcgcgcggtctcgaccatgcaggtgtcctcatccatgacgacgaggccgcccgagccgatcatggcgccgatgctcttgagcgagtcgaagtcgagcggcaggtcaagatgctcgtcgctcgccgtggtcgcaccgccggaggggccgccgatctgcacggccttgaactttttgccgttcgggatgccgccgccgatgtcgaaaacgacctcgcggatggtcgtgcccatcggcacctcgataaggcccgtgttgaccacgttgcctgtcagggcgaaggccttcgtgccggggctcttctccgtgccgatgctatggtaccactccacgccgtttttgatgatgagcgggacgttggcaaacgtctccacgttgttgagcaccgtgggctctgcccacaggccatgctcgatggtgcgcggaggtttgacgcgcggcatgccgcggttaccctcgatcgacgcggtcagggcgctgccctcaccgcagacgaacgcgcccgcacccttgttgacgtggatgcggaaattgaaatcgctgccaaggatgttcgttccgagaaggcccatctcctcggcgcgagcgatggccgttttcaggcggttcactgccagcggatactccgcgcgcacatagatatagccctcgtcgctgccgacggcgagacccgcgatcatcatgccctcgagcacgctgtgggggttgccctccatcacgctgcgatccatgaacgcgccggggtcgccctcgtcgccgttgcagacgatgtattttttcgcgctcttctgtttgcgcgcgccatcccacttgcgtccggcggggaatccgccgccgccgcggccgcgcaggccggaatcgagaatattgcggcagatctgctcgtccgtcatctcgaacagcgccttttcaaacgcgctgtagccgcccttggcgatatactcctcgatgtcctcggcatccgacgtgccgcagttttccagcaccacacggtgctgctttttatagaacgggatatcctcctgcttcgggtacgccgtgccgtcgagatggtagaccaaacggtcgatgacctcgccgccgagtacggtcttctctaagatctcgtggcagtcctcgggcttgacgtgaatgtacatcacacccatcggctcgatgtgcacgagcgggcccatctcgcaaaagccgtggcagccgctcattttgacgtgcaggctcttttcctcgtccgagtcgtgcttcaagccgacgtagaccttcagcccgcgcgcctcgcactcggatctgaaattgtcgtaaattttcattgcgccgccggcgatgcaacccgtgcccgcgcagatgaggatggacggcacctcgcggctctgcgcgaggtcgtgctccgctcttgtgcgcaggacgcggaattcttctcttgtcagcttgctcacgctcgcacctcctctttgcggatggactcaagcagctcgatggcgcgctcggggtccatcttggcatgcacctcgccgtccacggtcatgaccggcgccaaaccgcaggcaccgagacacgcgaccgtttcgagcgtgaagaggccgtcgtccgaggtctttttctttccgtgcagacccagatactcatagatcgcatcgtaaatcggcccggacttccgcacgtggcacgccgtgcccgcgcagaccttgacaatgtgcttccccttggcttcgagcgagaagttctcgtagaacgtcgccacactgtacaccttcgacacgcttaatccgagtgtgtcagcgataagcgtcaggtttgcttcgcttaaatagttgtactccgcctgaacatcctgcaaaattgcgatgagattcgatgggtcattctcatgcgaggcaagaatgctcaggatcttttctgtgtcaggtttcatggttgccctcctatctaatcctgacggcgattataccgtatcttttaaggcattttcaacaaattacttcaaaatcatcgattgattatctatataagcttcataattttatgcccatcaataaatccggaacaacccgtatctctgtgcggtttcataaaaatgactcccgttcaggttttccctgaacggaagtcatttttctcactttaatgaacgatacttattgcgcgccgtgcggcatgcgttctttgaccgccttaccggtcggcgttgcggccagaccgccgagcgccgtctcgcggaactcgaccggcatgcgccgtccgacctcgcccatcgcgtcgatgacctcgtcgacggggatgcggctctcgatgcccgcgagcgccatatccgccgcggagatcgcgttcaccgcgccgatgacgttgcgcttgacgcacgggacctcgacaaggcccgcgacggggtcgcacacaaggcccatcagatttttgagcgccatcgccacggcgtggccgatctgctcgttcgtgccgccgcgcagcgacacgagcgcgcccgccgccatggccgacgccgtaccgatctcggcctggcagccgcccgccgcgccggagatgctcgcgcggtacgcgatcaccgcgccgatgcccgagacgacatacagcgcctcaagcagctcgtgctgcgtgtaatgctcgcgctcgcacagcggcagcagcaccgccggcaccacgccgcacgagcccgccgtcggcgatgccacaatgcggcgcatgcaggcgttcgactccgccatggagatagcctgcacgatgacctcgtccatgaattcaccgccgatgctctctccgcggcgcgcgtacaggcgcatcttgagcccgtcgccgccgaccagaccactcacgctgcgctgcgtgccggtataggagtccgccgcatcctgaatggcctgccaggtcgacagcatcttcgccatcgaggcctgacggctcacctgacgctcctccatatcatactgcaaaacgatctcccagaacgggatattctcccgcgccgagcgttcaaagatttccttcatcgaatccagcgccatcttcatcgtcctccttatcgtaataggtcacgctcaggatgcccggcagctccgagagaaattccacctgccggggcttgatgtgctgatccgtttcaatgaccatcagcgcgtcaccgccgcggcggtgacggttcacgctcatgttcgccacgttgatgtgcacctgacttaaaatcgacgtgattgccgcgaccgagccggactcgtcctgattgcggacgatcagcgtgttgaagtcgcccgtaaagtttacgtcgatgccgtcgatcttgttgacgacgatcgcgccgccgccgatggacgccgcctgaagcgtcagctttttgccgcttttgcccgtcaactccaaaagcgcggtattggggtgcgcgtcgcgcagctccaccgtgcggaacgaatacgccatacccgcgcggttcgcctcttcataggcgttcggaatgcgcaggtcgtccggcttcatgccgagaagtcccgccaaaagcgcgcggtccgtgccgtggccgaagcccgtttcagcaaacgagccgtacaggccgatgtccgcgcgcgccacctcttcgccgagcagcgttcttcccatattgccgatgcgcgccgcgcccgccgtgtgagacgaggacggaccgaccatcaccggccccatcatatcgaaaatattgatcatggaaaccttgtcctttctgaccatcatttgggaaaagcatatcatatccgccgccaaaaagcgagtaaaattcccctctgcgcattgcgactattgaataatatcctttaccttgattcattttcgatattcattgaaacagcgctcacattcatttttttcatagcctgatgcaaaaggagccgtccacaggcggctcttttctttcgatgcagagcgccaggccagcatcagcccgatgaaaaagcagatctgcgcaaggctgttggcggtctgctccatccagttcaccttcgggtcgctcgaatccatccggaacgcgaaaacgagcatcaaaatcatcccaagcgcgcccgcaaggaagaaaaggcatgccggaaaaccgctcagctttgcaagcatcgcttccccgttcagccctgcgcggtctacgatcagtgccgcgaacatcgtcaaaaagccgaccggcatcaggacgcgcatctgcacaaacatcggccagatgttcctttggaagacggccgcgatgagcttccatcccaccttcacaacacccgagagcaggcagactaccgcacccgctacaaacagtccgctgtggaacaggttccccgccttcaccgcggagagaccgaaaaatacgacagggagcaaatcgacgaacgccatcggggcgctgaagccctcggggatggtctctcttgtcatgcggtttctcgcttttctgctcatggcgtcctccgtgatgatttttctctgcttcttattctgccccaaagcggcgaacaggcgcggcggatggtccgccgcgcctgcgttttctaaaaaattcttttacacgcgcttccactttgcgccgccgggcatatcggtcacttcgacgcccttcgtcttgagctcgtcgcggatgcggtcagcctcggcaaaattcttcgccttcttggcctccgcgcgctggcggatcaggttctcgatgccctcgtccgccgtgccgtcctcagagacgaccgtgaagccgcccgcgctctgctgggacgcggccttctccttcttctcgcgctcggcttcggcctttttgagaaggtcgaggctcagcaccgtgtcatagtcgccgatgatggcgagcttcgtcgcgcccgtggtcttggccttaagcacgtcgtagagcgcggtcacgcccatggcggtgttgaggtcgttgtccatttccttcatgaactttgcgcggtactcggcgcgaacggcctcgtccacgccgccctcgtccttgatgttcgcgatcttcgcgatgagcttgttgtacgcggcgaccgcattgtcaaggttttcccacgtgaagacaagactcttgcggtagtggctctgtaagcagaagaaacggtacgccagcgggtcatagcccttttcctcaagcagcgagaccgtcaaaaattcgcccttggatttagacatcttgccgtgcgaggtgttgagatgcgccacgtggcaccactggaggcaccagggatggccgaggtagctctcgctctgcgcgatctcgttcgtgtggtgcgggaaggcgttgtccacgccgccgcagtgcaggtcgaggtattcgccgttgtacttcatcgaaatgccggagcactcgatgtgccagcccggatatccgacgccccagggggaatcccacttgagcgcctgatcctcgaacttggacttcgtgaaccagaggacgaagtcgttcttgttcttcttgttctcgtcctcctccacgccttcgcgcacgccgacggcgaggtcttcctcgttgtggtcgttgaagatatagtagcgagagagcttgctcgtgtcgaagtacacattgccgccggcgatataggcatagccggtgtcgagcagcttcgtgatgatcttgatataatcgtcgatcaggcccgttgcgggctggacgacgtcggggcgcttgatgttgagcttcttgcagtcggcgaagaacgcgtcggtatagaacttggcgatctccatgacggtcttgtgctcacgcttggctcccttgaccatcttgtcctcgccctcgtcggcgtcgctcgtcaggtggccgacgtcggtgatgttcatgacgcggttcacgctgtagcccgaaaagcgcaggtacttttccagcacatcctccatgatgtaggagcgcaggttgccgatgtgggcaaagtggtacacggtcgggccgcaggtgtacatctccacatggttcggcgtatgggtcttgaattcttcctttttatgggtcgcggaattgtataaatacatgatagatctcctttgagaagatgaaataacggatttagtccgcctctttgaagacgtcgaggttctttgcgaaatactcaatgccggagtacacggtcgtcgccacgatgaccgcgatgcacacgacattcaaaaggttgctctcaaacaccagcatcaggcacaggcacaccatggtcgaggcggtcttcaccttgcccgaccacgcggccgcgatgacacgcccctgctccacggcgacaaggcgcatgccggagacggcaaattcgcgcagcagcacgatggcaaggcaccagccgggcatctgcccgcattcgacaaagtagcacattgccgccatgacgagcattttgtccgccagcgggtccataaacttgccgaaatttgtgatctgattatagtggcgggcgatgtagccgtcggcaaagtccgtcagacacgcggcggcgaaaataccgagcgcccaccatctcgcacccgcgaagtccaggtacagcaccactaagaatacggggatcagcgcaatgcgcatgatcgttaatttgtttgcagttgtcattgtctctctttcctcctgccctgcggggcatttacttattcgaccgcttcgccggtcagctcgccgtccatcgtgccggtcaggcggacattgacgaactcgcctgccatgatatcacgttctgcggaaaagtagatctttccgtcgatatccacggactcggcgtagctgcggccgacaaaggactgcgcttcctcactccagccctcgcacagcacttcgcgcacatcgccgaggacggattcattgtattcgtcgatgatatcgctctgcacgtcgactaaaagctccgtgcggcgctgggcctcctccatcggaacgtgctccatcgttgcggccttcgtcccctcctcgggcgagaacgggaacacgcccgcgcgctcgatcttctcctcgcgcaggaagtcgcagagctcttcgaactcctgctccccctcgccgggaagaccggcgatgatcgacgtccgcagcacaaggcccgggatgcgcgcgcgcaggtcgtggaaaaccttgcggatgctctctttcgtgtcgcggcggttcatcgccttcaagatgtcgtcgttgcagtgctggatggggatatcgagatacggcacgatcttcttttcctgcgcgatcgtgtcgatgagctcgtcggtgatgtcatcgggatagaggtagtgtaagcggatccagtggaaatcgagcttgcacagctcacgcaggagtgcggcaagttggtgctcgccgttcaagtccgtgccgtagcgcgtgatgtcctgcgcgatgacgatgagttccttcacgcccgcggacgcaagctcgctcgcctcgtccagaagttcgttcattgggcggctgcggtaacggccgcgcaggcgcggaatgacgcagtaggcacagcagttgtcgcagccctcggcgatgcgcaggtacgcataccacgacggcgtggacaaaatgcgcgcgccgccctgcacgcagttctgaatgtcgcccatgtagcaggggcgcagcccgccgggcgccatgacctcatcgaccgcgcgggcgatctcgccgtagctgccggtgccgagcaccgcgtcgacctcaggcagctcatggagcacatcgtccttgtagcgctgcgccatgcagccggtgacgatgatctttttgagcttgccctcttttttgagctccgccatctctaagatattatcgatggcctcctcgcaggctgaggccagaaagccgcaggtgttgaccacggccacgtccgccccctcgggcgaggagacgatgtcgtgtcccgcgtgctgcaccgttgccatcatctgctcgcagttgacctgatttttggcgcagcccagggaaatgaaagaaacgttatagggcatagaacccctcctgattgtaaactaattgtaaaaaatagccaaacgactactcttcgtaatcgaattccatcgcattctcgctgatttgggcgattgccgcgcgcacatcgcgccacgcaaagccccgcctcagcagcatgtcagacaggcgcttgcgccccttttcatcgagcgcgcggccctttgtcttctgcgcgatcacgcgcgcgatggcctcctgcgcgtcgggcgactttgacagcgcgtcctcccacagttcgcgcggcacgccgcgccggtagagctcatcgcgaatcttcgcctcgccatagcccatgccgccgtaatggtgcacgagcattgcggcatactccgcgtcgttgagcgcgccgatctcctcgagccagtcgcacgccgattcggcgtcggcctcgaccgagcccttttccctgagctttttcgaaagctctttccttgacagcgggcgggacgagatcatgttcgccgcgcgcacgcgcgtttcgctccgcgcgccggactgctgcaattctaccacagtcctatcgtcaatgtccagtcctatacataaaccgaaacgcagaagctcgctctcggtgatccggaggaggtcgcccccctccagatacacgagaacgcgctcctgcttatgcttcgatcgttcgatcttctcaatcttcatccttgaaatcgtcggcgctgacgtccacggcacggcctgcggccttcgccgccacgcgggactggcccgtcatcagcttgtcgaagttgcggcggatctccgcttcgaggttatcagcgatctcgggattgtttttcagatactgcttggccgcgtcgcgtccctgaccgatgcgcgtttcgcccatcgagtaccacgagccgctcttctgcaccaatccgagcttgacgccgaggtcgatcagttcgccgatgagcgagatgccctcgccgtacatgatgtcgaactccgcctcgcggaacggaggtgccatcttgttcttcacgaccttggcgcgcgtacggttgccgatgatctcgctgccgtttttcagcgcctcgatgcggcgcacgtcgatgcgcacgctcgaatagaacttaagcgcgcggccgccggtcgtaacctcggggttgccgtacatgacgccgaccttttcgcgcagctggttgatgaaaatgacgatggtgttcgttttgccgaccgcgccggtcagcttgcgcagtgcttgcgacatgaggcgcgcgtgcagaccgacaaagctgtcgcccatctcgccctcgatctccgcgcgcggcacgagcgccgcgacggagtcgaccacgatgacgtcgatcgcgccggagcgcacgagcgcctcggtgatctcaagcgcctgctcgccggtgtccggctgggagacgagcatatcctcgaccttgacgccaagcgcgcgggcataggtgatgtcgagcgcgtgctcggcgtcgatgaacgcgacctcgccgcccgccttctgcgcctgggcgagcacatgcagcgccagcgtcgtcttaccggaggattcaggcccgtaaatttcgatgatacggcccttgggcaggcccccgataccgagcgccaggtcgagcgccagcgagcccgtggagatggcctccacattgctcacggtgttgtcgccaaagcgcatgatcgagcccttgccgtaggtgcgctcgatctgctgcatcgcggtctcgatcgcccgcttcttgtcgtcggccatcgccgcagttgccttcgtctgagacttttctgccatgttcgcgttcctcccgattctttatgtaaactaaatttgcttcaaatggtctccacgcgcgtgccgtacaccacgcgggggatgttgttgaggtccttgacgatctgaatgtcgccaaagccgtgcgagcgcatgatgcgcagcacctgatccgcctgcccgatgccgacctcgaaaaagagcatgccgttttcacacagggcatcgcgccacttttcgcagatcacacggtagaagtcgagcccgtccgcgccgccgtcaagcgcaaggcgcggctcgtgctcgcgcacggaagcgtcgagcgtgtcgatgtccgcgctcgggatgtacggcgggttgctgaccagaaactggaactcgcccagcgtgcgcgcgggcttttcccgcgcgtcgatcttcaggcttgccacccgcgccgtcaagcggttgcggcggatgttctgccggcagatcttgagcgcctcttcgtcatattcgccgagcagcacgcgcgcgttcggcaggtttgccgccgcggcaagaccgatgcagccgctgcccgcacagagatccagaatgcggcaggcccccgcgccgcgcgccgcgtcgatgagctttgtcgccagcacctcggtatccgggcgcgggatgagcaccgcgggcgaaatgtcgagcggcagaccatagaactcccactcgccgatgaggtaggccaccggctcgcccgccaggtggcgcttgacgagctcgcgcgcactcttctccacctcgggcgaggcgtagagtgagccgtcgcgcaccagctcctcgcgcgtttttgccgccgcggcgcagacgagctcgcgcgccgactgcgtcgcctcctcgtcgcccgcgcgcctcagctccgtgcgcagatccagatagagattattatacgtcgttgccatgcttaccacgcatccttgcctttttcttcaggaatgaccagctcgagcgcgcggatggcgacctcgagcatgctgtcgtccggctcgttggtcgtaaagttttgcagccacaggcccggacgcgccagaaagcgcgtcaccttgttgtcgtgcccgccgacgtagcggttgaactcatacgtcacgcccacgattggaatgagcagcagcaggtgcagcgccatgcgcacccacatgttgcgccagttgacaaagctgaagacaaggctcgagactaaaatcgacacgaccacgaccacaaagagaaagctcgtgccgcagcgcggatggtggcgcggctggatgcggcagttttcgaccgtcagcggcagccccgcctcgtagcagaagatcgtcttatgctccgcgccgtggtactggaacacgcggtagatgtccttctgcttggagcacaggatcatgtaagcgaagaagatcacgagcttgatgacggattcgaccagattgtgcaccgccgcgctcttgatatacgggtcgataaagccggccagaaacgtcggcagcaggaaaaagaacaggatcgtcagccccagcgacagaaagaccgccagcgccgtgatgaatttctgcattttttcgttgccgagctttttttcaagccactggtcgaatttgctcggctcggcgacgtcctcgtctgggaaatagtccgccgaaaacatcagcgccttgacgcccttgaccatcgaatcgacgaacgtcaccgcgccgcggatgatgggtaagcccaaaacggggtacttgtcgcgcacgagcgtcagctcctcgaccttttcgaccagcccgtccggcgagcggacgacaatagcctgcttgcccggaccgcgcatcaaaactccctcgatcaacgcctgtccgccgatgctcgtgcggaacttagacgcggaagccttgttttttgcttcttctgccatgaatggttctcctttttctatgcgatatcataccacgggttttgcaagaatgcaacacccgttctattttttacgacatgggcagcgagatcgtcacgaccgcgccgccgccctcggcgttggcgatgtcgaacgtgccgccgtgcaggcgcacgatctcgtcacacacggcaaggccgatgccgctgccgcgtgccttcgacgagcccttgtagaatttctgcttgacgaacggcagctcctcctccgggatgccggggccgtagtcgcgcacgcggatgacaaattttccatcctcgcacgcggcgctcacgtcgatgcgctttcccgcgccgccgtgcttggccgcgttgtcgagcacattgcagaagacctgcttcatgcgctcgctgtccgccacgatcggcggcacatcctcgtcagggcccttgtagctgacctcgatgccctcctgccggaagagctcgaaataggtgtagattgcgtcctcgagctcgctggcaagatcgacgctctccacgcgcagcgtgaagcgcccgtcctgcatcttcgtgaattcgagcagctcctcgaccatcgtcgtcaggcggcgggactctttcaaaatgatgccgaggccgcgcttcgtctggtcgatgttcgcgccggggtcggcagagagcgtctccgcccagccgctgatggcggtcagcggcgttcgcagctcgtgcgagaccgacgagatgaattcctgctggatcttctcggcctggctgatcttgagtgacatgtcgttgatgttgtcgaccagctcgccgagctcgtcgcggtagtggttctcgatcatgatgccgtagctgccgcccgaaatgcggcgtgccgcgtcgctcacgactgcgacgggctggacgacgttgttgataaaaatagcattcgacgccgcaatcagcgccatgcacacgagtgccgccgccgaagcgagcagcgactcgaccaacacgcgatgctgcgcctcgcgcagcgatgtcacgtaccgcagcacgccgacgacgcgggagttaaaaaacagcggatacgacaccgcgaggatattctcccccgtctgcggatcgcggccctgaaacgacgccattttaccgccgatcgcgctgtcaacgtcgctcgtgccgggcagcgtgcccgccgtcagcccgtaggacgagacctgcacgcgtccgttcgtgttgatgaactggagctcgatcgtgtccttttcttcaaacgtttcggcggagtacgacgcgaggcggtaatattcgctgtagctcttcacgccgtagcccgtgaaggtctccgccgcgatacgcgcgcggctttcaaggcccgagcgcatcgcattgtaatagtattcctgcacgcccacgctgaaaagcgccaccgccagcaccagcagcagcaagatcggcagcaccgccgaaaacatccaccgctgacgaaggccacggatgtgcagcgccgaagcaaagccttttcgattgtccggcatcgctgcccctccttcgttcggtgcgctcacaccgtccatttataaccaaagccccacacggtggagatgtacttcggctcctgcgcgtcatcttcgatcttgaggcgcaggcggcggacattcacgtccacgatcttgagctcgccaaagtagcccttgccccacacggcgtcgagaatttcctcgcgcgcgagcgccttgccgctgttttccataaagagcttgacgatcgcgtactcgatctgcgtcagcttgacgcgctcgccgtttttttcaagcgtccggttcgtcaggttcagcagaaacggcggctgatacaactctccggtatgcgtggccggcgtgttttcgcccatgcggcgcagcagcgcgtccacgcgcgcggtgagctcggcgggcgaaaacggctttgtcacatagtcgtccgcgccggtcatcaggcccgtcaccttgtccatctcctgcgtgcgcgccgtcagcatgatgatgccgacctgcgcgttcgacatgcggatgcggcggcagacttcgaacccgtcgatgtccggcagcatgatgtcgagcaggcacagcttcgtgtcgggattttcctgcaatttttgaagcgcctcctcgccgcactcagcctccacgacctcgtagcccgcacgctgcaaattgatgacaataaaactacggatactggcttcatcctccagcaccagcacttttttcatatcgtttctcctctcagttgtctcccatcgtccattccgccgtgatgagcgagaagcgctcgcgcagcgattgctcatcaagcgtgatattccatacatcgccgatccgtgcggcgtataccgcctccacctgctgcgtgagcacaaagcggctgccgatgttggcaagtccctcgcgcgcctcgcccgtcagggtgtagacggtgagcagtttctctctcagtccgccctcgcccgcgcggtagaaggacacagcggtctcgccgctgcccgcgctgcgctcgacggtcagatggtccttgtcccactcgtccggcagcacaaggctccagccgtccgccacattgtggaagcagctctgcacgtccgtcaccgtgccgtcgatgctgtactgctcccagacaacgtaatactgcagctcgctctcgcggtcaaagcgctgcaagggacgcgtcttcggcgcttcggtcacgccgtcgctgttttcatcgcgcgggaaaaggccgaggaaaatttcctccgcgggtacctgatttgcgtccgcgccgagggcgatgttctgcagccgcccgctcttgagcgccagcacgtccgtcacggtcaggttgtcgcccgtcacgcccgtcacgaacagcgcgttctccccgcccgtcagcgtgccggccgtcaggcggctcagctccgccaccgaggcggacaggcgcagcgaggacttcgcgtgcagcgcgccgtcatcccagtcgtagtaatcgacgcgcgccgtactctcttcgtcgctgcaaataattaaaagttcctgcttcccgtcgccgttcatgtcgaggttcgcgtaacgggaatagcccgtcgtcaaaagcgactccgacgtgccgggagagagcggatagatggcaagcccctgcacatccgagctgctcttgtagccgaccaggatctccttgagcccgtcgccgtccagatccgcgtagttcacgctgtagatctggctcgatgtgccctcgatcacggcgtagcgctcgtagctgtcgccgtcggctttgaagatgtaaatcttcatcggctttttgtcgctcgcgcggcggaagaaggccaccgcctcttcgctgccgtcaccatcgaggtcgatcatctgcacgctctgcaaattgctgcccgacgtgggcgcggcatactccgcgccgtttgtgagcagcgcgtcgatctgcgattcgagcgactcatactcgcccgcgagcttcggcaggcggtagagcgacgtctccggcgtcgtgaacatgcagcccgaaagcagc

SEQ ID NO: 10103 - DNA, 53426 bp, Unknown
  gut microbiota DNA sequence
acaatgttaacggaaagcttagcgatgaccgcttcgacatgatgagtcagagctacgatgccgaacagaagcagctggaagaggaagttctctctatccagcaggaaattgaagtacaggaacagcagatcgagaatattgaaaagttcgtccagaaagcgcacaagtacgttcatattgaagaactcaccccttatgctctccgtgaactggtgtcggccatctatgtggatgccccggataagtccagcggaaagcgggtgcagcacatccatatcaagtacgatgggctggggtacatccctctggatgaactggaagcaaaagaaaaggcgtgaccgaagtcacgccaaatcttccccatttcgggagcttttgtaaatactgttttatgggaactctgctactgctcgcgcccgttcttctcgttcacggagcggtatttgtcccagaatttttcaaacacgtcgaagtgcggctttcccatgtagtcgagcacgcccgccacgcagtgctcgggcgcgaccttgagctggccggagatgtggtatttgacgagctcggacaaaaagggacttcccttgtcctcgagcagatagtcataccggatgcccgagcggacgaagaccttcttcacgccggggatcgcgcgaagacgacgcagcagctcgacatattccgagtggtcgggatcgagatttttgcaggggtagggagcgaggcagtttttattgcggcacatgccgcgcttcaactgatccttgcacgacggatggcggaagttggcgctcggaccgccgacgtcgtggacgtagcccttgaacttcgggtcgtgggtgaagccctcgacctcgcgcacgcaggattcgatcgagcgcgaggtgatcatgcgcccctgatggaacgccagcgagcagaagttgcatccgccgaagcacccgcggttgtgcgcgacggaaaagcgcacctcctcgatggcggcgacgccgccgagagcgtcgtacatcgggtgcacctcgcgcatgtaggggagctcggcgacctcgtcgagctcctcacgcgaaagcggcatcgcgggcggattgacgacgagcgtgtcgcgcccgtgcgcctgccagagcgctttgccgcgaatggggtcgtgctcctcgtattcgagctttgtcgcgagcgcgtaggcgtgcttatccccgcacacctcttcatatgacgggcactcgacatggtcgaaggcgcagacttcgggcgtgcgtgtcacaaacgccgtgccgcgaatatctgtcaaggtatccgccttttcgcccttggagagccggcgcgcgatctcgcgcgtggcatattcgcccatgccgtaaacgagcaggtcggcctgcgcgtcgaaaatgagcgcgcggcggaccttatcgtcccagtagtcgtagtgcgcaaagcggcgcaggctcgcctccagtccgccgacgacgatggggatattgccgaaggcctcgcggcagcggttggcgtatacgatggtcgggcggtcggggcgaagacccatgcggctgccgggggagtagaggtcctgcgtgcggcgcttttttgccgccgtgtagtgcgcgaccatcgagtcgatgttgccgccgccgatcatcacgccgtagcgcgggcggcccatcgcgcggaaggcgtccgcgctgtgccagtccggctgggcgagcacggccacgcggtagccctcgtgctccagcacgcgtgcgatgatcgccgtgccgaagctcgggtggtcgatatacgcatccgccgtgacgacgagaaagtcatagtagtaccagccgcgctcgaccatctcatccttcgagaccggcagaaaggccttttcgatcttctttttcttcatttttcgataacttcctgcaatctcttccagcaggattcctcatcgtattcgaaattcttctcaaaagtgacgctttccgcgtcctcatgaacggggtggaagccccacttttccgcgcagtggaggccgactgcattgctcttcgggatgcggccggtcgagagaatggagcagccgcgcgagcgcgcataggagagagcctgaccgacgagcttttcgccgaggtcgcgcttctgcacgtcctcctcgagccagaattcgccgatcgtgcccacaccgccgcgacaggagacaacgctgaccgcaccgatgacatcgctgccgtgcatcacgtcgaaatgccccgcttcgcccgaagcgcggtagtagatgccgccctcgaagcctttcgggtcgttgacccaaggctgcttgcgcacggtggcaatgttgtcgccgaggtgggaggcgtcgtcgcggaagatgacattgaacgtgccattttcgtactcgagctttgcaacggcggtgttttccgcgtggccggtcttgtcgatttcgtgcagcgtcatgccctgaagcgtgccgacgatgatgcgcatggccatgccgtgggaaaagacggcgaccgtgccgttcgggtgcgcctcggcgatctctgtgagcgccttgcgcatccgctcgcgcacctcggcaaagctttcacagccggggacgtgccagttctgcgagtcgttgctgaaattcgcaagctgttcagggtcgatgcgctcaagctccgcccacggggtatcctcccaatagcccacgtcgatctcgcgcagcgcgcggacggtgcgcagcggcagaccgtgcgttttatagatggaaagcgccgtgatcatcgtgcggaaacggtcgcttgaataaacggcgtcaaatttcgtgtcggtaaagcgcttggtgagcgcggcaatctggcggtagccgcggtcggtgatggtgctgttgtaccagccatgcgcgcggcgatagaggttgccctcggcctcggcgtggcggatgagataaatcgtggtcatatggttctccttcatacttactttttctcattttcattataggccgaaaagaggcattcagcaagggcgatttgcggcaaaaattgccgcgtatgacgcgattttgtgtggacagactaagcgcgtgagcaaaggagtgatcgatatgtgtgataccgcattctggcgcggtatggctgccggcatggccgccggcgcgatcatcggcatgaccgtcgcagaaaagcgcaaagccatgaagacctgcgtgggccgcaccatgcagcagatgggtaccgccgtggacggcgcgctgagcgacttaatgcaccggtgaaatagacgcgagagcgcaaagtaagggcgggagctttagctcccgcccttactcattattttcctgctatcctgcttgcttttatccttagatgacgccatactccttgaggagcttttcaatgtcggtgccttcgattttgccgagagctttcttgacggccatcttttccatgaagcccatatccatgtcggtggccttcttgccgtcgcgcagcttgacagttgcgttgagcaggtcacgcacatcatacacgctgccccagacctcgggcacgccgcggtcgacgttcagcagcgtatagacggcctccatgcccgtgcgcatggaatactcggtggtgaagatcgtgtcgcgcggggtctcggcgaactggccgaggaaggcgaagttgacgctgccctcgggcacgacgttcgggcggtcgccataggcgcgcggcatgaagaacgcgtcgatatacggcatcatgacgggcacggtgttggcgctgttcgtcgcgagctcttcgatctggtcctcgggcacgccgatgtggtagagccactccatgcagatctccttgccggtgcactcgcgcatgggctttttgatataatcgcccggcttgtcggtgaagagggagtagacccagacgaggcagtggtccttgggctgcgtgcggaactgcggctggcggttgatggtccagctcatcagccaggaggaatccttcacggtgacgatgccgccggtgacgacatggccggtgaacgggtcgcgcttgcagatatttttgatataggggatgatcttctggtcgagggtctcgacggtggcgctcatccagttggtctgctcggggtcgtggcagaacttgtcgggatgaccgaaggacgggtcctgcgcggcgatcttgcgccacatatcccagccgccgccctctttgagctcggtgttgtacgcggcgggctcgttctggctgcccatggaggagttttcgacgcagccgccgttcgtgatgaagacgaggtcgttttccgtgaggtcgatggcctctttcttgccgtcgcggatgacgtcgatgcgcttagccagcttgtgcttggggtcagagcagtcgaactcgacgtttgcgacctgcacgccgtagtggaactggacgttgtggctctcgaggtacttgaccatcgggaggatcatggactcgtactggttatacttcgtgaagcgcagcgccgtgaagtcgggaagtcccccgatgtggtggatatagcgctggatatagagcttcatctcgagtgcgctgtgccagttttcaaaggcgaacatcgtgcgccagtagagccagaagttggaagaaaggacctcgtcatcgaagaagtcggtgatcttcttgtcctgcagctgctcgttgggggtgaagaagagcttcatgatctccatcgcgcccttgtcggagatgtcgaacttgccgtcggtgtgcgcgtcctgaccgcggttgacggtcgcgcggcagagagagtagttggggtcttccttgttgagccagtagtactcatcgagcacactcacaccctcggtctcgatggaggggatggagcggaacaggtcccacatgacctcgaaatggttgtccatctcgcggccgccgcgcatcacgtagccgaggttttcgaacttgtagccgtcgcacgcgccgccgggcagatcacccttttcgagcacgtgcacgtgctcacccttcatctggccgtcacgcacgaggtagcaggcggcagtcagcgcggcgaggccgctgccgacgatataggcggacttgttgtccacaccttcgggcttcttgggacgggcgaacgcttcatagttaccgctggaataatacataaatcatttctcctttcaaactgcctgtgaaaccactgatccacgaaacacattcaaccttgggaatcaacggtatgttttcctttcgatggtgaaagcataccgcggttttgcgaaaagaacaatcagcagaaaccgggcggtgataagtttcttatcaccgcccgaaaagctgtaaaaatttttatcattctgccgcttttgatgaaagcagggaaaccgtcacgccttatcgatgcgcagccgctcgagcgcggcacggacattgccgtggatgacgagttcgagccggtcgacaagcagctgggagtcgcccttcatatcgtttttgatccagtcgagcatcagaccgacaaaggcgtacttgtagaccgttgcgatgaaggccttgtcctcgtcacgcacgctcatgccctgcgcctgctcctcgaccacgccctcgagcaggtcgtaggtgaccttgtagaggtagttttccacctgctcgcggctgacggagtggtagacgttcataatgaagggcttgttgtcctgcacggccttaaagagctgcaaaaaaccctgctgccacgtctcgtaggtcttgttgcctgcgagcgccttgctggcgtcctcctgacacgaccattcgacaaggtcgtaaatgtccttgaagtggtagtaaaacgtcatgcggttgatgccgcagtcctccgtgatatcgctgatggtgatcttgctcaggggcttttgcagcagcagatttttgagcgacgcctcgagcgcgcgtttggtcacctgtgacatggcggtctcctctttctatcaggaataatcggttattttcatcataccatggaaagcggcggaaatgggagaagtttttgtaaattctccactgaatcaaaaaagaggacgcttatcgtcctctttttcaattcagtttatgctgtcctggaccgcttcttcaaaccgcacggtgagattcggattttcctccgcgctgtcatcgagcacgcggcggaaggcgttggcgcggcgaccgagcagctcgtcaagcgccgaagtgccgcggacgatcagctccgtcggctcatgcaagtccgtcaggcagtcgtgcagggcatcgagattgccgctgtaccacgcgggaaaacgcagcccctccgcgagcgcgcggtgtaggtcttcgacactttcgcaggcggagacgtctaatacaaagcgcatggtgctctctcctccccgtacagcagttcaaaggtctcgtagtggtcttcggtgtagtaaatgaggccgtcgtttgagaagacgatgcgtttggccccgcgcgaatccgcgcccagcgtgtcgatgtcgcattcggtgtaggtgcgtccgtccgcctcgggcaagagaccttcgtagttgccgaaccggctgccgccaatgcatttgtccggcgcgtagggctcgagcgacccgcccggccagccgagggcctgggcatctttcttggtgatgaagttgtccggtaaatgtccgtaggtgtggatatagagcgcgacgtcgtccttggtcgtgtaggagccgtcctcgtcgatctgcgctgtttcgtccggcatgccggcgtcttcagacggtgcgttctgcgcatcctgctgctcctgctgcggcaggctggaatcgtcctgcaccggcgcatccgcgccacagccgacgagcgagaagagcatcacgagcgcgagcagccatgcggtcagttgcttcttcattgggaatcctcctgtggtgattttctccatcatagcacggctgcgggcaaaaatccagcacgcgcggcggttgactttgcgcgccgttgtgcgtacgataggggaaacgaccggcaaggtcctctgtccctgcgcgcagtgcgttcgcaacgccgtcctcgccgcaggagagatgctgggggagtaaagggagaaaagcccagttcgctgagagcgctgagtaaaaaataaaaccaccatcgaaagatagtggttttatttggcgcagcaggagagattcgctcgcggtgttaccacaccgcgacacggaaagcggcgaaacgctgccagtggcagagaaagtgagccgctttcgaggaagtggcacgatcgacgggactggacaagtcgcgtcgatcgtgatgccacgacggtgtaggcgggcactaaacgccccgctggggcgttttttcgcttcgctcatgccctgttcgaatctctggatacaaaaagaacaccacccaacagggtggtgttctttttggcgcagcaggagagattcgaactctcggtacgcttttggcgtacacacgatttccagtcgtgctcgttatgaccgcttcgatactgctgcgtatcgtgcgctcgacagcaaaaatgattataccaaaaatcacagcaaagtcaagcacaaattcgaaaaatgcgcgattttctgagcggcgccttcacttgcaatttttgccgccatcttttatactgacaaaaagaccctttggggagggagtatcatgagcagtagcatctatcgcgccgtgaacacgacgctcatttatatcgaatgcggcggcgaatacctgatgctgcaccgcacgaaaaaggagaacgactgcaatcgcgacaagtggatcggcatcggcggcaagtttgaagagggcgagagcccggaggagtgcgctctgcgcgaaacgaaggaggagaccggcctcgccctgacctcttaccgctatcgcggcatcgtgacattcgtgtcggacaagtgggagagcgagtacatgcaccttttcactgccgacggctttgagggaacgctcaaggactgcgatgagggcgagcttgcgtggatcaaaaagaaagatctgctggcgctgcccgcgtgggagggcgacaagatctttttgcgcctgctcgacgaaaacgtaccgtttttctcgctcaagctgcgctacgagggcgaaacgctcgcggaggcaaagctcaacgggaaagcgttggaggtgcggcatggataagctgctcgtgtcggcctgccttctcggcacgccctgccgctacgacggaaaaagtaaagcggacgcgcgcgtgcaggcgttggtgggaaaatatgaaattgttcctgtctgccccgaacagctcggcggtctcccgacgccgcgtgtgcccagcgaacggcggggcgagcgtgtcgtcacagcgggtggccgcgatgtgacagaggcgtaccgccgcggtgcggaggcagctctcgcgctgtgccagcaaaacggctgcgaggctgccgtgctcaaggaaaagagcccgagctgcggctgcgggcagatttacgacggaactttttcccgccgcctgaccgagggcgacggcgtgacggtggagttgttcaaggcgcacggcatagtcgtctgcggcgagagcgatgtggagaagctgtaaacgctgacgatatgcccgtgatattttatgcagtttaccgacaaaattttagttgtctttgaaaaatgcagccgttatactatataaccagcattggacagatatcatacgtgtattgaatatgaccggcggatgaccggcggtcatcataataaaaaaggaggagcacaacatgaaattttccagcaaagttgaaaaatgcggcctgtctccgatgcgcaagttccacccgtacgcggtggcggcaaaggcacgcggcgtcaacatctatcacctcaacatcggccagcccgacgtacagactcctcccgcgtttttcgaggcggttcgtcacttcgagcagccggtgctggcctacgcgccctcgcccggcatccccgagctgatcgacgcgatccggaactactatgacaagctcgacatgcacttcgacaagagcgagatctacgtcaccgtcggcggcagtgaggcgcttcagatcgcgctgcagtgcattcttgacgacggcgacgaaattttgattcccgagccgttctacccgaactacaacacgatgacccgcacctgcggcgcatcgattcgcccgatcccgacctgcccggaggaggggtatcgctacgctgagcgcgagaagatcgaatctctcatcaacgagcacacgcgcgccatcatggtcacgaatcccggcaacccgaccggcgttgtgctgagccacgaggagatggagatgctcgtcgatgtcgcacagaaacacgacctcttcctcatcggcgacgaggcgtaccgcgaattcgtctacggcggggagaagctccagtcgtttggcgagtttgccgacagggcgggtgacaacatcatcgtcatcgacacggtctccaagcgcttttccgcctgcggcgcgcgtatcggctgcctgatctccaagaataaggagttcatgaaccacgcgatgaaatactgccaagcaagactttcggtcgcgacgctcgaccagatcgcgtctgccgcgctctacaccgtcggcccagagtattttgccgccgtgcgcgacgagtataagaagcgccgcgacacgctctgccgcaagctcggcgagatccccggcgtggtgttcgacgtgccgggtggtgcgttctacgtgatggccgcgctgccggtcgacgacgccgacaagttccagcagtggctgctcgaggagtacagcgacaacggcgagaccgtgatgatggccccgggaggctcgatgtacgcgacccccggcaagggcaaaaacgaggtccgcatggcctacgtcctcgaaagcgacaagctcgagcgcgccatggacattctcaagaaggccatcgaggcctataatgccagataaaaaggagaaaatacctatgatccgtcatatcgtaatgtggaagttccgcgagggcactgaggaaaaagccaacgagtttctgacgaagctcgccgcgctcgacggcgtgatcccgcagctcaaaaagagcgaggtcgcgcgcaacatcggcaaggacaactacgacgccgtgctcgtctccgagtttgagacgatggatgacctgaacgcctacaaggtcgatccccgccatgtcgccgtgagcgatatctgcaagtccatccgcgccgaccgcgtggccgtagactacgaaatgtaaactcaaaaagagggagcactgcatttgcagtgctccctctttttgctgttcaggcccacaggccgcaattgcctaaaccggcggcgtattttccatttattgtccagctgtcgccacaggcaatcttgagttcgagaactcctgttaaatcgatgtaaaactcaacaggatcaacacctttcgtcaccgaagcagaatacagcagctcgccatctccatatattttcaaatcgcttacggcgctctcactgcggcagttatatgttctgaagagaactccgctaatcgcgctgtactgtccattcagcttatacacattatagccgctccaatgaccaatgcgaagtgcatgttcgtatgtattcccaagattgtctttcatattttccccttttttcagtgggttgtaactcgaatcgaagtagtccagttcatccagccagacggctggcttgtcgctcttatgctggccgatatagactgaactggtctttgcttcccactgcaccgccttgccgaccgcctcgccaacagcgcgcacgggaagataggtcgttccgttgtaaataaatacttcgaccggatttccgttggcgtctctggcgtcaagccttgcgtcatcaacgtaaatgtccacaccggaatagactgtgatcgtccgtttttgcagttttcctgccgcgaatacgccgccggtaaaaaatgctgcgcacagcagcagacacagcgccatgcgaaggaaacgtttgaatttgatgttcatatttcttctccttttccgcctgaatcaggcaatcatgataccggtgagatcaactcccggctgaaatacagtctcccgttcatgatctccagcttgatattttcatcataaacgcctacccaatagggcgcagttacggaatattccggccaatcaaatgacagctgcttttcttcaaaggaagcctcaagacgatcagtggagtagggcctgttatagtaggtaaaattccgcatgtaatattgccccgaatccttctcaatatcaaaagtgtagtgctgcttgccattgatatagaaatcatagtgacccgttatgtcgagcgttacgaccacctctccgctcgttgcatactcgttggattcctttcggaaccattgcattgaacggtcattccattcagcggtcgttcgatacacccgaaaaaactgaaagccgccgtagtctgttgtcagaagatagctgacctcgcattctccgttttcaagatccgctgtacagtaccagtcgctgacgtcgtaggtcagccagctttcaaattccttttgccagtaaagcccctcgagatcaacaaggtctttcatctcctcttccgacatcccgttttgcagttccgtctcataatacgtcatttcacgcccggtgccgacccaactgttctcaaaccgctcaaaggttatgacccagttggccgtctgtacggcgtagcggttgctcgcctttaccgtacagcttacgatgaattccttgtcattatttccctgttcttgagaaatatccttgatctcatccacagacgcatcactttcgttgtagtaagagctttccagatagctgcggatgctttcgctgtccactttgtttccgcagccggtcagactgagcaaaagcagcattgcccctaatagccaggtcagtttcctcatgaagatattcctccacctcttgagtttgagacgctgatccgtccttctgatttcattttacatcataagtgatgtatcgtcaatacactatttctgatgtatggaataatactccccatccaaaactacgagggggagaggcaaaatgaaggcctattgggatattctgcgcgagctaagagaggatcatgatctgacacaggcgcaggttgccgctgtcatcggaacaacgcagcaggtttattaccgctacgaaaaagggatcaacgagctgccgctgcatcacctgcaaacattatgcgcttattacaatgtcagcgctgactatattcttggcctgccgaagggactgcgctggccgcgctgaaggcctctttttttacactgcaaccgctggttgctaacttttcaaccccacttggtggactttttgcgcgccttttggtaagctgaacgcagaaaatctgcaaaggagaaccccatcacatgacacttggagagaacatcgtgcgcctgcgcacacagaaaaactggtcgcagggcgaccttgccgacgcgctggacatctcgcgccagagcgtatccaaatgggagaccgacgcctccatccccgaacttgacaagctattaaagctctccgagctcttcggtgtgacgcttgacgagctggtgcgcggcgaggacgcgccgaaggcggaaacagccgcgcccgcggcacaggcagtacccgcctctttcacgccgcagacttcgtctgagcaggaaaagcgtcacaccattgcgggtacgattttaatgtgtatcggcgcggttcttctgctcacctgcctgatactcgccggcgatctgctagcggggctgatttacggactgccgtttttcctctgcggcatcatctgctttacggtgaagcatcgcacgggcctgtggtgcggctgggcggcctatctctgtattgatctctacctccgctttgcgaccggcctttcgtggacgaccatcttcatgacgcacctctggacgccgcagatgaactatatgcgccttgcgatcgcatgggtgcagttcgccgccatggtcctgatgaccgtctggacggtgctcgcttaccgaaaaatgaagctgtccgcgacaaaaaaggaactcaaatggctcgctgccggctggcttgccgcgcttgtcgcgctgccgcttctgatgagctacggcgttatgccgctgctgctcgacgatctcggcaattacagcaacatttcgccgtacttccttctgaatgtcgtctacagctacgcgcgccttgcgctcgtcaacatcctgcttgtgcgcacgctcgccgtctggcgcttgaagcggaaagagaagaaagcaaagatctgaatagggataagaaaaagcggaccgcactgcggtccgcttttttgatgcaaatatgccttacttcttgctcttctccagcgcggcaagcttgaggcagcagcagaagacggccatcgcctgctcaagctcctcgaccggcggcagcgacggggcgacgcggatgttgctgtcaagagggtcgtgtccatacggataggtcgcgcccgcgctcgtcatcacgacgcccgcctccttggcgagcgccagcgtacgcttggcaaggccgggagccgtgttcacggagacaaagtagccgcccttgggcgtgtgccagctcgcaatgccgagcggcttgatctcgcgctcgagcgtttcgacgaccatgtcgaacttcggctttaagatcttggcgtgctccttcattagcgcgagcgtgtgctccttgttttgcaggaacttcacgtggcgcagctggttcatcttgtcgaagctgatggcctgaatgccgatgagcttcgtcatgtagtccatgttggcctcgctgcacgcaaagcaggcgacgcccgcgccggggagcgtcaccttgctcgtggaagcgaactcgaagaccatgtcggcgttgccgtacttctcgcactcgctcagaatatccttgaacgggacgaactcgccgtcgaactcgtggatgcagtaggcgttgtcccacatgagcaggaagtcgggagccgcgggcttcatcttcgcaatgcgctcgatggtctcgtcggagtagatgatgccgtcggggttcgagtacttcggcacgttccacatgcccttgacgctcgggtccttgatgaggttttcgacaatgtccatgtcggggccgttttcggtcatcgggatggtgatgagctcaaagccgaagctctcggtcaccttgaagtggcggtcatagcccggcgcagggcagagccacttgacgctctcttccttgcaccacggcttttcgctgtgcagcaggccgtgggtgtaggccttggagaccgtgtcgtacatgagctggaggctcgaattgccgccggcgaagacctgagaggccttgcagccgaggatatcggcgaacagcttacgcgcactctcaagacccttgagctcgccgtagttgcgggcgtccacgccgctgtccacgcactcctcggcgctggtcagcgcggtcaggatgccgctgacaaggtcgagctgctgcttgctcggcttgccgcgcgccatgttgagcttgaggcccttggccttccagccctcatattcagcggacaccttgtcgtattcctgctgccactcggcagcggaaagagccatataatccatgatgattctcctttacaggtaatttatccgattaaagtaactgcattatagcacagggaaaaatcaggcgcaagtgtccacatataacaatcatttgttttgcccgcggcaacaagtcgactcattgaacagattgtaccgcccctcgccgcaatagagaggggcgctgctttttggcgaaagcgggaaagaaaacgcgtcagcaccaaacatagtgctgacagtgcgtccaaatcaggcaaaaagtaaggccgcggaaagcgcatcgcttcccacggccttgatcgtttttatagaattggtcttgtcacagctcggtaaaggtgcgaatttcgtcgagttgggcgtaacgccgcgcgtgtgttgtgctcacctttccggcgcagacggggcagccgcactgctgcgcgccggtgcgcggatagatgacggatttccacacgtgtcccatggagcactgccaccagacctttttgttgctgccgggcgtgaccatctccggtgtcagcgcgccgttgagcgacgggtgccactgcgcggcaacgccgggacagagtgttttcagatcgttgaagcctttgagcaccttgcgtcccgcgcaataaggacatccggttttgcgctgcgtgcgcgacgagaccgtggcgcggtaggaatgtcccagctcgcagcgccaccaagcgggacggttggaactgacggcgacatcgctgggcttcaggcacccgtttttgcgcttatcccactgtgcggcgacctcgggctggaggtgggcaaggtcattttcgcccgtgacgatcgtcttgcccgcgcacacgggacatccgtgcccccacgccgtgcgcgaggcgacgggcgactgccacgagtgcccctccggacagcgccaccagatgcggatcttcgagcccgtggagacgtcgcgcggcgaaagcgggccgtttttctcgcggtcccactgcgcggccacgtcgggatagagcgtttccaaatcgttgaagccgggcaggacctttcgccctgcgcagtacggacagccgctcccctcggagcgcacatgcaccgtcgtctgccacgaatggccgttttcacacgtccaccagacttttttcttgctgccgtaggaaacggtgtccggcgtgagcggaaaattgcgcgattcgtcccatcctttcagtaagtttgtcctttcatgcagcatgcagaactcataaaatgtttgtcgcatgttcatccccctcttttcggcaaaaaaggtttcccgcctgtgccttgctttcagagagggctgggcggtgcaggaagggcactgcccttccgaatgatttgcagccggctgtcataaccgcacacggcggccttagacccctctggctttgcgtccctgcttttcagcaggtttgccaaacattgcttgatttgcttgtcagatcagtacaggcgctttcgcgccggaaacggggaagaaaaaacttccgttttgacagaatcaatgaaaaaagattcgccgatcctgctaaatctgtattctatcacgaactttccgtaaaaacaaggcaggtgacaagacggaattcggaaaagtgatataaaatttggaaaaatctgaaagaaattagcggaatattagcgttttcatgctgattctctatgtttttgacgcgatcgggaggatagaaaccgtgcacggcgacgcgaccgaaaccgcgttttcttgacatcttccgccgtttcggtatgatagagccatcccgttttttggaggcaactatgcattcagtgacaactaagaaggccgcgctcgcggtgcttctcgttctggcggcgctcctttccatcttcgcggtagggaagagagcgtccgaccccgcgtaccatcaagcgtccatcgacgcgctcgcggaaaagcaggagacggtgctcgagctgacggcggcgtccaccgccgcgagcgcagccatcacgctcctgccgggcgacaccgcgacgcccatcgccgaaaagctcgccgacctgagcggctatttcctcatcgtgctctgcgccatctttttggaaaagtatctgctgacgatcacatcctacgtgtcgttcacgatcctgatccccgcagcctgcgcgcttggcatcgctgcgctcttttccgaaaagctgcgcgccgcgctgggaaagctcgcgtggcatttgctgctcttcgcgctcgccatcgcgtttgccattccggcgggcgtcaaggtttcgagcatgatcgaggacacataccgcgcctcgatcgaagagaccatcgcaaacgccgagcagacgaccgaggatatccagtccgccacctcgggcgaggcggacgagggggaaaagagcggcctttccggcctcttttccaaggtgactgagggcatcaccggagcggcgaccgccgcggtcgggcagatcaaaacggtcctgaaccgctttatcgaggccctcgccgtcatgctcgtcacgtcgtgcctgatcccgattttagtgctgctgtttttcgcctggctcgtcaagctgatgctcggcatcgaactgccgccgctgcgtgtaaagcttggtgacggcaaggtgcacagcacgagcggcgcgccgcggatatgaccacatggccatcgtaaaaaatatacgagaacttaaaagtgcggcgagcgcagcgatgccgctttgggggggcagcaaggttggcaaaatctagcgacggcaggggattctaccaagactgcattcagatcagggagcgacagcgaagatagaaaaaagtcaaatcgtttagaaccatcacccggcaggtacccgattccgcagactgagcagctcttcaagcctcaaaaccgcaatgtcggggggcgagagggttccccctcatccttcccttgggattcaaaaggggacattctcttcgagaagagaatgtcccctttattcgctctcccctgcgggtcagcaggagaaaactccgcagcgctgcgcgctgctgattcaccttacctccggaaatcgcgtcgtcagaacgacacgacttcctgcgcgggcttcgacgtggtggtgatgcgctcgacgtacagcacggggccctcgccctcgtaggcgtcgaggtgctcctttttgaccgtggcagtgatatcgacccagtcgcgattcttgtaggccttcaggctgtcgcccttggcgacgatgccgacgaactggatgtcgttttcgcagcaggtcatcacgaagcggccggggcagtggatgcccgggaacttcttcgagtggcacatgatgagcttcatgtggacctttttgccatcccagcggtcgggatggtccatcgcgtcgacgtaccacacgccgtagtcgtcgtcgggaatgtcgatgaggtcgggcgtcatgtcgaacgggcactcgtcgccggtcaggtagtcctcgctgttgccgtcgttgtcctcaaggtagatgtccgcgcggcggttgaccatgcgcagattgcgcgcgcgcaggctctctttgagcttgtcgtcgcagcggttgaagacgatcatgtccgcgttcgtgatcttttccatcatgagctgacccatgttcttgacgaacagctcgaacgtcggcgcctgcacgaaggtcatgatctggtagagcacccagttggcgggcagcacctcgcggtagagcttttccatctgccacatgccgttgtactcaatgagcacctgcttggggcggtgctttttttcaagctccttgcagaaagcgagcgtcagctcctcttcgtcgtctaccgtgacaacggtgacgttgtcgagcgccttcttctcgtattcttcgtcgccctcttcgcagcagatcagaagcgtcctgtcctcgcgggcgaagccgtcttctaaaatgccgttgataaagctcgttttgccggaatcgaggaatccggcgaccagataaacaggaatatccatgaattacactccaaacagttctgcaaggccgtcttccttgagctccgcgccgataacgcacagacggcccgtgtagtcgggatggcccgcgcggacctcatgctcttcgggcacgtagtcgaattcgagccagccgtcctcgccgttcacgatgcccttggcacgcagaatgtggccgtagtcgccgctgtccagcttgtggagcatgtcctcaagagcttccttgctgaacttcttcggcgtctccttgccccaggaggagaagacatcgtcggcgtggtgatgatggtgatggtggcactcgcactcgggatcgtcgcactcttcaccgtcgtggtgatggtggtgatgctcgtgctcgtcgtgctcgtcatggtcatggtcgtgatgatgcccatgctcgtggtcatgctcatcctcatcgtggtcatgatggtgctcgtgttcatagtcgtgctcgtcatgttcatcgtgatcgtgatgatggtgatgctcatgctcgtgctcggcctcttcgatctcgtgctcgcggcgcatcttttcaagaagctcgtcgctgagcgacaccttctcgatggcggagaggatggtcttgccgtccagctcgtcccacggagtcgtcagaatggcggcgtcggggttcttctcgcgcagcatcgcggcggcagcctcgagcttttcctgcgagagcttctgcgtgcgggaaagaatgatcgtgccggcggcctcgatctggttgttgtagaactcaccgaagttcttcatatagaccttgaccttgctggcgtcggccacggtgacatagctgttgagcttgagctcgcccgggcactcgtcgacggtgcgctcgacggcgacgatgacgtcggagagcttgccgacgccgctcggctcaatgaggatgcggtcggggtggaactgcgccacgacctctttgagcgccttgttgaagtcgccgacgagggagcagcagatgcagcccgcggacatctcggagatctcgatgccggactccttcagaaagccgccgtcgatgttgatctcgccgaattcgttctcgatcagcacgagcttttcgccgctgtaggcttccgcgatcagctttttgatgagcgtggtcttgccggcgcccagaaagccggagaaaatgtcaattttcgtcataagaaatacgcttccttcttttttattaatttccaaacccatattataagcagaatttgtgaacgattcaagtctttttccgcgcaaaattcgcctttttcccgctcacaggcccataccgggcagcggcacacgatgatctaagatcacgtgtccgaagcagataaagcgctttccgctctcagggccgcagacgacgtccgcgctgcggtcccgccccagagaaaagaggtacgaaacgccgagcgggtcgcggtaatactgcttgcagagcatgtcgcccccgacgcagaagatgcccacgtcgcccgcatgcagcgggtcgtgattgaggtaggcgacgctgccgccgtgcagcacgggttctaaactgtcgtcgcggatgcgcacggcgaattccgctcccggcggcacatcgccgtggtcgacgatgtagtcaaaatcctcgcctggcacgggggcggcgtagcccgctgcctcgatcgagcggtagagcgggatgcggcgcggcgcgctcgcttcctcccgccctgtatgcatcgtgcacagggcgctgacgaggctgcctaccgtctcgcgctcgagcggcgagagcgagcggcacttttcgatcaaatcctgctctgcgcgcgagcagacgaagctgcctgagcggaacgaatcgcggtaaaggtagttcgggtcgatctcaagcgcatcgaacagccggagcagcacctcctccttcggcgagctgacgccgttttcatagttgctgatggcagagggcgaaacgccaagctcctccgccagtgccgcgcgcgagagatgaagctcctcacgccgcaaacgcatttgtttgccaaaactcatcaagattcccccagaaaacgcaggctgcgacaagatttgactgtattctatcgcagaagcttgtaactgtcaatcaattataacaagaatcttgtaaatttattcttgacatagcaagattcttgtgatatcttgattttgctgacaagttctttgtacttgccagcatgccgcggcaatcgttctcctcagtttgcccgcggcgcacgccgccgataccggtacggcggctgatccccgcagcagaaaaagaaaacgcgccgccccgaaagaggacggacgcgcaaaaaatagagagaaagaaaatatcgagccagcctaagggcagctcgatatttttgcttttgtggcaaaacgacgaaagtgtgatttcaacgcaggccgcagagcggctctgatacgccactggcgtatcgcttacattttccaaccactacaaaacaaaaagaacgagctaactttcatcaactcgttcttggtgggggaaggtggattcgaaccaccgaagtcactgacaacagatttacagtctgccccctttggccactcgggaattcccccatatgaaattgtttgcttgtcggtggagctggtagacggattcgaacccccgacctgctgattacaaatcagctgctctaccagctgagctataccagcatctcagcaacgaacaggttgtatattaccagacttcaattcgtttgtcaacagggaatttgaaaaaaggaggaattttgttgtacgcaggaaaaagacaccatgattcggtgcacgcggtctgctcactctgcgcgcaggacatttacgcgggagaaacgctgtggtaccggaacggcgtgaccgtctgcgcggactgctttccgcgctttgcgcgcgaagcgctccggtcgtttgaatacatatcaggggaggcgagcacgctatgacgctgtatcagatgtcgtttgtctaccgcgaggacgcgctgcgcttccgtatgcgcatcacggtgctgcgcgagcaggccaaggccgcaccgacgaaggaggagcgcgagcgactcaagcggcgcattttggagctccagcagcttcagcgccagtcgcgcgagctggccgagctgacgcggcactattacgaaaggggctattaccgcaatgaaaagtacaccttatagtatgcgcaacaatgaagtttacggcgatatgaccgcctggatcgccgcgcacgcgggcgacaacgagagcgacctcatgcgcctcaagcgcaatctgcgccttgcccgcgaggaggagcttaccgcccgccagcgagagctgctgcgcctgcggtacgaggaaaacatgaccgtcacggagatcgccgcggccatcgggcgggacaagtctacggtgtcgcgcacgctctcccgcgcgcggagaaggctttacaagtgcctccgctatgggctataatcaaaagatgacaagcgaataagacccgcacgggtacatagaataatggtcagtgcggagaaaagtgagggcaagagctatgctgcacaaagcgctgcaaaacaaatgggcgcgcgtcctgatcgcggttttcgcaacattcctctacgcgctgggcgtgaaccttttcgtcgtaccgatgggcctctactccggcggcgtagtcggactgagccagatcatccgaacactgctcgcgcaggccgtcgagctgcccgcgggggtggacatcgccggtattttgtactttctcatcaatattccggtgctgtatctcgcgtggcgcgacctcgggcgcgcgtttttgatccgcacgctgatctgcgtgggcgcgtcgtcgctctttttgagcgtgatccagtcgcccgccgtgccgattttggacgatcctctcgcctcgtgcctcgtcggcggcatcctgtgcggctttgccctcggcttggctctgacctgcggctgctcgaccggagggctcgacgttgtcggactgtgcctcacaaagcgcggcagccgcttcaccgtcggacgtttttcgctgggcttcaacatcgtgctctacgtcgcctgcgcactgctcttcgacatccagacggccatctactccgtcatctacacggtgttctgctcgctcttcatcgaccgcgggcatcagcagaacatcaatgtgcaggtgctcatcttcacaagggacgcagaccccgagctcccgcacagcatcatgtcgcgccttggccgcggcgtaacgtactgggagggcaagggcgcatatacggagagcgacatgcgcgtgctgtgcgtctgcgtctcgaaattcgaggccgcggagctgcaggagaccgtgcgtgagctcgatccccacgcctttttcatcgtgcaggagggcgtgcgcatcgacggcaatttcctcagaaagatctcgtaaatcctttcggttttcccgcgaagacgctttgcgcagcagagcgtcttctttttgtttatttaactattttgaaaaatcatccatgttttctaaaacattcaaggatgttttattgcgtttttctatcaatcgtgatagcattacctcaatcttttattatgccgcagcagtgttcttcccccggagacacgcggcatgaaaaagtcccgcagcgaataaacaatcatcaaaccccaatgagatgtggagggatcttttcatgtttgaccagtattttgaaaaatttgatttagcccccgaggtcaccgcagcactcaaaaagtgcaagtgcattgcctatgccgagacgaaggaagagctcgaggagatggcctacggccccacgcacacctcccgctacgacgtggtctaccccatcgagggcaatggcacggtcaaggaagcggaagtcgtgcgctgcaagaacggctgcgtcgtcaacttcatggaagactacatgcgccgccgcgacccgaacagcatggccatcggcgacgatctgccctccgacaagccgcgctttaaggaccgctttggctacgagttttcgtcccttcgtcaggagacgctcgactggctctccacgcagcaggtcatcatgctgccgttttccgccggcccgcgcggccacggctatccgagcctgatgatctgcccgctcaatgccgcgttcttcgcgctgtcgctggcgaacatgcagggctttacgagcattgtcgatgtgcctgagcactataagccccgcgccatcatcttcgtcgcgccgccgttccgacacacgcactttgacggcaagcaggtcgtcgtgcacaaccgctccaaggagatgcacgaggtctgggcctacaacctctatccgggccccagcgccaagaagggcgttttctcgctgctgctcgacatcggcgagcaggagggctgggtctgctgccacacaagcgcggccatggtcgagacgccgtatgagtgcgaggtcgtgttcatgcacgagggcgcgtccggcggcggcaagagcgaaatgctcgaggacttccaccgcgaagaggacgaccgcctgctcatcggtacgcacacggtcacgggcgaaaaatattacatgacgcttggcgagagctgcaagatccaccccattgccgatgatatggcctgcgcgctcaagagcttccaggatcccgagagcggcaagctgcgcatcctcgatgccgaggacggctggttcctgcgtatggacggcatgaatgcctacggtaacagcccgctctatgagcgcatctgcatccatccgagcgagccgctggtcttcttcaatatggacggcgtccccggtgcgacctgcctcatctgggagcatgtgatcgagtcgaacggcaagccctgctccaacccgcgcgtcatcctgccgcgcaagatggttgacaacatcgtgcctgataccgagcccgtcgaggtcgacgtgcgcagcttcggtgtgcgcatgccgccctctactgcgaaagacccgaactacggcgtcatgggcatgctgcaggtcgtgccgcagtccattgcctggctgtggagactcatctctccacgcggcttcaagaacccgtccatcgccgatacgaacgccggcagcggcctgaaggccgagggcgtcggctcctactggccgttcgccacgggcctcaaggtcacgcaggcgaatctgctgctcgagcagatcatgtctgcgcctaagacgacgaacgtgctgatcccgaaccagcacatcggcgcttatcatgttggattcatgggcgagtggctctcgcgcgaatacctcgcgcgccacaacggttttgtgcgcgaaaagcatctggtccccgcgcgctgcccgctgttcggctacgcgctcgatgaaatgaagctcgacagccagttcatccgtcagacgttcctgcgccccgagacgcagtccaagctcggcaacgcgggctacgacgccggcgccaagatcctgaccgacttcttcaaagagcagctccagcagttcgtttccgacgatctcgacccgctgggccgcgagatcatcgattgctgcctgcatgacggcacgctggacgattatctccagctcacgccgatgaagctgaagtaatttcagaacttttttcagaaaattcccccacctgacgtggggaacgcgggaaaggggaacattctctcacgtgagagaatgctccctttcttcgcacaagtgcgagggggtatgtcgcctgcgggcggcgggggcaaaggggccattctctttcgcaaaagagaatggcccctttggaaccccaagagaaaggcttttgattggcagttccggactcgaatgacttttaggcctccggagtggaaatgcctgcgtgcggcgttgccgcgttagcactgcaagacgatttgcctctgcttctattatccgctgttgcgcagccgttggcggctctgctgccttacggatgcggcacaccccttgcgggtgccgctctgcccatcttgtagaagtgcgcagtaatcatcgtctaccggagcactcctcaatgcggcgagcgcagcaatgccgcattcggtacgcagtctgccgccgagaaaacgtcactcgcgcctcacgctagtaaggcgcggttgcaaaacggttacgaatcgcaggggttcatggcgaagccatgtacaccgcacccacactgcgcagcgcgtgcagtcattcaagcgcccgactgccaatgtagggggtcgagggggcgcccctcgtccttctctgggggatttaaagggggtattctcttcgagaagagaataccccctttgccccgcgccccacggcaggtggggaccccatacagcgcccgcggcgctgcaaaactcacgcacctctgtcaggtgcgaaaaaaggagcattctatggactatacaatgaaagtcattgccagaatccactctgactttccggaaaaattcggcatcccgcgccagagcggcctcgtccccgcgcttcgcgcgaagatcgtcttcgagccggagtaccgcaatcccgacgcgctgcgcggcatcgagggcttttcgcacctgtggctcatctggcagttctctgccgccgtgcgcgacacatggtcgccgacggtgcgcccgccgcgccttggcggcaacgagcgcgtgggcgtttttgcaacgcgctcgccgttccgcccgaacgccatcggcctttcctgcgtgaagctcgaaggtgtgcggcacgaggacggcctcggcgacgtgctgatcgtctccggcgcggacctgatggacggcacgccgatctatgacatcaagccctaccttccgtatgccgatgcgcatcccgaggcgctgggcggctttgccccgtcgccgaaagagacgatcgaagtcaaaagcccgccggagctcctgcaaaagctgccggaggggcagcgcgaggcgctgctcggtgtgcttgcgcaggacccgcgcccgcagtaccagaacgaccccgagcgcgtgtacggtatgagctttggcggctgggacgttaagttccgcgtaaaggacggcgtgctgactgttttgtctttagcggaaactgaacatcaataaaaacgctgttaagggaaaaactcttcgcgttaagccaatgctaagagggcttccgaacggttgatatgcaaattctgcgcgctataatagcgccagaatacataaaaggagcgtatccgccgatgcaagtttccagcgcatttgttgttatcatgggtatgggcgtcacgtttgtgggccttacctgcatcatcttcctgacgatgctgatgggcaagatcctctcgaagcccgaggctccgaagcccgccgcagcagctgccgcgccggcagcgcccgccgttcccgccgacggtctgaccgacgaggtcaaggtcgccatcatggcggcgatcgcccagcagcccggcttcaacatggcgaatgtgacgaatgtcagcatccgcaagatttaattttgaattccacttcttcctttatcagcgaaagggacggcatcgcgccgtcctttttgctaccatgaaaaaaatattcgatttagcacaaaattagcaggctgtatgctataatggggacggaaagcatgcggagtctttctccgcgccaacgatcaagcgagagaaggcggcgacatggcaaaaatccccaaaaaaatgcgttggatctacgaccttttgctgacggcggcgatcctggctatggcgacggtgctctgcacgctgctgcgaaggatcgacgacggcagtggctacgtgaacctcatcttcgtgctggcggtcgcgaccatctcgcgctggacggagggctatttctgggggatattcagcgctgtctccggtgtgctgctcgtcaactacgtgtttacatatccctactgggaattcaacttcacgatcaccggctacccgttcaccttccttgcgatgctgacggtgtccatgatgatcagcgcgatgaacacgcagatcaaaaagcaggagcggctgcgcatcgaaacagaaaaggaagccgtgcgcgccaatctcctgcgcgcgatgtcgcacgatatccgcacgccgctgacgagcatcgtcggcaacaccgccgcgatcctcgaaaacgaggattcgttttctcccgagcagaagcgccgccttttagaggatgtgaacgaggacgcgcagtggctcatccgcatggtcgaaaatctcctgtccattacgcgcatgagcggcggacaggcaaagatcgaaaaggactgtgaggcggccgaggagatcgtcggcgtctcggtcagcaagttcaccaagcgcttccccgcgatccaggtctcgatcgaggtaccggacgaggtgctgatggtgccgatggacgcgacgctcatccgtcaggtcattatgaatctgctggaaaacgccgccatccacggcggaaacgtcacgcagatccgtgtctgcctctcacgcgaggggacgaacgcctgcttttccgtcagcgacaacggcgtcggcatcccgaaggagaggctctcgacgatttttaacggcgggctttccggcgtgtcgcacaacaactttgatatgaagaaaaacatgggcatcggcctttccgtgtgctacaccatcgtcaaggcgcatgacggcacgatgaccgcagaaaatttagattcgggcggagcgtgcttccgcttctatctgccgctggaggagggcatcaacagtgaaattgaaggataaagtgctcgtggtggaagacgagcagaacatcagcaactttatttcgacggttctcaccgcgaacgacttcgacgtgctggtggcgcagacgggtgccgaggcggtctcgatgatcacctcgcactgccccgatctcatcattctcgacctggggcttcccgacatggacgggataaacatcctcaaggaggttcgttcgtggtcgagcctgccgatcatcgtcgtttcggcgcgcacgcacgagcatgacaaggtcatggcgctcgacctcggcgcggacgactacatcgaaaagccgttcggcacgagcgagctgctcgcacgcatccgcacggccatccgtcacacgcgcacgccgctcgacaacaacgagatcgcgcagtcgggcaagttcaccgtcaaggacctgaccatcgactatgacaagcaccacgtgctcatcggcgatcaggatgtgcacctgacgctcaacgagttcaagatcgtggcgctgctcggcaagtacgctggcaaggtgctgacgtatgactatctcatcaagcagatctgggggccgaaggccaaggccgacaatcagattttgcgcgtgaatatggcgaacatccgccgcaagatcgagaagaatcccgcctcgcccgagtatatcttcaccgagatcggcgtgggctaccggatgctcgaaaacgacgcatgatgatagagccgctcgcggctttatgataccagggcgcgtgcgcgccccacacgatcacgcagacggctcctgccatttggggatggcaggggtcatttgcgcacttttgcacttttatgaaaaaggtgtcggactgaaacagtgaacgtttcagcccggcacctttcttttttgcgtgtattcatgcagcaaaatctttttgcttgcttataaacacgccgtattgtgccgcggcggatgttcgaccgtcatagttatgccgacttttgtgtatatttttaccaaatcgttttccactctatttcgcctctttattcagcgctacgatcttgatatgaattgttattctcgttattgacattttacaaacataaatatacaatcggcgtcacagtcagtcctacgaaggaggaaaccacagcacatgaacatttgggaaattgcaacgaattattatcaatacttcctgcgagggacgcgaacgaccatcctcatctctctgctcaccgtgttctgcggctcgatcctcggctgcctgatcgctttcatgcggctatccaagtttaagccgctggaaaagttcgccagcatctatatcaccgtcatccgcggtacgccgatgctcgtgcagctctacatcgtttactaccagctcgactttatcagctatcccaccggaaccctcttcggtgtcgatctggagcgggcgctgccatgtatcatcgcgctttcgatcaactcctccgcctacgtcgccgagatcatccgcgcgggcattcaggcggtggacaagggccagatagaaggcgcgcgctcgtgcggcatgacgaatgcgcaggccatgcgctacgtggtgatgccgcaggcggtcaaaaatattctccccgccatcggcaatgaatttgtcacgatggtcaaggagacctcgatcatccagtacctcggcatcggcgatctgatgtacaacaacggcatcgtggtcacctctacctataacccgcttccttgctactacatctccgccatcatctatctggcgctgaatatcatcctcggcaagggcctgaacatctttgaagggaggctgagaaagagtgaacggtaacgtattgttcgagatcaaggacttgcagaaaaagttcggcagcctgaccgtcttcgacgggctgagcgagaccatctgcaagggcgacgtggtcgtcatcatcggtccctcgggcggcggtaagtccacctttatccgatgcctgaaccttctggagcagcccaccgccggcaaaatttacttcgagggcgaggacatcacggccaagggctttgatgtgaacaggcaccgacagaaggtcggcatggtgttccagcagttcaacctcttcaacaacctgacggtgcttgaaaacattacgatctcgctcacgaaggtcaaaaagcagtcggaagaggagagcaaggaaaaggccctcaagcttctaaagcgcgtggggcttgaggacaaggcgaacgcctatccctcccagctctccggcgggcagaagcagcgtatcgccatcgtgcgggcgctggcaatggagcccgatgtgctgctcttcgatgagccgacctccgcgctcgaccccgagatggtcggcgaggtgctgcaggtcatctccgacctcgcccgcgacggcatcacgatggtcgtcgtcacgcacgagatgggctttgcccgaaaggtcggcacgcgcgtgctcttcatggacggcggacagatcgccgagcagggcacgcccgaggagatcttcgagcacccgcagaacgcacgaaccaaagagttcttatccaaagtcatcaacgtcatttaacaaacaaaaaataaaattaacgatattattggaggaaacaaaaatgcttcacacgatcaatcccgaaattctgttccttaagcaggaagatgtcatcaaggccggccttctcgatatgaaacagatcttggccgttacggaaaagacctacgcgatgctcggtcagggcctcatcaagaacccgcccaagaccaacaccagcatcccggacaaggaaaactggcagtcgttcttcaacgccatgccttgctacatcggcggcgacatcaacatcggcggcatcaagtgggcggcggagtccaagaagaacgctacgatccctggcatcccctacggcatcgacatttccatcctgagtgaccccgagacggtgctgccgttctgcattctggacggcacgctcatcaccgcgatgcgcacctccgccgtcggcggcctgatggccaagtatgccgccccctccaatgcggacaccgcgtgccttgtcggcgcgggcgttatcggccgcacgatgatctccgccgtgcacgaggcgctgccccagatcaagaccatgtacctctgcgacattgatgtcgccaaggccgagggcatcgcgaaggagtacggcgacagcttgggcgtcgagatcatcccgacgagcgacagcaaggctgcggcgctcaagtcccagctcatcgtcggcgagacgaccgcgcccaagccgttcatggacacctcctggctcacgcccggctgcggcctcgtctccatgcactccaacgaggtgatggaggacgtcttcctcaaggccgacggcatcgtcgccgactactggacacagctcaagcagcacacgaacccactgtccaagctcacgaaggagggcaagctcgatgagagccagatcatggacctgagcgagctggtgctcggcacgaagaagctgcgcacctcggacgatcagttcgtcgccgccgcgtccatgggcctcggcgcgctggacatcatgatcgcctatcagctctatctgaacgcgacggaaatgggcatcggcaccaaggtgaacctttgggacaagcccctgtgggaataagacacgtaggagggaacaaagatgaacgcattcaagaaatttgcggcgctgcttttagcgcttatgatgatcctgtctctcgccgcctgcggcagcaagagcgatgacagcgcgcagggcagctcggacggcgatgcgtcgcccgatgacaccgccaagtccaagatcgagcagatcaaagaggcgggcgtgctcgtgatgggaacctctgccgactatcccccaaacgagttccacacggaggtggacggcaaggacaccatcgtcggctttgacgttgctatcgcgcagtacatcgccgatgacctcggcgtcgaactcaaggtcgtcgacatgtcgttcgacaacctgtgcatcaacctcgccaagggtgattttgacattgtcatcgccggtatggcctcgaccgaggagcgcttgaagtccgtcgatttctctgacccgtactttaagcagcagcaggccattctgatccgcgcggaggatgacgcgctctacaacaagcccgaagacctgagtggtcacaaggtcggcgtgcagaacggtaccattcaggtgcccatcgccaacgagctggtgagcgaagagaacgtcgtcggcctcgtcaaggcgcaggatctcatcatggaactcaagagcggcaagctcgatgttgtgtacatcgactacaccgcggctctcgcattcgccgcggcgaacgatgacctgacggtcaaggacatcggcatcgaaagcgaccgcgagggccagtgtatcggcgtgcaaaagggcaacgaggactttgtcgcctacctgaacgaaaagatcgccgagatgcaggagcagggcctcatcgaccagtacgtcgccgaagcccaaacgctggcgggcatcgagtaaagcccgtcccccttgcatgatatgaacagcaccagcataccttctaccaagagaattggggaggatatgctgatgctgtttcattttgaccgcaggaagaagtctgaaaaggaaaagaagccgccgcgctttctggtgctccggcgcaaatggctgacgctgggcgcggcggtgctggccgccgcggcgatctttgccgccgtcaattatcccgccgccgtcagcgcgtcggccgccacgcgccaactgccgatctactgtgtccagcgcgaccagaaggtgtgctccatctcgttcgatgcggcgtggggggcggacaacacacagaagatcctcgacgtgctcaaggagtacggtgtcacctgtaccttttttgtcgtgggcaactgggcggatcagtatcccgaacaggccaaggccattgtggacagcggcaatgagctcatgaaccactccaacgcgcatgatcattataattccctcaccgccgaccagatcatcgcagacgtgaacacctgcaacgataagatcgaggcgttgaccggcgtccgcccgacgctcatccgctgcccgttcggcgagtatgacgaccacgtcatctccaccatccgctcgataggcatggagccgatccagtgggacgtggaagcgctggcagcggttggaagaaggaaatcaatgaaaaaatgagcggtgttgatgaaggacatcaagccatcgggctcattccacacaacacatatcatgagagatcaagctaaaaggcacagcaccgtcgtggtgctatgcctttctgacaaatgattttcagcagaagaaccgggcttctccgaaaaagtcggtcctttttgctataacttctgaacttctcgcttcaatcacatccatgatattgcggagaatgcgagcagggatccttgaattgttattacagagaatgcatccgccagcctttgtaatccatatctttgtagcgttcccgttgggagcgccttagcatacatggacatgaaccggctctattattgtatcagcaatttcgctgttatgcaattagtacccaccaagttttttggcattacgccgcctgcgcagtgattgctgcatcatatcagctgagaccgaaagacagctgttactgttagcagagataacctacatatacaaaagaattcaacacaagatgcaaaggtgttcgaaaactattctgtgatacgttacaatatgacaatgaaatctgtactggaagcccggttacagggaagccggtaactggaaagacttactatgtcaagtggacgaagggcgacaatgttacattgacctctgaccccgcggcagaaaatggcgaagtcagcgcagcctacaaccccaacggctccgttaccctgtcggtgaagaagccgggcgcaaactggctctacacatggatgaaggacggcgagcaaatcctcggcgctggaaatagcctgacgctttatacgcagagcgatagcggcaactattctgttcaggttacgacaaagggcaacaacgcattgatttggaccagcaacgcgatcaatgtgaccatcaccaaggccactgtggcaaataccgtgaaagagaacgtccatcacacctttggtactacctatgatgtaagcaatctgttcaatattgatcccaatgccggtggcgccacttatacattggttgagaatacagatgaggatgcaggtacagctacacttgagggcaatatcctgaccattactaaggcgggtaccatcgaggtcagcctgactacggcggagactgataattataatgcgggttccgctgtcactgctacgctgattgtcgataaggccgcccccaccatcgacatcaccgctgaaccggcttcgcttgttggcggcggtacggtcaagctcaccgtcactacggatgcacccgcagaagtcgttcccacctgcgagggtgtgaccgttaccaagaccggcgacggcacgttctccgcgctcctccccaacgagaccaggacctatatctttaaggccgcctacgcgggcgacgcgaaccacgagagcgcagaggatacctgcaccgtctctgtgacgcgctatgtgcattccgcccccggcagcagcgttagcgttcctgctacggcgaacggcagcgtaacggtttccccgtccaccgcgtccaagggcacgaccgtgaccgtgaccaccaagcccaacgaaggctatgagctcggctccctcgaagtgctcgacaagaacggcaacgcgcttgcgctcaaggatctcggcaacggcaagtacagctttgtcatgccggatggcaaggtcagcgtcgaggcggagttcgttaagactgttgctaccggctttgctgacgttcccgcgaacgcttacttcgccgacgcagtgaagtgggcggtcgacaagggggtgaccaacggcctgtccgcgaatctctttgggccctacgagtcctgcacgcgcgcagatcgtgacgttcctgtggcgtgctgccggttctcctgagccgaaggcgatgagcagcttcacggatgttcctgtgagcgcttattacgccaaagccgtcgcctgggcggtcgaaaacggcatcacaaacggcatgaccgagacgatgtttgccccgaatgcgacctgcacccgcggccagagcgtgacgttcctgtaccgcgccctcaagggcatcgcgagcggcagtgcaagcttcactgacgtgaagtccgacgcgttctacgctgacgccgtcaattgggcggtcgcgagcgacgtgacgaacggtacttccaacacgacgttcagccccaacgcagactgcacgcgcgcggagatcgtgacgttcctgtatcgcgcctatcagggcaagtaaaacttaaaatcatgcggaaaagcggcggttcactcgaaccgccgcttggcttttgtatacagttgttataataaaatcagaacatgccgggaattgcggaaaggcgggctttggataatcgatgttcagctcttgcggcgtgggggcggtgagaggacttgatgttcttgtaacctatattgccttgccccaagctgcaaagtgaaagtacagagacgttttgccgcaaagcggcaaaacgtctctgtactttcgaggttgataattgtgtggtgaggaaagatcaatggagatgaacgtatgttaggagatcattcggctgccgcccactctgcacgtgccttgacctcttcgtcctcttccttttcatagaagatcgggaagtcagagtcaacggtgccgacgtgcttgtagcgcgccatgtagtccttgatgaggccgaggaagcgcggcgtcagcaggaagagtgtgatgatgttggccaaaatcgggagcgctgtggaagcgtctgagaagagccagagcgttgcgccgggatagcccagataaacggcgatgacgaccatgccgaggctcgggatgggataggtccacttgtagaacttgaggatcttgtccttcatcttagagttgccgaccagatagcgcacgaccacttcaatctgcgcatagacgccgctggaggttgtgaggccgaacaggaacacgccgagcgcaagaatgatgcggccgatggagccgatgccggtctcgaaggcggacagggtcagcgttgcgccatccaggccgctgttccagacgccggtgatgaggatgacgatgcaggtgatcgtgcagacgacaaaggtatcgacgaaaacttcgaagatgcccatcatgccctgcttgacggggtgatcgaccttagcggaggcatgaatcatcggagcagagccccaaccggcctcattgctgaacactgagcgggccataccggtcttgatagccagcgagacggaggcacccataaagcctccggccgcggcagtgccgttgaacgcgctgtcgaacacgagcttgaacatcgccgggatctgcggggcattgcggaacatgatgaaaagacccgcaaggatgtagaagatgcacataaaggggaccatcgtcatggcgaacttgccgacggacttgaggccaccgctgatcatgacgtacagtgcgatcgtgtagacgatgccgacgaccatcatgtcgatattaaaggtgttggcgaccgcctcagagacggtataggtctggatattgatgaagtagccggtcaaaaagccaaaggcgaaaatgaagctcagaaccttgaaaacacctttccacttcttttcgatgccaaggccctttttcatgtagtagttcgggccgccgtaagcttcgttgttggcgtctttagagcggtagtggacagccagcgtgatctcggccatcttgatgatcatgccgaaaagaccggcgacccacatccagaacacggcgccgggaccaccaacagcgatagccgaagcaacgccgccgatattgccgacgccgatggtggtgccaagcgcggtgctcattgcttcaagaggggagagaacgccagtatcgttctcatctttcttttcgcggtggaaaatgctgttgaacgcatgcttcatggacatgccgaagcagcggaactggaaaaagcccgtgcgaacagtaatataaacgccggttccaagaatcagaacaacgagtggaagaccccataaatagtcgtaaacgataacggaaattaggtctgctaatttcatcctgagttcctcaactttctttagattgaggctcccagccatgactctgcggtgatagccgggagtcctttatggtgattccgagggttgtttgcggcgctggggaatagattactgacggtcaccatcggccagaactaatccgatggcgtgctgtataattgcgggagtacgctcgcagagatcccgcttcaaaacgcgctcggtaagcttgtggaagtccttgccccatgggccgatgttgatgcacggcatggagattgtttcgatatccgagatcgcgatatcgtacagtgtgccgtaaaacggcatggacttagacagcgcggcggaaatctcctcactgttggaaatgctcgtgtagctcaagtcagagatgccggtgtagaattcctccgagacatagtgctggccgaaccgctcgcgggtgaagcggtccagatcaacgtcaaggctgcggatctgcggagcaaggccggtgataaagcggttggaaacattggggtagtacggcgggatcagaccgtagaccacacgcggggagaggtcggtgatatagccgtagacaaagtcgagcaaggcaaagttgcagtcgagcagcgtcatttcgttgttctcaagcttttgctggagtgttttgagctcagatcgatattcgcgttcaaatgcttcgccgccggcggccttggcctcctcgtagagcgtcataaaatcgacgaccttccggctccagggcaacttatggacgggctggtgtgtggcttcgaggaatctggcgtagtttcggttcatcttatcgagaacttcgtcaaacgcctcctcgcagattcccttgaccttttccatcagcgtaacaggggtctggttcagtgtcaacacacttaggcagccggctgcggagagcggcatagacacatcgtacttgatcttgcggtcgcggcaaaagagccaggtgggcggcggcgccgcctcattgccgacgatgtccgagaggtccatgttgacctctgttttctgaacgatcgcactgagcaggttcatcgggttgaagccctcgaacaccttgccgacgtgggcgagatagccgcggatgtagaaaaacggcatcagcttaccgacagaccccatcgagaacacgcccgtttcggggtctttgcgttgatggggctcagagttgatcatgagctgataggtaaagccgtactgcgccttgagctcggccagaagcgttacggcggcgcgcataccggcggagagattttcctcatccggcacagccaacacgatgaggttacccggaagtgcctcaggcgaacggcggaccagctcgctgtagcggcgcagcagcgccatctggatcgagccgccgcccttcatgtcgcagacgccgcggccgtagaggtatgcatcggacgccagatcatttcgaatctcctccgagaagctggcggctctctttttgagctcaatctccagctcattggggctgaaggccagcgggcgaagacggtcatagtcctccaccgtgaccacatcgttgtggtggacaaatacgatggttctgtcccccttgccgcgcaccatggcaaaggcggctgcacggccgaaggggtcgtccttgaccggctttgtgccgacgcattcggggtgctcctgccagtagggcaggtttttgaagtaggacaggaaaaatgattccgcctgcttttccccgggggaataggtgatgctctcagctttgacgtaagagtagagaatttctttaatctcttcaccgatcccctccagagagaactggttccaattatccatagtgggctcctatcttacggaatggctcaatcaaaggcgggtcagcgggcaggtcaggcaggtggggccaccggtgccgcggtaggaaacttctttgccttcataggtgaagacctcaacgccggcgtcttcgaccttcttcttgatatcagggcagccggcgatcagaacgcacttgccgggttcaagagccagcaggttggagccgagatagtcgtactcttcatcgttgcactcgatcagctggatgccgcgggcgatgagatattcacggaagaaaacgggcatgtacttcgaatagacaacggccttatctgtgtcgacgaagctgatgatgctcatcaggtgcaggcagcagtcctcaccctcgccgtgcggcatgggaacgatgatgtactcatcgacaaggcctttggtcagctccttgaactggcggatgccctcgtcgttcgtgcggtagccgcggccgatggcgacggttttttcgtcgatccagagcacgtcgccgccctccatcttgccgggggccttgatctcgcccagcgtggggatgccgatgctctcaagataggcctgtgtggccaggtgttccttgctgcgcagttccttgcccatggggaagtagatcgcacccttcttcgtgaccttgagcgaatcgtgcgcgtaaatagagtcgagaccggtgcggtcatcctcgggcagatagtaaacgttttcgacatgatcggtgatgatcttttcaaaagcggcgtattctttcagaaccgtttcataatcggggcagccgaaatagcggaaagcctcccagtttttgttaaggttttcctggctgatgaatgcctgttggggacgcttgagtaagatagattcgagctttccgaccatagactgacaaccgtacagcataacaattttctcctcttataaagtattttgtagaaagtatattgtatactttaagcataatatagcatggagatttgaaaattgcaagagcttttgtgaaaaaaatataaaagaaaaaaagattgccaattacaagtaaatacagtatactgagaccatcaaaggataaaagagaccggacatatttggagaaatgatatggaacactacttgtcactgaaagatcacgtttaccgttatatttcggattgcatcaattccggtaccttgaacccgggggacaagatcaacgaggcgcaggtcagtgagacgctgaacatcagccgcacacctatccgtgaggcgcttgtgcagctggcgtcggatggatacctcgacagtctgccgcgcaagggcttccgcgtcaaagcgctcgacactacgaaggtccagcagttttatgagatcatcggtgcactggatggccgtgccgcggcgctgtgtgtaccgcatatcaccaaagaggacctaaaccagatgcagtttctggcggaagcgatggactcagccatccacgcgggattgggtgacaaatattatgaattgcaggtcgaattccataatgtctatctcgaccgctgcccgaacacggagatgactgacctcttaaagcgcctgaagaataactttatccgcaagtactatctctttgagaatccggacaacgagaacagcgttctggaggagacgaaccagcagcactacgagatcattcggctgttccgcgagaagaaggctgcggagctggagcagtacatccgtgatgtgcattgggacagcagcaaggcaaaattcgactcgctgccatctcatcagtcgtgacgaacctgacagaataaaaagaatgaaaatacaataaacggcagcagagagcggcaacggcctcgttctctgctgctgtttattctatttacggtgggtatttagcgatttcaacgtcggggatgtgcaaatataccaatgaaaaagataaaatactgttgacttttgttgatgtcgtgcatacaattatattgtatacagtatctggaagcaaaactgtatcaatactttattgaggtgcggctatgaaaaagttcaatcatgttattgtcaggcgtccctgcaaggcaatggtcgaaggaatcaccagcggcctgtatcccggtaaacccgattatgcgttggccttgaaagagcacgactcctacatcgaagcactcaagcagtgcgatgtcgatgtgacggtgcttgaggcggatgagcgctatcctgactcctgttttgtggaggacccggcgctcatcacgagcaaatgcgccatcatcaccaaccccggtgcggcctcccgcaacggcgaaaagaataagatcatcggtgcgatccgcaagttttttgacgacgaacatatcgagtacatccaagatcccggaacattggagggcggcgatgtgatgatggtcggagaccatttctacgtcggccggtcggccagaacgaatgaagaaggcatccgtcagctgacggagatccttgccaaatatggactgacctgctccgaggtcacgctcgaaaaagtactgcatctgaaaacaggtgtcaattatctggaaaacaacaacatgctcgtctccggtgagtttgtcacaaagctggattttgaaacatatcaccgcgtggagatcccagaggaggaagcctatgcggcgaactgcatttgggtcaacgatacggtcatcgtgcccgagggctatccggcggtactgaaggctgtgcaggatatgggctaccgaacgctcgtcgtcgatacttcggaattccgcaagcttgacggcggactgagctgcctatcgttgcggttctgaaaactttttccatgggaagcagagcaaaacacaagattttggccggcagccatgtgctgctggcctctttttgcaaacggggaaagtgtacgggagtgttatccgatcatacaaggagaaccgtattgcagcagatgcgcggaacggagggaagggtgtcagatatgagaccttgcgcagctgcgaagcaaggcttggaatcaccgcaactgtttttcctatgcggttggtttctgacgacatcctgcgagacttttataaaccgataaaacctgaaaataaaaatcaaaagtgtgacttttgcaacagaatgtttgagagaaagctgctataatcaaaacatctcaaaaactgctgcaagcaggagaggaaaagacagacaaagctttgacgcaacggatgatccgaaaaagctttttacaccatttggaaaacgataaaaatgaaaaggagaacctatcatggagcagaagttttatatttgcaagcattgcggcaatatcattgtcaagattaaggacagcagcgttcctgttgtctgctgcggtgaaccgatgagcgagattgttccgggcgtgaccgacgcggcggtcgagaagcacgttcccgtctggagcgtggaaaacggcgtcgttcatgtcaaggtcggctctgtggagcatccgatgctgccggagcactacattgaatgggtgtcgcttcgcaccaagcagggcagccagcacaaggagctgcatcccggcgagaagcccgaggttttctttgcccttaacgaaggggacgaggtcgaagaggtcttcgcctactgcaaccttcacagcctctggaaggcgtaataatatggaaaaaacggcgctgagatgattggattgccgaaaagcaaaagcagcggagcacaatgtgctccgctgcttttattgctaaggggacgtagcgttgacggctgtttatcaaaaatagaaggtggggaagagtgagttgccctctgagaatattacgacacctggtatcgtgttcgaatttatcagcatctaatggcaaaccatattccaaccaaaactcaatgagggcagacaccgtcgataatttcgtatcccttttccgcaaggagtttttccacccattcgcggttggctgttccgtttttggcagctgctaattttttttcgtcggctgcctggaactttttggcatcttctaaaacggtagcggcatcgttgcggggaatggcaatgacaccatcgggatcggcaagaatgatgtcgccagggtttacgttgatgccgccgcaggagatcggtacattgatctcaccgggaccctccttgtatgggccgcctggcgttgtaccagtgcagtagacgggaaaatcccatttgctgatctcgtcgatatcgcggataggaccgtctacgacgatgccggcgaccttttttgtatagtgcagataggccatcatcacttcgccgagaatcgcgcgagtgtcatcttcctcattggaaacaataagaaaatcaccttcgcgacagagattcagtgctgcgtgaagcgtgagattgtctcccgcacggcacttgactgtataggcagggccgaccgccatctgcgcccttggcaaactgaccagatgaattctcgggttcatcgcacagcttcgtcccatcacatctgcagtatttgacgcgggaatggtgcggaactgttccatgatctcaaggtctggcatctctcgttgaagataaatgcgttttccaacagacatttttaaacgacgcctcctgttagtccgtcagctgccacatgatcccgttgggatcagggaaactgctgacagtgcgcccggtatccttgattgtggcatgctctgttttgaagacgataccctgttctttcagcacttccacatcctctggcctgctctggcggaaggcaacatgatggaccccctgcggattgccattggcagggcgcagttcaaaggtgacctgattttctcccggcagggccatttctacggaagagcgcggtgctggagtacggcgtttttcctgtaagcccatttttttcagtgtttcgacagttgcttccagatcattgacgcgcatgtcgatatgatctacttgtgtaagcatacgtaaaaaacctcactttgtttgattaaagtattactgtgcctgctgctttttcttgcggtgttctttgaacgtcggatagaaaccgcaaacaaggatcagaaccatcaacgcaatactgagcgggcggctgaaaaagtatgcaagcacattgccgcgactcatggcgaccgactgacgaagaccggtttcagccattgagccgaggattagtccgagtacagtagcggaagcgggatagtccgccttgcgcatgaagtagcccagaagaccgaagacgatcatcacgtacacattatacattgtagaagagagcgcataagaaccgacaacagccagaaccacaatgatcgggcagagaacgctggttggtacctgagtgactttgacgacgtagcgcgcgatcaaaagcccgatgatacccatcagaatgttggccagcgcgaagccgacaatcaccgtataagtgatatcagcatgcttggtaaacattgcgctgccgggctgcatgccgtggatcattaagccgcccataatgacggccgctgcggcgctgccggggataccgagcgtaagcatgggaatcagagagcctccggtcacggcgttgttggcagactcggaagcgcagatgccctccaatgagcccttgccaaagagttccttatgcttggagcggttctttgcagtgttgtatccgacccaggagccgatatcaccgccggcaccgggcagaatgccgacgccaatgccgagaacggacgaataaagaatggtggggaccaattccttaaactgtttccaggtgggaagtacacgaccggcggctttgccgatctcatctttcggttggccggcagcggcgcgagctttggcgagctgaccaagcacctgcgggatagaaaacagaccaatcagcgcaggaacagtggggataccaccgagcagagctgtagaaccaaaggtaaaacgcgggaatgctgagttgttgtcaatgccgaccgtgcagaacagaagaccaagaaaacctgcaatcaaacccttactcagactttcggaggcgaggctcgcaatgatgctcaggccaaaaaccgcaaggaagaaattctcggcagagccaaatttcagtgcgacagaagccagcagcggggagagaaacagcagtgcgatcgcgctgatcgttccgccaatcatggaactgaccatagccgtgccgagagcctccagaccacggccctgaagtgtgagagggtatccgtccattgctgttgcagccgatgacggcgtaccgggggtgtggatcagaatggcagagatagaaccgccagcgattgccgaggtatagatcgtcatgagcattacaagtgcggctgtgggttccattgcataagtgaatggaatcatcagagcaatgcccatggtcgcgctcaaaccggggagtgcaccgatcaccataccaccgaccacaccaatcagcagtgcgatcagaacatcgaaggtgaacagtgacgatgcaatcgtcggtaaagtgttaaaaaatccgcttatcatcgtcgtgcctccttagatcagcagcccggagggcagattgagtttgagctgcatcacgaacagaaaatagacaaagacgtccacgccaagtgtgacaagcatgagcgtgagaggcttgcgcatcttcagaaacagcatatatccgaccataaaaattgtagtggatacaaaaaatccgagcacatcgattaacaggatgtaaacaacaatcagcgcgtagccaagtagcgggagcttgttttcctcccaactgaagatgtttttgatctcttggccttcttcgatttttttgcgctcagctttggcttcggcaaaaccataaacaaaggtatagatcccaagcaggcacaggaccacaagaataaactgcgggaaaatgccagctgtgtcaggaaatttgaaggtcattgggaatagaactactgagagcactactaaaagtatcccaatgtacacgtcatagtgcaaatgctttttcacaaagggttcctccccgataaagtgttgaatgctcagccgttgtaaccgagttcgtcggcccacttgataataacggcctcctgatccttcatgtactgctcgtactcttcaccatccatatagttgacttcatagccggcagcttccattgcagcaagatactcgggatcttcctgcgccgcgcggagagaagcgaccatagcttccttgatctcttcaggaacaccgggctgcgtcacaatgccgcggtcagaaccctgaatgatctcatagccctgttcagaagcggtggcgatatcgggcaggaaggaagaacgatctgccttgcagacggcaagaaccttgacagtaccttcttcgtacattgtcagcgtatcgccgaccttaccgaaataaagatcgcagtcgccgctgaggaaagaggtcttctgagcggaaatgccatcgctgtggttgatgccaataagattggtcacgccagcctgatcgcagaattcaaggagggccaactcatctgcgccacccttagaagtcagggccacggtgaaatcactggacgcagacttgagcatattggcaagatcatccagcgtgttgacatcagcaaaacggctgtcatcgttgcgaacggcgatcgtcacactgtcagtcacacagttgcacagcagattgaagctgtcaagcgtgttggagttctgcagagccttgttgagatacgagaagacctgaggtgtgtggatattggcaacggtggaaccgtccggcgttgcattgaacatctccgtccagccgatccagtttgcgccgccggtcacattctctaccgtgacgacggttttattgtcagttgccttctcccagtagggagcaagcatgcgagcgcagatgtcaaggccgccgccagcggaggcagtgatgatgtaacgggtgttagccttgggccaatcggcagaggcgtcggtattggagctgtcgccggtattcgagtcaccggtatccttctggccgcaggcggcaagcgcaaagaccagcgccaaggaaagcatgagagcaaggaactttttcataattggtactccttttcttttttctctttgaagttgatggtgtgcagcatccttcacagatgaattagcaaagggcgtgccaataaatggatgggatagaaaaaactcaaatttttcgtgaacgacggcaagcaaactatattttgacggaacatgtcaattaaaatctcgaagatacctttctgaatgtttcaattcgtttcacaattcgttccgcttgaaacaaattgtgaaacgtgctatgctttttgtgaaacataaaggaggttagatcaatggaacatgcggcacattatgggatcgtatcaatctttacaaatcaacttgcctatgaggttgcaaaaaaagtctctgaagagcagggatatccttacccagtgtactttaccccactggaaaatgcaatcaactttgcgaaagagatgatacaaagcggcgcggagacgatcatcagccgcggcggggtagcaaccgttttgcagcagaatgtagatgttcctgtgattagcatcaaatactcattcagcgattttgctatttccattgagaaggcgcgtaagatctccaacaaaattgccattgtcagctacggtaccggtattgcttatgcacagcgaattctgccgttttttgacgcgaagatcacgatggcacaggtgaagaatgccgcggacatggaagagacgctgcgcgagctgcaaaaaagcggaattgaagtgatcatcggcggacacagcagtacgactgctgcccaaaagctcggaatgcatactgtttatatgagtgcaaaccgatatgactttattgaggcagtagaaaatgcacaaaaaaatcttgccatgtattatgagcagaagtccaggctgcaaaccatcacagcggtgctgaactctgcaacgacggctatgctggtcatcgataatcatggccagatcaccaatatgaacggcaaggcacaggatgttctgggggtaacagaagaaaatgctgttggtaaatcatatcgtaaagtgtttccggattcccgcattgtagaagaaacactgaggggacacgaagtgcgcgaaaagatcattcaatataatatgaattacttagttgtcagcagtaatccaatcttgcttgacggcaacatcattggcgccgtgctgaatatccaagtgggcaaagagattcagtccattgaaaataaactgcgcatcaagactgtgagcagcggctatgttgcccgcagtgaattttctgatattcttggtaccagtgcggcaatctgtacagtaaaagagcgtgcgagcgtctatgcacaggtagacagtaccattatgctctacggggaatccggcgttggcaaggagctctttgcacagagcatccataacgacagcaaacgtcggaactatccttttgttgcagttaactgtgcggcgcttcctgaatcgctgttggagagcgagttgtttggctatgagaaaggtgcatttaccggagctcgcgcggaggggaaagcaggtattttcgaaatggcgcatcgcggtacgatttttcttgacgagatcggagagatgccgctgacactgcagtcgcgtttgctgcgagtattgcaggaaaaagaggtgactcgcatcggtggtagccgtgttctcccgatagatgtccgcattcttgcagcgacaaaccgtgatttgcatgaggaggtcaaaaaaggaaattttcgaaatgacctttattatcgcctgtgtgttcttgtgcttacgattccgcctctgagaagaagaaaggaggatattcaatcgcttgcaacggcctttgctgaacgcttttccagaaagtatgagagggagtttcgtggtttttgtgaggatggcattgatgcgctttgtcaattgaattttccgggtaatgtacgtgagctctcaaatctcgtagagcgcatggtgattcttagccgaaacggcacgctcggacgcgatgtgctggaggaagcgctttccgaggaatttgcctacgagccaattacgcaggctgccgctcgacaagactcggatgaactagagcggcagcgcattctgcgcatattaaatgagtgcggcggacagaaagaggaggcagcgcggcttcttggaatgagccggacaactttgtggaggaagttaaaacgttttcaattgactgaatgctgaattggcacgatctttgctttaacatgagtatcgtgtgtgcatccgatttctcatgaagaggtgatacttatgcccaaagtcggtttggtcggcccgtatagcccggcaatgaaagaggcattttatgacagcctaccgcaggattacgaggctgtagaggtcacagccactgatgattataaaaatcttgcagatgtggattacatcatcaaccgcaccctgccgatcgacgaaactttgctttcaatctgtcctaaacttaagtttatcgcaaaatatgctgtcggtttcgataatattgatgttgctgccgctgcgcagcgcaatattcctgtaaccaattgcaaaggattcaattcagactctgtcgctgagttgaccgttgcactgatgatcgattcctgccggaatctgtatccgatgtacctggggttgcgcgaggataactggatgcaggataaatttgtcaatacttcgctcacgctgcgagggcagacggttgggattattggacttggcagcgtgggaagccgagtggcaaaactactgaatgcatttggctcaaaagtggtctattacgatgtggtacgccgcagcgagcaggaagagaatgaactgaatgtttcattccttgaactgaacgacttacttgcggtgtcggacattgtgacgctgcactgcccaggctcagcaaaaaatgagcatctgatcaaccgggagacattggcattgatgaaaccgacggcgatcctgattaactgttcccgcggttcggtggttgatgaagaagccttgtatgaggcgctttctgcgaggaaacttgaccgcgcggcacttgatgtgtttgaaacagaaccgccggtcggttctgaactgttggcattacccaatgtgattgcatctccgcatgtgggagggacgacaagaggactcggagctgggatgattcgcctgtgcatgcagtttatccttgattttgccgggcacaaaccaattccggtgcagaacgtggtcaattatacgatactcaatgatcctgcaattctggaggtaatggaatgaaagatgagaaaatgcttgtcgtggcagcacatatcggcgattatctgtggcgctgcggtggctctattgcaaaatatgtcgccgaagggacagaagtaaaagtcattattctctctgacggcctgcgcggcgaagcgaatgactactggaaacgagaggatgcgacgatggagggtgcaaaagaagtgcgccggtcagaatgccttcgggctgcggagattctcggtgtcaaggatattgagctctgggggcttcgggattatcctatggaacttggcgcagaagaggtggaaaagctcgcgcatatctatcggaccttccgaccgaactttattgtcacacatgatgcgtacgacgcatttaatcctgaccataacctcgtctctgcgacggtgcgtcaggcgtatgctgttgcgtcaggtgcaggtttccgcgatggcagccccgtttgttcgcgtcaaacgccgatttttggcttcgaaccgcatatgacggagatatgtagcttccagcctatggtttacgtggatattaccgacgtttttgaaaagaaggttgaggcgatgaaagtcttctcctcacaaacacatatgctggctgcctatacaagaaaggcggagatccgaggttctgaagcaaaaaaccgcggcagccgtcccaattgcaagtatgcggaggctttctcagtttttcagcctattgcatccactggccgcttcgtttggtgaaagataaaacgataaggcagcgctgcgttattgaaatgcagcgctgccattatatctgctgcgttaaaagataacctgacaagaggagaatacagtgaaaaagtatgtggattttacgcaggggaatattgtccgtgcaatcatattgttttctattcctctcatcatgggtgagttgctgcaaaatctttataacagtgtggatgcgctggttgtcggaaatttgatcgatcagcatgcattggcagcggtgacagtgtgcgggatgatcgccaatatggtcatcaatttctttaatgggatgtcggtcggttcaaatattgttgttgcaaaagcaagcgggcgcggagacactgaccgcctttgtaaggcaatctgcgccgcgttctcatgcgctgtggtacttgggttgctgctcgcgctgctcagcgttattgctgcacctcggcttttacagttggcgggcgcacagcccaattattttaaggacgcattgacctaccttcgcgtctatcttgcaggggtaatgttcaccgtcatttataataatgccgcaggtattctccgtgcgattggacgttcagatattccgttccgaatccttttgatagcatgttgcctcaatattgtgctggatattttgctgactggtgtgatgcggctcggtattttgggagttggcattgcgaccgtactttcacagggcgtttcagcaatgctggtttatcatgcgatcaaccgtgcaatcagacagccgtgttttaaccttcgcataatgtacgaggaaggggaatcggttatttcagaaatgctgcgtgtaggtacggcggcggggatacagagtgtgctgatcggcttctccaatatctttgttacccgttatatgaattccttcagtacagaagcagttgccggtatagggatcgcgcagaggcttgaccgctttgtgatccttccggcaaaatcgtttggtattactatgactacctacgttggacaaaatttgggagcaggccaatatcagcggattcgccaagggacaaaaagttgcactgccatagcacttggaatcacaatcgggttaagcaccgtcatctttgcctttactgaacaatgtgtgtcactttttagctcggtaagtgaggttactgacgtcggaaagaacatgctgcgggtgatggcaccgctgttctgggtaatggcgttgcgtgaaatactgctcggtactctgcgcggctgtggacgaaacttttttccaacaatgctgagtttgattggcatggtcggcatccggcaagtatttctggcggttacaatgcattggaaatttacggttgaaaatatttattattgctatcctgttgcttggatcgcaacgctattgctgcttgtgatttactacttgactgtaaggaaaagactattgccgagtaaagagaaaatttaatcttgctgaccgaatcaaaggagtaatgaaagacgcagaaaagcagccgtacattggtattggaacgcccgttgtcaattatcacatgactcatcgcatctttgctgatggtaccgtgctggaaatcatggatcataagattttagattctgttgctatggggtattatggcggcattcaatatcagcagaaagcaaatacttttggtggcggtgtgtaccgttatctccctggaacgaaaaacttgcagctttctgatccgtctcgtgtagatattgcgcgggcgcgtcagtataacaatcattttctcacctctcatacgaaaacccctcgccgtaggcgggctttggataatcgatgttcagctcttgcggcgtgggggcggtgagaggacttgatgttcctgtaacctatattgccttgccccaagctgcaaagtgaaagtacagggacgttttgccgcaaagcggcaaaacgtccctgtactttcgaggttgataattgtttggtgaggaaagaccgtaagcgtaaaacgtagccgcgtataaaaggccgccatctcaaggagccgttcgctcactgagatggcggtcactatttttgatgtgtgcaaattagggccgatcactgtgcagtgcgtcgtgtatccgttcgaccaacgcccttgccgtaaaaggcttcgggagcacaaagcttgcgcccaaacggtatgcctcctctatgaccctgtgtgtcggcagagccgtcataaaa

SEQ ID NO: 10104 - DNA, 581 bp, Unknown
  gut microbiota DNA sequence
ggagcaacataggtgaccttggcgaggaaggtgtcgatcatgacgatggtatcgtcatagacctcaaccagacggccctgagcacccatcttggtgacggtgtcggtcaggttgaccgtgtaggtcgtgggctgcttctggccgttgacatacagggtgtaagcggtgtcgaccttcaggccagcgtcgtgagcgacgtcgcactcagtaacagccttggtgtaggtcaggttgggcttctcaacgaaggtagtggccttgtcgccggtgttgtaggtccacttggtggcgggacggccccacttgtcggaggacttagcagagtcgagcttgaagttcttctcaccgaggctgttgttcttggcaccgatgaccttatcggtcacatagccgaaggccggggtgtaggtgacctgagccttctggatgccctggaacaggagctcagcgaccagctcacgggaagcgggagcgttcaggtcggtggtcttcgccactctgtccagaacgccgagctgctgcgcggtctgcgcaacatggagcgcccagtcagcgccggagaactcgttgttcttgtcgta

SEQ ID NO: 10105 - DNA, 2230 bp, Unknown
  gut microbiota DNA sequence
gggagcgttcaggtcggtggtcttcgccactctgtccagaacgccgagctgctgcgcggtctgcgcaacatggagcgcccagtcagcgccggagaactcgttgttcttgtcgtaaccgacagcgcggaggatcatggcgaggacttcatagccggtgaccttgccggacggcttgaaggtgccatcgggatagcccttgacgagggaggcgttggcgcagtagccgatgtagccctgagcccaaccggcaccagccatgtcgctgaacttgttataagtggcatagaggccggacttatcgttcttggcgacgtcggcagtgtagatacgatagacgatcgtagctacctcagcgcgggtgatgttgccctcgggcttgaaggaaccatcctcataacccttgaacacacccatgccattcagaacggcaacagactcagcgtaatcatcgctgatgctcttgtcatccttgaaggctgcgttggcgctgacggccagagacagagtcatgaccagagccagcaccattgcgagtaactttttcatagatgttactctcctttcataaatttccatccccttggagcgctccggcagcgaaaagcgggcattttgctgttcgcgggcgaaaatgaaagttgaccgaaaaagttgcaaaacatttcaattttcttacatttttgaccgttttgcaggaaaacgcgcgattttagttgctatcgcatccccttaaagatggttcgtttgtcagaaaggagcaagtttcggcgtttctcggcttacttaccgtggcatgccgatcccgtaactaagtcgggaacgcaccgttccccaccctttctgcactgtcaccttaccacaagcaaaatttcaagtcaacgctttcgccccatctgtaacacacttgtaacaaaccgccgcttctgttacagcttgacataaaaccgcagaaaaccccattatccgccaccacatacatataatatataagcacaaatatgaaaaaagcggcctaagccgcttttgtgattttaggcccgcgcagcggtcaggcggcaagtaacagtagtccgcgccgccgcgcggggagcgaaatttcccttttccagccgcggcccgccgaaaaaaaggaaagcccgctcacctgagcggactttcgccaatattttttgcacaaccccgtacaaccccaaaaaattgcgcgcccgcaggcgcgcaatccaaaatcaaaaaaggcggctttcgccgccttttttgaagttctttactgaatctcgatctgcttcgcgttcaccacggcgctcttcttcggcatgttcagcttgagcacgccgtcattgtactgcgcggagatattcgcgacctcgacgccgctgatgtcgaacgcgcgctggtagctgccgtagctgcgctcgcagcggacgtaattgcccttcttgtcctgatcctcgtgctcgctgtggcgctcggcgcgaatggtcatcgtgtcgccgtccacatcgacgtggatgtcctctttcttgaagcccggcagatcagcttccagcaggtagctgtcgcccttgtcctgaatatcggtcttaaactcgctcagcccgcggccccacgagccgtcaccgaagaatgcgcgctccatctgatcccagggatcataagccgcaacatggttgtttctgcgttcaaaaggtctcagttcaaacataatcaaagcctccaaatctattctggcgagccgcttttgcagcccgcgtggtttacttttctttcgttcccctcggaacaattatgagtataggcacgccctgtgaacaaaaatacatcttttgatgaacaaacttttaattttagcactctcgcgtcgagagtgctaaaattatgctggctgcggaccgctgccaaaccgctacccgacctttcgcgcccccaaacccttgaaaaatcaggcttttttcgccctgccaaacccccgtttccggcaaatcgctaccaaaccgctaccagccgcgcccacgagcccttgcgctcgggctttttccgcgtcgctaaggggatgcgatatccactgaattgaacgattttgtgttgattctgctgcattttgattattttctttggctacgacaagaacaacgagttctccggcgctgactgggcgctccatgttgcgcagaccgcgcagcagctcggcgttctggacagagtggcgaagaccaccgacctgaacgctccc

SEQ ID NO: 10106 - DNA, 18780 bp, Unknown
  gut microbiota DNA sequence
accctcgcttatatattactaatcggattttgtatttcgccggaaatggggcaggtcttatggcctgccccgttttccggcttacttaatattcaggaggtcagtttatgcgaaaggctatccggcgtggcgatctgttctatgcagacctgaacccggtggtcggctccgagcaaggcggcatccgccctgtccttgttatccaaaatgatgtggggaatcactttagtcctaccgttgttgcagcagccatcaccagcagaaaagcgaagaacagtctgcctacccatatcctacttgagaatgtgccggggcttgcgcctacctctctgcttctgttggaacaactgcggacaatagaccggaagcggctccgtggttacattgggcgtatcagtaaagaaaaaatgctggaggtagatgcagccctggcaatcagcatcggcataggataccccaacgaaaggaggactcacaatgtatgaaaatgacggcggcctactctctcccagagatgcctaccgattgatgttaaaagactacccggatgtgatggacattggtcaaatgtgtgaggcgcttggcgtcagtacaaaaaccgggtacaagttacttaaagatgggaaaattgagtaccttaaaattggacgggcttaccgcatccccaaagcccacattcttcgttatttgaaaatcacctgctccacttttgcggagtagcaggctatggtgtcgatcttcaccggatagacgcagaaagttaacaattctgacgcggatttacctggagttttgttctgtccgatgatacaataaaggtgtcattggtaggtgaactcaataccgcaaaaggaggaacagatcagtatgccagcggtacacctgcaagaaaacagcaaactaatctccggccatgtggccgagaaaaaagggtatctctattgggttctaaaccttaccgatgagaacggtaagagaaagcccaaatggattcccacccataagaaagtcaagggcaataagacctgggcaaacaatatgcttcccaccatccgaaaagaatggacggaaaagctgcttcaggaggctacggcctcacagcagtcggcttctccgtctggcccgtcatccgcagcgatttcctttgtggatttcctgtaccagtggcttgagtacaagtacaagtctgctaccggacgggtgatggacagcaagcccattgaactctcgacctattcgggatacgaacaacagcttaacaaccccatcgccccgtatttccgagagcatcctgtcgccctttgtgaccttaccaaacaagatattctcgctttttatgagaaagaattggaacgggtcaagccgaccaccgttaaacattaccacgctctgattcatggggcgttgaattatgcggttgacaaaaatctgattccaagcaatccggctgaccggattatcatttccaagcctgaacccttcaagggtgactactacctggattcggaagtcctgaatctgtttgaagttatcaaggggcataagatcgagctggtagttctactgactgctttttacggcctgcgccgcagtgaggttatcggtttgaaatggagtgcctttgacttcaaccataactgcttctccattcggcatacggtaacaacctgcaatgtaaagggagagcgggtcacgattaagaaggacaaggcaaagaacaaatccagtctgcggacttatccattgattccttttttgaaagaacggttgctggaggccaagaaacagcaggaagaaaatcgcaagctgtgcgggcgcgcctacaacaaagaatatctgggatatgtctgtgtcgatgtgattggcaatctcattaaacccaactatgtgtcctcgacctttgggaagttgcttgccaagaacaatttacggcacattcgtttccacgatcttcgccatacctgtgcctcgcttttgctggccaacggtgttccgatggaacaggtaaaagaatggctgggacacagtgagatttcaacaacggtggatatttacgggcatctgcaatatgccacgaaaaaacaatccgccgcagccattgagcaggacattgtggcgcccatgctgcaaaacctatcggcggtttctccataaaaaggaaagaggtctaccagcttttcgctggcagacctcatggcggagatggagagattcgaactctcgcgccggttttgagccgacctaccgcatttcgagtgcggacccttcaaccgcttgggtacatctccaaatttatgttatatccctggtcccgacccgccgaccaattcagccggtggaaatcgggaagaacaacaggatagaacaagcaacattattcaatttgaactcggctggaacccgcatggttccaagggtttcagccgtttggcactccgcataggaaacctgatttcgaatcattacaccaacttggatgatgacggtaaatcagggacgatagcggtaactacggaaccccaaaacatacctctcaaagtggctgtcagatggctgctctcattatagccattttcccgcaaaattcaagccgtggaaattgggaagaacaacaggatagaacagaccccaattcacaatttgaacttgcccgcaaacccgcatggttactggcttttcggcagtttggacttccaaagtggaaacatgatttcgagtcagccccgttatgaccacttcgataccgctgcatattcagttcgctgttatcagccaaactattatgccataactttttgcgtcttgcaaggtcttttttcgcattcggggcatattctgtgcgtatgaagactgtctatttatcggtacgcctgaaaaattacgaaaatgcgctcgcgctggtcggtgcgccgctcgccgaaacgccggagaacgcggacgttttgctgctgcccggcgggggcgacatgcacccgcgcttttacggtcaagcactgaacggctcggaagatctcgacgaagcacgcgacgcgcgtgagctcacgctgattgacaacttcctgtgcgcgggaaagcctgtcatcggcatctgccgcgggctgcaagtcctcaacgtctattttggcggcacgctgcgtcagcacatcgagggccacagtcaaattgacggcgttgaccggctgcatgccatcaacaccgcgccgggccttctgcgcgagctgtacggcacgcgctgcacggtcaacagtgcacaccatcaggccgtctggcggctggggacggggcttcaggtctttgcctgcgcggaggacggcacggtcgaggccgtcggccacaggacgctccccgtctttgccgtgcagtggcatcctgagcggctgtgcggcgcgttcgcgcggccggaaagtgctgacggtgcaaggcttttgtgcgctctactcagataacataaaaaagcgcagaaaaattctgaaaaaacgttgacaaaacgggacactgatgctattataacagagctgacgatttttgcggagggcgcatgcaggtgtagcacaatggctagggcaccagccttccaagctggggatgcgggttcgattcccgtcacctgctccattcaattcgcgccagtagctcagttggatagagcaactgccttctaagcagtaggccgggggttcgaatccctcctggcgtaccatttacaaggcgcccctcagcaaagcagcaaatatcgcacggatacagaatatgtggtgggtgtagctcagttggttagagcaccggattgtggttccgggtgtcgagggttcgagtccctttacccaccccacaaaaagagagggatgggatttggccccagccctctcttcccaataggggtgtagccaagcggtaaggcaagggactttgactccctcattcgctggttcgagtccagccatccctgccagatttttaccgcttcggtggtttggaatagaatatgcttcgttagctcagttggcagagcacctgccttttaagcagggtgtccggggttcgaatccccgacgaggcaccaaaaaagagatggctttaagctgtctctttttttggattccgttagaaattaaaatactcggggcaaataaacacctcagggcagtttctcttgccgctctgcggcaattcaccttctgccgcggcagaaaacgaatttgaatttatttcgtgccgtgcgcggcacgaaactctacgaggcttttcattctacgccgcccgcaaagaacctttgcttgtctgctcgtggcttttttgctatgatgtgagcagcaagggaggtcgatctatgtctgatttcagttccaacctgcggcggctgcggaaaagggcaggtctttcgcaggacgcgctcgcggaaaagctctccgtcgcccgccagaccgtttcaagctgggagcgcggcaattcctacccggaccttgacatgctggtgcgcatcagcgacgcactcgcgaccgatccgaacgagctgctttacccgaatcaaaaacgcaggagcggtggcgtgagccgccttgtgggcgacgactttttcggcaagctcacggtcgtcatttggatcgtggggttcctgctcggcctgcccgccggcagtcaaggctatgcgtcggggccgaacaccatctcgtggcatttcgtgttttccgacgcgctgcgatgctgggctcccacatttttgaccggcatggcgtttctcggccttcagaagatcatcgaccttttgaaagaacgcggcgagtgaacgggcattctttgcccaggatcttgccattctcctcaaaaacggctatgatggacttactttacatgaacaggagaagcgcattgaacatcacgaccattttattcgacctggacgggacgctgctgccgatggatcaggaggcgttcacgaccggatacttcaagttcctcgccaaaaagctcgcgccctacggctacgagcccaaatccctcgtcgacgccatttgggcgggcacggcggccatggtcaaaaacgacggcagctgcacgaacgagcaggccttctggaagaagttcgcggcgatctacggcgaggaaaaatgccaaagcgaccagggccttttcgaggatttctacgccaatgagttcaacgccgcgcgcgacatctgcggctttaatcccgcgtcggtggagacggtccataagctcaaagagtgcggctaccgcgttgcgctggcgacgaatccgatctttccccacatggcgacggagaaccgcatccgctgggcgggccttgtgccggaggattttgaaatttacacgacctacgaggcctcgaccttctgcaagccgaatcctgcttactacctcgaggtcgcgcgcacgctcggcgtcaagccggaggagtgcctgatggtcggcaacgacgcgaccgaggacatggctgcacgcgaggtcgggatggatgtctttcttttgaccgactgtctcatcaacgcgaaaaaccgcgacctgaacgcctatccccgcggcgattttgccgcgctgaacgcttacattgacgcactgcaataaaaaactgccgcccaaacgggcggcagtttttacttttcgaacactactttctgcttttcccgttctgcgcggtgacgaggcggaagatcgtggacaccagcaggatcgccacggcgatgctgcccgcgacgcccgcggtctcaagtcctttgtgcaccgcggcctgcacatcgccgcccaggccgaggctcatcgtgtagtaaatgcccgcgcccggcaccagcggcaggagcgagatgacgaggtacgacgtgacggggcatttgcgcgagcgcgccaagatttcagagtaaagcgccgagacgacggcggcgaagaaattcatgctgtaaatgctcatgcccagatcacggcagagcaggtacgtcatccatgtgaacacgccgccgagcgcgcagagaatgctgccccagtcgtgcacattgaagaggatgaaaaagcccgtacaggcgacgaagatcatcacggcctgtgcccaggcgggatagctcgctgagccggacgcgaccgtcatcccgtatacgccagacgtgacgcgccatgccgccgccgtgccgagcgcgatggcgaacgccgagagaagcacctgcacgatgcggttgatgccggagttcgtatcgccgtaaatgatgtcgcgcatggaggtcgtgatgagaaggccggggaccaagatcattaaggtgccgatgatgacaaagtcgatatagtcgaccagatggaagcccgcggcgagatacgccggcaccgccatggcgaacgcctcgacgatggtgctgaaaaacgggttcgtctcgcgcctgtccatctggcgcgagacaaagccgatgatgaggcccagaaggcccgcgaacaggctgtcgcgcagcgtgccgccaaacaccgggcaaaagcccgccgcggcgcagaaattgcccaggtaataaacgggcaccgagtagtgccgccgccccttgagcgtttcgtcgagccactgcgcggcgacgctcgggtcaggcgtttcggcgcagatgcggcgcgagagcgcgttgagcttttccaccgactcgaggtcattgccgtgaaagccgactcgcttcatcaccatcaaaggcttgccgttggccgcctcgaggctgaccatcacgcagttggggatggaaaaggtctcgcattcaatgccgtaggcgccgatgatgcggcgtatcgtctcttcgacgcggaacgtctccgccccgctgagcgccagatgatagccgacgcgcgcggccagatcggtcaaaaggtaataatccataaaaaatcctcatatttttgggaaatttgccgtcagcgggccttatattacagcgaaacgaccgtcctgtcaatgctgacaggacggtcacgcaaaaaacatttgccattttgccgcggcggcactatactggtgctcggtcaagcggaaaacagaaagaaatgagagagatcatgggaactacagtcaaaaagcatgagatcgacatgctgcacggctccatctggaataagctgccgctctttgccctgccggtcgcggctacggcgatcttggagcagctcttccacgcctcggacgttgccatcgtcggcaacttcacgggcgatgcgcgcacagtcgccgtcgcggcggtgggcgcaaacggcccgatcatcggcctcatcgtcaaccttttcatcggcatcgcgctcggcgcgaacgtcgtcatcgcgaacgccatcggctgccgcgacgacaatgccgtcaagcgcgcggtgcacacggccatcgtgtttgccgtgtgcggcggcgcggcggtcgcgctgcttggtcagctcatcgcctcgccgcttttgagtattctcaatgtgccggaggacgtgttcccctatgcgcttttgtatctgcgcatttaccttctcggcatgccggtgatattgctctacaactttgaggccgcgatcttccgcagcatcggcgacacaaaggtgccgctcgcggcgctcgcgatctccggtgtgctgaacgtgctgctgaacctctttttcgtcattgtgctgcatatgacggtcaacggcgtcgccatcgccacggtggcggccaacgccgtgagcgcggcactgctctacgtccgcctgacgcgcacggataaatgcgtgcgcgtggagcgcaaagcgctgcgcatcgacggcgcgagcttgaagcgcattttgagcatcggccttcccgcgggcgtgcagagcgcggtgttctcgttcgccaacattgtcatccagtcggccatcaacaccctcggcacggtggcgatcgcggcgtcgagcgcggcgttcaatgtggaaattctcgcctacgacgtgctcaactcgttttcgcaggcctgcacgacctttgtcggccagaactacggcgcagggcagatcaagcgctgcaagaagacgatgcagctcagctttttggagggagccatcgcgacatttgtctcggtcgttgtcctgctgctgagcgcaaggtcactgctcgccattttcaacagcgatcccgaggtcattgccatcggctatattcgccttgcgacgatcctgccggcgtatgttttctgcctgatctacgaaatactctccgggtatctgcgcggcttcggcatttcgctcgcgcccgcacttttgacgatgctcggcgtgtgcggtatccgcatcgcgtgggtcaagttcgtcttcccgacgagcatgacgttccagaccgtcatgtgggtctatcccatcagccttggcgtgacggcggtgctgatcctctgcgccgtgctgatctaccgcccgtccagacgctttgcgggccttgaaacggaagaagcggacaagtgagggggaaccctcacttgtcaaaatgctcccagaaggcgcgcacagcggcctcatacgcgccgcggcccatgtaatagctcatcgcgtgatccgcaccgggcacgacgagcagcttgcagggcgcggcgcaggcgtcgcggttttcaaacgccattttgagcgggacgaagtggtcgtcctcgccgtggatcagtaaaatcggaacatcggtatttttgagcgcctcgacggtggagtagctgccggacgaggcgttcagtctcttctggcacagaagatcggcgatgacggttgctgcgcggacaggaagatgcaggttcttccccatcacgtgctgccagatcgcacgcggcgaggtgtaggccgagtcggcgatcacgccgtgcaccgcggcggggagaatatcgcctgcggccatgagcaccgtcgccccgccgagcgacacgcccataaggtaaacgggcaggccggggaagcgttcggctgcccagtttgcccagtcgacgcagtcgtagcgctcggtcaggccgaagccgatgtagtcgccctcgctctcgttctgcgcgcgctgctccacatagagcacgctgcactgctcgcggcttaaaaagtccgcgagcaggccgaaatcgcggtaccacgctgagcgccagccgtgaaacgcgatcacaaggcgcttggccttttcgcattcacggagatggcccacgagcgtcaagccctcgcggttttcgagcagcactgtctccgtttccgaagacgcaagctttttcgcggcggcgcgctgcgcctcacggtagggctcgtcgcgcttttcgcccgtgagctgggcgctgcccttatttttgagtgccttgggcgcttcgcgcttcatcgcgacgtccatcagcgttctcgtcacgccgtaggccgccgcgccgtagagtgccgccgcagccgtgacgaatatagccgcctttgtcgcttttttcataactgtgacctccttgtagccaaactgtaaactcttatcttgggtactggacagggatattttcccgtgttatactccaaactaatctaagttccgggcggtttcgaccgcccatctcttctttcagcgtagcaaaaactccggctttttgctacgttcagtttttcccgtttgtatgcatttcctgccggaaatttcaatgatcggaggaacgcattttcatgaacgaagtcaagtccccgaaaaagccgctgctgtactactactttgtggcgatgctgcttgtgatgctcttcaacttcatcgccatgccgtggatctctgagcaccagatcaaggacatcgactacaacactttcgtcaccatgacagaacagggcgaggtcggccgggtcgagatccaggagcagtccaaccgtatcctcttcaccagcagcgatgaaaagaccgtctacaagacggcgatggtgcctgacgacggtttggtgcagcgccttttggacgcgggcgtctccaccacgggtgaggagatcgagcagacgtccacgctcgtcagcattctcgcctgggtgctgcccatcatcatctttgtcgcgctgggacagtatatgtcgcgcaagatgatggagaagatgggcggcggaggcaactccatgatgtttaacatgggcaggtccaacgccaaggtgtacgtcaagtccgccgagggcatcaagtttgacgatgtcgcgggcgaggacgaggccaaggagagcctcaccgaggtcgtcaactacctgcacgaccccagcaaatatcaggagatcggcgcgtcgatgcccaagggcattctgctcgtcggccctccgggaaccggtaaaacgatgctcgccaaggcggtcgccggcgaggcgaatgtgccgttcttctcgatgtcgggctctgaatttgtcgaaatgttcgtcggcatgggcgcgagcaaggtgcgcgacctcttcaagcaggccaaggaaaaggccccctgcatcgtcttcatcgacgagatcgacgccatcggccagaagcgcagcggcggccagtacggcggcaacgacgagcgcgagcagaccttgaaccaactgctcaccgaaatggacggctttgagggcaacaacggcgtcatcatcctcgccgccacgaaccgccccgaatccctcgaccccgcgctcacgcgccccggccgcttcgaccgccgcgtgccggtcgagctgcccgacctcaaggggcgtgaggccatcttgcaggtccacgcgaagaagatcaaggtcgccgaggacgttgacttcaacaagatcgcgcgcatggcctccggcgcttccggcgcggagcttgccaacattgtgaacgaagcggcgctgcgcgccgtgcgcgacggccgccgctttgccacgcaggcggacttagaggaaagcatcgaggtcgtcatcgcgggctaccagaagaagaacgccatcatgaccgacgaggagaagaagatcgtctcctaccacgagatcggccacgcgctcgtggcggcgatgcagacgcactccgcccccgtgcagaagatcaccattgtgccgcgcacctcgggcgcgctgggctacacgatgcagatcgaagagggcaaccattatctcatgagcaaaaccgagatggagaacaagatcgccacgctgaccggcggccgcgccgcggaggaggtcgtgttccaatccgtcacgaccggcgcgtcgaacgatattgagcaggcgacgaagctcgcccgcgcgatgatcacgcgctacggcatgagcgacgatttcgacatggtcgcgcttgaaacggtcaacaatcagtacctcggcggcgacgcatcgctcgcttgctctgccgagacgcagacgaagatcgaccagcgcgttgtggagctggtgaaagcgcagcacgaaaaggccatccatatcctcaccgagaaccgcgcgaagctcgatgagctggcgcagtacctctacgagaaggagaccatcacgggcgaagagtttatgaacatcgtgaacgcgcagtaaactccataaatagaaagaaggcacagccgagcggctgtgccttctttttgctatttacaggttgctttcttttctgctcgtgcggctgcgcaggtagtcgccaaggtttgtgatgcaaaggagcgtcacgactaaaaatgcgccggggatgagcaggatccaccacgcgtcggtcatcagcgccttttccgcgagcgagagcatgctgccccaggtcacgacctcgatgggcaggccgaggcccatgaagctgagcgtcgattcggcgatgatggcgctgcgcacattcatcaccgccatgaagaggatggacgagaagaaattcggcgcaaggtgacaccgcagaatgtggaaaaagctgccgcccatgcacttcgccgcgatgacgtactcgctcgcgcgcagctgcctgacctcggtacgcacgaccttggcgatactcgtccagcttgtgagtccgatgacgagcgcgatgctccacgcgctcggcgtgccgatgactgcctgcaggaagatgacaagcagcaggttcggcacactgaggagaatttcggtcaggcgcatcagcagcgcgtcgagccatttgggcgcaagtccgctgaccgtgccgaagaggatcgcgagcagcgtcgaaatgacggtcgagccgacgccgatgaacagcgacagccgcccaccgtaccagatcatcgagaagatgtcgcgccccatcgtgtccgtgccgaacaggaactcgcggcacggcacggccgagcagtgagccaggtcgagatacgtcgggtccttcgtcatgataatacgccaaaactttcgcaaacagaaaaggatgatatcacaatgaaagaaaaccgtaagcttttgagagaagtcctcaaggacatccgccacgatatgacggacgaggaagtgctgaacctgctggcagacagcaaaatttccgaaaatcccgcgggtgagaaggaaaaatacaccctcggccggcgggcggcggacgccattgccaaatttgcgggcagctgggcgttcatcttttccttcaccggcgtgctgattttgtggatgcttgtcaacacgctgctggcggcaaaggtgttcgacccgtaccccttcatcctgctcaatctggtgctctcttgcgtggcggccattcaggcaccgctcatcatgatgagccagaaccggcaggaggaaaaggaccgccgccgtgcagagaacgattataaggtcaacctcaagacagagatcatgatcgaggatctttacgacaaggtcaatgccatcctggccagacagaccgcactggaaaaacagctgacggagaagggcgaaaacgcagggcaaaaatgagggaggacagagccgtcctccctcattttttgctgtttttgcgcaacgcggaatcctcctccgcagacctgcgcgcttttgttgagatgcctctccggcgcgtaaagcccttatacgtgcaagactctatgttgctttacagccggaagtgcttcttaagttcttggtttttccccagcaccagcagcgtcatatcagcgtccagcacagtttccggggagatgttcacatcggtcttgccgttccgcttcacgccgaggatgttgacgccgtattttctgcggatgtccagctcgccgatgctgcggccctgccaatcctccggcacggcaacctcgataatggcgtgctgctcgtccagctcaatgtagctgaaaatatggttggcggtatagcggatggccgcccacttcgccagctgcttttccgggtaggcgaccgcgtccgcgccgttgcgcagcagaaatttcgcctgcacatcccgctcagcgcgggataccacatagtttgctcccagctccttgagcagcgacgtcgtctccagtgaattctggaaatccccgctgatggtgacatagcagacatcgtaattgctcacgcccagcgagcgcagaaagtccacacgggtgctgtcgccgatctgcgcgttggtgacaaaggacatgcactcgttgacgcgctcctcgtctttgtccactgccatcacctgatggcccagctcgttgagctgcatggcaagatgccgcccgaagcggcccagtccgatcaataataccgttttcatcgtgtgctcctttcagcctacggtaattttctcttgcggatagcgggcataggtcaggtcatgcccggagaatgcggcgtagatcaaggtcaatccgccgacgcgcccgaaatacatcagcaggatgagaatgctctgcgacaggactcccagttgcggcgtcagccccagcgtcaggcccaccgtaccggcggcggacgctgtttcatagagacaggcaccgaggggaagctcctccgctgtgctgatgaccgccgcccccgcaaaggtcagccccagatacagcagcagaatggcggcggcgttgcggacagtggatgtctccaatctgcggtggaagagctgcagatcctctcgcctgcggaaggcggcaatggcgttggcaatgagaactgccagcgtcgtgaccttcatgccgcccgctgtggagccgggtgctccgccggtgagcatcagcaaaatggtgaccgcctgagaggcatccgtcatctccgtcagatccactgtgttatagccggccgtccgcggcgtgaccgactgaaaaagggaggccaatatccgctctcccacggggaggtccgcaaaatctgtcagataaaagagaagcgccggaatcgtgatcaaaagcgccgtcgcgctcagaatgaccttgctctgcatccggtaacgccgcaggtgcagaccgtgcgtacagacatcgtcccacgttagaaagccgatgccgcccacgatgatcagcagcatgatcacaatgttgaccagcgggtctgcggcataggccgtcagcgaggggtagagggaatccgtccgccccagaatatcgaagcccgcattgcagaaggcggaaacggaatggaaaacggacatccatacgccccgcagtccatagtcccggcaaaaggctggcagcatcgccagcgcgcccagcagctcgaccagaaaggtccccttgaggataaatctcgtcaggcgcacgatgccgcccaccgcaggggcggagatggcatcctgcatggcgctgcgctccttgagcgtgatgttccgcccggcgagcatcaggaaggtcaccgcaccggtgatcacccccagcccgccgatctggatcagcagcaatatgactgtttgaccgaaggcggaccagtagctgccggtatcctgcaccaccagccccgtcacgcagacagcggaagtggaggtgaacagtgcctcatgaaacggcgtccagacccgctgtactgtggcgataggcagcatcagcaccagcgcccccaataggatcacgcccgcaaagccgaggatcataatttgaaaagaagtcagatgctgctttaagcgaaacacagtctccgtcacatcacacacctccttgaaacaatggtactctcaattttccgtacagtatagcacggcttttgcaatgtgtctgtatgtatcttgtacaattttcaggtgcagagtccttatttgcagcccggaggcgggctgcaaatctgcggttgacagactttggtgcatagaattctccgcgtgacctgtaaatctttcctgatttttttacaggaaccgttgcctttttccaatatttgttttaagataagctctctgtctgtcatattcagctgaaattctacgaagctttttaaaaaagccccaacgggagaactaatatgctcaaagaaaaaacatccgatgtatccatgacaaatacaaatcaaggctctggcactgctgctgaagcggcagtgcccatgagccatggcctttggaatacgtggctcaaaaatctcctgctgttctgcctgaccggcgtttatgtggagctgtgcctgcatctgtgcgtattgggctcgatggaccggtacgcgggatatcctgtcctgtttggcctgctgggtggcgcactctgcacgctggtagtctcaagcctgccaaaggttctgcgccagatcacaggggttttcctggtcgcggcacaggtgctgctggccgaggtgcagctggtctatcactgcatcttcggagatttcatgcccgtcagtcagatcggcatgggcggaaatgtggtcgtcaatttcaactcgcagcttctctatgggatccgccaaaatctgctgaagatcctgctcctcctgctgccgctgattgccgtgatcctctgccttgccctgcgaagggggcaggctctgaagctgcggctgcgctggaaacagacgatggcctcctttgccgtgctcctcgcactgctgctgacggtcacgggactcatgtatgttggacgggacaacgccttttccgtctatcgtaccttcaccaatgtgaacacctccaccgacagcagttataaaaaaatcggtatgctggccaccacggcgcaggagcttcgatacatgctcttcagcggcagcggcagcattatgatcacgccgtcgtccttgaatatgagcgatgttccgcggacatacagcagcaactcctataacgtgatcgaaagcatcgattttacggctcttgcagacagtaccgacagcgatattctcaaggccacagacgagtatctggcaaatgcaacacccacccgcaaaaacaactacacaggacttcttaaggactataacctcatcaccatctgcgccgagagcttctgcccgtggtttatcagcgaggagctgacgccgacgctctacaagctgagccatacgggtattctctttgaaaattactacggcacgttccagtccgtcaccaccaacggcgaatacaccatgtgcatggggctttatccggatatgtcccgcacgaagacggattccagcttcaatgtggcgggcaccaactatctgccgttctgcctgggcaatgcgctcaagggcatgggctatcaagcctggggctatcacgactacatcggggatttctacaaccggaacatcacccacgccaacatgggctacacgttcaaggcggcggattccggtctggccatgaagatcgactggccctcctccgatctggagatgatggaggcctccgtggacgactacatcaacagcggagagcctttccacgcctattacatgaccttcagcggtcactaccagtacaactgggacaacgccatgagcgccaaaaaccgcgacgcggtgaaagatctgccctattctgagccggtgaaggcgtacattgcctgcaatctggagctggaatacgcactggagtacctgatgcagcggctggaggaagctggcgttgccgacaagacctgcatcgtcctgaccaacgaccactacccctacggcctgaccgaagacgagtacaacgagctggcagggcagacgctggacaccacctttgagaagtaccgcaacagcttcatctgctatgttcccggcctttcagagaacatcgtggtggatgaatactgctccacggcggacatcttgccgacactgctgaatctcttcggcgtggactacgattcccgcctgctggcgggcaccgatgtactctccagcggcctccatgtagcggtgctgtcggataagtcctttctgacgaagaccttccgctatgacgccggtacggaaaccgtgatccccgccgatgaaagcatcactgtctccgacgggctggtgaaaacctaccggctctatgtggacagcaggttccagctctccggcaacatcctcaacagcgattactacgcccacgtctttgccagggagtccagcggcggaagccttgcggacacggtggtattcacggacatcaagagcattttcaatcaggccagcgtcctctatatgtaccgcaagggctatgtggagccggaagcgccggacaccttcggcggcaagaccacggcaaggctgggcgagttcatcgatgtgctctaccgcatcgcgggtcgtccggaaacggacaacaccgcccttccggctgactacgagaacgaggaattcaacgcggcccatccctattatcatgccgtgtgctgggcctatcagacaaggctgctccggcaaaatgatcccaataccgaatatgatgacaaggtggactatcagacggcgtgcgtactgattcgccgctacgcgatcatggcgggcgtcgataccggcgtggatcagacgcagctcaggcagcttcttcgggatgcccccgatcttggcagagaggcagccaaagcgatgctctggtgcgatgagagggacatcaccacccgggacagcaaccttgacgagctgctggtgtccgctggcacccgcatcagccgctaccagatgacgtcgttcctgttctacctctgcacctacgagctggatattggcagctgagcatgcggcgcagatcctgccggagaagtgttccgcgaccgatttgcaaaaagagccgcctttctcggctgtgtaccggaagatacccatttgatgccgcactacgcttaatgttggaatcagtaaacatactcacaagcattacactcagtgtagacctaatgtagattcagaccattctgtgtttacgaaagtttacattgagtgtaattttttctgccttgaatgggtggtcaaacagggccggttttctacatttattacgaagggatgagacatccaccccctattctcacacgaaagaaggagtttgatttgagcaaacgaaaacacggacctacgattgtaccggccttatccgccaaggtggataacaaaggaaaacgattcattcaggttggaaactcattgctcctctccaagcagttccacgcgctcagtaccggcagccggtttctctatttctgcatggccatggagagcggcggaaggaaaaatttcattcttccacaaaaggacgcaaaaatggctcacggggtaaacccgcgtagccgtctgatccgtttcagcaagaacagcagctttcattatttcaccgtcgatgaggtgggcctgcggctgatgaagctggcgctggatggaatggcgctgtatcggtttcagcggtacttgcagcaaaatggcatttgcaaagcatctatgcttccgctgtatctgttcagtctggagctgctttcggaggcgtatgccttgaaaaaggggaagcaaatgcgggcagagctggatagaggcgcattgttttcgtgccaggcagatgttgtaaaacggatctgcaacacaggacccaatctgatcacgatcccagacaaatggctgctg

SEQ ID NO: 10107 - DNA, 38188 bp, Unknown
  gut microbiota DNA sequence
caagaaaagagtcgtcaaccagttgcttcccttattgtagcttaggcaagagatggaaagaagcccagccggatgctgggcttccaaccaaaacttattgtaatagaaaagagggagaaccttatgctctatattgaacacctgaccaagaccttcggcgaaaagaaagccgtggatgatctgtcgctccacatcgcgccaggggagatctacggcttcatcggccacaacggcgcgggcaagaccacgacgctcaagtcggtcgtcggcatccagcagttcgattccggcaggatcacgatcggcgggcactccattcaggacgatcccatcgcctgcaagaagatgctcgcctacatcccggataaccccgacctctacgagtttatgacgggcatccagtacctcaatttcatcgccgacattttcggcgtggaggaaagcgcgcggcaggagcgcatccgcaagtacgcggacctcttcgagctgacgaccgacctggcgcagcccgtcgcggcctattcccacggcatgaagcagaagcttgccctcatttcggcgtggctgcacgagccgaagctcattttgatggatgagccgttcgtcggcctcgacccgaaggcttcacatatcttaaagggcatgatgcgcgaggtgtgcgacgcgggcggcgcgatcttcttctcgacccacgtgctcgaggtggccgaaaaactctgcgacaaggtcgccatcatcaagggcggcaagctcatccgctccggcacgatggaggaggtcaagggcgacgactcgctcgaggaggtcttccttgagctggagggcgaatcatgctgaaaacgctcgtcaagaagcagctgatggaaattttccgcagctacttttataatgccaaaaccaataaaaaacgttcgacggcggggattatcgcttatatcctgctctttgccgcgttgatgatcggcctcggcgggatgttcacggggctttccgtttcgctctgtgcgccgcttgcgcaggcggggatgggctggctctattttgcactcatgtcgctgctcgccatctttctcggcgcgttcggcagcgtgttcaacacgtattcgggcctgtacttcgctaaggacaacgacctgctgctgtctctacccatcccggtgcggacgctgatggcctcgcggctgctgacggtctatctcatgggcctcatgtactccgcggtcgtcatcctgcccgcggtcatcgtctactgggtcacggtctcgacggcgccgatggcgctcctcggcggcgtgctgctgacggcgctcatttcaatcttcgtgctcacgctctcgtgcgcgctgggctgggtcgtggcgaaggtgagccgtaagctcaagcacaagagcttcatcacggtcatcgtctcgctcgcggggcttgccatctactatttcttcgtcttcaaggcgcagacggccatcgagcagctcgtcgccaacgccgcggtctacggtgagaagatcaagggtgcggcgcacccgctctacgtctttggcctgaccggtacgggcgatgtgacagcgatgctgctgagcacggcggtcatcctcgcgctgtttgcgctgacgtgggcgctgctctcgcgcagctttttgcagatcacgactgcgtcgggcgcatcgggcaaggctgtgtaccgcgaaaaggccgtcaagcgccggagcatcgatggggcacttttcggcaaggagctcgcgcgcttcaccgcgagcccgaactacatgctcaactgcgggctcggcatcctgctgctgccgatctcgggcatcctgcttttgtggaagggcggaacggtcgtgtcgctgctgaacgaggccttcacctcgcagagcggctgcgcggaggtgctgctctgcaccggcgtgtgcgccattgcatcgatgaacgacatggcgacgccgtcggtctcgctcgagggaaagtccctctggctcgcgcaatcgctgcccgtcaggccctggcaggtgcttcgcgcaaagctcaaggtacagcttgcgctcacggcccttccagcactcgtgccgcttgcctgcatggcgtttatcctgcctgtgacggcggcgctgccgctcgtttttgccgaggcgctcgcgtacatcgcgttttctgcgtgcctggggctgacgctcggcgtcgcgcgggcaaacctgacgtggacgagcgagctcatgcccatcaagcaaagtctggccgtgacgatcgcgctgttcggcggctggctctacgccatcgtgttcgcggggctctacctctggcaggggtggaagctcggcgcggctgcgtatctcgccattgcggcggcggtgacgctcgcggtgacagcgctgcttcttcgctggctcaaaacgaggggcgcacagcgctttgcgatgctgtaaaggaaaataaaatgagagagtgcggcggtcgaaggaccgctgcacttcttttatataggcaggagcaaaaatttacacagttcgttcttgcggaaagcggcggaccatgctgttatgtgactgcactcacaagtaaactttgaggagcgtgatcgatatgctgctgcgcggcaagcaggcgagcggacttttgacgcagcagaagatgctgcgcgccgccgtaaagctgtttttggaaaaaagatatgagggcacgacgaccgcggagatcgcccgcgccgcgggcatgccgccaagctcgtttttccgggcctttcccagtaaggaggcgctgctgctcgagcttgacaagcggatgttcagcgggcagttcacgctggccgagcagcacagcgcggcacgtgctctacgcggtggggacggctatccagctccacatcgccgagctgaccgagccgctgcgcgagctgtacgtgacggcctacacgctgtcgtcaacctcggcatacctgtatcgcagcacggcgaagcggctggagggcatcttcggggacgatcttccggacgcggaggccaaggacttttacgagatggagatcgcctcgacgggcatgatgcgctggttcgtggccgtgccgtgcgacatgtactttaccgtggagcgcaagatcgcgcgctttttggagtgcgcgctcaagctctgcaatgtgccgccagagcggcggcgggggcggagaacaattgggagagttggacgatatttgatggcaccaatttgaacctgtcggacggtagttactatttaggtggcaatgttactattagcggcgaaattacaatcagcggagccgtcacatttgatttgaatgggtataccttgacctgtaatgctgcagacgaggatatgttttgtgtgtacgatggtaaaacactaacgataaaggacagcggcactgacggcaccattgatggtcaaaataagaactgcggtttttctgtgtctagcggcacactgatcttggagagcagtatcattgcgaattgcagagatgacgatggtgatggcggtgctgtggatattggaaaggactgcgtattcacgatgagaggtggtacgatcagcaattgcaatgcacaacacgaaggcggtgctatataggaaaaaaggacggctaaagccgtcctcttttttcagctctccatgtgcttgccgagaaagcctgcgatggcctgcgcgagcttgtactccgtctcgcctgcggccgactcgccctcggtgccgatgaagaccacgagcccgagtgcgtcgccctcggagatgatgggcgcggcgatggtcgcgcagtagcggtcgagcgactcggtgacgaacacgctgcgctcgctcggcacggcgcggtagataccgcggtcctccatgatctgctcgagctgcgggctgatgcgcttgccgatgaggtcgcggcgcgcgctgcctgccgcggcgatgacgctgtcgcggtcggtcacggccacgctcgtgccggtcgacttgctcagcgtgtcgcacagctgcgcggcaaactcatctacgccgcccatgagcgaatacttcttaaaaatgacctccccgtccttgctcgtgtagatctccaacgggtcgccgttgctgataacatggacacggaaaaccttgtcctcgtggtttttagaggactggatcagcgtgttttcgatattttccgtgccttgcttaaaatttgcggcgtcctccgtttctgcggggagcgtgccgcagcgcagcagcgtgtcgatgtcggattggagcttgatctccagatgatcttcatagacgagaatcttgtcgatcagcagttccagatcatttcgttccagcttgtcctttgccagaatgtcgcggaacacgtcgatggcggtcttggccacgcggttcacctgaatgatggtgttgcgcttgtcgctcagcaggttgatctggtggtggatgccgtcgatcttcttctgaaggtctgcttccatctcgtcatacagcgcctcgatggtggcctcctgctcgggctttttcatgatctcccggatgcgctggcgcttcgtcaccttcaactcctcggtgaggtcggccagcaccgccgccagattgtcggcagactgctccgtttccgccacctgctcggtctcgcgctttaattcctcgttgagctgctcgagcatggcggcagagctgtccgccagtttttgcacatagcctttcagcagctcgtccagccggtcaacgcggatgtggtggctggtgcagcccttgaggccgcgccggtgatacgtcccgcaggtgtaggcgggggcgaggtcagagcggctcatggcgaacagcggactgccgcagtcgccgcactgcaaaaagccggaatacacgttgtcattgatcttgacgccgcgatagttgctgcggctgcgcttttcccgcagcgcgcgggtgatggcgaaggtgcggtagtcgatgatggcctgatggtggttttcaatgacgatgtgctcgtcgtcgttgcgtttgatctccttgccgttgattttggcgcgggtatacttgccctgacggagcgtgccgatataaaaatcgttgtcgagaatgccctgcaccgtggcgatggcccacgcgttcttggcctcccgcttggatttcttgcccgccgcctccttgcgcatccgctcggacatacgcggcgtgggaacgccctgatcggtgagatagttggcgattttcttgtagccccaaccggcgttgctgtaaaggtcaaaaatcttgcggacggtctcggcctccgtggggatgacctcaaactgattgtcctcggtgacgagatagccgtagggcgcggcgcagatccactcgccgtcgttctgccgccgcttcacaacgctgcgcaccttgcgggaggtgtccgtgacgggcatctcgttcacgagaaactggaactggatcttcagccaatcgtcgtcattggggaagtccacgccgtcgccaatggagatgatgcgcacgcccgcgtcgcgcaggtcttccagctccacgaggccgcgcgagttgcggcgggagaaacgggaaaaatccttgatgatgagaatgtcgtatttgtgccgcatcagcccccggcgcatctcctgatagccctcgcgctgctcgaacgtgtagccggagcggtcgcggtcttcaaaaaacgtcagcgtgctgccggggaagtgggttttcacatagtcctcaatgatggccttctggttctcgatggagatgttcttttgatcctgctcatcatccacggaaatgcgggcatagcccgcgatatcaaagcgttcgatcatgtcggctcaccgccttttaagtatttttctgtctgccggtcgaattcggagatgtatgctgcgtcctgcatacgcatcctttctcacgttcccacttgtagcagactttgcatctctcttattgaataacattgtatcacatgaatcgagcatgtgcaaccggaaaatgatcggacgaggaaaagcgaagcgcttcgcagaaaaaccactccgctttttcgcgcgtgtcaggcattgcgttttttgtccacatgtagtacaattaaaaaataaaaatggtgtaatcccaacgtttttcgggtgggagacggcaatatacatggatcgatgaacttgcgcatttctgcacgtcacagcggcaaaaaggaatgacgcggctttgtcgcgcttttaaacgcagcgaatacgcccgaccgaagcaaattttgacatccggtggacgaaaacataggagtggaaaatggataaacgacttttgctggccagcccgcatatgtcggacgagggctatgaactggagtacatccacgacgcgtttcagaaaaactggatcgcgccgctgggcgagaacgtcaacgaatttgaaaaggccatgggcgaatttatgggcaagggatatcctgtcgccctctctgccggtacggcggcgctgcacctttccatgatcctcgcgggcgtgaaggcgggggacacggtcttttgccagagcctgaccttttctgcctccgccaaccccgtggcctactgcggcgcgaagccggtgtttatcgactctgagcgggagacgtggaatatggaccccgccgccctgcgccgtgcctttgcgctgcacggcacgcccaaggcggtggtcgttgtccacctgtatggcaaccctgctaagctggacgaaattaccgctatttgccgtgagcacaatgttcctctgatcgaggacgccgccgaggcgctgggttctacatacaatgggcagaagtgcggcacctttggtgacttcggcgctctttccttcaatggcaataagatcatcaccacctccggcggcgggatgctgctgtgccggacggcggatgaggcgaagcgcgcattgaagctctccacgcaggcgcgtgagaacgcgccgtggtatcagcacgaggaaatcggctacaactaccgcatgagcaacatctgcgcgggcattgggcgcggccagatgaaggtgctgccgcagcgcgtggagcagaagcggactatctttgcacgctactgcgaaaacctgaaaggtctgccgctcaccatgcagccaaagctcccctgtgcggaatcgaaccgctggctgtccgctgctctgctggacgagggctgcggcgtgacgcccggcgagatgctggcaaagctgaacgaggcgaatatcgagggacgctacctctggaagcccatgcatttgcagccggttttcgcaaactgcccctttgtcagcgtcagcgatgcgccggtgggcgacgacctctttgcgcgcggcgtttgcctgcccagcgatacgaagatgagcatggacgatgtggaccgcgtgtgcgatgccattcgggggatgttctgatgcggcacaaggctgggttttatgaaaaaaacatcaagcgcctgctggacattgtgctgtccgggtgcgcgctgatcgtcctgtcgccgctgctgttggtgacggcgattcttgtgcgcgtgaagctcggaagccctgtgatcttctgtcaggagcgtccgggaaaagatgaaaagatttttaaactccataagttccgcagcatgagtgacgtcagggatgaaaatggctcgctgctgccggatgaggagcggctgacgggctttggaaagaagctgcgcgcgctgagcatcgacgagctgccggagctgtgggatatcttccgcggtaagatgagcatcgtggggccaagaccgctgctggtgaagtatctgccgctttacagcgaagagcagcatcaccgccatgacgttcgccccgggctcaccggctgggcacaggtgcacgggcgaaaccttgcgtcgtgggaggaacggtttgcctacgatgtggactatgtagaccatgttagttttgcgctggatgtgaagatcatcttcatgaccgtccgctgcgtcttcgcccgcgagggaatcagcgcagaaggcagcgcaacgatggaagcatttacgggaacggaggctgcggttcatgagtgagaagattattgtgaaggatttaatcatagccggagctggtgattttggacgggaagtcgcttggcttgctgagagaattaatcaaagtcaaccaacatggaatattctaggttttgtggatgatgctattgattcccctgaaattgatggatatcgagtgctgggaaacattaaatggttgcttcaatatgacagaccagcgtatgtggtttgcgcaatcggaaatgggaaaacgcgagaggtgatttgcaacaagctagaaaacagcccttgccttaagtttgccactttagtggatccaactgtaatttgtgggacaggaagtagaattggaacaggtagtatttgctgcgcaggaactattttaacagttaacgtgcaagtaggtgatggttgtattgtgaacctgaactcgacaatgggacacgattcagttttgggaaattatagtacgcttcaccctggagtaagtgtttcaggaaaagtggttataggccagaggtgccttttgggaaccggtacgaaagtaattcaggggttaaaaatagaaccggacactactattggcgcaggtgcagtggtgattcatgatatcaaggagagtggaacctatgtcggaatccctgcgagaaaaatcaaataagcggattctggtgcttgccaacaacgatgttggcctgtatcgctttcgaaaggacttgcttgcagcgcttttgggtgcaggacacgaggtatatatctctttgccggacggcggtttcgtttcggagcttgtgcagcttggctgccgttttatcgacacgcccattgagcgccgcggtatgaaccctatacatgacagcaagctctttcaccaataccgggcgattctgaaagaggtcaagcccgaccttgttttgacctataccatcaagcccaacatctacggcggccttgcctgccggatggcgcacatcccctatgccgtgaacattacgggacttggcagcgccatcgaaaacggcggctggctcaagaagtttgtgctggcgctctacaaaccggcgttgaagggcgcgagggtcatttttttcgagaatgccgggaatcgggacaccctcgctgccaccggcgttgtgccgcagggacgcgacgtggtgctgagcggtgcaggcgtcaatttagaagattatccctatcagccctacccacaggagggggcggtacgctttctctttgtgggccgcgtcatgcatgaaaaaggcgtggacgagttgtttgccgccgcaaagcggatgaagcaggaatatggcgacggcgtggagttccacatcgtcggctcgtttgaagagggatataagcccctcatggatgaactggaaaaagccggtgtggtcaagtaccacggctatcagtcggatatgaagtgcttttacgccatggcaagctgtgtggtgctgccgtcgtatcacgagggtatgtccaatgtgctgctggaggctgccgcctctgggcgaccgcttatcaccagcgacatccccggctgccgcgaggcggtggaggacggcgtcagtggatatctgtgccctgcgaaggacgcgaacgcgctgtatggggctatgcagcgggtcatggagctgtccgtggagcaacgctccgaaatgggctgccgaggccgggagcgcatggagcagcagttcagcaaaaccgccgttgtggcggaaaccatcaaacacttggagatttgacatgcgtgatttagtcaccctcatgctcataacgattgccttagcatggtgcgccgatcatgtggcgtttggaccggtaaagcataatcggcgccagcggctgatcgtctgcactgtggtaatcatcatcctgctcgccggttttgccggactgaggacacgttgcaatgacactgccacatatcgatattcctataagctcctgacggaaaaattatgggaagcatccgacaagagcatcggttctaacccgctgttcaactgggtgaactatcgcttgaagatgcacggcgtatctacgcagaactttctgatgttctgggcatttctgaccgtcggctgttatttcatttttgtgcataagtactctgtaaattatccgctgacgatttttttactgtttgtcaccggttgttatacctttgcttttgcgggtatcaaacaggcggcggcggtcgggatatcggtcattgcgacgatgtttgcacttaaaaagaagtggcttttatttgctgttgggatactgatcgcaacgctgatccatccctattccctgatgtatttggcggtgccgttcatgacatttaagccgtggacgaaaataacctattggatgctggcagccttcattgcagcgggctttctgctgcgcccgctgctcggcacggtggtcaacatcacgacgctgctgggtgaggaatacacggtttcctccttcacgggagacggtgtcaatatgttccgtgtgctcgtctgcaatgtgccgatggttttgtcgttcctctaccggaaaaagctgtttgcagacagctccgaggcggaaaacctcgcagtgaatctcactatgctcaacggcgctattatgtttgacgggctgttcggaacggcaaattattttgcaagattggcaaattatttcttgattttccagtcgctgtcgctcccgtggatgctgaaaaagatcggcggcagggatggaaaagtgctaacagcattgctggtgctgggctatgccgcgtatttttactatgcaaacgcgatcaaccagccgtttgaccactactttgcgcggttaagcttggcggagtattttgctcagattgggagatagactatgaatcagcttcgcgttttacaagtcgttacccacatggagcgtggcggcttagagtccatgctcatgaattactaccgctatatcgacagggagaagattcagttcgattttctggtacatcgtcaggaacgtgcagcatacgacgatgaaattgaggcgatgggcggaaaaatctaccgtttgccgcgccttgtgccatggagcaaggcgtatctcactgcactgaatcgcttctttgatgaacacccagaatacagaatagtccatgttcatcaggattgcctgagctccgtgatcttaaaggctgcgcagcagcacaatatcccggtacgaattgcccacagccacaacgcaaatcaagacaggaatctaaaatatcccatcaagctctggtgtcggcgcagcatcccccgttgtgccacacacctttttgcctgcggcaaggatgctggggactggatgttcggcggcgcatcgtatcagattatcaacaacgcaattgacactactgcatacacctatgatacgaacaagcgcgtcgagctgcggcgacagcttggccttgcggacgagctggtcattggccatgtcggtcgctttaacccacaaaagaatcatccctttcttttggatatctttgccgccttgctgaaaaaagaatcgaacgcagttcttcttctagtcggtggcggcgagggaatggctcaaatacgggagaaggcacagaagcttggcatagcagagcacgttcacttcttgggtgttcgcagcgacgttgcagacttaatgcaagcgatggatatatttgtttttccgtcgctgtatgaaggcttaccggtcaccatggtcgaggcgcaagcggcggggctgccgtgcattatttccgacaaggttcctcccgagtgcattttgactgagggtttggtggatgtcatgcctttgtccgcaagtcgggagacatgggcggagaagatccttgcgaagcgagccatcccccgcaccgaccgtcgagcagaaatcgccgcgcacggctttgatatcactacagaagcagtaaaactacaggagttttatttggaggcgaataaatgagtgtcttcagaaatattattatgcttcttaaccgcgagatccccactgaagtgctgataaagcgcgggatgaaggtggggaaggacttcaatcgccagcagggctgttttcttgacccgacacattgctttttgattacaattggcgatgatgtaacgatgagtatccgcgtgacggttatggcacatgatgccagcacaaagaaaaaccttggatacaccaaaattgggcaggtacatattggcaaccacgtctttattggagccaatacaacgattctgcccggtgttaccatcggtgactatgctgtgattggtgcgggcagcattgttacgcacgacgtacctgcaaaaacagttgttgccggtattccggccaaggaaatatgcggtgtagacgaatatgccgcacgatttcaatctcaaatgaacgaagcaaacacatttggtgatgagtaccgtatgggctatggccttgacgaaagcaagaagaaggaaatccttgccgcaacagacggaaagattgccttcatcaaataaggagctcgaatgtgacaatgccgaaaataactgtttttactccgacctataaccgagcctatatcttacctaagtgctttgaaagcctgaatcgtcaaagctgcaaggacttcgagtggctgattatcgacgacggatcaacagaccagacaaaagaactcgtaacagattggcagaaacgtgaaaatgggtattccattcgctatatctataaagaaaatggcggcctacacacaggatacaatgccgccattgccaatatggaaacggaactgtcagtctgtatcgactctgatgattctatgccagaagatgcaatagaacgaatccttgctgaatggcaaaaggtaaaggacagtggcgcggcagggctggttggcttggatgttgatcagaacgggaacctgatcggtaaagagttgccagacagcgaactaatcaacgcggcatccctgctttgtgttccgggtatgggagataaaaaatatgttgtgcgcaatgacttgttgcgcaccgtggctccgatgcctgtgtttgctggtgagaaaaactttaatccgcactatttaatcatgaagctgtccaaacagtataggtttcatcctgtcaaccagtgcttttgcttggtggaatatcagcctgacggtatgacggcgaatatctggaagcagtatgtcaatagtccccgcagttttgctgaactccggcgagtaatcatggatgtgccgggattaacttggcagtatcggctcaagaatatcatccactactgctccagcagccagattgcgggaaatcggaactatatcaaggaatccccacgcaagttgctgacggtgctctgcaccccggcgggttgggtgctgacgggatatatcaggagaaaggcgggcgtacagaaatgccctcccaaattgcagtcataattcctgtttataacacgggaaaaaagaagcttaggaaatgtatatattctgtcttggcgcagacatatcggcagttcattttaatccttgtggatgatgggtctaccgatgatagtggtgctatatgcgaatcctttgcacagaaggacccgcgagttttagcgatccatcagaccaacaaaggctgtgtagaggcaagaaaaacaggcattttctcggatgcagcacagacggcaaagtatatcgccttttgcgattcggatgacaccttgccgagagatgcactcgaaaagctggtaacggcagcagagaaggagcaagcggattgtgtctgcggtaatatgcgccgcgtgtaccgaaaaatcacaattccaagccgctttcaaagcccatgcctttctgttgatggccctagagtatatccgaatgcggaaattctttccaaagtatatgtaagttgcttcggtgtaagtgattatccggtaaacctatggggcaagatttaccagacggagctgatcacgcgcgcatctgactttccaccgattgtcgagttcatgggtgaggatttgagtgttacgcttagagtgcttcccgaaacaaggagattggtgattatcccggatgttgtgtacaactaccgaatcggcggcggaacctcaaaattcatgccccatatgttagatgattttttgagcctataccgcctcaaaaaagaactggcgcaacgccatccgatgccgcagaatgtggagtatctgatggcggtggagatgaaaaacattgtgctttcatggcttgaaatgtgtgcgctgagcgggaaatatgataacgatgcgctgcgcgaggaaatcaagcgagtttgcggcatccctgagatagaggaagcggtacggcaaagagacttcgtagagaaggagcctacagggattcgcaaagcaattcaggagactgatgttgagtttattgacaacgctctcttagagcgaatcgcagcagggaaatatagaagactgattaagaaactgttgaagtgatattatgaaaaaaccatccattctcatcttctcccaagcaatggagcttgggggcgtggagcgcagcttgctggggcttcttgatgccatcgactacgaccgctatgacgttgacctctttctgatgcggcacagcggagaacttatgccgtacctgaacccaaaagcgaagctcctgccggaaattccgcagtatgcctcgctggccgtgcccatggcgtcgctcgtcaagagcggacaactgggcgtgctgcgcgggcggctgagtggtaagcttgccgcgagacgctttgatggacagcacccaagcgagaagccgtccgtcaccgcgctgacctacagccacaagtatacgctgcggttcatgccgtcgatctccggcaagacctatgatcttgtcatcagcttcctgacgccgcactattttgcacgggagcgggtgcgggcgaagaaatacgcggcatggatccacacggactacacggcgctgacctttgaccgctcggcggaacttgccatgtgggagggttatggtgccatctgcggcgtatccaagcaggcgtccgagagctttcgaaccgtctttccggagctggcacagaaggttcggacggtggagaacatcctgccccgggagctgacgtgtaagcaggcggcaatgcctcagaccgatatgcccacggacgacggaatatccctgctctccgttggccgcttctgcgaggcgaaaaacttcgacaatgtgccggatatctgccgccgtctggttgcggacggccttgacgtaacgtggtatctcatcggctatggcggcgatgagccgctgatccgtcagaagatcgacgaggccgggatgcaggagcgcgtcatcatcctcggcaaaaaggacaacccctatccctatatgcgcgcctgcgatttgtatgtgcagccctcccgctatgagggcaaggccgtcaccgtgcgggaggcgcagctgcttggaaagcccgtcgtcatcacagactacgccacttccgacagtcagctggaggacggcgtggatggcgtgatcgtccccatggataacacgagttgcgccgctgaaattgccgcgttgctgcgcgaccctgcccggatgcagcagctgtcggagaactgcgcaaagagagattatacgaacagcgcggaggtcgagaagatctatgcgctgatggagtgaagagatagtaatatgaatgaatcgagaagaacatcgcttgacatcatgacgattattgcatcgttccttgtggtgctggctcatcaagcctctcaggtcgatgcccgttcgatatatgcgtatcgaataatttcagaggcggcagttccgttgtttatcatgaaaagcggcacactgctgttatcaaactcaaaacgaatagattattcgtatgtccgaaagagaattactaagtttgcactgataatcactttttggggcttgttctacaatttgctatgcaatgctctaatagatgggatttcatattctgctgtttggaaatcaatagtggcagttgttacagcggacacagcatacaactatcagttttggtatttatatatgctcttggggctttacataatttcccctgtaatcaaaaaattcacagataatgcaggcaaaaaagactttttgtatgttattacaatttttgccattatcggttttattgtgcccttcatttgcggtatatatgacgttgattcgcaatcaatctgggtagtaaagtggctttctccgttttcggcatattggttactttattatcttttaggaacttacttagatcgctatcctcttagcaaacagcagaaccaagttataattttgttgacagcattgttgggctcattgaccatattaaagtgcgtagggggcgataattctcaagacagcctaaaggcatggttaaagtataattcaccatttacactggtatataccgttgcattattctccgtggtttataggaaatgtgattcatgtggagcgagaagaatcgctggtttagcaaaatatagtttaggaatatatatactgcatccggcagtaatcgttgccatgagaaaagtccttggaattgatgtgagttgctttgctttagtgatgagcgttccagtgctgacttgtgtcgtatatatatgctgtgctattgcgacgtgggtatttaaaaagatcccaatattgcgaggtatcatttagtgtatagaacagtttgccattgtgttcttgttctataagagatctgaaagacaatgttgttttgcaagtgatagagaaatgcacgttattattgcatgtcacaatgaatctcatcgaaaacacacaaacaaaggatagcagtgagacgagagaaagcaacccagacatatgcaatcggatgcatttctagtttcgttctgttgtacgacgagagtaaaaagcgggcaagacgatagcgagggcaaccgcgaaagcgaagacttgcaatattgtgataattcctgcgcttgctctattctatttctgtgatcgtccccatggataacgcaggctgcgctgctggaattgccgcgctgctgcgcgaccctgcccggatgcagcagctgtcagagaactgcgcaaagagagattatacgaacagcacggaggtcgggaagatctatgcgctgatggaggactgacccatgatcccaaaaatcatccactactgctggtttggccgaggcgaaaagccggagcttgccaagaagtgcatcgccagctggaagaagttctgcccgggttttgagatccgcgagtggaacgaggacaactttgatatccattgctgcccgtatgttgaagaagcttatgcaagcaagaaatacgcgtttgttacggattatgtaaggctgtatgctatgtatacgtgcggtggaatttacatggacactgatgttgaagttgtgcgcccgctggaagagttcttgacctgtaaagcattctctggctttgagtctacgcgttatgtaccgacagggattatggcttctgaaaaaggagttccgatcattcatgaactactagactattacacgggcaagcacttccttaatgacgatggctctcaagatatgacaacgaattgcgtgtcgattaccaatattatgttgacgcacggattggaactgaacggcaaactccagacagttgcggagtttaccttttatccatcagattttttctgcccatttgaaaatgagacaggggttcttcgaagaaccgacaatactgcggcaattcactggttcaataaatcatggttgccgcaaaatgttcggctgcgctctcgaatcaccagagtgtttcatcgaatatttggcgtagattgctttagatggctaaaaagatgaaacgctggacagcgtaacaggcaagctgacaaaaacggagaacacctactcgatccactggtattcgatgagttggttgccgaaaagaaagcagatcagagcgaaagttggacgaatatagcggaggattacgaaaagggtcaagtcatgaaaatttgtacgatcacctgccacgatgtctataacgtcggcgcatccttacaggcttacgccctgcaaacctatttgaagtcgctggggcatgatgtgaagatcatcgactataagccggattacctctcgaagcattaccggctggatgtcgtcggcaatccaaaatacgacaaaccttttgtccgcgaggcgtatcttttggcgaagctgccggggcggcttcacgtgttgccgagaaagaaggcgtttgacagcttcacggccaagcatcttgatctgaccagacggtatgcctctaatgaggagctaaaggtcgatcctcccgaagcggatgtttttttcgctgggagcgaccagatatggaatccgctgttcccgaacgggaaagacccggccttctatctggattttgcgctgcatggcattcgagcatcctacgcggccagctttgctgtggacgagttcccgaaggaattacataatgtgacggtgcagtatctgcaccgattgcatcacattgccgttcgtgagcgatcgggtttatctgtattaaagtcactgggcattcagaatgctacgactgtccttgacccggtgtttctgcttgaacgagcgcaatgggaggcgatggctgagaagccggggcactgcgagaaaccatacctgctggtatatgactgcgaaaaaagtgccgtcatttgtaagttggcggagagaattgcggcggaacgaggcttgcatatctactcggtcttcaagcttccgtatgccgagcgctgcttcccactctgtggaccggaggcgtttttgggcctcatgcagcacgcggcttttgtgctttccaactccttccacgcaacggcattttcagtgatattcgagaaggaattcgccgtcgtggagcgcacggagaaaatcaacacgcggatgcgcgactttaccgccatgctggggctatctgaccacatggtaacaacagagacggagatcccagttggtacggattggacagccgtgtaccgctgcctgaaaaatgagatcgaccacgcaaaggcgtatatagacgaagtgctgagggacggggagaaatgattgataaggtttcggttcaagaatgcgcgatctgcggcgcttgcataaatgcttgcccggtagatgcgatcagcttggacaaggtacatctggattttagatatcctcagatcaatgaagacatttgcattcattgcaaccgatgtgaaaaggcttgtccaattttggggaacaagggaaaacctggtgaggggtatcctgtagcctttgcagccaaaagcgagaatgaccctatgcgtatgcgcagcagctcaggcggtgtattttatgagcttgccgatcaaatgctccgcgatggcggatacgtatgcggcgcggtgtttgatgacgagtttcatgtcaagcacatcctttccaatgccaaggaagatattctgcggatgatgggctccaagtatgcccaaagcgatgtggggtattgctatcgggaagtcaaagacgtgcttgaaaagggatgcaaggttttgttcagcgggtgcccctgccaggtcgcaggactgcgcacatttcttggaaaagagtatccgaatctgcttcttgtggagttgatctgccatgggattccaagcgaccatatgctgcaaacgtatattggtatgcaggaaaggaaatatggcgcaaagcttacaaaaatggagtttcgtaacaagaagaagggctggcataatagctctgtgcgaatggagtttgaggatcatcgaatttattctattccttacacggcagacgcatatacgattggctttttaagaaatattactttgaaatcatcttgctacaattgtcattttcgtaacttcacgacagggaacgatattatcttgggagatttttggggtgccgaagtagaactgccagaagatgataataaaggaatatcggcaattctcgtaaattcgggaaaagggatggatacacttgaccgctgcaacttggcgcttactcagactgatgtggaaacggtgatcaaatataaccggaatctgctttgctcggcagcaccaagccctcaaagaagttcattctatgccagtgctgatacgaacggatttgaggaagcgatacggagatatctggaagaaagtacgattcaaaaattgaagcgacaaagcagatatgcactccgctgcatcttacacgcaatacgtggaaaaggaaaaccgctttattaggagatactgctgcatgacacttcggaacagatttaacatatggcttgcaggctggattgagcgccgaaaattaaagcgcttttttgcctgcatggcctctgtagggagaaacgtatatttaagtaggggatacagcataagctcgccgagcaaattgagcatcggtagcaacacgtggatcggcgaaggcttctttgctaaatgtgagggcggcgtaaatataggtagtggtgtactcatttcacgcggagctgaaatttggacggcgaaccacaattacgacagcgacgatctccaatcacttccctacgaccgtcggtttgttttgaaacctgtcaacataggaaataacgtatggattggcagtcgcgttacgatcattcccggagtttccatcggcgagggtgccgttattggtgcgggtgcagttgttgcacacgatattcctcctcttgcagtggtgggagggaatcctgctaaagttataaaataccgcaatagagaagtttatgaaaaactaaagaccaacgggaaaatatatctggacatggaatatgattatgatatatcaaccttgcgaaaaaacgagtatttgaagaagcatggaaaatagtcgtctaaaaaattcagcattaaattttgccagtggtttcttgggacgcgtgctcacgatcttgctgaactttgtcgtccgcacaattttcatttattgcttgaatgaagcgtacctcagcgtaaatggattgtatagcaatatcctgacggtgctgtctcttgcagagttgggatttggttctgccatggtttatcgtatgtacgcacccgtggcggtaaaggactatcaaaagacagctgcgctgctccaattttacaagaagatatatataattattggagtggtaatttttctcttgggcctctgtgtaatcccttttatggattacatcatcaaggataagccggatatttccgggctcacactgtactatatcctttttctggtcaatacatcgatttcatattggctttcgtcgtataaagcgtctgtcctttatgccgatcaaaaagagtacatcaaaacgaatgtgcagagtgcgacgactattctgcaatctgtactgcaaattgttttgttgctcttgttcagaaaatatcttttgtatcttctgattcagcttgtcggtaacatttttttaaatttgtacgttgcacatttggttgataaaagatatcccgagatacagacctatcaaggtgctagccttagcgcggaagaacgtatgcagattagaaaagataccgaagcgctggtcttgtcccggtttggtcatgttgcgctgaatggaacggataacattattatttctgccgttgtcggcgttttatgggttgggcgactgtcaaactatacgctcatatgtgattctgtgaccagtgtgctttgccagatcacagcagccattacgggaagcctcggaaatttctttgcaacggaagataaacatgcgggctatgcactattcaagaaagttgaattcctgaatttttggctgtatgggttcagctttattgcgctggtcacattgttagatccgtttgtacagatatgggctggtggccgatttgtgctggggcttcctatatcaattgcgattgcgatcaatttcttcgtggcaggttacatgaatacgctctgggtgttccgttcaacactggggttatttaagcagggaaagttcagaccaattcttgtggcaattctgaatatagttctctcaatcgttcttggaagactgtggggcgtttttggcgttctgtttgccacatttttgtcgcgggcagcaatcagcctgtggtacgatccgcttattctccataggtatgggtttgaagtctcgtgtaagcctttcttcgcccgttatttcaggagagttctcctactcatagctgttttgattgccatgctgacgatccggcatgtagttctatcttctgcaacaacggttttgcgttttgcagtcatgacaatggtcacggcgattgtgcccaatgccatattctggctggcatatcgccgctgcgaagagtatgcctacttccgcagcattgtaaaagaccacgtaattgcaccggttcgagaaaaattgcattgatgcttcactacatctacacccgttcgttcatcggcattatcacctttatggcgctggctcttgccgcttggggtgcgctgcctgcccgcgcgggggcgaggcgctggcggtgtgggaaccttgtgctggtgctcctgataaccgccgccatcctctacgcaaccttattcagccgcgccgagggcggcaccggtctgatcctcacccccttcgcctccctgaccgccgcgcgggtacagccggagatttaccgcgagatgctgatgaacgtcttcctcttcttcccgctggggctgacgctttccaacgccctgccgcgaaagtggcaccgttggggcagaatcatcctcacaacgctcatcggctgtgcgctcagcgcgggaatcgagtacgcccagtaccgctacgcgctgggacttgcggagacggacgatgtgatctgcaacaccttgggcgcgcttctcggcgctgcgtcgctgcttgccgctcacgccatcgaaaaacacaaagaaagggcttgacacacgaacatgaccctgaccgccacggagagacaatttctgcatatcgccaaggctgctgtttccggcgggaaagtcaccgctgaaagcgtggactggcctgccgttttcgcgctggcggggcagcagaagctgctgccgatcctcttcgaggccgcccgcaaaacgcccgccgctgcggaaaacgcggcgctgttcgccgccgtcaagcagcaggtcatcgcgcaggtgctgcaccagaccgtgcgcgcatcggcgtttgcaagcctctaccaaacgctccgcgcggcgggactgcacccggtcgtggtcaagggtcagctttgcagccgcctctatccgctgtgagatcaccgcatcagcgcggacgatgacctctacattcctgatgcggagtttatggcctgccatgagcagcttcttgcaaacggtttgaccaccgatacgcccgctgacgagtttgccacagcggacgaggtatcttacacaaaaagcgacagcccactttacatcgaactgcatcggcatttatttgattctgccgaggatgcgcatgacgagctgaaccatttcttcaccgacatcaatcccgtcgagatggacggctttctggccatgctgccccacgagcatctgctgtacctgcttctgcacgcctacaagcacttcgtccgcagcggcatcggggcgcggcagttctgcgacatcggcctgtgggcgagggagtaccacaccgaaatcgactggcagcgcctgcacgagcggtgtgagagcgtccacgcggcgacctttgctgcggcggcgtttcacatcgcgggagactatctcggcatcgaatttgacctgcccgcgccgtggagcgaggcgggtgacgtggagccgctgctgcacgacaccctctgcggcggtgtgtacggctccaatgacctaacgcgcctccattcctccaccgtcacgctgaacgccgtaaaggccagccggacgggggagaagagcagcgtcctgcggacggtgttccccaaacgcgagtatctggagcggcgctatccctatcttaaaaagcgcccgtacctgctgccggtcgcatgggcgcagcgcctcgcatactacgcgggcgagaagaagactggcacggataacagcgtctccggctccatcaagctcgccaaggaacgtatcgagctgatgaagcggtacggagtgatggattaaattcaggcaaaaaagaaaacgggcggaagggattgctcccttccgcccgcggcttaccgctccatgcccacggcactctgcttcttcgcctgctgcacggccttttcggcgctgcggcggcggttgaagagcagcagatcccgcgtgttctcgtaaagatcgcccttgccggactcgaacacggcgaccatgtatttcttcgtcttatacttggcgtaaatctccttcagcccctcccgcaggacggggtcaattttttctgcattcgtcagccagatttcaacaagcttctgatcgtccctgacgttcatctccaaatagaaccagcctccttcaacatccttagtttcctcatctttcctgctgcttatgcgcggccacctgcttcgccgcctgcaaaatctccggaggcaagacgtccaccatgcggtgcagctcgtccagctcccggagcttttcgttgatctccaattttttcaggacgctttccttggaggcagcgcccagctgcttttcgagcgccgcattctcggcagtcagcgccttataagcggcgtcatacttcttgagcttcgtccgcagagcctccgcgccggggatgtactttcccagcagcgcttccagttcgtccagcttggcctttttgttgaacggattggtgttgttcagaatcgccatgatctgctccttcattcggttcaggtgcacggcctccttgaatagccgcggcgggatgtggtcgcgtccggtttcgctggcgctttcgccgcgctccagatcggggtattttttgaccatatgctcccagaatctgtcctgccactgtgtcaattttttcttgttgccgacgatctctttggcgctgagccgcccgtccgccgtcagcgggacaaagcaaaggtgcatatggggcgtcttctcgtccatatgcaccacggcggatatgatcgtgtcttttgactgatgtttttgcatgaagtccagcgcctcctgaaaataggctttgatttcgccctttttcttgcccttgaagaactccgggctgaccgtcacgagagcctccaccacgcgcacgctgtccgaccgcgtgcggcagcccacctcggcaatttgcttttccgcctcggcgcggtacttgcgctgcggcgtcaccagatggaagttcaggtggctgcgggacgtgtccacgtctggattgctggcgtacttctccttggtacgctcgttgtgggactcgatgtgaccgatttctggccccttgtatttagcaaagcggagaatggcgtactgtgctttcatcggcgctcccctcgcttcacccacacgatgtcgcagtccagcacgtcggccagctccacgacctccttgtagcggatgctctcccgctgcaattttgcggacagattggagacgctatcgctccagtcatattcctcggccagccggtcaacgacctcctgcatggtaaatccggcgcggacgatctgcgccttgatctcatttctgatgttcataaaatcctcccaaattttcgtgatgaaaacagcgaagcgggtttgcgtttccgaaaaccagcttcgctgtttggcgtaatattctgtttttccgaaatccgctggaaacgcggcggtcgatgccttcttcgtaagcgaggggtatcgactttccgaaaccgcgtgacttcgcaggagaccgtgcaaatccacacgcatccgcgaagccggtgcacgattccgagcagcgcggtttcgtggaatgatttcgccgccgcgcaaatttctttccggttttcacctgtcttgcagatgcccctttcgtttcagcgctgccagatcggcggccacgtcctccgggcgcatctgcgcaaggcagctcagatcgtaaatgtcgaactgattcaccagaagcagcgtcatcagcagcttctgcgtgccggtcaggtcgctgtcgtacaagtgaaacagcggcagttccttataataaattcttcccattgcatcctcctttgcgggtaaactgaaaaacatctatcccatccatcccatccatccgggttttttgggatgcttgggatggatgggatggagaaatttgagcctgttctcataaaaccggcggcgcgaccagcggctcgatgccccagaagccgttgacccgcttgccgagggcgttctggatgtgattgtcatgctctaagccgaactcatcggcgtgctttttgagggtcatgctcaccgtccgcgcggagcgcggcttgtaggcgttgtcgctgcaccacatacaatagataccgtacagcgcggcggacgggatggcgctgtcggccttcaaacggatgtagccctcggagcgcaggaacagcagcacattgtcggcctcgcgccgtgcatcctcgcggtttgctttcgtctgcgcgctttcggtgaagcggaagttattactttgcaagcgccgcaggccttcgagacaccagaggaagatgccctcgatctcgccgcagagcttgtccgcgagaaaggggtcatcctcccggttcggcggcttcttcttcaccgacaaaatgagctggcggcggtaaaagccgtccgagtggtcgtagagcgactccagatcgccgttagaaaaggccaaaaagcggacgtacatcctgccctgatagctctgctcgcccttgcgctccaagtccatcggcatttcggcggtgatgagggacttgagatagtgggtggattgcagcgcctccagtttcatatcgtcatccaccatcaaaagctcgtgctccagatcggcgcgggcaaaggggctgcgctccaccttggcgatgctgccgtttttcaggttgctgccgagcagcttctgcatcaccacgccgatgcggctcttgccctcgccgccgttgcccttgagcagcatcatcacctgcccgcggtttgtcggaatcaggcagtagccgaggtattcctgcaaggtcaaaatgtcctccggttccagcaggtcagacaaaaaccgcagccatgtcaccggctgcggcgcgcttgggtcatatcggatgggaagccggttgcggcagaattctttttcggcgcaaaactcaccatttagaaacagcgtgccgttggcaacgtggatgcgatcctcctgaatgggcagctccggcgtgtaggcctccagcctgagcgtttccagaagagtggtggcgcggcgagccgtgccgctcgtaaaatgcgggcgcagcatctcatagatctgcttgcgaatgccctcttcgtcggcaacgcggccatccaccgtgaagaagctgccgtcaacgcagaccatcgggtgcgccgatagaaagtcctcgcagaacaggacttcgttgaagtgcttgtcctgcatccagcggggcggctcatttcgttccatgtgcttcctccctgatctgccggtttcgcgcctccatccgcgcaaggcgctcgtccttctgcaagtcagccaccacctcggcgcgctcctgcggcgtgccgcaggccagaatgtccagcatattcccgatgcgctcgagcatatggcaggcctccgcatagcgcgggtcgatggcgtcctccggcgattgcggggcacagcgcgccttccagtcctgcaagatgcgcaggtagtcccccagcacgcggaagcagcgccgctcggcttccgcctgcgatttcccgcgctgtagccttgcgagaatggacggcttctgctcggtgatgccgaaatccgccgccagcttcttcgccgcgtcgtaaccgctcaggttgaacagccttgccgcaaggtcgatcacgtcgccgtgcgccccgcagccgaagcagtagaagtaatcctcgttcagcttcatgctgggcgtgtggtcggcgtggaaggggcagcagaccatgctgccttgctggatcggcagcccgtaccgctccgccgccatgcgcggctgaacggcagccttcacggtatcaaataggttcataggcagtttctcctttcagattttctgacaatttttccttgtcacctgaatatacggaggaaaggtcttagaccgacgaaatcaggcgcttatgcaagcaaatagcaaaagcctcctgctttcttgcaaaaatgcaagagcacgggaggcttttgtcgagaggatattcaaatcatttcacaaaacaattatagaacgcttgtactagattttgagcagagtatgtgctatactgaatttacaatatctgcttggcgcaggatttttactggaatcggaggcgatatgtttatgagcaacgaatcggtatttctccccgcggctgtccgtgaccgcatttgggatctgttgaaggaacggaaggttacgcaggccgagcttgccgcaagaatcggctgttcggaaagttcgctgagccgcttcatcagcggcaagacggacaagctgggtgacgaaaatatcatccgcatcgcccgcgcgtttgatgtgtccaccgatttcctcttgggcgaggtggatgagccagatcgcaaaaactacgacatctcagagctgggtctttcggttgaagcggcgcggaacctctacacgcagaaggtcaaccccaaaatcgtcagctgccttctggaaaatccgcagtttgccgacaccacataccagatcgcccggtatctggataacgagctgaccgccggatttgccgcgcagaatcagctttattcgatggtttcgtccatgctgggcacagtgccgcaggccgcagacgaggtcaaaagtctgcggacgcccatcgatcaggcggatttgagctccatccaaaattcttttatgaaggccgtccgcgccgtgaaaaaggaagccgaggcagagatgccgcccacgcgccagctcacggcgcaggcgatgaagagcatctatgcggaactgaccaagggcggtcaaaagctgaaccggaaaatcacaaaggagcagattgcggacgcggtggcagcctccgtttcccatctgcccggtgttgacacggcatacgtcaggaagttgttcctctccatgaccggaacggcggcaagcgatgaatccgaacagcatgaccaatgagcggctttgcactctggctcagaagggggacgcccatgccgccgatttgcttctggagcacaattccggcttcatccgcaaaacggccagtgagattttccttaaatccaatctggcggagagcgatctcagcatcgaacccggcgatctggagcaggagggctgcatcggcttattgaaggcaatttccagctatgataaaagcgtcggcgtcaagttcctgacctatgccgcaccgttcatccgaaacgccatgaccgatctggttcgggacgccttctcccgatatgagcagcgaatgatcgattccgaaaatgggctggggcttcaaaaagtccggctggatgaagttctccccggcgaagagcgattgctgcgcatggaggcggttgcagacatcgccgccaaatctccggaacaggtttatgaggaaagagaaaccttgcgggagctgtacgagggcttggggcaaatctccgagcgggagcagacgtatcttctgtaccgtcatggttttacggacgatattgggcacacgctgatcggcacagcgattcattttcatctcagcgagagcagggcaaagaagctggaaggcgaggcgatggacaacctctggctggagctgccgtggtggttttagcgcgcaaacgccgcggcgggacgggggctttatatacctctgcttccttttccggccagtcggattttgcttctcaaaaatcctgcgtttgtgctgtaactcacgtcacaaaatccgcctgtcctactgccgcgaaaaagcgtttgttgccacactctgccgcaccgcagagtacgccgccaccccttttccgcgtcagccggaagcaaaggtataacacactagactttcctgcggaaaatcgtgtgccaacagggcggctcgcgcccctattggaaacccagcggcaaagagatgttccctttgcaatccctcattttcctcgcaggtgcatatacaaactgcaaaaggcagcttgtcatgcctgctctgaaaatgcaaaaggaagcctgtgcgggtgcatggcacagacttccttttgggtgggaacgcagaagaaggggacggtaacttcttctgcattcctgcgatccgcacggcggggacgagggaaagcgaattgaaataggagttttagctatgaaaaagtcgtggatagtataccgcttacagcattacggtgatcgacgtctcttcgactttctgctgcggacagagcctaccgtcgacgctacctaaacaccctagcatagctcgtagtcccagtcgctggcattattcaacccatccgcgccaaatttattgcgattcagggcaatcgattgtaatagtacctccggtcgcgtcaagaataatgtggtcgccctctttgactctctcgtaaaagagaggatcgacatcatccaccatggggacttccatgatgatcgcgctggagaccagcacagtatcaaggcaggaaacgatcaatccacagggagcaagacctgctgtatcgagcttgtacataccgtctgcctgtacaacggaactccccttaccgccgggaaagatgatgatcttgccagcgatgcattttccttcaagatcatgtcccggttcgcggaaaacgcctgtggtgaaatctgtttggtaaaacagtactgggtcgcgggaaagcaaggcttcgcctgtggcatagccaggtgagatggtgtggcagcgaaaagtctgcttcatgcttcgatccctcctctccctgcccattcaaggcaggtcttaacgtcgcacacggcgagttccacaccgaacgaacgcatgtaataggcgcatttaggagaatccgtcacaccgcgctgtccggcgagatggccccaacaggagtgctcgtcaacgcaggtatcgctgacgagctgcgtgccgcagcgggcaagctgctgtgcgagtccgttggcttcggccagcgcagtatttgctgcagaggtcagtatccagacgggaactttgggcggcgtacgctccatcagtgcggcggcacggcatatctggcgataggtgtagtgggggcagccaagcatgacaaagtcaacgcgatcggtgctggcaggaatcagaagttttctctgctcgtccaactctgtacgcgtgatagtcacggtgtgctcaggcgcatgaccgccaaatgcgcgagaaagatcaggggcgtcgggagtaacgccgaccatgtggaaaagatcggcaacgcctgcgacattgagctgtgtgccaagcgccatcaagtcctctgtcgatacacgctcagatgcgatgccggtaaagactggaacaccgcggccaatgtgcttggcgttgaggcctaacagggcaaagtcaaattcgtcctcgagcggcgtatctacctgaacgaggatagttcccaagcggttttcatccagcagcatgccgtattccggtacatagccggtgatggcagcgcacaaagcgctggcagagctttcgcgatttgtttttgcgccgagtacagtgtttgcataaaccgtggcacttgtttcggaaaacgcaaccgtttcgcggtaccggggaatgttgccgaataggtatggcgtacaactgtaagtaagatttgcccccaaatcgcgataaacctcatgtgtttcgcgcataagggcagaactctttgcgttgatataacccaactgctcaaaaagcttgagacagtaacctggattgacagtgggcggaatcgcacagacggccccggcgtcgcgcagcttgcgggcaaaccatgtatcggcttcctgcgcactgagtgcaacatgtgcacgtgtaataggaaccatccgttgtgcgcggaacccatcaccgatagccacctgaatgcgcatcgccattgccttacccttgccgaaccgtccgtcgagcatctcctgctgatatagtgtcagatccatagagtatccctccggtccattgcacgatcagaagatcaggtgtgtgacgattgccacaagcggcatagcgatcaaggtgcgcaggaagaaaatgaggatcagcttgccgagaccgaggggaatatcggactccagaatggagggcatgctgttggaaaacatcatgatctgcagcgcggtaacggtgacgacaaagaatgcggcagcgggagcgatgctcagtccaccgatgtacgccgagggcagcgctacctcagcaaggccgagaatgaaggacggggcgatctcagaggcgttggggataccgagcaggttgaggatgggaacaagcggaatgccgagatagcttgtcagcgtcgtacccttgacaagtaacatggccagaacatagatgcacatgatgtaggcactgattttctgcgcgaagatcagcacatcggtgagcacctttttaaaagtcttaccgatctcaacacggttaccagtttcagcggcagtgataaaggcgtttttgatcaaggctgcgctgtagtggacgctctcttcggtgggccggggtgtaccgtcgtacatggtatccggtagtttgctcagaggcgggatacgcaccataatggcggccataacgaacgagagcacaaagctccaaagcacaacgtcgccataatattcgaggataccggcagattcgaccagaacggcgaagaagccaaggctgataaaactgaagttggtagcaatagacgcagcctcgcgggtcgtatagcgcttttctttatagatgcggttcgttagaaagataccgagagtcggattggcgacaaaagaggtcacagcgtcgagagaggcgtagccgggaaccctgaacaccgggcgcatcagcggctcgatcagtgcaccgatgagttcaagcagtccgaagtctgtgacaaagacaacgaaaaggcctgcgacgatgatcgtgatgatgacggtcttgctgacggctaacgcatcaccgccgacggcactatcgaggatcagcgaggggccaaactggaatgtgaccatcagtgcgaagagaaagccgatcacataaagcacgatcgagtagacctttacggagccgtaaaggcgggtaaagagcggacacttatctgtaagcttggcgacgatgcagccgatgagcaacgtgccaacaaaaagcaggacaatataggaaagatagggtttgagcacacccttaatcaggttaacggactgcaccagccaggtcgcccgtccccctgaagctgttggcgccagaggaacgaaaaagtagaggataccgataatagaaaaaatcaagaatttggacgggttgcgtgatacggttttctccatgataattctcccttttaaaatcagtaaagtggatggatcaagcgtcgcccttgttcattttgccaacggtaaggttgccgccctgtgtgtcgtagccgctgtagaaaccatttccggttttcataccgaggttgccgtccttgacaaaggattcgaacgccttgggcgggcggtcgctctcgtcgccgctggcattaaagtaggaatattcgatattgagtatggtatcaagcccgataaggtccatcagtttgaatggaccaatgtcggtgtgccattcgctcatccagccgcggtcgaactcagatggagtgatgtatccgttggcccaaagtttcaggcattcctttttcactgcacgccaaacacggttgatcgaataacccttgatctcgcgctcagtgatgatcggctcaaagccgatggtgtgatagtggtcgagtgcggcggccttggtctcctcagaggtggcactgttccacatcatttccacataactgttgcgtaccgggtcgtcgtggtcgacctgaaaggtatgcgctcggtgtgcgggcgaaatatccttgcatatctcgctcatgagcaaggacgaggtgttcgagctgagcagcacatcatcatcgcatatctctgcaaggcggcagaacatttcctgcttgcgctcgagtatctccgggatattttcgataaccatgtacgcattcttgcaagcctcctccaacgtggaaacgtaggtaatgcgtgctctggcttggtcggcttccgtctgcatcaggcgaccggtctgaacgtagaattccagaaagcgttcaatacgttcggcacagcgttcgcgggatgaaaggttgcggctgtatgccgtgacctccttgccgtaaacggcattgcggaatgcgatcatgctaccttgtgtcccgactccaataattgcaactttgtttttcacttggttacctccttttcttttgctgcgaaaagttcgcgtactgccttgtgcaaagcaagcggcgtgccaactgaaccaagaaaaagatagaaggcgcaaaagcggggaaaacagcactttactgtgatagggtatctgataaaagcaagaaaatgcgcatcttttccttgcacaagaaaggaaaagatgcgcatcaaaattttgcagatctactctgtggcaattccaagacgaagcatacgctgggtcaaattttggcgctggatgccaagagaaagtgccgtttgcgataggttccactggtgctgctcaagtgctcgaagaattaactctcgctggaaacggcgcaacgcttccggcagcggcacagaaatctgcatggaagtaaatggagcgtccttcgttttgcgcggcaggtaggcgggatagccatcctcggtcagttcggtatccaactcgctgatacgcaacatcaggttacggatcacatgctccagttcacgggtgtttccgttccagtcgccattcaggagacgagacctgagtgcaggagatatgcctgagatgtttttgcgaaactcccggttgtagcggcggataaacatttcggagaggtcgagaatgtcctcgtgccgctcacgcaacggtgggatcgtaagaacaaagtcagatatccgataaaaaaggtcgcgtcgcatacgattctcctgcagcagcgtttcaacggtttcgttgctggcgcagatcaatcggcagcggatcggttcttctttgagactgccgaccgggcggatgcacttttcctgcagcgcgcgcaggagctttgcctgcatggcgacgctcatggagttgatctcgtcaagaaaaagagttccgtctcctgcggcagagaaaagcccctgccggtccatcgcgccggtgaatgcgccgcgcacgctaccaaagagcgtactctcaagcaggttttccggaatagcggcgcaattgacggcaacaaatttccggttctcacggccaaagttgtggatactttgggcaaggacttctttgccggtgccggtctcgcctatgataaggatggaaccgtctgtcgcagcgacggtctgcgcctcacgcagcagctctcgcgtttttggagatttgccgacaaaatcggaaaaggtgtaactagttccgtcggctttgcgtatctccgctacaggcagatcctctgctgtacgtgcaccgcgtttttcctcgatcgtttcgtataaaagctcgcgtagtatctcctcgttgcggctgatcgtatagacaccgatgactttcccgtttcgaatcacagggtaggtgctgtagtaaatgtagacaggaatatccccgacgtaggcatgcggccggtatgcgttgagaatcggtttgccggtatcggaaacctgttggtgctcggatatctcacggttggagtgcgtgtaagcttcccaggagaccattcccaacacgtcggaagcgcgcatatgttccatccgttccttggcggggttgaattcgacgatgcggcaatcctgatcggtgagaataacaccttcgctgacatgctcgataatggattcgagacatgccagtttttcctccaacgcctgcatgcgtgcctgctcctcctgcgtcacaatgggtccctcctgatcacaataaattttgactgaaagctcagcctccggcagtttttctatcggtcaagcatggggccaaacgcggcatgggcttgcatggggtgaggtgtaaactgccgaccgtcatttacgtagtgcttgcatccgagagaaaagcaatatctccagcctcatattatgttatcatcataacataatatgggaaaacgccgcaatagcagattgagccaaaagaaatcctggctttccgtctcctatcagaatagtgtgtggtaactttattctaccagaggctgcaaactatgtcttcttttatgcattctcctttttgcacagttaatcctgcattatcctgcgctcgatcctgtcaccggacggtgggctttcggctgctcaattttcagtccttccatgagccggcggtactgctgcggtgttaaagtcttcacctcagattctgagcgcgaccattgatacgcaccctgttccagtcgtttgtacagcaggatgaagcatccttttcccagtacaagcccttgatacggtttcgccgccgtccgcagaacggaaataatgtgttgctaagcggatccagtttaaacggctgctggacgagccgcaccaggccatctatgtttcattcgcagctgtgatgggctttcatgagaagttgataattgcatgaccgtccgaacggggtatgttctccggcgaagtgctgcatccagcgcaccaaggagaacaaaacgccgggagcgatcctccgggcaggaacgacgttcggaaagagcggcaaaatcgaatgtaaaaatcaaagcaagtgaaaacggcgaaatagctttctgcctcgtgtggttatctgcaaggaacagagtgctattcagcagcgaacggcgtttgccgttcagaatgatgtttcgccgtttcacgcaaagacacatcaaacggcaaaagcggaaggtgctgcctgtgaccagtacatcatcggcggtatttccagtggaaagccgtgcatcaaaaatcagcgccctatggcgaacgggtgtcacgatttgacaagcctattttaccatagagcgcatcgaaaaaacagaaggaacatttgaatatgagaaaatctgaaacctatcgcaacgagatcaagccctacattgtccgcgctggaatgaccatgactgaggcggtggagcttgcagacgcgctggggtatgacatcgtgtggcagaagcggaaggatgtgaagtgatatcaaatctacggcttatggatacatccgcgtttcgaccaaagagcaaaatgagaatcggtgggtgattgccttgcgggaagtcagggttagtgaaaagaatatttacatggacgagtaatccagcaaggatttaaaccgcccgcaagataagttgccccagtctttcgccatcgaactgcattgcgctgccccggttttccctccattccacccctcccgaatccccacagctttgccctcgtcctccgtcactatgtacaatccagtccccacctttttgacagatccagcattgcaaagcagaatctttcccaccgtgccaatgttatctgtgacgggtcgccctcgcggattctcatggtgcggcggatctccttgggaatgacaacgcggccaaggtcgtcgatccgtctgacaattccggttgctttcatctatcaaaactccttttatactcgataaactgcacttagtctttggaaaagccgccaatttatccaaagccgcggctggaagattttgcagcgcgctgaggatgatgttttttaacaaaataaggtgaaagaggagcgaatgtggacattgtgcacagctaaggtcggattttagatgatgaaactgaaagaagtgacagaccgaaaaaactttgaaaaatacgcttgacatttcctgggatgcgcgtataataacgtactgttccgcgaatggagcgtgcaccttgtaaattaaacaacgaaactttgacaagcaccagatgaaaaactgtgcgaaatgcacagagcttgcggaggaccggttaagtcaatt

SEQ ID NO: 10108 - DNA, 58805 bp, Unknown
  gut microbiota DNA sequence
ctccttgggaaccatcagttccatcttcaagatgggctggctctcgtcgtcgttgaacgcgagcgtgaccgtgtaggtcccgttgcggcgcggcgcgatgtcggactggatctgcgcgcggcgcttgagcttctggttgaagatcgtgatgttcttgtcggcgcgcaggcgcacagagtagggaaggctcgactcgcagatcgcgccgttgtgcagccccttttcggtgatggcgtagagtccgtcgtccgaaagcgtcaaatgctgcgactcgaccaaattgctcaggcattcggaaaagtcaaaaaagtcgatgccgtcgtcgcacatcgtcagctcttgcatggcctcgaacgggaccggctcgatgagccgggcagcaacatacagaatgagaaatttgatctccagtttgtcctggataaaaccgacgcgccccatagcgcacctcctcgggtgaatttacagcgatcataacacaaaatgactgccaataccacaaaaagttgtcggtatcggtcggccaaaaactatatttagtatagcacaccttttttcgcttgtataggtctttttcaaaatcggcaaaaacgcggcacacccatcttcgcgtacggcatagactggggtgaaagaaaggcgcggtcgcgcccgactttccagtacttaaaataggaggtattcttgctttatggctgataaagtagcagcaggccacgtcggcggcgcgaacggcgcgcgcgaggcggtctgtattcatacgaaaaagatctattcatcctgccgcgacaaggattgcattgaggatttgcgcttttaccccacggccacggcgcagagcgttttgagcacggcgcaggggctgcgcggcggcagcgccgagctgatctacacctttgtggacgtcgagcccgtcaactttaaccgcgggtactacaccgtcgacatgcactttttctaccgcatcaccttgcaggcgctcaacggcagcacgcgctacacggagatcgagggtcttgcgacctttgataagcgcgtcgtgctcttcggcagcgagagcggcgcgaagatctactcttccatccccgaggcaaacgctatcgacgcgccgctgaacctgacggcaaatctcccgaccgcggtggtcgaggtcgtcgacccgatgctgctgtgcgcgcactttgccgacaactgcaactgccgctgcggctgtgaccgcggtacgctcggcggcgtgcccgcgggcattctggcagcattcgacgagccgatcatcttcgacgagtccgcgattcgccgcgtgtgcatctcgctcggccagttttcgactgtgcgcttagagcgcgacacgcagcttctcatccccgtgtacgactactgcattccgtccaacgagtgcacgcttgccggcggcgactgcagctgcgaggacccgtgcaaggtcttcgatgcggtggaattcccgatggacgatttcttcccgcccgcggcggcgcccggcggctgcggctgcgcgtgcccctgcggcgaacagtaaaaatcaaacgcgaaaaaacggggaatttccccgttttttcttttgcccgaaacgggacaaaccggcataagcgtgtccaccgcctcatagattggactaacaccaaagaagggaagtgggaacggtggatcgtctggaacggatctatcgctacgaacaatcgtgcgagtttttaccgcaccggctcaaaagtctcgccctgtcgctgccggacaagcagaaagagcgcgtcgaggagctgcgccttcgcgtgatgcacccgctgacagtgctgacactggagggcgagctgaacgccgcgccggacggacgtgcgtcgctcgtgacggcggaagacctcgaacagatgctcggtgcggtgacggagtattcgcgttatgcctgcatcgaaacactgcggcagggctttttgccgctgcggggcgggttccgcctcggtgtgtgcggcagcgccgtcgtgcgcgacggcgaggtgagcaatctgaaggacatttcgtcgctcgcgctgcgcatcgtgtgcgagcacatcgggctcggaagcgacattgcgccgcagctcttcagcgctgacgggcggtttttgagcacgctcattctctcgccgcccggcggcgggaaaacgacgctgctgcgtgacctcatccgcgtgctgtcgctcggggatgccgaacaccgcgcgctgcgcgtggcggtcatcgacgagcgctgcgagctcgccgtgtgctgcaaggggcgagcgcagatggagctcggcaaccacacggacgtgctctcgctctgcccaaaggccgtcggcatcccgatggtgctgcgcggcatgaacccgcaggtcatcgcggtcgatgagatcacggcggaggaggatatccgcgcaatgtgcctggccgcgaactgcggcgtcgggctgctcgcgagcatccacgccgcgagcgttgacgagctgcaccagaagccgctctggcgggaacttctgcgcgcgagggtgtttcgccgctgcatcgtcatccgctcgaacggcggtgcacgttcttacgaagtgggtgacctgccatgctccgactgacgggcagtgcactgattctcggcgcagtgctgtggctgcaaaggagtttccatttacgtactttactgcggcaaaggacgcttcgcacgctttccggtgcgtttctcgcactcgagagcgccgtccgattgacgctgacgccgctgcccgcgctgctgcggcacttgagctgcgaaccggaagccgcgggcttctttgaaggtgtgaccgccaatcttgcgcgcggcgaaccgcttgcctctgcatgggagcacgccgcaaagactctgcccatcgccgcgcgggagcgggagactgtatcggcgctgggacacgcgctcggcggggatgaggaaagcgtctgcgccgcgctgacgctcgcggcaagcgagctctcgcgccttgaagaggagctgcggcaaagggagcgcgaaacgggccgcatcacggcggcactgtgcctcggaggcggggcaatgctctgtattctgctgctataacgttattgaaaaggataaacgctttacataaggaagacgtctatggatattgacctcgtgttcaagatcgcagcggtgggcatcgtcgtcgccgtgctcaatcagctgctcgtgcgctcggaccgtccggatcaggcaatgctcgtgagcctggccggtctcatcacgacgatgatgctgctcgtgcgggagatcagctcgctgttcgatctcatcaagagcctgttcggattttaggatggagctgctcatcaagcttgcggcgctgagcctgtgcgtgagcgccgtgacggcgctgctcaaaaaaagcgacgaagcgctctcgcttcttctgctgctcgcggcggtgctcgtcggctgcgcgatgctgctgcccgcgctctccgacctctttgacttctgcgagcgggtgctgttgctcacggatctgccgctcacgctgttcgtgccggtcgtcaaagtcacggccatcgcgctggtagcgcgcttttcctgcgcgctgtgcgcggatgcggggcagagcgcgctgtcaagtctgctcgccgtggcggggacgctgtgcgcgctcgtctgcgcgctgccgctcatggaggcgctgctcgagatggtggagggatttctatgaaaaagctgctctgcctgctttttgccgcgtttctcctctgcgtgagcgcgtcagcgcttgagctgccgtcagaactggatgacgtcgtgccgcgcgagctcatcgacaacgccgagacggggaacgaccttctcctgcgcggcggacagtaccttttttcgcactttcgcgcggcattgcaggatgcggtggcaaattccctgcgcggcgcgatggcgctgatgctgctctcgctcttgtgcgggctcgtcgagagcacggcggagagcgcgggggagacgcccgcgcgatacgcgggctatctcggcgtgctgggcgcggtggcgctctcagcaggggacttaagcgcgctcatcggcctcggcgtcgagacgatggacgagctttcgaccatggcaaagctcctgctgccgacgatcgccgcagcgatggcgggcgggggctgtgtgggctcggcaagcgtctggcaggtcggcgcactgatgctgagcgatatctttctttcgctgatgcgcgatgtgctcgtgccggtgctctactgcatgatcggcacggcggccgcgggcgcgcttttggaacagagccgcttatcgctgctctccaagggcatcggcaagctgctctcgtggggcttgagcgcgattctgatcgtatttaccgcgtttttgtcggtctcgaacctgctggccggttctgccgaccggctcgcggtcaaggtgggcaaaaccgtcatctccggcgcggtgcccgtcgtcggcggaatattgtccgacgcgacggaggccgtcgccgccgcggcgctcacgctgcgcgggacgctcggtgtgctgggcgtattttcggtgctggcgctgtgccttgtgccgctgctgcgcatggcggtgcagtatcttttttatcagctcgcggcgtttttcagcggcatggtggggtcacaatcgctcagcaagtttttagagcagctctcctccgcgttttcactgatgctggcgatgacggcgggcggggcgttcttgctgctcgtgtcgcttttgattgcaatgatgatggtggtgacggtatgacgtttcttcgctcgtggcttttaagcgtgacagcctgcgcggtactggtaagcatcgtccagcagctcacggacggcggcacgatgaaaaagatcgtgcgttttgtcggcgggatggtgctgatgcttgcgatgctgcgcccgctgctctcactcacgttcgatctgccggagctcgacggcggtcattaccgcgaggcggtcgatgcgctgaagcaaacgctgaacgccgagcaggacagtgcgctcggtgatagcatagctgcgcagacgcaggcatatattgaggacaaagccagctccttaggtctgagcgtgcgcgccgaagtgcagaccgctttacgcgacggcgtaccgtttccggacagcgtcacactgtacggagaaaacagcgcggcgctcggcgcgtacatcgtacaggagcttggcattgcagaggagaatcagctatggatcgaaccgaagtgaacgcatcgcccgtgcagaaggcgctgcaaggcatcaagaagtacaaatacgtcctcctgacggcgctgctcggcgtgctgctgttgctgctgccgcagaacgagaaagcggcagactcaggctccgcggcaccgtccgccgcggaaaatttcgaccgcgaggcgctgcaaaacgagatggaggatattctttcctcgctcgacggcgtcgggaagctctcgcttatgctgacggtcgagggcggcggcgcttacgagctggctcaggatgagaccgcgtcgctcaaagcccgaggggaggaggtcgacgagcagacgcgaaagacggagaccgttgtgctcggcagtggcacgagcgccgaggtcgtcgtgacccacagccgctatccgcgctttgtcggcgcgctcatcgtgtgcgagggcggagaccgcgcggatgtccagctcaaggtgacgcaggccgtcagcgcgctgacggggctttcgtccgagcgcatctccgttgttaaaggaacgtcatgaaactacaatatttttattatgcaaaacgcagggaggaaacagctatgaagcaattatggaagcggaacgcagtggtcggcacgatcctggtctttgtctgcgcggcaatctttctgaatggaaagtacgccgaaaaggtcgacaagcccacaaaggtcttgggtcagtccgagcttgtgagtacagacagcgacgccgccgaggtctcggcaaacgcagaggggaaggactactttgcctcagcccgcctgacgcgccagcaggcgcgcgacagcgcgctgtcgctcttgaaggaggcgagtgagaacgacgacgtggatgccgagaccgcgagcgaggcggcaaagagcatcgaaacgcttgcttcctatacgctcagtgaggcgcagatcgaaaacatggtcacggccaagggctatgaggactgcgtcgtcttcatgtccgaagacggtgtgagcgtggtcgtctcgacgggggaagaggggcttcagaccgaggacattgcccgcatcacggacatcgtcaagcaggagacggggctcagtgcagagagcatcaagatcatggaagtaaattagctgttgtaattttgggaaaaagatgataaaatactttcgatatgagcattcacaaacaaggagaggatatctgaatggctgagaatcgagagtatctgacccgcgccgaggaaaacggcagcatcaacatcgcagaagacgtggtcgccgcgatcgccgccgacgctatcggcgagatcgaaggcgttggctccatgtgccagaatatgaccgaacagatcaccgagcagttcacgggcaaaaagggcctgcgcggcgtgcgcgccgaggtcaaggacggcgagatcatcgtcgacgtctacctgatggtgcgctatggctacgccatccccgagaccgcgcgcaaggtgcaggacagcgtgtccgccgccgtgagcggcatgacgggctacaacgtccacgcggtcaatgtccacgtcggcgggatcagcttcaactaaagaaagataagatcaacagataaaggaacagacgagaatgattcgcaatacagcgcgagagatcgcagtgcatcttgcatatgaactgagctttacggataagacggtgaaagagcttctcgacgagcggctgacgaaggaatacttcgacacgctcaaggatgaggacgacatctacgaaaaggcccccggcgccgcgcagacggaatacatccgctccatcgtttccggtgttgccgagcacgcgccggagttggacggctacatcgccaagtacgccaagggctggagctttgaccgcatcccactcgtcgcctcggcgatcatgcgcgttgcgatgtacgaatcgctctaccgcagcgacattccgacgcgcgtggccgtcaacgaggccgtggagctcgctaagaagtatgaaacgcctgaaacagtgaagttcatcaacggcatcctcggcagcttcgttcgcggcgagatcagcgcggaataaggcattgccacaaaaagcagagtaccgacaggcgctctgcttttcttccgtttttcattttgttttgagagaggggtgacgcggcgtggcgcaggagcagatgatcttcagcgtatcggaagccaacaatttcatcaaggcgctactcgacgccgtgccgcagctccagaccattttcgtgcgcggcgagatctcgaactacaagctctatccctccgggcaccattacttcacgctcaaggacgaggggagcgcgctcaaatgcgtgatgttccgcggcatggcggggaagctccgcttccgcccggaaaacggcatgaaggtcatcgcctttggccgcatcggcgtgttcccgcgcgacggcgcgtaccagctctactgttctgagctcagcgtcgagggcgtgggtgacctgcacgtcgctttcgagcagctcaaggaaaagctcttcaaggaggggctttttgccccagaacataaaaagcccttgccaaaatatcccaagcgcattgccatcatcacctcatccgcgggcgcggcggtgcatgatatgctgcgcattttgaatgcgcgctggccgatgagcgaagtcgtgctcctgcctgtgcgcgtgcagggagcagaggcgccgccggagatcgcaggcgcgctgcgctacgcaaacaaatggcaggtcgccgacctcatcatcacggggcgcggcggcgggtcgattgaagatctgtgggcgttcaacgatgagcgcgtggcgcgcgcgatttatgcctccgacattccggtcatctccgccgtcgggcatgagcccgacgtgacgatcgccgattttgttgccgatgcacgggcgtcgacgccgtcgaacgcggcggagatcgccgtgccggaccagcgcgaaatttaccgccggctcgacgcgctgcaaacgcgcatggtgcagagcgggcaaaagcgcgtgaaagccctgcgcgagcagtttgaaaagacgtcccgcagccgtgcgctgcaagaccccatggcatttatcgacgacaagcggatgctgctcgactacacgcagaaaaaccttgccgcactcgcgcagcatcagatggcgcagcgcacacagcagtttacagcgcttgcggccaagctcgacgcgctgagtccgctcaaggtcctcggccgcggctacgccgtggcgcgaaatgaacagggacaaattctgcgtgcggcacaggaggccgcagccggcgaaaaaatcgaggtactgctcgggcagggaagtctcaactgcacggtgaacgcgtgcaatatgggaggaaatgacgatggcaaaaacgtttgaagacaatatcgcgcgtctcgaagagatcgtgacggcgcttgaaaaaggcgacgcaaagctcgccgattccctcaagctctttgaagaggggacgaagctcgtgcacgactgcggcgcgatgctcgacaaggccgagcagaaggtcgcaaagctctctaagggcgcggacggcgcgccggtcgagagcccattcatttcggaggagtaatcaatggacgaaaagctgttttccgcccgcatggcggagtataagtcggcggtggacaagtatcttgacgcctgccttgaggaaacgcagtgcgcaagctatcacaagctgaccgattcgatgcactacagtctgaccgcgggcggcaagcgtctgcgcgcgatcttagtgctcgaattctgccgcatctgcgggggagacgtcgaaaaggcgctgcccgtggcctgcggcgttgagatgctgcacacgtattcgctcatccacgacgatctgcccgtgatggacaacgatgatctgcgccgcggtaagccgtcgaaccacaaggtcttcggcgaatgcacggcgacgctcgcgggcgacgcgctgcaggcgctggcatttgaaacagtcctgaaggccgacctccccgcgctgcgcgtgctcaaatgcgcacaggtcctggcaaatgccgcgggacacgagggcatctgcggcggccagcagctcgaccttgagtgggagggcaagattctgagcgcgccggagctcgaggaaatttatctgcgcaagacgagcgcgcttatccgcgcggcgtgcctgatgggcgtggccgcggcgggcggcacgaaggagcaggaggaggccgcggccagctacgccgacaacttcggcttcgcgtttcagctgcgcgacgacatgctcgatgtcatcggcgatgaaaagacgttcggcaagcccatcggctcggacagggaagaggggaagacgacgtttgttgacattttaggtctcaacggctgccagcgcgtcatcgaggcgcacagtgagagcgcggtcgaagcgctgggcgacatggaggacaccgattttctcattcacctcgtccgtgtgcttgaaaaacgggagcaataaataaaaaatcccgcagaaaacgccaaaaaagtggaaaatcatacaaaagtgcgcatttggtgttgacaagcggaatcgtcggtgctacgatacgcacattgaaacggaacccaccccgtgtggaatgctcgaaggaaaggatccattggcatgaagacttcgtactctgccaactgcatgatgatgccgatgatgcgcatgttcagcatgtgcatgctttgtcatggagaaaatggtcatttcctttcagaaactgtctgagaaaaacagcgaagcggcagcggaaggtcaatgacctcccgctgttttttactgctcgaacagcatacactccccgcggtctgtccgttccaaaaagaagctattataaaataagtaaggagaacaaaacgatgaaaaagcattctattaagctgaccgcccttgtccttgcactggtcctcactgccgctctggccctgaccggctgcggctccaagagcgatgactccgacggtgccaccaccatccagatcgccgtccccaacgacacgaccaacgaagcccgcgcgctgctgctgctccaggacaacggcatcatcaagctcgctgacggtgccggcatcaccgccaccaagaacgacattgtcgaaaacccgtacaacgtcgagatcgtggagaccgaggccgcgcagatccccaacatcctgcaggacgttgactacgccgtcatcaactccaactacgccatcaacgcgggcctgaaccccgtggccgactccctcgtgatcgaaggctccgcctccgcttacgccaacattctggccgtgaaggaaggcaacgagtcctctcccaaggtccttgccctgatcgccgctctggagagccagcaggtcgtcgactacatcaacgagaagtatgacggctccgttgtcagcaccgtggataccccgaccgacggctttgacgccactgtcgactacgacgctctgagcggtgagaccatctccatcgccgcttctccgaccccgcacgctgagatcctcgaggtcgtgaaggaaattcttgctgaaaagaacatcactctcgacattcaggtctacaatgactatgtcgtgcccaacaccgttgtcgaagacggcactgtcgacgccaactacttccagcacaagccctatctcgacgatttcaacgccgagaacaacacccacatcgtctccgttgccgccatccacgtcgagcccatgggcctgtacggcggcaagcagaccacgctcgatgcgctgagcgccaagtaagaaagaaaggagggagcgttcttgatcgaactgaagcatctaagcaaaacctttgaaacagccggcggacgggtagacgcgctcaaggacgtctccctgaccattccagacggcgacgtctacggcatcatcggcatgagcggcgccggcaaatccacgctcgtgcgctgcatcaatatgctcgagcgcccgacggagggcgaggtcatcgtgaacggacagcgtctggacacgatgacccccgcgcagctccgcgcggcgcggcgcgagatcacgatgatcttccagcgcttcaacctgctgatgcagcgaaactgtctcgctaacgtctgctttccgatggagctttccggcttgcggggagagaagaagtggcgcgaacagcgagctctggaactcctcgagatcgtggggctcaaggataaggccaaggcctatcccgcgcagctctccggcggacagcagcagcgcgtggccatcgcccgcgccctcgccacgaaccccaaagttctgctctgcgacgaggccacgagcgcgctcgaccccaagacgacgcgccagatcctcgagctgatcggcgacatcaacaaaaagcttggcatcaccgtcgtcatcatcacacaccagatgagcgtggtgaaggaggtctgcaatcacgttgcgatcctcgacgacggcgaagtcgtggaagagggccttgtttctgccgtcttttccgcgcccaagtccgcggcggcgcgccacctcgtgttcccgcgcggcgcggacatcgacgtgtccgacccccagcagcagcgccgcatccgcctcatcttccgcagcgcgaagacgacatccattccgctcgtcgcgcgccttgcgaccgaagagggcatcagcgcgacggtcatttcggccaacacgcagaagctatccgaagaggtgtacggcagcatgctcctcggcgtgccgaacgcgcagttcgagcaggccatggactttttaagaagcattgaaaatcttcaggtagaggaggcgagcgtcgatgtacagtaatctcttttccccggactccatcgcagagctcaccgtcgccatgcagacgcagttccccaaggcgatctgggagacgttttatgtgacgctcctttcgacggcgctggccgtcgtcattggccttccgctgggcgtgctgctcgtagcgggggagaagggtggcgttctgccgcttcccaaggccttgatgagcattctgaacgtcatcatcaacctgctgcgctcgatcccgttcctcatcttaatgatcatggtcttcccgctctcgcgccttatcatcggcacgaccgtcggcaccaccgcgaccatcgttccgctggtcgtggcggcgttcccgttcgtcgcgcgccttgttgaaagcagcctgcgcgaggtcgaccccaacatcatcgaggccgcgcagagcatgggcgcaacgcccatgcagatcatctgcaaggtgatgatccccgagagcgttccctcgctgctccagaacttcaccatcgcactgacgaccatcctcggctactcggcgatgagcggcatcatcggcggcggcggcctcggcaaaatcgccatcgactacggctactatcgctacaagtaccttgtgatgttcgcagcggtcgtgctgctcatcattctggtgcagatcttccagtccttgggcacgcaccttgcggccaagagcgacaagcgcctcaagaaataaccggatatcctatcctgcaaagcgcctcaaccgtacggttgaggcgcttttttgtcatttttcgcaatttgacagagaaaaatgtgtcaatttttgaaagcaaaatgcagcaaaaattgcaaaatcccttgtcatgtgggaaaagggctgttataataagaatagaatgcaatgcaagtcttcgcgatttgcatattttttacggagaaattgcgtgaacagttttcaggaattggtccagtccatcgactggggctcgctgaccgacgcgcttttgcgcgtgctcggcgtctttttatgcttgacggtgcacgagacctgtcacggtcttgcagcctatgcactcggcgatccgacggccaagcgcgagcaccgcttgagcttaaacccgctgcaccatatcgactggttcggcttggctgccatgctgctcgtcggcttcggctgggcaaagcccgtgccggtcgacatgcggtatttcaaaaagccgaagcagggtatggccatcacagcgctggcggggccggtgtcgaatctgctgctggcgatgctgctcttgctcggcgcgcgcatcacgatcgcgcactatgtcgataccgcgttttgcagcggccttttgaatttccttgcgatgacggcgtacatgagcgtcggtctggggcttttcaacctcatccccatctcgccgctcgacgggtcgaaggtgctcttcgcctttctgcccgaccgcgcgtacatgacgctgatgcggtatgaaaaatacggcatggccgtgctttttgtgctcgtctggctcggcgtgggaaacaatatcctcagcgagggcatctaccgcgtgtacgagcttctggtcaactggatcgtatattgataaagtgagaggaatgtcatggacaatcccgttttcaagctggagggcgtggtgcacgagcgcagcgcggaggcgctgcaggactttgaagggccgctcgacctcattctcttcctgctgtcgaaaaataaaatagagatccaggacattcccatcgcgctgatcctggaccagtaccttgcgtatctcgagcagcgaaagcagctcgatctcgaggtcgcgagcgaattcatcacgatggcggcacatttaatgtacatcaaaacgcgcatgctgctttcgcttgaggatgagcaggcgcagagcgagatggacgagctcattgcctcgctcaaagagcgccagcaaaaggacacgtaccttcgcatcaagacgctgaccgaaacgctcggcccgatgggcgagtttggccgcagcatcatgacgcgccagcccgagcccatgcagcgcggcaaaatctacgagtacagtcatgaaaaggccgacctcgtgctcgccatgcagacgatcatggagcgcggggaaaagctggccgcgccgccgagcgccgcgctgagcgagatcgtgcgccgcgagccgtatcccgtcaagggcaaggcggaggaaattctgcaccggctcaaggagttcggcatgacgcgcttcaagctgctgttccgcggcagccgcagccgcagcgagatcgtggcaacgtttatcgccgttctggagctctgccgcgaaaaggtcatccatctggccggttctgacacggactgcaccgtggagtgcggggacgacgcccccgaccgtatcaatctgtaaaaagcgaggaacgctatgtctttggaatctttggacctgcgcgaggtcgagtcggccatcgagggcattttgttcgccagcggcgaaccgcttcccatcgaccgcatctgccttgcgctcgatttggaccgtccgaccgcggaacaggtattgcaaaagctcggcgattactacgcctttgagcgccgcggcatccggctcgtccgcatggaggacagctatcagctctgctcgtcgccggactatgccgacgtcatccgcaaggcgtttgagatccgcaagaccgccaagctctctcagcccgcgctggaggtgctgacgatcatcgcctactaccagcccacgacccgcgcctacattgatcaggtgcgcggcgtggacagctcgtacaccgtgggcctgctgcttgagcgcgggctcattgaggagtgcggacgtttgcaggtgccgggacggccgaggctgtaccgcacgacgaaaaagttcctgcgcgacttccacttgggttcgctcgaggagatgccggagatgccgggtcttgaggccgacggtcagctccgcatgacggaggacggcacgatcctcgaccccggcgccatgacggaaaaagaaggcagcattcccgaaaacggggaacactgaccgcgtaaagcataaaaaccgcgtgaagcgtaaaaagagggaggtggtcgattgactgcgctgaaggtaattggcatcatcctgctcatttttattttgatcggctttctgcgtgtgggcgcgttgatgcagttcggcgacgagctgcgcgtgcagctttcggtcggcccgttccgcttcacgctgctgccagcaaaggaaaagaaagaaacgccgaaaaaaaaggcaaaggagaagaaaccaaagtcagagggagaagaggtgaagcaaaagaaaaagccctcgctccccaagccgacaaaagaggagctcagggacctcatcacgacggcgctctcggcgctcaaggagacagcgaaacgcacctgcaagcgccttcgcatcgacccgctggaaattctcgtcgtctttggcggcacggaccccgcggatatcgcgcagacctacggctatgcgagcgccgcgatgtggggggtgatgccgcaccttgaagacctcttccatatccctgatccctcactgcacctgcgcatggactacagctctgaaaagacgcacgcagagggtgccgttggcctgtcgcttcgcatccgcgacgggctgcacatctcgcttgcgctgctcattccgatgctcaaatggtacctgcgctataaaaaggcgcataaaaacgacgctcccgcggaaaaaccaacagagagcactccgcaaaacagtgaacacagtgaaaaactgaccgcataaaaagaaaggatgaacctcatggaaaacatcgaaaagaagaccccgctcaacgatctcatggacaccacgatggataagatccgtgatatggtcgattccaacaccatcatcggcgagccgatcacgacgcccgacggcgtaacggtcattcccgtttcgcgcgtgagcttcggcttcggcgcaggcggcggcgactacggcaagaccgacaccgcacacttcggcggcggcgcaggtgcgggcgtcaaggtcgaccccgtcgcgttcctcgtcatcaaggacggtctgacgcgcgtgatgcccgtggccatccctgcggcagcaacggtcgaccgcgtgcttgatcttgtgccggaagtgctcgaccgcgtgcagaatttcgtggacaagaagagagaagagaaagatatctactgatttcgggcataataggggcattccgaatgaaggagtgatcccatgccgcgttttgcccgatgcgtatttgccgttttccttgctgtttcctgcctgtcaagcagtttgacctgtcaggctgctgtgcctgaaactgccgccgccgcattcattttgatggaggcggacagcgggcgggtgctggcgtcgcgcaatgaaacgcaggagcgcagcatcgcgagcacgacgaagatcatgacctgcttaatcgcgctggagcacagcgaactcacggagcaggtcacggtcaaacgcgagcatttacgcgaaggctcgtcgatgtaccttctcgagggcgaaacgctcacgatggaagagctcctctacgggctgatgctgccgtccggcaacgacgcggcggagtgcatcgccgcccactgcggcgggagcggcggcagcgcgcagtttgtccgatggatgaacgaaaaggcgaaagccctcggcatgaagcacacgtcatttgccaacccgagcggtctcgacgaaatggggcacagctcctgtgccctcgatatggcgcgccttgcggcctacgccatgcagaatccgacgttcgcgcgcatcgtctcgacgcgcacggcgagcgtcggcacgcgcacgatgacgaaccacaataagctgctcgcgtcgtactccggctgcgtcggtctcaagaccggctacaccggcgacgcagggcgcacactcgtcacctgtgccgagcgcggcgggatgcgcatgatcgccgtcacgctgcacgacggcagcgattgggcggatcacgcggcactctacgactacggcttttcggcgtatgcgctctcaagcggtgcgaaaaaaggcgaggcctacggcagcgtaagcgtcgacgggcagagtgtgtccgccgtggcggcggagagcttccgctatcccaccgcggaaaatgaagcattgagcgtgcgcgccgagctgccgcaaaccatctccgcccccgtgcggaagggacaaacgttcggcacgctcgtcatctcctgcggcgagactgagatcggaagagttgaccttgtcagcgcgcgcagcgtacaggcgcaggaaacaaagagcaaaacaagcaaaaataagtcgctggcggaaaagctctggcaatttctgtcggcaaagtaaaggagggatcgacctggccgaagcaagaattcaaaagctcatcgccgaatcggggctctgctcccgtcgcaccgccgagcagtgtatcgccgcgggacgcgtgcacgtgaacggcaagactgcgcttctcgggcagaaggccgaccccgaagtcgacgaaattaccgtcgacggcaggccgctcacacaggaggggcagaagcgctacctgatgctcaacaagccgcgcggctatgtctgcacgctctctgacgaaaaagggcgaaagaccgtcgccgagctcgtcagagactgcggcgcgcgcgtctatcccgtcgggcggctcgacctcgactccgagggactgctgcttttgacgaacgacggcgaatggatgcagcatcttctgcacccgcgctacgaggtcaacaaggtctacgaggtcagcgtcgcgggcgaggtcaggggagcggcagaagcgctcgcttccatgacacagctcgacggcgagcccatccggcccgcgcaggtgcgcgtgctgcggcaggggagggacaccgccgttctctccatcaccatccatgaaggaaaaaaccggcagatccggcgcatgtgcgccaccgccggattacacgtcaagcgcctaaagcgcgtgcaggagcacgcgctcaaactcggggctcttcccgtcggcgtgtggcgcgatctaacggagcaggagctccaagcaacaaaatcaaagtaacagaggacgatcttatgacgaagaatatcttacataatatcgaaaagaacatgagcagcttttccaaggggcagaagctcatcgcccgcttcattctggaaaactacgacaaggccgcgtttatgacggccagcaagctcggcaagaccgtgcaggtcagcgagtcgaccgtcgtgcgctttgccacccagctcggctacgaggggtatccgagcatgcagcgtgcattgcaggagatgattcgcggcaagctcacgagcatccagcgcattcaggcgtcggacggcgagctcgcagggtccgatctgatgacgaacgtcctgcagcgcgacatggagaagatccgcatggccatcgaccagaccgacggcgcggaatttgagcgcgtggtcgacacgatcatcggcgcgcgccgcatctacatcgtgggcttccgttcgtcctcgtttctggcagggtacttaaacttctacttccgcctgatcttcgacaacgtcactctggtcaacggcggcgcggccggctcgttcgaccagctcttccgcgtctccaaagacgatgtggtcatcggtatctgcttcccgcgctacagtgagcttgcgctcaagaccatccagtttgcgcgcgaccgcggcgcgacgatcgtcggcgtaacggacagcgagatgtcgcccatcaaccagatgtccagcaattcgctgctcgtgcgcagcgagatgatctcgttcgtcgactcgctggcggcgcccatgagcatgctcaacgcactcattctggccgtggccaacaagaagggcgcagacatctccgcgacgttctccgaactcgagcacatctgggagcgcttcgacattttcggcaagatcgaagatgaataaggcgatcgttgtcatcggcggcggcgcgggcggcatgatggccgcgatctgcgccgcgcgcaagggtgcgcacgtgacgctgctcgatccaaacgagcgcctcggcaaaaaggtgaacatcaccggcaagggccgctgcaacgtgacaaacgacagcacttgcgaagagctgctcgcccacgtgccgcagaacccgcggtttttatactccgtgttttcccgcttcgacgggcacgacgccatcgattttttcgaggggctcggtgtgccgctcaaggtcgagcgcggcaagcgcgtgtttcccgtgtccgaccggtcattcgacatcacagcggcgcttgagcgcgagctcaagcgtctgcacgtcaagctcgtgcgcgaccgcgcgctcggtatttcggtcgaagacggccatgtcgccgccgtcaagagcgaaaaaggggactacaccgcctccgccgtcattctggcgacgggcgggctgtcctatcccgcgacgggctcgacgggcgacggcttccgcatggcggaagcgctcggccacacagtcacgccgctgcgcggctcactcgtgccgctcgaggcacgcgaatgcgcggtgctgcaagggctgagcctgcgcaacgttgcgctgacggtatacgaaaacaacaaaaagatccactcggatttcggcgaaatgctgttcacgcacttcggcgtgagcgggccgctcatcctgtcggccagcgcgcacatgcggcatttcgacaaaaagcagtaccgactggagatcgacctcaagcccgcgctcgacgagcaaatgctcgacaagcgcctgctgtcggattttgaaaagcacgcaaacagcgactactgcaacgtgctcggcgcgcttctgccgcagaagatgatcgacgagttcatcgaccgctcgggcatcccgccgcacgaaaaggtgcacgacatcacgcgcgcccagcgcgagaccatccgcacgctcttaaagcactggacggtcaatgtcagcgcgccgatgccggtcgaaaacgcgatcatcacctccggcggcgtcaaggtgggggagatcgatccgaagaccatggcgtcgaaaaagatcggcggcctgtactttgccggcgagatcatcgacgtagacgcctacacgggcggctacaatctgcaaatcgcctgggcgaccggcaaggccgcgggcgaggctgccgcggacgcactgctgacgcagtaagcacatatttattgtaagagggaagaatcaaacagatgaaaaagcatttttccattgccattgacggccccggcggcgcgggcaagagtacgctcgccaaggccgtcgccaagaaattgaacattctgcatgtcgacacgggcgcgatctaccgcaccatcggctacgcggcgttttcccgcggactggatgcaaaggacgaatcccagatcgcgccgctgctgaaagaaattcagatcgacatggcatttgacgagaatagcggacagaaaatgctgcttgacggcaaggacgtcagcaccgaaattcgcctgccggaaatttcgatgtacgcctcgaacgtctcggcgctgccgtgcgtgcgcgcgtacttacttgagatgcagcgcgacatcgcgcgcaagagaagcgtcatcatggacgggcgcgacatcggcacagtcgttctgccggatgccgacctcaaaatttacctgacggcttcggccgaggagcgcgcgcgccgccgctgcctcgagctctctgagcgcggcacgcccaaggcgtatgaagaggtactgcgcgagatcaacgagcgcgactatcaggacatgcaccgcgatatcgccccgctgcgcgaggcggcggacgccgtgcacttcgacacgtcgaagctcagctttgaagagagcgagcaggcgctgctgagcctcattcaggagaaattgaaatgatgcaccgtatcttttttgcgtttatctggatcatcggtcgggtgctgctgtggatctaccgcgtggacgtcaaggggcttgaaaatcttccgaagcacagtgtcctgctgtgcccgaaccattcaacggacttagaccccgtgctcatcggcctgtgcctgccgctcgactaccatctgcactttatggccaaggccgagctcttcgacaaccgcgcgctcgcgtggctcatccgcacgctcggcgcatttcccgtccagcgcgacggcaaggatatccagtccatcaagaccgcgatgcaggtgctccacaagggtgagaatcttctgatcttccccgaggggacgacgatccggggcggcgtcggctatcacgacggactccccgcgcacgcgcacgcgggcatcgcgatgatcggcgtgcgcacgggtgcgacgctcgtgccggtgttctgcgacgggcagaaaaagcccttccataaaacgcgcatcatcttcggcgagccgtatgtgcctgaggtcacgggccgccgcggcacgtccgaagaattgcaggccatcgccgacgaaatgctgcgtcaggcctacgcgctcggcggccagcaggtgggaggcgcgccgctgtgaaggtcatcttagctgagaccgcgggcttctgctatggcgtggagcgcgcagtcaaccttgcgcgcgaaacggcaaaagcgcgcggcggcgcgatgctcggcagcatcgtgcacaacgcgggcgtcgtgcgcgagatcgaagaccttggcatgcgcctcatcacgtcgcccgaccaggcaaaggcgggggagaccgtgctcatccgcgctcacggcgagtcgagagcaacgcttgatgcgctgcgagagcgcggggcagaggtcgtgagcgtcgtgtgcccgcatgtcgagcgcatccgaaagcttgcacaggaggcagagcacgagggacgccgcgtcatcctgatcggtgagcgccatcatcccgaagtgcagggcatcgcaggatggtgcagcgacccgctgatttttgaaaatgtgcaggaagcgcaaaaatacttgcaggaacaccccgattttgcccatttatccagtatcatgctggcgcaaacgacctgcattcgtgcgctttgggaaagttgcgtgaaatttctaaaaaaacagtgtacaaatctgaaaatcaatgatacaatatgcaatgctacgcagaaacgtcaaactgaggcagcagaactttccgccaaggtagacgcgatggtggttgtgggcgaccgaagaagcgccaacacaaggcatttgaccgagatttgcagagagaactgcggaaaagtcctccagatcgaatccgcagacgagctctcaccggaattcttttccggatgccgtgtggcgggactgacagccggcgcatctactcctgcgagtatcattatggaggtattaacaacaatgacggaagaaaacatcaacaccactgcccctgaaaccagcgaatcctttgaagaactgcttgaaaaatctttcaagactctaaatacaggagataaggtgaccggtatcgtgaccgccatcggcacgaccgagatccaggtcgacgtcggctgcaagcaggcaggctatatccctgtttctgagctgagcagcgaccccgacgtcaagcccgaggacgtcgtcaaggtcggcgacgagatcgaggcttacgttgtccgcgtcaacgacgtggaaggctacgccaccctctccaagaagcgtctcgacgctgtcaagctctgggaagacattgagaccgccgttgaggacaagaccgttctcgaaggcaccgtgaccgaagtgaacaagggcggcatcgtcgtttctgtcaagggcgtgcgcgtgttcgtgcccgcttctcagagcggcatgcccaaggactccgaccttggccagatggtcaagcagaaggtcaagctccgtgtgaccgaggtcaaccgtgcccgccgccgcgtcgtcggctccatcaagtccgtgctgaacgaggagcgtcaggctgctcaggccgccatctgggaaggcatcgaggtcggcaagcactatgacggcgttgtcaagtccatgacctcttacggcgtgttcgtcgacatcggcggcgtggacggcatggttcacatctccgagctgagctggagccgcatcaagaaccccgccgaggtcgtctccatcggcgatcacctcgacgtgtatgtcatctccttcgaccccgagaagcgcaagatttccctcggcgtcaaggatcgcacccagaacccctgggatgtgttcatgaacacctacaaggtcggcgacgttgccaacgtccgcatcgtcaagctgatgaccttcggcgcgttcgctgaggtcgttcccggcgtggacggcctgatccatatctcccagatcgctgaccgccgcatcgacaagccctccgacgtcctgtccgaaggccagatggtcgacgcgaagatcaccgccatcgacgaggagaagaagaagatctccctcagcatccgcgcgctgctcagcggcgaggaagaggctcctgtcgaggagtaattttcccgaactgaaaagagacaggctccggcctgtctcttttttacgttcttttttacgctgacacgtaagaaagactttgcaaacggcgatcggtatgctataattgttaaagtttcgacatagttccgaaatgataatcaaattcacatacatacaggaggaattatccatggattacgcagcgctttatcagaagaagctgacctctgccgcggaagccgtcaaggtcgtcaagagcggcgactgggtcgactacggctggtgcaccaaccatccctacacgctcgacaaagctctggccgcacgccagaatgagctcaaggacgtcaaggtccgcggcggcgtgacgatgtggatgcccgagatctgcaaggccgaggacgccggtgagcacttcacctggaactcctggcattgcagcggcatcgaccgcaagatcatctccaagggcatgggctatttcattcccatgcgctacagcgagctgccgcgcttctaccgcgacggcaacgccacagtcgatgttgcgatgatccaggtcacgccgatggataagcatggcaacttcagctacgcgctcgcgtcctctcacctggccgacatgctcgacactgccaaaaccgttattgttgaagtcaacaagaacctgccgtgggtttacggcctcaccggctgcgagatcaacatcaaggacgtcgacatggttgtggaaggggagaatcctcccgttgcgcagctcggcgcgggcggcgcccccaccgaggtcgacaccgcggtcgccaaccttgtcgtgcctgagatcccgaatggcgcgtgcctccagctcggcatcggcggcatgcccaacaccatcggctcgatgatcgcgcagtctgatctcaaggacctgtccgttcacaccgaaatgtatgtcgacggctttgtcgacatggccctcgccggcaagatcaccggcaagcacaagcagctcgacaagggccgtcaggtctttgccttcgccgccggcacgcagaagctctatgactacatggatcgcaatcccgaggtcatgggtgcgccggtcgactatacgaacgacgtgtttgtcatctcccagatcgacaacttcatctccatcaacaacgccatcgactgcgatctgttcggtcaggtgaatgccgagtccgcgggcatcaagcacatctccggcacgggcggccaactcgactttgcgatgggcgcgtacctctccaagggcggcaagagcttcatctgcatgtcctcgaccgtcacgggcaaggacggcacggtcaagagccgcatcgttcccacgctgacgcccggctccatctgcaccgacccgcgctcctgcacgcactacatcgtcaccgagtatggcatggtcaacctcaagggcctttcgacctggcagcgtgccgaggcgctcatcggcatcgcgcatcccgacttccgcgagcagctcatcgccgacgcggagaagatgcacatctggcgccgcagcaataagtaagcaaaaatcgttcttccgtcgcgggggctctcctgaaaaggggagcccacattttttcgaaaatccacctcgtttccatttttatgcgatatttcatcaaaagtcgcttgaaaatgatggcaaagtacgttatactatgtatggggaattgtttcctcttgtgtgtttgtgttgtttttcttttccatcgcacggaaaaccggggcgaatgccagattggcattctgcctgaagggaggtgggcatagaatgtttcaagtgggagataaggtcgtgcacccgatgcacggtgccggtgtgatcgacagcattgtccgcgaaaagatcagcggcaaagcaatggatttttacgtcttcaaaatgcccatttccgggctaacgctcaagatcccgaccgagaattccacggccatcggcatccgcgccatcaagacgagaagcgagatcgaagaggtcatcgcgcacattcccaagctcggcgtcgacatgacggcgaactggaaccaccgctaccgcgagaatatggatcgcctgaaaagcggcgatctcgacgaggtcagcgccgtcatcaaggcgctgatgcatcgcgacagcacgcgcggactatccaacggcgagcgcaagatgctgcacattgccaagcagatcctcgtatcagagatcgtcctggcagaagacgtggagtatcccgaggctgaggggcgcgtcaacgccgcgatgctgttaaaggagagcgattgagtccatgagcctgctgcaaaagatgttcggcaagcaccaaaagcgcactcacccgtactgcgccgcgctgattgcggccgccggaagctccacgcgctacggcggggagaacaagctgttgcaaacccttgacggcatccccgtccttgtgcgcacactgctcacgatcgaccgcgtggagggcatcgacgagatcgtcatcgctgcgcgggaggacgagctgctgccttatgctgagctctgcaagacctttggcctcagaaaacccgtaaaggtcatcgtcggcggcgcaacgcggacagagtccgtgctgcgcgcggcgctcgaggcctcgcccgagacggaattttttgccgtgcaggacggtgcgcgtccgctcgtcaccgtcgagctcatcgacgaagtgctcgacgcggcaagagtttatctcgccgccgcgcccgccgttccggtgcgcgacaccatcaaggtcgcgcacgacggcatcgtcgagcgcacgcccgatcgtagcgcgctcttcgccgtgcagacgccgcaggtcttcgccgccgaccttttgaaggcggcgctccagtccgcgattgcggacggcgcgactattacggacgattgctccgctgtggagcggctgggcaaggaagtccgcttgacagagggcagcgaggaaaacatcaagatcaccacgccggtcgaccttgcgatcgcagaggcaattttacagcgcagaggggaatgaacctttcccctctgccttttcttgaagaaaggacccataccatgacgaatttacgcatcgggcacggctacgacgtgcaccgcctgaccgagggccgcgcactgattttaggcggcgtgacgatcccctacgaaaagggcctgctcggccattcggacgctgacgtactgacccacgccgtgatggacgcgctgctcggcgcggcggcgctcggcgatatcggcaagctctttcccgattccgccgacgagtttgctggcatctcgagcttagagctgctgcggcaggtgaagctgcacctcgccgccgcggggtacgatgtcgtcaacattgacgcgacgattttggcgcaggcacctaaactcgcgccgtaccgcgagcagatgcgcgcgaacatcgcgcgcgagctccagattgatgtcttgcgcgtgagcgtgaaagccacgaccgaggaacacctcggcttcaccggcagcggcgaggggatggccgtccacgctatcgcgctccttgagcgcgcggacaactgaatcaaaaccgcttcggacggacgctttttctgagcgcccgtcccttttcgcccgcacaccgccgccgcgcacgcatatcatgctgtgagggggaatcggtatggactattatctctttgccgcgcgctcagtcacccatgcccagcgcatggcgcggcttttgagcgacgcgggtatctctgccaaaatccgccgcgcgggcgctgcgatcaccgagcgcggctgcggctatacgctggaaatcccgcgccgccatgcggcgcgcgccacgcaggcctgccgcgcgggcggcgtgctgccggtcaaggtgcttttcgtctcggatgacggcatgcaagaggtggtgctatgatctatctcgacagcgccgccacgacgtttcaaaagcccgctgcggtgcagcgggccgtcgtgcgggcgatgcgcacgatgagctcgcccgggcgcggcgggtatgccgcggcgcagcaggccgacgagctgctgtttcgctgccgcagcgcagccgcggagctcttctccgtgccgtcgagcgagcaggtcgttttcacgatgaacgcgacgcatggactgaacatcgccatcaagagccttgtccacccgtgcgggcgggtcgtcgtctcaggctatgagcacaacgccgtcacgcggccgctgcacgcgctgggcacggaggtcatcgtcgccgccgcgccgcttttttcgccgcaggagacggtcgaagccttcgagcgcgcgcttgcgcatgagcccgatgccgttatctgcacacatgtctccaatgtcttcggcgctattttaccaattgagcgcatcgcgcagctctgccgcggcgcaagcgtgccgctcatcatcgacgcgtctcaatccgcgggctcgctgccgatcgacttttccgcgctcgcgcccgcattccttgccatgccggggcataagggactttacggcccgcaggggacggggctgctgctctgtggcagcgacgcgctcccgctcattgagggcggcacaggcagcgaatcgctgcgtcagagcatgccggactttcttcccgaccgtctggaggcagggacgcacaacgttcctggcatcgcggggctcgaagcgggcatcgccttcgtgcgcgcgcagcgcccggagcgcatcctgcaccacagccgcgcgctcatccgtcgagcaggagagggcctcggcaaaattccaaatgtacacggatttctctcgctggaggcaagcttgcaggcaggggtcttatcgttcacggtggacgccctttcgccagaaagtgtcgccgaggagatggcaaagcgcggtatcgcgctgcgcgcggggctgcactgtgcgccgttcgcgcacaaaacggtgggcactttgcccgacggaacggtgcggctgagcgtttccgcctttaatcgcgaaagcgagatcgacacgtttctttcctctctgcgcgcgatcgcggcaggtcaggcaaaaaactgagatttcatagaaaattcatcgctctaccgttgcaatttggagtgtttcatattagaataagtaataactattgcttaaggggagcgtgcctatggaatttgtcatgcccattctggagggcgcgtggcgctatgtgctcacgctcaggatttcggactatcttgatatcgcgctgatggcgtatgcgatctattggcttttaaagctcgtcggcacgtcgaaggtcgagagcgtcggcaaggtgatcctgctgttcctgctggcgctgatgctctcggacgcgttctcactcaacggaatttacttccttttgagccatattctctcactcggtgcgctggcgctcatcgtgctcttccagcccgagatccgccgcctcatcgatcagctcggctcgagccgctggcgctcgttcaaccccttcgcgcgcacgcagcaggtctcggccattgaaaacgccatcgcgcagacggtgctcgcctgcacggaaatgtccaaaacgcgcacgggcgttctcatcgtcttcgagcgtgaaatggcgctggacgacatcgcccgcacgggcacgatcgtcgacgcgcgcgtgagcagcgagcttctcaaaaatattttcttcgttaaggcggccatgcacgacggcgcggtcatcatgcgtgacgggcggctgctcgcgggcggttgcatgctgccgctctcgaaaaacgtgaacctgagccgcgaccttggcatgcgtcaccgtgcgggcatcggcatgagcgagaattccgacgcggtcgtcgtcatcgtctcggaggagacggggacgatctccgtcgccatcggcggcctcttaaagcgccacttgatgcccgagacgctcgaaaagctgctcatcaatgagcttgtcccgcaggagcccaccgaacaggacgacaagctccacatgaagctcttgaagctcctcagtgccggaaagggggacaaggacgatgaaaagtaagcgccgcaagatcttctacgttgcattgtccatcctcatcgcggcaacgatctggttctacgtgaacaacaaggaatccgtgaccgtgtacgtccatgacgtgccgatcgaatttctcaacgaggacacgtcgcttgccgacaagggcctcatgcgcatcagtggggacgaggatatcaccgtcgatttaaagctccagatgccgcgcaacgtcgtctacgactttgacacgagcgagctgcgcctcgtgagcgacctttcgaccatcacctacgcaggcaagcagtccgtcagctacacgatcctgtacccttcgaaggtctcgtcgagcagcgtgaaggtcgaatcgccgaccatccgcaccgttcaggtcgagatcggcgagctcaacaagaaggacatcgagatccgctgcaaggtcgtcggcaatgtggccgagggctacatcgccggcacggtcgagatgctgcccgaaacgctcgaggtgcgcggccagcaggctgacatcatgcagatcagctacgcgcaggtcacgctcgacatcgaaaatgcatcctccacggtcgtggagctgctcgactatgagctctatgacttcaacgaccagctcattgagagcaagaacatccatcccatgagtgaaaacgtgcaggtgacgatgccggtgctcaaggtgaaggacgttccgctgaccgtcaactttatcgaatccgcgggctcgcggctcgagaattacacctatacgctcagccacagcagcatcaccctttccggtgatgcaacgcagatggcaggcatcagcgagatctcgctcggcacgctcgcgcttgaggacgtgcagggctcggagacgctgacctatgacattctcattcccgacggggtgaacaacttaagcgggatcacaagcgctacgctcacgatcagcagcggcgacatcagcacgaaagaggtcgaggcgacgcacttcagctacgagaatttctcaggcgatcacaccgtcaccgtcgtgacctcgtcactgcccgtcacgctgcggggggcgtcgagcgaccttgatgccatctacggcagcgaggtccacgtcatcgcagacctatccgacatcgccgccgacagcggcagctacaccgttcccgcccgcatcgaggtgagcggctacgacgtgggcgcggtcggcacttacgaggtcaccgttcacatcagctaagccaattcgcaaaaggagacagcatgactcagatcgcaacagtagaaaaaatccttcccggcggcatggcggagatctccgtcccgcgcaagtccgcctgcggccacgactgtgaagagtgtgcgggctgcggcgtatcgggtgcaagcgtgcgcgctgtcgcgcgcaacgacgcccgcgccgaagtgggacaaaaggtcgtggtcgagagcagcacgaagaatctgctcggcgtgatgctcctcgtctatcttctgccgatcgtgctgtttcttgtcggctactttgcgaccggcgcgctcgaaagcgagggactgcgctacgccgtcgccatcgcggcgtttttagacggcatcattcccgcgatcatctgcgaccgccgcacgaagaaaaacggcaagctgacgttcaccatcgtgcgtcttttctaaggcatgtttggttacatcaggccgtccaagccgcacctcagcgagcaggacgaagcgcgcttccagtccgtttactgcgggctgtgccacgagctcgggcgaaagtacggctttgccgcccgctttgtgctgaatttcgacttcacgttccttgctatcctgctctccgacgcgcaggagccggaatgcgagagctgccgctgcgcggcgcatccgtgcaaggcacagtgcgtcatggcgcacaccgccgcgctcgaaacggcggcagaccacagtctggtgctcgcctggtggcagcttcgcgaccatattgaagaccacggctttttcaaagccatcccataccggctcgcggcgcttttgctgcgcggcgcttaccgcaaggcgaggacgttcgtgccggaatttgacgcctccgtgcagcggcacctaaatgatctgcacgagcgcgagcgggagcactgcgcctcgctcgatcaggctgccgagcctttcgccgcgctgatggcggacgtcgccgactgcgtcgatgacgagatgcggcggcgcgtgatgaaggaaattttctaccacctcggccgctggatctacttggtcgacgcggcagatgactttgaaaaggacgcgcactcgaattgctacaatccgctgcgctatcgctatgagcttgatggcgacaagctggacgagcagagcagggaagccgtggccgcctcgctcgacctctccgtgcaccgcatggcgagcgcttacgcgctgctctcctgcggcgtgtggacaagcattttagacagcattttttacgagagcctttacgggatcggcagcgccgttctcaagggcacatatcataagcccccgcgcagaatacacttccgcatcaaggcggagaaaaacgaggaaaccgtatgaatgacccctatcagatcctgaatatcccgccgacggcgactgacgaggaggtcaagcgcgcttaccgcgaccttgcccgcaaataccacccggacaattaccacgataacccgctggccgatctcgcgcaggaaaaaatgaaagagatcaacgaggcctatgaccagattcagaagcagcgcaaggcgtcttccgccgcctcgcagagccactcctacggctacggcagcgggaatagctatggcaactccgcttacggcggcgcctatggagcgggctcgctcaatcaggtgcgcatggcgatcaaccgcggcgatatctcgctcgctgagcgtctcttaagcggcgtgagcgaccacaacgcggagtggaacttcctgatgggcgtggtctgctcgcggcgcggctggatggacgaggccaagcgctatatggagaccgccgtgcagatggacccgaacaatccagagtatcagaacgcgctctctgcgctgacgggggcgggctaccggcccaacggcttccgctcggtccacacggccaattttgatgacagcgcgtgtctgcgctgctgcgcggcatggtcgtgctgcacgctctttagcggcggcggatgctatcttctgccctgcatttacttctgatttttgtttaatcctgtacttttcagttttgtgtttttactatatcatggaggagaagaatcgtggtcaaaagtatgactggctatggaagagccaaaaaaacgctctccaatcgcgatatcaccgtcgaggtgcgctctgtcaacaaccgctatcttgactgcacggtgaagctgccgcgcgcctacatttttgccgaggatgccatcaaggggcgcgtgcagaaggccatctcgcgcggcaaggtcgatgtattcgtcaccatcgactcgaccggtgcggatgaagaggtcgtcgtggtcaacgagggtctggcccgcagctatttcgccgcattcaaaaagctctacgagcttggcggagactatctcaaaaagcagtcctacgtggcggatatcgcccgcatcccggacgtgctgaccgtcacgaaggcggaggaggacctggagtccgttggcgcggacatctgcgaggtgctcgacgaagcgctcgcgtcctataaccagatgcgcgcgacggaggggaagaagctcgccgaggacatcggcggcaggctcacgaccatcgaaacgctcaccggcaaggtcgaggagcgctcgcccgaaacggtgcgcgagtaccgcgaaaagctgaccgcgcgcatgcaggaggtcctgcagagcacgacgatcgacgagtctcgcatcctgaccgaggccgccatctacgccgacaaggtcgccgtggacgaggagaccgtgcgtctgcgctcgcatgtgtcgcagctgcgcgacatgctgctctccgacgagcccatgggccgcaagatggactttctcattcaggaggtcaaccgcgagagcaacaccatcggctcgaagtgcaacgatgtcgccatcgcgcgcgatgtggtcgcgctcaaggcggaggtcgaaaagatccgcgagcaggtgcagaacatcgagtaaggggcgaagcaaatgaagctgctgaacatcggatttggcaacatggtgtccgccgagcgcctgatcgccgtcgtcagccctgacagcgcgccgatcaagcgcctcattcaggagtcgcgcgagcgcggcatgctgatcgacgcgacctacggccgcaagaccgcgtcggtgttcatcatggacagcgaccatgtggtgctctcggccatcgccgctgacaagctgatcgcaaggctgggcgtggaaacgctcgccatggaggaggaagcatagaaaatcatgtacaaggggaaaacattcatcatctccggcccatccggagtgggcaagagcacggtgctcaaggagttatttcaagatcgcgacgatctttatttctccgtttccgccacgacgcgtccgccgcgtcccggcgagataaacggcgtccactatcactttaccgacgtcgacgagttccgcaagatgatctcggaggacgcctttttggagtatgccgagtatgtcggcaacttctacggcacgccgaaaaagtttgtcgacgaggccatggagcaggggaaggacgtcgtcctcgatatcgaggtacagggtgccttgcaggtcgtgcataagcggcctgatgtcgtgcgcatcttcatcgcgccgccttcgtggcaggcgcttgaagaacgcctgacgagccgtggcaccgacagtcccgaaaaggtgcaaaaacgcctcgtccgcgcaaaggtcgagcttcagaccgctaatacctatgattatttcgtcatcaacgacacggtggaacgcgccgtgcgcgagatcaacgccatcatgctcgccgagcactgcaagcccgccgagcgcatggctatcttgtctgaataagttcaaaaatcagccgaaaaggcagaaggaagtaaattattatgatgctttatcccgcaatgagcctgctcaacaagtacgttgaaaaccgttatctgctcgtcaacgtggtcgcgcgccgcgcccgccagatcgccgagcaggctgacgaagagggttatcccctctgcgaaaagccggtcaccacggccatcaatgaggtcgctgccggtaagctcaccgcagagaatatcgacacgcacatcgcaaagtaagtcttgaataacgcaaagggggagactgtatgacagagaaaatgcttgctcgcgtcgcagtctcttccgttccctatgccgccgaccggctctacacctaccttgtgccggacgagctcatcggcagcgccgaggccggcaagcgcgtgacgatcccctttgggcgcggaaacaggcgcgtggagggctttttgctcgaagtcgggcgcgaggcggcgacgtcgccgctcaagcccatcgacgcggtgctcgacgatgcgccgttgctggatgcaaaggacatccgccttgtgcggtggatgaaagcgcgctatttctgcacgtattacgacgcgatcaagacgatcctgcccggtggcgtgtggctccagtaccgcgagctgtggcatgtgaacggcgagatcagcgcggaggatgcgctctcgtccgtcgcgccggattcccttgaggaaacgctgctgcgcgccatgctcagcgccaaggagatcgagcgcgccgcgctcgatgagcttggcggcgaaaagacggcaaaggcgctccattcgcttgaagcctgcggcctcgccgtgcgcgaaacaaagctgcgccagcgcttgcaggataagtccgtgcgcatggtgtcgctctgcgtcagcgcggaggacgcgctcgccgcggtcgagcccaagcgccgcagcgcacccgtgcgctatgcggtcgtcgagcttctcagccgcgaggggtgcctatccagcagcgagatcagctattacaccggcgcgacgatgcaaacgctgcgcggcctcaaaaaggccggtcttgtcgaattctccgagcgcgaggtgctgcgcgtcagccgctatgatgatgcgcccgcgcgcgaggacattgtgctcaacggcgaacagcaggccgctttcgacggcctctgtacgctcttaggccgcgagggcggcagcgccgcgctgctgcatggcgtgaccgccagcggcaagacgcaggtctatatcaggctcatcgaagaagcgctcacgcgcggcaagaccgccatgctgctcgtgccggagatcgcgctgacgccgcaaatgctgcgccgctttacggcgcagttcggcagtgacgtcgcgatgctgcacagcgcgctgccgctcaccgagcgctacgaccaatggaagcgcatccgccgcggtgaggtgcgcgtcgtgctgggcacgcgcagcgcggtgtttgcaccgctgcaaaacctcgggctcatcattttggatgaagagcaggagacgagttatcagtccgaaaatccgccgcgctaccacgcgcgcgacgtcgcgcagttccgctgtgcgcagaacgacgcgctgctgctgctcggctcggccacgccgacgattgaaacggcatatgccgcgaaaagcagtcgctatcaagtcttttcccttcataagcggttcaacgatctgccgctgcccaaggtgctgatcgccgacatgaaggacgagctgcggcaggggaacgagacctcgatcggtcatgcgctgcgcgcagagcttgaaacaaatatcgaacgcggcgagcagagcattctgtttctcaaccggcgcggcagcgcgcggatgctgctgtgcggcgagtgcggctacgtgccgcagtgtccgcggtgcagcgtgccgatgacgtaccattccgccaacgaacggctgatgtgccattactgcgggcactccgaagccgtagtggacaggtgcagcgagtgcgggggactgatgaagcgcgtcggctccggcacacagaaggtcgagcaggagctttttgacctgttcccaaaggctaaagtgctgcgtatggacgccgacaccgtcggcgcgtcgcgcggacatgaagcgctgctgcgcgaatttgaagaaaagaatatccccattctccttggcacacagatggttgccaaggggctggattttgaaaacgtgacgctcgtgggtgtgctggacgcggacctttcgctctacgcgcagaactaccacgccgccgagcggacgtacagcctgctggcgcaggtcgtcggcagggccggacgcggcgagcgtccgggccgcgcggtcatccagacctaccaccccgaaaacgaggtcattcaggccgcggcaaaacaggattacgagacgttttaccaaaacgagctgcgcatgcgctcgctgcggcgctatccgccgtttgcagatctgttcacgctgacggtctcaggccttgatgagctgcgcgtcatcgccgctgcccgcgcaatgtgtgacgcactgcgctacgcctgctctcagccgccgctgaaagacttggaggtcgaagtgctcggccccgcgggcgcgccggtcgtgaaggtcaacaaccgctatcgctattgcgtctacctgtgcggcaagggcggcagcgtgctgcggcgcaccgtcagcgaatatctgctggcattttacgcaagaaaagaaaaccgcggtctcgacatttttgccgactgcaatgctttacaatagagaaaagaggatgaaattatggctattcgcaagatccacgaagtgggcgacccctgccttgcaaaggtctgccgccccgtgacggaattcaacgaccggctgcatgagctgctcgacgacatggcggacaccctggaggaggccggtggcgtcggcctcgccgccccgcaggtcggcatcctgcgccgcgtctgcatcgtggaggatgagcagggcgagatcatcgagctcatcaaccccgagatcatcaagaccgagggcgagcagacgggcctcgagggctgcctgagcgtgccgggcaagtacggcatcgtcacgcgcccgatggtcgtgcgcgtgcgcgcgcaggaccgttacggcacggagtttgaagttgaggacgaagagctgaccgcccgctgcttctgccacgagatcgagcatctcgacggccacctctacaccgagcactgcaaagtcctcaccgacgaggagctggagcagtatatccgcgagcaggaaaaggagctggacgaggaatgaggatcgtcttcatgggcacgcccgactttgcgcgcacgatcttagagcgtctggtcgcggacgggcacgacgtgtgcggcgttttcacgcagccggacaagccgcgcaaccgaaacaaagtcacgccaagccctgtaaaggaatatgctttgtcgcagaatatccccgtttttcagccggtgacgatgcgcgacggcacggcgcttgaggatttcaagaccctcgcgcccgagctcgcggtcgtcgcggcctatggtcgcatcctaccggaggaaatgctcaccgtgccggtgcatggctgcatcaacgcacacgcgtccattctgccgaagtaccgcggcgcagcgccgattaaccgcgccatcttagacggcgaaaaggagaccggcgtgaccgtgatgcacatggcgaaagagtgcgacgcgggcgatatgatcttagtcaaaaagcaggccatccgccccgacgagacggcggaggacctgttcaaagagctcgctgtgctcggcgcggatgcgatcgccgaggccatcgttgagattcaaaacggcacggcccagcgcgtgccgcaggacgagtcgcaggcgacgtatgcgcccatgctctcgcgcgagctttctcccattgactggacgagaagcagcacgcagatcatcgaccagatccgcgcgctgatcccgtggccctgcgccgcggcgagcattctcggcgcaaacacgaaaattttccatgccgtgccgctcggcgaaacgaaggacgtgcccggcacgctgtgcgcgcgcaaaaagggcatcgaagccgcctgcggcgacggcaaaagcattctcatcacggagctgcagcccgacggcggcaagcgcatggcagcgaacgcttttctgaacggcaagcgcatcgccgcggggacggtcctcgatgcgtaagggaaataccgcgaacgcgcgcgaatgcgcgctctccgttctggtcgcctgccgccgcaacggtgcgtgggcggacgccgcgctgaaggcgcagctcggcaagtgcgcactgagtgctcaggacgcggcgctttgcagccgcatcgtctacggcgtgatgcagaacgagcttctgctgaactggtatttgagcgcctactgcacgcagaagctcgaccatttgcagccaccgctctccgacattctgcgcatcggcgcgtaccagatcttatttctggacaaggtacccgaccacgccgctgtcagcgagtccgtggagctctgccgcacgaacggcagaagcgccgcgagcggactcgtcaacgccgtgctgcgcaaggtcgcgcagaataagtcgaatctcccgccgctgccggaggggaatttcgcacgattgagcgtcgcctacagccacccgcagtggctcgtcaaaaagctcgtgtctctcctcggcgtcgaggaagcggaagcgtttcttcgcatcgacaacgaggcttcgcccatcagcgtacaggtcaacccgctcaaaacgaatgaaaaagcgctcgtcgacgaacttcgcggcgagggcgtctgcgtcacgccgcacccgtgggtgcccggatgcctggagctttccggcacgggcgacctaacgacgctcagcgctttctacaatggccgcttcaccgtacaggacgcggcggcacacctgatcgtctgcgccgcggactttgcgcgcgggcagagggtgctggacgtctgcgccgctccgggcggcaagtcgttcgccgcggcattcgcgatggaaaacgaggggagcatcctctcgtgcgatctgcatgaaaacaaattgaagcgcatccgcgagggcgcgcagcgcctcggcatcacgtgcatcgagaccgccgccgtcgacggccgcgcgttccgcgaggaatgggcggggcgttttgacgtcgtcatctgcgatgtgccgtgctcgggccttggcatcatccgcaaaaagccggacatccgctataaggatgcgcaggatttttccgcgctgccggagatccagcgcgcgatcttagagaacagcgcgcgctatgtgaaacgcggcggccttctcgtctactcgacctgcacgatcctgcccgaggaaaacgagcaggtgacggacgactttttaaaagcgcacgacgagtttacttacgaagccttttcgctgccgaacggcgtgagcgcgccggggcatttgacgctctggccgcagcgcgacaatacggacgggttctatctcagccgcatgaggagaaagacgcatgactgatttaaagtcaatgacattggaggaaatcaccgcggcgctgcgtgcgatgggcgaaccgtcgttccgcggcaagcaggtcttcacctggctgcaccgcggcatcaccgattttgacgagatgatgaatattcccaaatccctgcgcgaaaagctcagggcggagtactacatcaccgtgccgacggtcgcgcgcaagcaggtgtcgaagctcgacgggacgatcaaatacctctgggagctgcaagatggcaactgcatcgaaacggtgctgatgtcctatcaccacggcaacacggtctgcatttcctcgcaggtcggctgccgcatgggctgcaaattctgcgcgtccacgctggccggcaaggtgagggacttaacaccgtcggaaatgctcgatcaggtgcttttcacgcagcttgactccggacgcgaaatttccaacatcgtcctgatgggcatcggcgagccgatggacaaccggaaaaatgtgctgcgctttttggagctcatcaaccatcccgacgggatgaacatcggcatgcggcacatctcgctttccacctgcggcgtggtgccgggcatcgacgcgctcgcggaggacaatttgcagctcacgctgtccgtttcgctccacgcgcccgacagcgcgacgcgcagccgcatcatgcccgtgaacaacgcctacgacgtggaggagctgttcgccgcttgccaccgctattttaagaagaccggccgccgcatctcgtttgaatacgcgatgatcgacggcgtgaatgaccacgactggcaggccgacctgctggccgaaaagatccacggcatgccggggcatgtgaacctcatcccgctcaacgatgtggtcgagagcgagttcaagccgagcaagcgcgtcgcggcattccagaagcgccttgagtcccacggcctgacggcgacggtccgccgcagcctgggcggcgacattgacgccagctgcggacaactccggcgcaaagaaatgaaagcaagagagggggtcgcgcaatgagagcctgtggaaaaaccgacgtcggtctgcggcggcatgaaaatcaggatacctttgccgttgagcaggacaaaaagctgctcatcgccgtcgtgtgcgacggcatgggcggcgccgagggcgggcagatcgcaagctctgttgcggtggagacctttatgaaggaaatgcgcgcgctcatccgcgcggacatgaccgccgagcagctgcgcgagctcgcgtcgttctgcgtggcgaaggccaacacggcggtctatcagcgcgcgctgcaagaccccgcctatcagggcatgggcacgacgctcgtcagcgcagtggcagaggagcagtacgccatcgtctgcaacatcggcgacagccgcgcgtatttgatccgcggcggcgagatcacacgcatcacgcacgaccacagcgtcgtgcagacgctcgtggaaaacggcaacatcaccgccgaggaggcgcgcacgcacccgaaccgcaacctcatcacccgcgcgctcggcccagacgaaaacacgctctgcgacgcgttcgaggtctcgttcaccaagggggacaaaattctcctctgcacggacggccttgtcgtcaccgcgacggacgacgaaatttgccgcgccgtgtgcgcgggtaagagcgcggaagaaagccttgacgatctcattgcgctcgccaaggcgcagggcgcgccggacaacgtgacggctgtgctcattgaacacgagtaaaggaggtggcaccgtatgaacaatatgattggaaaaatgctcgacaaccgctatgagctgctcgaagtcatcggcagcggcggcatggccgttgtctacaaggccaagtgccaccgcttgaaccgcctcgtggcggtcaaggtgctcaagagcgaccttgccgaggacgccgacttccgccgccgcttccgcgacgagtcgcaggctgtcgcaatgctctcgcacccgaatatcgtctcggtctacgacgtcagccgcggcgagacggagtatatcgtcatggagctcatcgacggcatcacgctcaagcagtatatggaaaagcgcggccagctcaactggcgtgaggcgctgcacttcatcacgcagatcatgaaggcgctctcgcacgcgcattcgcgcggcatcatccaccgcgacatcaagccgcagaacatcatggtgcttcgcgacggcagcgtcaaggtcgctgacttcggcatcgcctgcctcgccaactccgccaacacgctcacgcaggaggcgctcggctcggtgcactacatgtcgcccgagcaggcgaggggcgaccgcacggacgcgcgctcggacatctactccgcgggcgtcgtgctctacgaaatgctgacggggagactcccgttcgagggcgacaacgccgtttccgtcgccatccagcacctttcctccgtgccgctctcgccgcgcgagatcaatcccgacgtgcccgaagcgcttgagctcatctgcatgaaggcgatggcctccgatttggagaagcgctacgcctcagcggatgaaatgctcgcagaccttgaggagttccgcaagaatcccgaggtcgacctcgacttcacgatcgaagacctgcaccgcgagaccgtggacgagcccacgcagtatatccccgccgtgcacaccgtctccaaggcacagaaggtgcaggaggcggacgacgaggaggaagaagaggcatccccgcacaagctgggcacgcgcaagctgctcacgatcatcggcgcggcggtggccgcggtggcactcatcgtgctgctctggcacgcgatcttcagcgatcttctcggcggcgagcagacgccgacggagtatgtggtgccgtatctcatcggcatgaccatcgacgaggcgaacgaggacgaaaacgtgaagggcatcttcacgatcgaacagatcggccagcgcgcgagcagcaaatacgcggcgggtcagattatcgagcagtcgcccaagcgcggcaagaccgtaaagggcaaccgcgtcatctcggttttcgtcagctccggcgccaagacggagaaaatgccgaatctcgtcaacaaggagtaccgcgacgcaacgctccagctcaccaaccttgacttgaaccttgtcgtcaacgacccggtcgaggaatacagcagcatcacaaagggctatgtcatccgcacgattcccgagcacggcgaaacgcttcaggagggcgacagcgtcacgctcgtcgtcagcaagggcgagcagcccaagcccgtgacggtgctctctttcatcggcatcgacattgagatcgtccgccagcaggtcacgcagaccggccttgtcgtcggcgaggtgacgcagcgcgcatccgacgagccctacggcacggtcatcgagcagagcatcaacgccgaaacgaaggtggacgcgggcacgaccatcaacttcgttatcagcgaaggccccgccatgccggactacggcgatgacgccacgacctccggaggggaaccgcagccgtgagaggaagaatacagcgcgcactgagcggcttctactatgtcaaatgcgcagacggacagctctacacctgcaaggcgcgcggcaaattccgcagggagggcatttcgccgctcgtgggcgacgacgtcgaattctgcgaggtgccgggcggcgaaggccgcatcgacgaaattctgccgcgccgaaacagctttgaccgcccgagcgtcgccaacatcgaccagatggtcatcgtctgctcacaggcgatcccgaagaccgatccatatttggtcgaccgcatgacggccatcgccgcgctcaagggctgcgacgtgctcatctgcatcaacaagtgcgacttagaccccgcggacgcgctgcgggaatactatgaaaacgcgggctttcgcaccgtcagcgtcagcgcggagacgggcgagggcatcgaggcgctacgcgcccagctcgtcgggcggctctccgccgtcacaggcaactccggcgttggcaagtcgagcattctgaatgcgctcgaccccagcatgtcgctcaagacgggcgaggtgagtcaggcgctcggccgcggacggcacacgacgcgccatgttgagctctacgagctaccctgcggcgcggagatcatcgacacaccgggcttttcctcgttcgagacgacggggctcaatttggagctcaaagaaaagctgcccgagtgctttttggacttttcgccctaccttggcgactgccaattcgtcgggtgcagccacacaaaggaaaagggctgctcggtgcgtcaggccgtaaaagatggcaggatcgtcagagggcggcatgaaagctactgccgactctacgacgagctcaaggacctgcgcgaatggaacgcgggcagtcaaaaacgacgctaaccgaaaataaatggacaaaggcccgcttcctttcggaagcgggccttcgccatttagagagatgagagagggatcaaatatcaatcctgaaacaggggggtggagaggtaacggtcgccggtgtcgggcagcaggacaacgatggtcttgcccttgttctcgggacgcttggcgagctggataccggcccagacggcagcaccggaggagataccgaccagcacaccctcgctgtggccgacaagcttgccggtggcaaaggcgtcgtcattttcgacggtgatgatctcgtcatagatcttggtatcaagaacgtcaggcacaaagcccgcgccgatgccctggatcttgtgcgcgcccgcaacacccttgctcagaacgggggatgaggcgggctcgacggcgacgaccttgacgttggggttctgctccttgaggaacttgcccgtgccggtcagcgtgccgccggtgccgacgccggcgacaaagatgtcgacctgcccgtcggtgtcttcccagatctcgggaccggtggtctcatagtgcgccttggggttcgcggggttgacgaactggccggcgatgaagcttcccggcgtctgcgcggcgatctcttcagccttggcgatggcacccttcatgccctttgcgccgtcggagagaacgagctctgcgccgtaggccttcatcagctggcggcgctcgacgctcatggtctcgggcatgacgatgatgatgcgatagccgcgtgcggcggccacggatgcaaggccgataccggtgttgccggaggtcggctcgatgatgacggagtcgggcttcagcttgccgcttgcctcagcgtcatcaagaatggccttggcgatacgatccttgacggagcctgcggggttgaagtattcgagcttggcgaggagcttagcctcgagcttttcagccttttcgatgtgggacagttcgagaagcggggtcttgccgatcagctggtccgcagaagtgtaaatcttgctcataatgcttcctcctgaacgatgtacgttctatatcaaaattttattgtttgttttataggtttcggtgatcgcttgcatcttatgttctgccgcggcgacatcggaacgggtgaaggaatgaattcacgttcattaccaacctttcaagtaggtatgtagggattatacgatgtgcatttggatttgtcaagaggaaatttcaaaaaattctattgaattcccataaaccatgtaatataataggaatatcaaaagttgaaaaaggccgactcccgtatgcctttcaacggatgtgcttagaaaggcgtgaacatactatgatgatttcaaccaagggccgctatgcgctgcgcgtgctcatcgacatggccgagcaccagaccgacggatacatcccgctcaaggagatcgccaagcggcaggaaatttcggaaaaatatttagagagcatcgtcaaatcgctcgtcaagggcggcgtggtcgagggcatgcgcggcaagggcggcggctaccgcctgtgcaagagcccggatcagttcacgaccggccagatcctgcggctgatggagggctcgctcgcccccgtcgcgtgcctcgaggctggcagttcgccctgcgaccgcgcaggggagtgccgcacactctcgctctgggcgggactgaacgatgtcatcaataaatatcttgatcagtacacgctcgcggatctgctgcgcgaagatggggattatgattatgtaatataattacagtttccctgcaccgtgcagggggacgcggataagggggccattctctcacgtgagagaatggcccccttggacccccaagagaacgcaaggggctctgccccttgaccccgcacattgcgggtttgcagcttgaagagctgcacgcgctgcgcattgcacagccgttggcagctctgctgccttacggatgtggcataccccttgcgggtagtcgggtgcggtgtacatggcttcgccatgaatcttctgcaagtcgtaactactctcaaccgcgccttactatcgtcaggcgcgagtgacgtttgctcggcggcagactgcttgccgaatgcggcttgctgcgctcgccgcattgatgagtacctcgatagacgatgattaggtgtacttctacaagatgggcagagctctgggggttccaaagggggtgttctctttcgcgaaagagaacactccctttgactcgctcccctgcgcggcgcagggaacccctttgcactttttgcaagaagaaaataaaagacttccttttctaaaaaatctctgttacaatacaggatacaaatactaaatcgcaaggagaactttgatgaaaaagctgctttgccttcttctgacgctcgctatgacgctttcgctcgctgcctgcggcagcaaggcggacgacaagacgccggaagaggacgatccaacacaggcggagacgaacatcgccgacaagcaggacgagcctgccgcggatgacgtggacaaggacgatgcatccgacgctacagagatcgaacccgacgcaaacaagggcgaaaagcctgacgaggcacaaaagcccgcggaaccgaccaagtccgacagcaagaaggacgagacgcccgcaagcaagccgtccgaacctgctaaacctgccgagccctccaagcccgcggaaacaccgtcggaaacacctgcggcgcaggacaccggcgcgctctcactgctcacgtctgtctggagcacgtacagcgaggatgacaaatttcccgccgcgggcggagacgcagagcacagcgtcgacgacgcgcccggcagcttcgatgtgtcgaacgctgacaacctgacctatcagctgacgttcccgtccgccgacgtatcgctcatcgacggcgcggcatcgctcgtgcacatgatgaacctcaacacctttacctgcggcgcgttccacgtcagtgacgcgggcaacgtttcgaccgtcgccgccgacatccgcagcgccgtgcagggcaagcagtggatgtgcggcttccccgataagcttgtgattttcacctcggggcagtacgtcgtgtccgtctacggcaacgagagcctggtcaatacgttccgcgataagttcgtcgccgcccacagcggcgcgagcaccgtctatgacgaggccatcggcgcgtaacttcatcaaaaaaggaagcgcaagcattttgcttgcgcttcctttttacaattcgatgatctggcaggggacggggatgggtaattcctcatgtgtggagaggatcacgattttcgtctctgccgcgcgcaggatggcgcgcatcgcggcctcgcggttttccgcgtcgaggccggtgaacggctcgtcgagcgcgagcgcgtcggacggcgcgagcagcgctcgagcgagtgccagccggcgctgcatgccgccggaataatcgcgtaccttctttttccccacgtcgccaagtcccagttcttccaggagcgcctgcgccgccgcggcgttgtaattcgcgccgaggacgaagcggagatttccctctgcgtccagcccttcgagcaggcagttttcctgaaagaccgccgtccagcgaaatttatcgccgttgaccgtgccgctgtccggcgtttccagcccgagcagcacgcgcagcagcgtcgtcttgccgatgccggagggaccgagcaggcgcgtcacgccgacgcgcgcggtaaaggaaatgtcgtcaagcaccgcattctcgccgtagcgcttgcagaggtgttcgactcgaagctccatcatgcgcccatcctttctgcgatcttgtccacgaggagaagaaacagcttttcaaacgccgccgagatcagcacgatcgccgccgtccaggcgaagaggtcggcggtctggaagtatatcttcgcgttgtagagcttctcaccgatcgagccgctggagagggcgatgacctccgccgcggtgccggccttccagcaaaggcccagcgccgcactgacggcagagcggaagtagggaagcacctgcggcagatacacgccccgcagcgtgcgcgaaaacggcacgcggaacacgcgcgccatctccagaagagaggcgtccgtgcgccggatgccctcaagcacatttaagtacacgggcgggaagaccatcagcgccgcgatgaacagcggcagcgttcggctggagagccagataagcgccagaatgatgaacgacgccaccggcacggtcttgaccgccgccacgagcggcgcaagcagctctttgacgcgcgaaaaccgcgcggaaagcgccgccagcacaactgccagcgcgcaggaaagcaaaaagccgcccagaatgtgcatgctcgacgtgccgatggcgcaccagaacaccgccgtgcccgccagcgaaatgagccgcgcgagcgaggatacgggagaggggagcagcagcgcgccgtgcgggtatgccgcgtacagtgccatcgcggcaagctgccagacgatcagccagaaagcgactgcccagagatgcacgttctgcttttttccgcgcatgatcatctctcctttccttgaaatacggcggcgggacagcgcccgccgccgcaaagaatttatgcgaaatagaagctgttatccggcatctcgccgccgacagcggcgggagaagcattgtagagcacctctaaataaccgggcagcgcctcaagaaggtctgcccccgtcaggcagacgatgttgcagtagggcagtgccttttccgcgacggcggcgtccacgatgctgtattcgccgatgagcgcggcggcatccgcggtgttggcgttcacccagtcgacgctcgcggcgtagtccttgagaaaggcctccacggcggcaggattttcctccacgaccgcgcggcgggcaacaatgacgcccgtgatgagcgccgagccgttatcgagtgcgtcccattcagcattcagatcgagcgccatgcgcaggccctcgatcttgctctgcgccacggtgacgaagggctggggcaggagcgcaacgctcgcctgaccggaagccagcgccgcgacacactcgctgtgctcgctcttccagtcgatcgtcacatcgttatcgggatcgatgccgttttccgtgagaagatagcgcagggcgtattccggcgtagagcccttgcccgccgccacgatggtcttgcccttcaagtcggccatggagtgcacgctctcgccgttttccacgatgtagagaacgccgagcgtgttgaccgccagcacctcgatctcgccctccgtcttattgtagagcacggcggcgaggttcgcgggcacgcaggccatgtcgagctcgcccttgaggagcgcgggcgtcacttcatccgcagaaccggcaagggtaaaggtatattcattgccagtcgtttcgccgctttcgctgtccttcatcagcttcacaaggcccatggccgtagggcccttgagcgcggcgatggagtagctcgtgggggtgaactcctcctgttcggtctgctggtcgtcctgcgcgtcgttcggcgtctcatccgccttctgcccgcaggcggcgagcgagaagacgagcgcaatcgtcaggcacagggccaagagatatttgagattctttttcattggttttcttcctttccgatgctgccctcgggcgcgtagaccgttttggcggtgatgccgtccagacggccgatcttgcccgacagggcggagatgacgttgcccggcgcgtcgagcgccacgctgatgatattcacgcccttttcgcggtacggcacgcccatgcgcccgatgatatactgaccgtactggtgcagaagctcgttgagcggctggacagagcttcccccgcggacgatgatggccagcacggcgactctcgtttccattaacgcattctcctttgtcaaaataaaaatcatcccttccgccgttcagcagaagggatggaaacagcaaatgacgacgcagcagggctgtgtctttgttttccctcttcttgtggctcggaacgcatcctcgctgtcagaacggtagaatgaatctggttcgccgccggtcagagtagtcttcccggaaggcaaagcgatgataccacactttcgccgcagcgtcaagatggagggacaatggtatcggataagctggaaaaaaggccaaaagaaaacgtccgtgaacagtgcaaggcatataaattccgttgactttttcgacgttatcttatacgatatgacaaacacacaagttttatacgcagggctgaattccggccccgggaagtcagctctgtgatctcacagggctgatttttgctgtttggggagaaatgagagggaagcgcatgccatattacgcacacatccggcaggatgaaaacggcgagaccatctatcagaccgtcgcggagcacctgacaggtacagccgcgctgtgccgagagtttgccgccgacttcggcgcagaggcggacggagatctgatggggctcgcgcacgatctcggcaaatgcactgacgcattccagaagcgcctgcttgaaggtggtcccgttgtcgaccacaccatggcggggatgctcacctgtataaagatgaagcggcccagcgccgccgcgtgcgccgccggtcaccacggcggacttttggatgtcggaaatctgaggaccgaccgcgcgggcgaggacacgctctccggccggttcaaaaagggcgtggagggacactatcttgagcgctgcggcgagagcggcgtgacactgccaactcttccgcctgagacgccggaacgggatccattgaaagcgtcgtttcggacaaggatgctctattcctgtctggtggacgcggattttctcgatacggagcggttcatggacggcgaacgcgggcgcggcggatatgacgatcttccgacgctgctaaggcggctgaaagaatacatcgcgccgtggcaggaaccgaaaacagcgctcaacaagctgcgctgcaaaattctaaacagctgtctggatacaggcagtaaatcaaaaggcatttacacgctgaccgtgccgaccggcggcggaaagacggtcgcgtcgctcgcctttgcgctgcggcacgcggtggcgcacgggatgaagcgggtgatctacgtcgtgccgtacacgtcgatcatcgagcagaatgccgaagtattccgcgagatcctcggcgacggcaatgtgctcgagcatcactcaggtgtgcagttcgagctttccgacggcgcgtcgcccgaggaggtgcgccgcgcgctggcggtggaaaactgggacatgccggtcatcgtcacaacggcggtgcagttttttgagtccatttacgcaaaccgttcgtcaaaatgccgcaagctccataatcttgccgacagcgtcatcatttttgacgaggcgcaaatgctgccgctttgccatctgcggccctgcgtggcggcgatggcatcgcttgccgagcaattccgttcaacgcttgtgctgtgcacagccacgcagccgtcgctcggtgacctgctgcacacctatgcgccaagctgccctatcacagaactgtgcccgcagacggcggaggaatacgacagcttccgccgcgtgacgtttcgacaggatggcatcttggaggacgacgcgcttgcggaaaagctcagtgagcaccggcaggtgctttgcatcgtgaacagccgcaaggcggcgcagagcatctttgcgcgcttgccgcaggaggcgagctttcacctctcgacgctgatggtgcccgcacagcggcagacgcttcttgatgagatccggcggcgcctaaaggcgggggaaccgtgccgcgtggtgtcgacctcgctgatcgaggcgggcgtggacgtggactttcccgcggtgtaccgcgagctggctgggctggattccatcttgcaggcggcggggcgctgcaaccgcgaggggaaacgggcggcaggtgagagcatcgtaacgatctttgagcggacggagctgccgccgcttctgttccgcacggcggtgggcgcaacacgccatgcgctgaaagacgggcgagaccccgccgtgcaggaaaccatgcagcgctatttccgcgaactgcgcgcgctgagtggggaaacacttgacaagtacggcattgtcaaagcctttgaggatggcatcaacggctgcgaactgccgtttcgcaccgtggcggagaattttcatctgatcgatcagaacacgcgcacggtctatgtcccgtttggcggcggagcggcgctcgttgagcagctaaaggaaggcgaatgctccaagggtctctaccgcaagctggggcgctacgccgtttccgtgtacgaccggcattttgaggcgctgcatgcagccggtgcgctgctgaccgcgcgggatattcccgcgcgggatattcccgcgctggatgaaagcagcgccatcctttcggaccttacgctgtatgataagcggacaggcctgacgctggaaccggagatcggaaaggcatttttgatctaagaaaatagcagaaggacggaagaccgtccttctgcttgtaagcataattgcttttcaacatatttcaatccacgtcttatctgacgacttatttaacatagcatatatattcctccttgtcaactattaatttctctttaacatgaagttgacattataaacatattgtattatgatcaaattaagttcaactaagagaggagtgatccaatgccgattcaagtggaggtctggggcgattacgcctgcttcacgcggcctgaaatgaagacggaacgcgtcagctatgacgtgatgacgccctcagcggcgcgcgggctgttggaaagcatctactggcacccagggctccgttgggtgatcgaccgcatccatgtgtgcgcccccatccgcttcaccaacatccgccgcaacgaggtcaaggatgtcatcagcgcccgcagggcaaagaccgtgatggaaaaagggcagggggagctgtacctcgccgcgtcggagagcattcagcagcgcgcggctatggtgctgcgggacgtacactatgtcatcgacgcgcacttcgacatgacggacgccgctgcgcccggcgacaatcccggcaagtttcaggacatgatcaagcgacggctggaaaaggggcagtgttacagcatgccgtatttcggcacgcgggagtttcccgcgcagttccgacgctgcacggaattgccgccgtgccccgatgagctcaaaggcacgcgcgacctcggctggatgctgtgggacctcgactacagcgatccagcggacatcacaccaaagtttttccgcgcgagccttatcgacggcgtgatgactgttccgccgccaaacagcggggaggtgagaggatgatcctgcaagcgctgacacggtactatgaagacctcctctcgcgcggcgagatcgccgcgcccggctgggcccctgccaaaatcagtctcgcactttacataaacgaaaacggtgagctgacgcagatcgttccgacaatggtggaagggacaaagggtaaaaagacggtcatgcagccgcagctgatggtgctgccggcagcggtgaaacgaacggtcagcattgcctcgaactttttgtgggacaattccgcttatttgctcggcatcgaccagaaagggaagcctgaacgcagccgcgagtgctttgccactgcggcaaagctgcaccacgcggtgctggatagcgtcgattcgcccaatgcccgcgcaatactggcatttttcgacacttgggaaccggaacgcgcggcagagcattcggcgctcatcaggcagctcgacgatgtgaccgcgggcggtaacctcgtctttcgcgtggatggccgcaaggtcgaggaggatgccgctatccgcaaggcgtggcaacggtatcaggacggcggcgagagcggcatcaagatgcagtgtctcgtgaccggaaaagaggatgagatcgccgctgtgcacccgtcggtcaagggcgtgcgggacgcgcagtccagcggcgcggcgctggtgtcgttcaacgcgccggcgttctgctcctacggacgggagcagaactacaatgccccagtcggcaaatacgccgcctttgcctacaccgccgcactgaatcatctgcttgcggacagcgaccacgtccagcacatcggcgatacgacagtcgtctgctgggcagagggcgcagatgatgcctatcccggctttttcagcgccgtgattggcggcggcacatacggcggcctgtcggacaatgatctgcgcgcggcgctcaaacgtctggcgaatgggctgccgtgcgacgacctcggcgtcgacccgaatcgaccgttttacattctcggtctcgcgcccaacgcggcgcgcctttccgtccgcttctttctgcgcgacagcttcggaaagctgatggagaatgtgaacgcgcactatgcaaggctggagatcgccggtgcaaaatattcgatactccctttgtgggctctgctgaacgcaaccgtacgagattccaaaaaacaggtccccagtccagttgtgtctggggcaacggtgcgggctgtattttcaggaactccataccctgtatctttgatggaagctgtcttgcttcgcattcgtgcagagcgaaacgttacttgggagagagccgctattttgaaggcctatttggcaaagaactacgaacgaggaagcgatcattcaatgttttcggaggtgacaagtgtgcagttaaatgaagattgtaactatatgccatatcttttgggtcgtctgtttcgagtgatggaagagattcagcttgcatcgatggggtggagcgtgaaccggagtattagggacagctatttcaactcggcggcatcaacaccgaggagtgtatttggcaaactgttctccttgagtaattaccacctgaaaaaactcatgcgagataagccaggattagggaaaaagctcggagacttggaaagtgatcttgctgcgcgactgaccacaccaccaccggcgcgattcacgcaggaagaaacaatctgtttttatcttggttactatcatcagtgtaatggcaaaaaggaggagaaagaaaatgtctgatcccatcaagaaccgttatgaatttgtggtgctgttcgacgtggaaaacggcaatccgaacggtgatcccgatgcgggcaatatgccgcgcgtcgaccccgaaaccggctatggccttgtgacggacgtttgcctcaagcgcaagatccgcaattatgttgaaatggcaaaagaggatgcagatcattatcatatctacatcaaagacggcgtaccgctgaactcgagcgataaagaggcctgcgcctacgtcggcgcagaccccgataagctgaaggaagccaagaaaaaggacgagcatctggatgaaaaaattcgcgacttcatgtgttccaatttctacgatatccgcacgttcggcgcggtgatgacgacctttaccaagggtgcgctcaactgcggtcaggtgcgtgggccggtgcagctcggctttgcccgaagcatcgaccccattctgccgcaggaggtgaccatcacgcgcgtcgccatcacgaccgaggcggacgcggaaaagaagaacaccgaaatgggccgcaaattcatcgtgccttacggcctctaccgcgcggagggctatgtgtcggcgaatctcgcgcgcaagacgaccggcttttcggaagaggacctcgaactcctgtggacggctattttgaacatgtttgaaaacgaccattccgccgcgcgcggcaagatggccgtgcgcgagctcatcgtcttcaagcacaactgcgagctcggctgcgctccggcgcacaagctctttgaccttgtcaaggtcgaacacaaggacggcgtgaccgcgccgagaagctacggcgactacactgtcagcgtggatgaaacgcaccttccctccggcgtgacttgcacgcggatggggtgatctatcaggacgaggacttcctccagctttccggcttacagcatttcaaattctgccgtcgccagtgggcactcatccatgtagaaaagcaatgggcggaaaactaccgcacaacggacggcgcgatcatgcacgaaaacgcgcacgacggctcattcaccgaaagcaggggcgacctcgtcatcacgcgcgatatgcgcgtcttttcccgcacgctcggcgtatcaggcgcgtgcgacgtgctggaattccgccgcggcgagacgggcattccgctcaaaggccgcgagggcctgtggcagccctatcccgtggagtataagcgcggaaagccgaaagagggcacggaagacacgctccagctctgtggacaggcgatgtgccttgaagaaatgctctgctgcgagatcccgcgcggcgcgctctattaccgcgagccgcggcggcgcacggaagtcgacttcacccctgcgctgcggcaggaggtgcgtgccctccttgaagagatgcacgcgctctacgtgcgcggcagcacgccgaaggtaaagccgacaaagggctgcaacgcctgctcgctgaaaggattgtgtctgccaaagctgatgagaagcaagtccgtttccgcgtatctgcgcagcgcaatggagggagagcaatgagacagcttttgaacacgctttttgtcacatcggaggatatttacctctcgctggacggggaaaacgttgtggcgaaccgcggcggggaagcggtcgcgcgctatccgctgcacacgctgcaaagcatcgtctcattttcctacgcgggcgcgtcgcccgccctgatgggcgcatgcgcgcagcgggagattggacttgcgttctgctcgccgcgcgggaaatttctcgcccgtgtagcaggtcaggcgcaggggaacgtcttgctgcgccgaatgcagtaccgcgtggcggacgacccgtcgcagagctgtcgcgtcgccggaatgatgatcttcggcaaggtctacaacgcaaaatggagcgtggagcgcacgcgccgcgaccacgccatgcgcattgacgaatcgcgcttttcagccgtgtccgaccagttacaggggcttctgccgcagatcgcagcggagacgtcgctcgacagtctgcgcggcctcgagggtgtcggtgcggcagcatatttcagcgtgctggacgacatgatcttgcagggaaaagagacgtttttcttccgcgagcgcagccgccgtccgccgctcgatgcgttcaacgcactgctgtcgtttgcttacagtctgctcgcgcacgactgcgcctcggcgcttgaaagcgtagggttggacgcctacgtcggatatctccaccgtgaccggccagggcgggagtcgctggcgctcgatttgatggaggagctgcgcccgtgctttgccgaccgctttgtgctcacgctcatcaacaaccgtgtgctcaaagcgatcgattttgacttccgcgagagcggcgcggtgctgctgacggacacagggcgcaggacgttcctgcagaagtggcaggagcgaaaaaaggagaccatcacgcatccgtttctcgaggagaagatgctgtggggtctggtaccgtatgtacaaagcctgctgctcgcgcggtacctgcgcggcgacttggacgactatccgccgtttttatggaagtgaggcgcctatgctggttctgatcacctacgatgtgaacacgagcgacgccgccggacgcgggcggctgcgcagaatcgcaaaggaatgtgtcaattacggtcagcgcgtgcagaattcggtgttcgaatgcctgctggacacggcgcagtgccggaagctgcaaaatgaactctgtaagatcattgactcagaaaaggacagccttcgattttactacttgggcaagaagtacgagaataaaatcgaacactttggctgcaagcagacgtatctgcccgaggaaccgatgatcttatagtgcgaagcacaagtgcgcagagatcacttgggcggttcgcacccaaaatccgcatggttttcctgcatcaaaaaggagcagaatgccctgacaggcggcattctgtgcaaaagcatctgaaatttgtctgttatcgcaaaaatgtgcatagtgatttgtacacttttgctgtcgcgccccgcaaggggcgcgtgggttgaaatccgatgtcttcatactcttttttcgcatccttgagtcgcgccccgcaaggggcgcgtgggttgaaatgctttctgttcctgcttttgctgtatctgatacgggtcgcgccccgcaaggggcgcgtgggttgaaattcagaccatggatttcgataaaaag

SEQ ID NO: 10109 - DNA, 11422 bp, Unknown
  gut microbiota DNA sequence
ccattctctcacgtgagagaatggccccctttgcccttgccgcccacaggcggcatatccctccgcgccgtgcgtggaaagaagtcttcgccctttaggcgaaaaaagagctgtccttgcggacagctcttttcaaatctttgttccttattcggtgacgaaggggagcagagcgatctgacgggcgcgcttgatggcctcggtcagctgacgctgatgcatcgcgcaggtaccggtggttctgcggggcaggatcttcgaacgctcggagatgaagcggcgcagcttggcggcgtccttatagtcgatatactcgcacttgtcaacgcagaactggcacacctttttgcgcttgcggttcgggccgccggcgcgaggggctctgttttcgcgttccatagccatggatgattcctccttatcagaattggggctttcgtacccacattagaacggcagctcgccgtcctcttcaatttcggcaaagccgccgctcgcaggagcggtataactctcggcgggagagccgtaagcggggggcgcgtaatcgccgcccgactggctgtcgcgcttgctgtcgccgaaataaatgttgtcggcaaccacttccgcgctgcggcggttgttgccatccttgtctttccagtcgcggatctgtaatctgccctcgaccacggccatgcggcccttggtgaaatactggcagacaaattcagcggtctggcgccaagcgactacgtcgatgaaatcggtggccttctcgccgctctcgcggctcttgaagtcgcggtcgaccgcgacggagaaggacgtcaccgccgtgccgttctgcgtgcggcgcagctcgggatcacgggtgagtcgacccatgatgacgatacggttcaacatagcgctgccctccttattcgcccttgcagacgatcatggagcggatgataccatcggtaatgccgaggatacggtccaattccttggggaaatcgggcgcgctcgtgaaggagatcagaacatagtagccttcggtgatgtagttgatggcgtaggccagcttgcgcttgccccactcctcaacctccatagccgtgctgttctgctccacgagggtcttgaacttttcggtcagagcggcgacctgctcttcgggcagtctgccgtccatgatgaaaacgacctcatagtttgcggaaatcttagccattcttggttgcacctccttttggactgatggcccacacggattcatgtgagcaaggatttgcctgcaatgcatattacaagcgctactattatataaaacttttccgtaaagtcaagcaatttttcaaaaataccgccccctttgcgcggaaaaatcagattttccatgtttttccggtgtaaagacggccgcattgcttgcaatcgggcggaaattcgtgtaaaattatcggtagagtttaccaaaggagcgatacaccatgaaaaagtttttcgccgcggcgctggtagtgagcatgctgaccgtccttttgagcggctgcatgtgccaggtcgccgatacgacgtttcaatttgacggcagcggcacggtcgaggccaaattcggcttctccgaggaaatggtcaacgcgatgaatatgcgcgccgagatgacccagaacggcttttccttctttcgctacgatggccacggctactacggcgaccaggcgagcgagtcgtttgccaacgctgatgagttcaatgcgatctttgccgaggtctccgcggagaccgccgaggtgagcaaggccgccacgcccggcacggtcacgctttccgttgcatctgacggcgggcttacgctgacggtgcagaacacccagaccgaccgccgcagcgcgatcaagacagagcttgccaagcatttgcccgactactctgacgcacagatcaacgcgctgcttgaggacatggtgatgacctaccgcttcgctttccccgcagcgcttgtggactacaacgccgctgccggcatcacggcgaaggaaaacgtcgtcacggttgactacctcacgctggaggcgggcacgtaccgctttacgacctctgaaaccgagagcctgcaccagcgccagctcggcactgtgacacaggagagcattcccgcgagcggcacggcctatatgcgccgccagaccatcgagctcgacggccgcgacatcacgctccagacctacgcgctgcccggcagcaacggcggcgagacgaattatgtccgcctgcgcgatattgcgtctctcttaaacggtacgaacgcgcagttcggcgtggactgggacggcaatgtcattatcgtaccggatgaagcctataagccaaacggaacggagatgcaggcgccgttttccggcgaccgccattatcagaaagccgatgccaagactgtgatctacggcgagagcatcccgttcacggcgatcctgctgaccgacgatcagggcggcggctacacgtactacaagctgcgcgacctcggcaaggtgctgaacttcaacgtcggctggtcgaacggccgcgggatctatattgagagcaaccacgcatacgaagcctaaagccttcaaaaaagcggcctaaagggccgcttttttgagtgggagcgttgcaggccgctgcgcgcataattcgcccgctgtaagcgggtgaattccacacttgcggcctgagaagtgttttttctgacgcgcgtgtcgtcagaaaaaacgattaaaatttatttcgagcctgcgggctcgaaagtctgcgaggctcgaaagtatgcgacgcttttcagtgctttcttaaataaaaaagaggacttccgttcggaagtcctcttttttgactcagttgagcttgaggtgcttctgcatcacgccgaggagggggatgccgaggacatagcaggcgatagcttcgccgaggccgacggtgagggcgttgtagaagaacgcgggcgggaagccgttgccgacgcctgcttcctcccaagcgatgagcgcgccgatgaggatggcgttgcagagcacgggcggcagcgccgccgtccacttcttatggcagcgggcggtgaggagcgcggcgagcagcgtggccgccgagccgacgatcatgtcgagcgggccataggggctcaggatgttcgagagcacgcagccgatgaacagtccccagcttgcctcgggcatcaggaacggcaggaccgtcatcgcctcggaaaagcggagctggatggggccgtaggcaaggttcagggcgttggagagcatcgtcagcgcgacgtagatggccgcgatgagggcgcagcgggtgagctttttggtgtcaaagtgcatgggtcgggttcctttctgaaatcatgcgggtgggttggaaacggatgaaaaacacggcgcgggcagccagatggccgcccgcgttgtttcttacgcgaggtcggggaaagagcgcatcacttctgcgcagcgggggcagagaccctcggcgttcgcggcggtagagtgcttccagcagcgcgggcacttcgtgccggcggcttcctcggcggaggccttcacgctgtcgccgaccgtcacctcgacctgagagacgatcagaaggtccgcaagctccttgccgtccacatttgcgaggaatgcgtcttcggcgggaacagtcaggtgcacgtcggcctcaaggctcttgccgatcttcttctcggcgcgggcagcttcgagcacgccgttgaccacggtgcgcacctcggcgagcttctcccagttggccatctcctcagcggtgagggcgtaggccgtgaagggcttgttcatctcgttgagcaccacgttgcgcgcgtcgtcctcgccggtgtgcggcatggcgagccagatctcgtcgcaggtgaaagcgaggatcggcgcaaaaagcttggaaagcgtgtggagcgtgaggtacagcgcggtctgcgcgctgcggcgggacaggctgtccgcaccgtcgcagtagaggcgatccttcacgatatcgagatagaagcttgagagcgtggtgacgcagaaatcgttcaccgcgtgggtgatgatgtggaactcatagtcgcagtaggactgctcggccttttcaatgagctcgttgagcttcgtgaggagccagcggtcgagcttgggcatctcctcgggcttggtcagcttttcggggtcgaagtcgacaaggttgtcgagcatgaacttgcaggtgttgcggaacttgaggtagttctggctgagctgcttgaagatctccttcgagcagcggacgtccgcgtgatagtccgcgctggcggcccacaggcgcaggatatccgcgccgttctcgttgaacacgtccgcgggatcgacgccgttgccaaggctcttgtgcatggccttgccctcgccgtcgaccgtccagccgtgggtgacgcactccttaaagggcgcgccctggccgaaggcgccgacagcggtcagcagcgaagactggaaccagccgcggtactgatcgagaccttcgaggtacatcgtggcgggccagaagccctgatccttcttcatggacgcgaagtgcgtggagccggagtcgaaccagccgtcaagcgtgtcctcctctttggtaaagccggcgttcttgccgcagtgcgggcaggtgaagcccttgggcaggatgtcggcggcatccatatcgaaccaggcgttggagcccttttcggcaaagaggtcagagacggccttgatggtctcgtcggtgcagatgggcttgccgcagtccttgcagtagaacacggggatgggcaggccccagcggcgctgacgggagatgcaccagtcggcgcgctcacggatcatgctcttcatgcggtcgatgccccagcccggaacccagcgcacgtcgtcgcacgcggcgcaggcctcatccttaaaggaatcgacggagcagaaccactgtggggtggcgcggaagatgatggggtgcttgcagcgccagcagtgcggatagctatggacgatctcctcggaggcgaagagcgcgccgctctccttcatgtctgcaaggatgacggggttggacttctcgacgagcatcccctcgtacttgccggcatagtcggtgtggcggccctgatcgtccacgggaacgaccatgtccataccgtagcggcggcaggtctgatagtcatccgcgccgaagccgggcgcggtgtggacgcagccggtaccggaatccatcgtgacatagtcggcgagaaccagacgggaggtcttgggcaggaagggatgagatgcgagcatgttctcatagaagttgcccgggtgggtctcaacgatcgagtagtgctcgatcttgccgacggtcatgaccttttcgacgagcgcctcggcgacgatgtacatctcgccgttatcctcgttcttcacgatggcgtagctctcgtcggggtgcagggcgatggcaaggttgccgggcagcgtccagatcgtggtcgtccaaatgacgaagttgagcttggacttgtcgagatggctcagcttgccgagatcgtcgttcatcgggaacttgacgtacacggtcgtgcagggatcgtcctgatactcgatctccgcctcagccagggcggtctcgtcgtgatagcaccagtaaacgggctttaagcccttgtagatgtagcccttcttgtacatctcgccgaagaccttgacctcctcagcctcgaagccgggatccatggtcttgtaggggtgctcccagtcgccgagcacgccgatgcgcttgaagccttccatctggatgccgatgtacttgtcggcaaagtcgtggcaggcggagcggaaggcggaaacggacatggccttgtggttgagcttgttctgcttgatgatggcgctctcgatgggcatgccgtggttgtcccagccggggatatagggcgtgtagtagccgcgcatcgcgtaggaacgggtgatgaagtccttcagggacttgttgagcgcgtgacccatgtgcaatccgccgttggagaacggagggccatcgtgcagggcgaagcggggcttgccctcgttctttttgagcatgaggttgtagaggtccatttcctcccagtgcttgagcatctcaggctcgcgcttgggaagacccgcgcgcatcgggaagccggacttgggcatattcagcgtgcttttgtaatccatgttgcgtctccttcgtttatataaattttcagatcacttatctgatttttgccgcgacatgtgcgtggcaaaaattccttgacccagccgccttgggcggcgacgccagtgacttgtgtcactggtgcgggggactctaaaggggggatgaaatcccctctttacgaaaaaaatacgcgccctgtccccataaagagacaaaggcgctgacctctgcggtaccactcttcttgctgtgtcttgcacagccgctcaaatgctgcgatataacggtcgcacccgtccggccttactcatgagttcagtccggctgctccgaggtgatattcggccctgccgcgtcccgcctttcaccaaaacggcggttctctttgccgcgggggaggggcttacttgtcctcatccacgcatatttcataatgcagtagtaatatatcggcttttttgggctttgtcaaccccaccgcggcgctctcagggcagaaaaagatgtaaatttggagtaaaaacttgtaaactacggcaaaatacgcccgtgagcgcttgacagcgcaaaaaaaatgtgataccttttgcagcacggaaaaaagggagtagccggcgcccacgggcgttgagcagatcgtcatcgcgggagagtatccccggtctgcttgcgaaatggcaagacttttaccccgggcggcgcccgcggtagaggtcttttttcttttgcccggctaccaaaaccgactgaatataaggagtgtttacagcatggagtttttgctcgacggcatccgcgccgtcacaccgcagcagtgcgtgatgtatgtggtgggcgcgctgctcatctatctcgccatcaaaaaggactatgagccctcgcttctgctgccgatgggcttcggcgcgatcctcgtcaacctgccgatgtccggcgttctgaaccagatggtcgcgggcgtgggcgagagtcagggcatcattcagtggctctttgaaacgacgatcgaagcgagcgaggcgctgccgctgctgctgttcatcggcatcggcgcgatgatcgacttcggcccgctgctttcaaacccgaagatgttcctcttcggcgcggcggcgcagttcggcatcttctttgcgatgatcgcggcggtcatgctgggctttgacctcaaggacgcggcctccatcggcatcatcggcgcggcggacggcccgacgtcgatcttagtctcgcaggtcttacactctaattatatcggccccatcgcggtcgccgcctactcgtacatggcgctcgtgccgatcatccagccgttcgccatcaagctggtcacgacgaaaaaggaccgcgcgatgcacatgccgtataaccccaagcacgtctcccgttcgctgcgcatctgcttccccatcatggtcacgatcatcgcgggcttcatcgcgccgatgtccgtctcgctcgtgggttttctgatgttcggcaacctgctgcgtgagtgcggctgcttggagcgtctttcccagacggcgcagaacgatttggcgaacctcatcacgctgctgctcggcatcacgatctcgttttcgatgaaggccgaccagttcgtcaatctcaaaacgctcatcatcatggcgctgggtcttgtcgccttcgtctttgactccatcgcgggcgtgatgtttgcaaagcttctgaacctcttctgcaagaacaaggtgaatccgatggtcggtgcggccggtatctcggccttcccgatgtccgcgcgcgtcattcagaagatggggcaggaggcggactgcaccaatcacctgctgatgcacgccgtcggcgcgaacgtcgctggtcagatcgcatcggtgctcgcaggcggcatgatcctcaatctcgtgccgcagctcatgggttaaggaggaacgtactatgacaaaccttgagatcgcgctgctcatcacggggcagggaatgctcggcatcttcgccgtgatgggactcatcaccgtactggtcacactcttcactaaatttggtaaaaagtaaaaccccagacataaacaggcggccgctgccaacgcagcgaccgcctgttttaacatcgtagattttgcaccgcgcacggcgcaaataattttaatcgtaatttgtcgcgacatgcgcgtgacaaattactctctgcgcggagcgcgtgtcgcagccgcctcacgggcggcaaggcacgaagcgcagcgaatccccttgaaaaggcggcatagccgccttttcaaatactcaaaaacgagggactcagtcccacgtttttgaagtaatatagagcattaaagccgcgacatctgccggactcacgcccgagatccgccccgcctgccccagattctgcggacgaatggcggcgagcttttcgcgcgcctccagacggagaccgtcgattttcgcgtaatcgatatcctcgggaatggcgcggtgctccaggcgcgcaaactccgcgacctccgccatctggcggcggatgtagccctcgtacttgacggcgatctccacgctctcggcgagtgcgggcgggaaggcgcggcagcccgcatcaaaatcgcgcaggtcgtcataggtgagctgcggtcgacgcagcagcgcgatgagcgggctgccgtcgcgcacctccgccgtgccgcgcgcactcagaagcgcgttgagcgcgtcggacgaggggatgcccgtgtgctcgaggcgcttgatctcgcggcgcaccgcgtcgtatttgcccacgaccttttgcagcgtttcatcgctgacaaggccaagctcgtgcccgatgggcgcaaggcgctcgtcggcgttgtcctgccgcaggatgaggcggtactcgctgcggctcgtcatcatgcgatagggctcgttcgttcccttggtcacaaggtcgtcgatgagtgtaccgatgtacgcctgctcgcggcccagaatgaacggcgtttcaccctttaatttgcgtgcggcgttcacgcccgcgacgaagccctgcaccgccgcctcctcgtagcccgacgagccgttgaactgtcccgcgccgtacaggcccgaaatgtgcttatattcaagcgtcgggtagagcgcggtcgggtcgatgcagtcatattcgatggcgtaggccgggcgcatgatctccgcgtgctcaaggcccttgaccgagtgcagcatttcgatctgcacctcctcgggcatggacgacgaaaagccctgaatgtagagttcttctgtatcgaggcccatgggctcgatgaagagctgatggcggggcttgtcgggaaagcggacgatctttgtctcgatactcgggcagtagcgcggaccgacgccctcgatgacgccggagtagatgggactgcgatccaggttctcgcggatgacgcggtgcgtctcctccgtggtgtaagtcaggtagcagaccgcctgattttcgggcgggtgttccgtcgaaaacgagaacggcagcggcgttttgtcgcccggctgcacctccatctgagaaaaatcgacgctgcgcgcgttcacgcgcggcggcgtgccggtcttgaaacggcgcagcggcagtccgagctttttgagcgcgtccgccagcgtgagcgaggcgtgcatcccgtcggggccgctctcgcgcacgcattcgccgacgatggtgcggccatccaaaaatgtgcccgagcagaggatgacagccccgaccgcgtaaacgccgcctgtctcggtcacaacggcggacacgtggccgtcggtgacgcgtaagtcgacgatctccgcctgccgcagcagcagattttcctgcgtttcgagcgtgtgcttcatcacgctctggtagcgccgccggtcggcctgcgcgcgcagcgaccagacggcggggcccttgccccggttgagcatgcggtattgaatgcaggctaagtcagccgcccttgccatctcgccgccgagggcgtcgagctcgcgcacgagatggcccttgcccgtgccgccaatggcggggttgcagggcatgttgcccaccgcgtctaagttgatggtaaagcacaccgttttcatgccgaggcgcgcacaggcaagagatgcctcgatgcccgcgtgtcccgcgccgatgacggcgacatcgtagcttccggcagaaaattcacgcatagcctcagcccctttccagtgtgatgaccgccacctgcggcctgttcagaatgcgcgggatgacgcgcggcgagtttccgagcccgcggttgacgaagacggatgcgccgttgtctgaataaaagcccgccgtgtgcgtggggaagaggttcctctgcgtgccgaacaccccgcccacgaacggaagtctccagatgccgccgtggccgtgaccggagatcgttaagtctgcaccgaggagactgtattcgcccgcaaagcggtcgttccggtgcgcgagcagcatccagaaggggtcgccgcaggcggcgtagacctcctgagcaagctcgtacggcgtttcctgatcggcgtagccgttcggatcgtcgatgcccgcgagcacgatggtatcaccgttgcgcgcaagatacgtaaactcgttggagagcaccgtcacgccgctctcctgcagcgtgcgcttgatctcctccacgacctttgtgccgtgaccccactcgtggttgcccgtgacgtaatacgtcggcgcgatggccgagagcgccgcgccgacctcgccggcgtagatggtcgggttctcggtcttgcggtcgaccaggtcgcccgtcacgaagatatactccggatgcgcggccttgaccgcactgtacaggcgctcgttgcccttgccgaagtatttgccatgcagatcactgagctgcacgatgcggcagccgtcaaagcccgcaggcagcgcgcctgaggtgaatgtcgcctcgtcggtctcgatgctgcggttgccccagtagaggtaaatgccgaacagcacgatcagaatgagcaggttgcgccagaaatgatgtttttttctttgtctcgccatgggaactccaatctataaggaggctataagccaaaaagcctcgcagagttgcgtgccgcgcacggcacgcaatcaattcaaatccgttttctgccgcgacacgtgcgccctccagaggggcttctcttgcccgctgcggggcaattcaccttctggcagaaaacactttgcgcggagcggaaaacggtgaagcgccgtctgtgacggaaacagcaagccgttttc

SEQ ID NO: 10110 - DNA, 14544 bp, Unknown
  gut microbiota DNA sequence
ggagggtctcccctccggcgcttttacctgttcctttagtcacttgccgtgctgcatcgcgtcatagcgctgcatcagcaccgccatctgctcgcgcgtcaaaaagctgcggtactgtttgttccccgcctcgtctcccgcgatcaggccgtttttctccgcccaggcgcgcgcctccgcgctccagcctgccggcgtctgctgtgccagtcttttcaggtagttttccatcatcgcgtcaaactgctgttgcgtcatctcttcctcctcatagcgcggcatgggcggcggatagcgcttcgcgcggatcatcgcgctcgtgtacgtggcgcccgcgtcccactgaaaatgcggccggtcgggaaagctcccccagtctcctccccaggaaaatccgagcattttcccaatctctccgactcttataaagaacgcaggatcgtcgtactcgtgccccgcctcatttttgcagacatcaaaggccaatcctgcatgctcggcgtggaacgacggcgtcaccgctcctttggccgcgtagcccttctcggcgagcatccgctgatactccgcatcgcgcaccgtctccgtcactagaacgctcaacccctcgcgctcagcgagcataagcagcgcccggcagttctccgccacgtccgcgcgcaggtcgctgatgcttctgctgtggcgcatttacgtttcctcctgcgcgtttttgccgttctgcgtgccgaaataaaacgcgatcaccatgagatacaccgtgttgaactcctgcgtcacctttgcctgcaccgtcagcacacagaacgtgatcgtcaggcacagcgtcacgatgctcttcacgctcaaaagattcgccagtctctttttcaaaagctccatgctctctcacccctcgcagtcctgcccgcggcacaccgtttcatacgtcacgccgcccgccgtattttccgcctttgccttggcatagtagcacgcggcgctcgtgccgtaagcgccccacgccgccgtcaccatcgtcgcgatccacgggagcgtgcccataaagcccagttcgatcgcgagcttcgcgatcccgaagccctgatacgtcgtatagagcacgatcgcgctttcgagcagcagcaacagtttggaaaagctcgtacgtttccttttcataagctcccccctgtcatcagcagggagatcgccgccccgatgagcacgtacagcacgcgatcgatcatcgcatcccagcgctttccgcccttctgcgtgatggtcttcacgtccgccttgatctccttgacgtccgtctccacgcccttttcgcgcgaggcgagcacctccaccgccgttaccagcttattcaggtccttctgctgctgttccagcttttcgatgcggcgcgtgttcgacttggcgcgctgctcggtctccgtcagtttgaccgagatttcctgttccgtcattcttctttcggcaccgccttttcaaagctctcccatgtgtgatgcgcgttctccacgctctgccatgtaaatttctgtgcctcgcactcgagccacgtcagataccggaagtagaactccaccagcaaatggcacgggatgatatcaaggatgatgctctccacctgcgaaaactcatccggcacgcccacggtgttcggaaaccacaccttgaccgttccctttttctccgtctcctccgccagcgccttgatgccgcagccgctgagcgtcgagttgatcgcatccagcgtgaagctgtcggcgttgatgcgcgcgagcgccgcgatggcctcgcgccgcagcgcagtcgaaacgctgaccgggcagcgggaaaagagcttctcccgccttgcaaggccctcgccctccgccgtctgcaaaaggccctcctgctcggcgtattccatcgcgccgtccgcttcatccagcgccgcgcccgctgcgtacagctctccgccgctcagcgtgccgcgctcggtgcggtaaacgcgcatcggctccaaaaggcggcagagatagtcataatacgtcatgcctcacccgccccgatctccgtgatcgtcaccgtgccgagcaccggcagctccgtcgcgctcacgctcacatcctcgtccggcgtgagcaggtgacagttcttcacgccctccacaccgtagaggatgttcgcgagcttcgccgtatacaccgcttcacccagccgctcgccggtgaagtacgcctgcagcgccgccgtcgccgcatcggtgatctcctgcatcgtccagccctgctccgccgtcagctccgcgctcatgttgacggtcttctctgtcggcgccttgacctccacatccaccgcgatctcgcgctttttctgcaagaccgcctcgatctcgccgagcagcttcttatccggcgcgcccgcgtgcgtcgaaacatacacatccaccgtgccgatgccgcgggcgcggccgaccgctttcgccgccgccacgttcggaaagctcatcgcctcctgctcgtaaaacgccgcgttcgcgccgttcggcaggcgcttgtagcttgctagtacgcgctcgcgcagcttttcgtcgctctcctcgtcgctgccgccggaaaacgcctcaggatttacgcactgcgtgatgcccaccggatacacggacatcagatggatcgcgcccgcgatagcgttgccgctcgcccccgcctccacggcgctcgccggcacatccacatacgtttcgccctttgcaagcgtcgccttctccgtcgtctcaaagcgcacaccgccgctcgtcatcgcgacgctcccctgctcgatctcataatccgtcaccgccgccgacggcgcggaaaagcgcagcacgcccgccgctttcgccgccggaaggcgcgtcagcgcccgcgtctcggcgtgataatcaagatactgccccaccgccgtctgcggaaagctctgatccagcacccagtccgcctgcgccagaagcgactgtacctcgctcgccagcgcatagaggcgcaccatcgcgtcgcagccgtcgttcggcacaaagcccgcctcctcggcaaagatcgcgcgcatccgctcgtagatcgcgttcagctcttccattcttcactctccccctatcgtcacgaccgcctcgcccgtttcgttctcatagcgcagcagcacgcgcagctccaaaaatccattcttttccgcaagctccatgcccgtcacgctcaggccctcttcgtccgccagcgcctcggccgcgtactgctttgccgccgtcgcgcggctctcgcccttttcccgccataaaaggtgcagcttgctgccaagctctggcacgagcgcaaagctcccgcgccgcacactcagcttaaagagcacgcgttcgagcagctcgtcccagccgctcacgcgcacgagcccgcccgcgccgtcggccacataatcgcggtctttgatcttcagctccatcctcatcctcccgttcccagatacggcatcccattgatgaaaaggagcccgttgatgtcgatgcgcccgttgttgcgcagcacgatctccgtccccgccgcggcggagcgaatgcgcacctcaccgggtgccagatcgtccgcgctctgccccaccgcgcccacggcgtaggcctcctcgccaaaggtcccgccgcgcaccaccagcacatcctcgccctttttcggctgccactcatagccgccgggcgcggcggtcttcacctcgcgcttttccccgctgctgaacaccgccagctcgccgccctcgaccgtcaccgttccgtcctgcgccgaggccacgtcctgcatctcatgctggcttagctttctcgatagccacatcgtctctcactccctctgcatcgtcacttcgcacgcctctccgctctcgccaaagcgcctcacgcactcgatcacgcggaaattgcccacaatgccgatcttcgtcccgcttaccgccgcgatatcacccggcgcggcggtgaaccgccccgcgatcgtcacgcgcagtgtctccgcgccctccttcgactttgcgatctgatactcccccgtgtagcgcattgcctgcgtgccgctgcgcgccggcacgtaaaatacgcgcctgctcgtgccgccgcgagcacagaacgcctcgtttttcacgctctgcttcacgcccgccttactgtccaccaccagcgcctcggcgatcacgccgtagcgcttgtcgcagtaggcgagcgccgtcaccggcgttttggcgtcgatgctcacgcgcgcggccctgcggtttttcttcacttccagcgcgcccgtcttgtcgaaatacggcgcgatccctccgtgcagcgctgcaaaatcgttcagcgccttccactggctcgacccgttcgccacgcggtaccgcgccgcagccgtcaccgcgtcatagcccgtgcacacaatgccgtacggcgtcacatggtttttgaggatctcctccatcgtcgcccactgatagctcacgctctctgcctcgttgtcgagcagcagcgccgccatgccgcgtccgctcacctcaagctgcaagcccttttcatcgcatgtcacgccgcactcgtccacaacgcccgcaaattcgaccgcgccgtcctctctcgccgtgaagcgcaccgcccgccgcagcacctccgccatcgcaggctcgtatgcgcaccgcagcgtaaagctgtcgcacggcacgcttcccgtgtaggaaaattcccacttcagcagcgtcggcagctcaaactgcgcaccgtcgcacgtcgtcagataccccttcatcacggcagcgtcacccgctctcccacggcgatcctgttgggatttttgatctgcggattcacgttcaaaagcgccgtcagcgtcacgccatacgtgttcgcgatgccccacagcgtgtcgccgcgcttgaccgtgtagtacgggctcgccgttttcgttcccttgcccgcgctgccgcttccgccgctcacgcggatgagcgacgtatcgagtgggctcgtctcccagaaggcaaagcggtagcgcacgtagttttcaagcggctgctgcgccagttccagcaacacaaagtatgcctgcgacgcctgccacaccggatggatcagcagccccggcccgccctgatagaagaccgatgccagctttttgaactcgtcgtaggcgcccttccccgcaaaaacgccttcgccctccatcacgcggtagctcattccgagatcctgcatcccgtagcgcccgaacggcaccttcgccactgccacctgccgcttgaacgagatggtgtatgtctccgggttgtgcggccagacataatccttgtatcgcatcggtgcaaggttcatcctcccgcccctttctcagtaaaataaaaatccgccgtcgtatcggcgcgcgtcgcgctctaagctcagcgaaaacgactccgtctcacgcacctcctgctcctgcgcaagtgaaaagtcatttttccctcgcgctgccgccgcgctcgccccgtcgcggccgtccgcgctcaggagctttcttatccagtcggacgcattgtccgcgctctcggcctccctcgcgcgcagaagcgcagcgttcgccgccgcagcacccgccagatcggcagaaaacgccgtctccctctccgagccatcatcttcctgcgtcgcacccagcccaagcttttgcccaagccgcaccgccgccgtctccaccggatcatccgctgcttctgccacagtttccgcgccgccgctcatctccgcatcctgcgccgcggcttcctcttccgaaagctgcgcctccgccgcctttttctgcgccgtcccctccggcacaagggagaggcgctttttcagcgtctcttcccgcgcgcgccacagctctgcgcctctttgcagcgcccattcgatgtaattcaaggttttcgcccctccttcatgcggataaagcgcgccatatcaaagctcgcgttgccgccacctgcggtttcgccgagctttgcgccgcaaatgctgcaccgtgcctcctccgcgcgcgtccggcactcggggcacagccgctccatcgcctcctcgcggtcgagcatctcgtgcacaaggcaatagaggtagtccgcgtccgtcatctcctgcgcgcgcttttcgctcggcagcgcgccggcatatcggagcacgcgccatttcagccgttcgtagggcgcgtgctccatgctttttttagcgcttccaccttctcgcgcccgtcctcgctcgacgggttctccgccccgtcaagcagcgcgtagcaccgcaccagctcgttgatctcgccgacgctcagtgcattttcaacgtcctccgcgcttgcaaaggccgcctctccgccctccgtcaggcttcttttgagcagcgccgcgttcgcgcgcaacgcacgctcttcttcgtcggcgcagtcaagctgcgcgatctcgcgccgcagcgagagcgtctcgcgggccgaaagcagccgcatcgcgcacgttctctccccgatgcgcaccgtcttctcccgctcgcgccccaaaaagttcagcagaagctcgtccatcagcttgcgatctccatgcgcttacgcgcgatgatcgtcaccttctccgccgccgggtcgccgagcttgcccgcctcttcaatgctgctccagcggcactgcgagtagatgatgcgcttgtccggcttgcagatcacaagcgaaaagtcgttcagatcatagaagttgatgccgtcgctgatggcctcatccgtcgcgtacaggcggctcaactccagcgtgtacttgttcgcgcccgcgatcgtcgccaccggctcgttttcgccaaaggcctcgatctcgcggctcgtgcgcgtcgctctcgtcgtgtagctctgcaccaccgccacctttttgccgtcgacttcgagatagatgtcgctgctcagcggcaataccgtattcgccatatttttcctccttacaccgtgatgtgcgccgtcagatagatgcggttcagcccgtgcgccaccgtaaagctgaattccaccaggcacaccgtcgggtcgctcttgagcgcgctcaccagcacctcgccgtagctgtccacgatctcgcggctcttcatctcctcgagctccagcaccacctgcgagcggatggccccgcggctctgcgcggtgtttttgctgcgggcaaagcgcgtgcgcagcgcgctgcggatcgtcgggatgacctcatccacgatcaaaatggtcgtcagctcgcgccacgtcgtgtccgccgccccgccgctcgaagtcttcgtcgtgatccctctcaccggcgaggaaacgccgcccaccgtctcgatcggcgtcacgccgccgcgcaccagctggtcgatctcattgtcactcagtctcttgcccgccgcgccgaaaagcgtcagctccgcgccgttgataggcacggatgggtcggtgtttcccgcgatcaccgccgccaccgccgccgcggcaaacaccgcgctcatcgtaccgccgccgtccgatgcgatatccggtcccaccagcactacgcgctcgctgttgacagccttcgcgcggttcaccatctgcgcgaccgtctcttccgaaccgccgatgaccgcgatgcgctcgtgtctcgccgccgaggcatcctctgccgccgttttgaggagcagatgcacgctctgcgccgcgctgtcgcacaccatcacgccgacatcttcctcatcagagagcgccgcaaacgcgctcgcgtagtccttctcttcactctcgtccttgcccacggccacagccttcactgcacccgcgccgttggcgaagaggaatctgagcagcgtgctcatgccatacacgccgctcgcatcctccccgaatacgctctttccctcttcatacgaggtgatgagctccaccttattggccgtccccttcgtcgccaccgctgccgcgccgatcgtctttgccgcagcgctcgcgctcaccacgctcgatgcgtcgtaggacgaatacacgcccggccgctcatggatcgtactattcacgttctttcaccgtgcctttcaatacaaaatcggtaaacaccgtctcatcctccgccgtctccgcgacaaagtacgccgcatattttgcgctcgcgtccagccggaacatgcccgtcgtcttgtcccagccggtcttgccccactggagcgatccgagcttcagcccctccggcagcgccgtcatcagtgcctgcgtcaccgcctccgccgctttttcgcagcccgccgcgcccagcgtcctcggcgcatacacctcgatgagcagcgtcagcagcatttttctcccgtagacagataccgtctcctgcgttgcctcgtcgaccttttctcccagatactgcgccgcgccgctctcctcgatcaccgtctccttcgtgccgaccgccgccaccgcggtcgcataccgcttgagctgttcttcgctgtaactctcgatcgccgcgcaccccgccgccttgatcgccgcagccaccgcgcgcttcacctgtccgaccgccgtcatgcctcttcctccttcggatgcagcatcgcccagtagtaggcgatctcctcacccacgtaaaacggccccgccgcgcgcacgacgtaccgcctctctccgcactgcacaaagtcgcccatcgcgaccgcaacgtccgccgcccccaggtaccgccagcactgctcgtcgaccgcgcccagcgccgttacagagaacggctccttgccgttctccctcttcacaagctgcaaaaatgccttcgtctccgccgtctctccgccgtgcagcaccgaaacgctcatgccgtagcgcgcaaatgcctcactcagcgcccgcttcacgtctccaccccgcggaagcagaacccgccgtccgtcgtatacgggcgcatcagcgcccacgcctgctcgcgcagcagcgacagccttttgctcccctcatcggacgaacgcttcgtcactgtcaggtcgcccgcgcgcagggaggaaaactcctccccacccgctctcgcgctctccagcgcggccgccgccaaccacgacgccgcgcagataaacgcgctctcgcagtcctccttggcgacgccctctttcagcgcgcgcacaaggctctcctcctgcgccgtgcagatcattcggagcatgctcttctcgctctcgtccgccttgctcagcgcgcacgcgatcgaaaagatctgctcgctcatgctctccgccattcgctcttcctccttactttttactgtaaggacagcaccttcgaggcctcctgatacggctttgcaaagccggaaatgctcgtgatggccgcgcgctccagctggcggtcgatgagcttgtcgtactcgaccagcacctcgctgccacagatgcgctcgagcgcatagttcttgtcaaggccgatgatcttgcccgcgggcattgcgctcgtgcgcaggagcttcgcacccagcggggtcgcgagcgtgcccgtgccctggaagttgaggcccgtcagcgggttctggaactccgagagcttgagcatcgcgagcatcatgtcgctgcccatcagcatcgtgttcatcgtataggggtcaaactgcgaccagaagcccagcagcgcgtcatagctcagcgtgcccttcgtgccgccgatgccgtcatcgccgatggtatagcttgttgccgcattgttgttgccgtcgccgttcatcaaaacgtcgatggcgtcctttaagtgcatgcgcgcgatgtacgcgccgatctggcgcagcgtcacagagaagaggtccagtcgctggaagcggatagcctcataggacgcgaccagcattctgccgcgcttgtggagcttcacaagattttcctgcgtgcggatgctggtcgtcgggatgcccgcgccctcctccacgcgcttgagctccttgtcgtcatccgtcggaacggacgcgatagagcggtagtccatgccgtcaaaattcgtcacggtcgcagtgatgtcgggcaggatgtcgctttccatgccctggagcaccacgcgggagacgaactccgggaacagcacggacgattcgctcgtgtggaaaaacttttccaccatgtcgctgcccgcgcccttgacgtggatatcaaagcgcttgagctggcgctgaaaggcgtccagcccctcgagcgccgtgcccttgtagttctcgctcgggtcgagcgattcgagcaccttcagaaaacttctgccgctttgaccgtacatgcccttttcgagcttcacattttcatactgataagccatttgtccttctcctccttaaagcttgatgacggccttgtccgccgcgctgtccacgctcagcacaagatagctgctgccgctctggttctcgcccggcttgctcacgccgcccgagccgtccgccatcagctcagtgtagcccaccgcaggcgccgtgccgctgtatttcacgctcgcaaggccgccgagctgcaccgtgcaggccttgccgtcatgtgcgacggcgcgcaccacgccgcagaagccgtcgcccgccgtgcacttgcccaccgtgccgttcgcgctcaccttcacaatgtcgccctcactgaccgcgccgcaaacaaacgttgcgcaccactcgccgatgccctcataagaaatgctcataccgttcctccttgatctgttgttctatccaaaaagcgccgctgctttttgttccttttcacacgcgaaagtcgctctcgtcctccgccgctttcgtcttctctccgtaagtgagctgcgtgcgcagccccagctttttcgccatcttcccgcgatacagcttctccatctccttgagctcgctctcgtcgagcttttccgcgagcttttcaatggcctcgccatccgcctcctgctcgcacacgagcatcagccgcttcacctcgccgcgcagctcactcaagtagcgcttaccgacctccgcctgcttttcaaggctttcaagctccctctggttcgctcttgacccgcgccgcttgacgagcgtcttgagcgtgcccgcgtcctctccgccgcagcgcttcaaaacgcccgctctcggctgcgccggcaccgctacaaagctccactcatacgcgtcctgcgcgttcacaagctccgcgcagcacaccttgccgccgtacacctcgccctttttgtgcgcgcaggtgttgatgtcctccccacagatggagcacacgcacctttccacgctgcaccccacgctcacttcctttttgatgccgccctcgatctgcgcgatcagcgcgtcgttctcgccgccgcgcagcatatacgcatagcccttgagatagcagcgcccctcgccctgcgagcaaacgccctcttcctccacgatctccgtgcggtagatgcgcgccgcctgccccttcgccgtccactcgtggtcaaaaatgccgcttttgcccacaaacagctccgcgagctcttcgagcgtcgcgcgcggaaagcgctcgccgtcccggtccacctcgttgtcgcacagccgcacggcaaaggtgtagacctcgtcctctttgagcgcgcgcttcgtgaactgattgatgattgccagttcctcgcgcgtcaccatgctgtttttgagcccattgctctcttttctcacttccatgctcatttcccctccgcttcatcattttcctgcctgagctttcgcgcctgctgcaagtagagtgccgctttggcctcctccacctcatcctgcaggttgatgtcctcccagtccaccaccgcacggcagccgtagccgtgcatcctaagccacagcgtacagacgcgctcgatgaccggttcgagcgtgcgccgcagcgccgtgatctcgcttgtcagcatatccgcctgctgcgagctcatccgctcggtcgacgaccagctcagccccagcataaacggcggcagccccgtcttcgccaccagctgctctaagatctgccgtaccggtgtctcgctgtcgaggatctggttgtccgcgccgatggccttgatcgatacatcgcccaccgatacaaagtcgcgcacgctgccgtttctgccctcctgcatcgcccgcgaccattcctcggcgatctgctcggcgcgctcctgtgccgccccgcggtcgagctcgccgtcctgcggcttataggtcaccgcaaagcgcacattgccgcagcggtcccagttctttcccatcgcgtcgtaaattttcagcagcagccccgttaagtacggcatcgagcgcagcatcgaaacgccgtaagggtgccccgcttcggggttgagcggcgtaaagagcagcaggtcctgatactcgagcggcacgctgcgcccgccgccatccacaccgcacaggcagaattcgagcggattgtccccctcgcgcacctccacctgcgaaacgtccgcgcacagcaccgccgcgatctcgcgtccttccgcgtccggtacgatctcgcccaccgcgcgcccgtaggtcaaaagcgaatcgaggtaacagtccaaaaaggcgttgatgcctctctgccctctgcccaccggcacctcgcacaaaaagcgctgcaagccctgctccgcccgctcgttgccgcatgccacgcgcacgccgcccgtcagccggatcagcttgcagatggccgcgtccaccaccggcaccgcctcgcgcacctcgcggtaaagcgctgtctccccgtccagcagcggcacatagctctcaagccgtccgaatgtactgcgtccgccgctgcgcagctgcacggcggtctcgccgcccgtgcttctctccttctgccagggtactttcatcctgtcctctccttttccgttttgttcatcgcgccgcgcgctccaccgcgcgcatcgcaatgccgcctccgcgttcctttttcgcgatcgacacggcaaaataccgcatctcatccatcgcgtgatctctctcctttttcggccggtctcttcccgttccgctgtcctcccagcagtacgccgcgatctcgctaaggcagctctcgcagccctcgcagatcacgatccttcgctgcttcaataggttcgccgtcacgcggatgccgtccgccacatcgttgtccgccctgctcacagggaatccctcgcgccgcagcgcctcaataaagctcgccgccgacgggtcgacgatcaccttttccactgtctcccccgccgcaaattttttaaggtccgccacatactccgtgtccgtcttctgccgcccctctctgcgcgaatcgaagtaatactcccgcgcccggtaccacaccccgtccttgagcgcccacaggccaaaactcgtcggattcaccgtcccgtagtcgatggagatcctcacccgctcccacggcttttccggcacacgagcgcaatactcctgcggcgtaaagaagtcatagatgagccccttcgccgccgtccactcgcccaggatgaaccgccggtaaaatgtcccgctgtatgccttttcgtaccgcgcccgaatgcgcggcgagagcgacggattgtcgtccatcgtaaagtgcagatacagcgccccgcgctcctccgcgcgtaagatccactcgcggtagaaccagtgcatcggcccctcggggttgcagttgaaccacagcttgctgcccgatacgctgcatcgcgcgctcgcctgctccacaaacgagcgcggcatcagcgccgcctcgtcgaacagcacccccgccagcgtcacgccctggatgagcgccgcgctcccctcgtcgtatccgccgaagaggtaaaagcggttttcccgccctccgcttcgcacgatcactaaattctcgctccgcttctcctcgcagtgaaagcccagcgccgtcaccttcggtaaaatctcatgcagcacgttgcgccgcagcgacacgatcgtcttcccgcacagcgcaaattgctcgccgctaaagcgccgcatcgcccacaggaaaaagcccatccccatcgacagcgtctttccgcttcgcaccgccccgtcgcagatgatcgcgtcgtactcttggtaccttggattcacccaccaggtcattgccgtcttctgcttggcggaaaactgcttcacgcccgccaatcgtccttctcctctcccgcctgctccagcgcctgcaagaactccgccgcctcgtccgcgtctccgccgcccagcatgtcatagagcgcgctgagcgccttcacccggtcgacgaacttgacctccaccgtgccgttgccgtttctcttgaactccgccaccgccgacaagtccatctttcggatgagctgcgccgtcggctcgctcagatacgtcagctccaccccgcggttcacccgtccgaacgcgatctccttgagcgcctcgatcacatcctcgcgccccagctcctttttctccatcgtgtccccccattttgttttctcttttcactcgaaccccgccgcacccgttttgttgcacagtcgtatgcacgcgcgcaaaattttgcgcgcaaaaaatgccgcagtacctgcggcagcgaaaaagggaggggcatctcttttca

SEQ ID NO: 10111 - DNA, 85781 bp, Unknown
  gut microbiota DNA sequence
gatcgagaagtaccgccgcgcgctgctaagctttgccgcatttttgagcggcgcagcggtcacgcgagagatgatccgcctttggaaagacgatctgcgcgcaagtaactacgcaccgtcgaccattaacgcttgtttggcggcactgaatggctttttctgcttctgtggctggacagactgccgagcacggttcttaaaaattcagcgccgcctgtttcgcgacagcaggcaggagctaacgcgaggggaatacgagaggttggtcgctgcggcggaggccacgggcgaccgcgccctcgcgctcctgatggagaccatctgctccaccagcatccgcgtcagcgaggtgcagtagatcacggttgaggccgcgaagaacggcaaaacagaaattgcgctcaaaggcaaaatccgcacgatcctatcgcgcctatcagggcaagtagatccaactgaaaaaagcggcggttcatcagaaccgctgcttttttgcgccgcattgacaagcgctcccgccctcggtatactatgaccaaaagcaagacggcagtcaaaaatgcagacgagtttgagagattaaactcgaaaaggggagagcaaatgaagtatcttggaaagcctgcgggcatgtgggcgctgtttgccggatcgtttgaaaagcacctgacggtcgaattcgacctgaccgcggagcaggcgaaggacgttgcggcgcgtgccaaaaagaaatatcgcgagatcatcgcgaagctgccggaatttgacaagcgcgaccgcttcgaaatgaacatcgtcaactgcgcgatgctcgccgcgtttatcctgtgcatgccgcagcggccgaacatcaaaacgctgacggactactacgccgcggcgatgatgacgcctacgatgaaggctttctgccgcgcgagcggaaagaaaaagttcacgcccaaggacatcgagggcatgaaggcgacggcgaagctgcgcgcgggcgaccgcaacccctattcgtggaacatggactttttcgagtacgaggacggcagcggctacgaggcgcgcttcacgacctgcggcatctgcacgctgatgcaggtgttggggctctacgatctgacgcccgcgctgtgccatctcgactacacgatgagcgacgcgggcggcgcgtcggatttcgtgcgcgagtacacgctcgcctccggcggcccctactgcgactgcgggtatcacaaaaagcagtgaaaaaaacaaaaaggatgcgtctttcgatgcatcctttttcctttctgtaggggactcaatcttcgttgtaggcatccgaggccttgatgcgctggtacatgtcctgcatctggcggtcgatctcagcgatcttgcccgcgcattcgaacatctcctcgttgatgccctcgggcagcttcgttttgtcgaccttgtagcggatatcgtgctcaaggctcgcccagaagtccatggcgatcgtgcgcagctggatctccgccacgacgtattccgtccggtcggagaggtagacgggcaccttgatgtccatgtgcagcgagcggtagccgttgtagttcggcgtctggatgtagtcctgctttttgacgatctccacatccgtctgccgcgccagcatctcgcccacgcggtagacatcgtcgatgtagctgcaaacgacgcgcacgcccgcgatgtcgttgatgttttttcgcgcggactcgatcgagagcggcaggccgcgtttgatgagcttggcgacgatgctcgattgcgatttgacgcgcccgtcgatgtgatgaatgggattgcgtgcataaagaacattgaattcactgttgagaatattgaatttcaacgtgagctgccgaaccgccgcgtcatagagattctgcatgacaagaaagtcatgcggatcttcgcagagtgcggcgccgttccccgttcgattcattctgagccttcctttccatcggaagcgtcaacgcccgcccgatgtgcttttgttcctttcagtatagcagacgatcaccgccgcgccaaggggagaaatgttgattttccgcaaaagtctgcgcgaaaagagcagcgggcgggagaaactaccaagcgacgggcaaaagaacttgcaatgcagcgcaagccattctataattaacctgaaaggatatgcacagcgttcggcacttccgctccggtggcagagcgaacgcgcggaaggtgcagaaaagaacaatggaaaaaaaaggaaaacagcaatttcttctggtcgcgttcggcgtggcgctctatgccgcgctgatgaatctcaacgaagtcgcggcgtttctcacgaggctcgctaccctcttcacgccggtgatcatagggttattgatggcgtttgtcctcagtgtgccgatgcagggcatcgcaggacgtttgacgcgcctgatgccaaaggcaaaggaaaaacacattgaccttctcagcctgctgctgacgcttttgtgcgtggtcatcgtcgtggtactgctgtgcgttctggcgctgccgcagcttgccgcgtcgctcaagagcatcggcacactggtcagggagaactggccggactgggcgcgccttctctcggatcacggcgtggatacaagcgagctcaccgatcgcatcgccgcgcttgattggaaaacggtgctggaaaaggcgctcaccggcgccggcgcgctgatcgattcggtggtggatcttgccggtaccacagtctcggcggtggccaacgtcacctttgccatcgtcatcatgttttatgtgctgctcgaccggcgcagccttgctaaacagagccgcagactcctctacgccaacctgagcgagcgaaaggccgatcaggtctgccgcatcgcgcgcctgacgcacaccacctacgcccgtttcctgtccgggcagtgcgtggaggtcgtgatcctcggcacgatgatctttctcgcgttctccctgtgcggcattccctacgcggggctgaccgccgcgctgacggcggccttcgcctttgttccctacatcggcgcgctggcctcctgcgcaatcggcgtactgctgacgctgcttgcccagccggagaaggcgctgctgtgcctgatcgtctatcaggcggtgcagttcacggaaaatcagttcatttacccgcatgtggttggcagcagcgtggggcttgcgccgctgtggacgctccttgcggcattgcttggcggcaagctcttcggccttgtcggtattgtgtttttcattcccctcacggcggtagtactccagctcgtacatgagcacaccgcacagcagctttcggaaaagaaactcgaccgcgaggatctgatcgaataacaaaaaaggacgacagctatttttagctgtcgtccttttttgtgcggtcacgactgcgccatgcgctcgaggagctggaaggcctcttcgagcttggggtcgatatggtcggtctgcaaagcctcgcgcacgcaaccttcgatgtgcgcgcgcatgatctgctggttggcgcttttgaggagcgactgcgtggcgagaagctggttggagatgtccacgcagtagcggtcgtcgtcgatcatctgcaaaatgccgtcgagctggccgcgggcgattttgagcttgcggcggacggaatcacgatcggctctcatggccttagcggatggagacggcctgatagcccgcctcatcgaccgcggccttgagcgccgcgtcggttacgctgccgtccacgctgacggtggcggacttgctctcgagatcgacctttgcctccttcacgccggggacggcggaaagcgcctgctgaacgtgattcacgcaatgcatgcaggccatgccctcaatgctgatgactttttccatgtttgtttctcctttttcattacttgccataatttccttgcttgctatctccactccgcgatccgacggagaagaaaccgttttcggtgctgcctccgtgtgcttggccttgaaccagcgcagacgcagcgcattgctcaccacaaacaccgagctgaagctcatcgcgagcgcgccgagcatcgggttcatcttgagctggaaggcggggtagaacacgcccgccgcgatgggaatgccgatggcgttgtagaagaacgcccagaagaggttttccttgatgttgcggatgaccgcgcggctcaactgcacggcggtcgagacgtcgagaaggtcactgcgcatcagcacaatatctgccgactcgatggcgacgtccgtaccggcaccgatggcaatgccgacgtctgcgcgcgcaagggcgggcgcatcgttgatgccgtcgccgaccatggcgaccttcttgccgccctcctgtaagcggcggatctcgcgttccttatcctgcggcagcacctcggccacgacgcggtccacgccgacctgacggcggatggcctcggcggtcttggcgttgtcgcccgtgagcatgacgacttcaatgcccatgctcgagagctcggcgatggcctgcgcgctcgtgggcttgacgacatcggctacggcgatgaggccgatgagcttgccgtccagcgcaaagtagagcggcgtcttgccgtcctcagccagcgcttcgccttgtgcgagcagctcactgttttcgatgcggtttgcttccatcatgcggcggttgccggcaaggcagagctggccctcgacctcgccgcggatgccctgaccggggatctgctcaaatttgtcgacggacaggaacgtgagcgattccttctccgcctcggccacgatggcctcggaaagcggatgctcggagagcttttcgagcgacgcggcgacggagagaagtttgtccctgccgatgccgccgtcgacgacgtcggtgacgacgggcttgccctgcgtgatggtgccggtcttgtcgagcacgacggtgttgacgctgtgcgtcgtctcaagcgcttcggcagacttgatgaggatgccgttcaccgcgccgcggcccgtgccgaccatgatggccgtcggcgtggcgaggcccagcgcgcaggggcagctgatgacgagaacggaaataccgatggacagcgcaaattccacgctgtggcccgtcagcagccatgctgccgttgcgatgacggcgatcgtgatgacgacggggacgaacacgccgctgaccttatcggcgagcttggcaatgggcgctttggagctcgtggcctcgtccacaaggcgtacgatctgggaaagggcggtatcgtcgccgactttggtcgcgcgcatcttgaaatagccggatttgttgatggtcgcgccgatgacgctgtctcccgcctgcttttcgacggggatgctctcgcccgtcagcgcggattcgtcgaccgaggacgttccctcgagtacgacgccgtcgacggggacgctctcgcccgccttgacgatcagcacgtcgccgagttggacctcctcgacggggatgacgctctcgacgccgttgcgctcgaccgtcgcggtcttgggcgcaaggtccatgagctttgtgatggcatcagaggtcttgcccttggcgcgggcctccatcgtcttgcccatggtgatgagcgtcaggatcgtgcctgcggactcgaagtacagctccatcatataggtgtgcaccgtgtccatgtccattcttccaaagccgatgccgatcttatagatggcgtagatgccgtacacgatggcggcgctggagcccagtgcgatcagcgaatccatgttcggcgagcgctgccacagcgtcttgaagccgacgatatagtactggcggttgatatagacgatgggcagcagcagcaaaaactgcgtgaatgcgaacgtcatcgcattttccatgccgaggaagcacgcgggcagcggccagcccatcatgtggcccatcgagagatagaacagcgggatggtgaagatgagcgagagggcgagacgctttttcatgtcgctgtacgccttctgtgcggcgctggcgccgccggtctcggcagtctgtgcggcgggggcgctgccgggctttgcatgcagagacgcaccgtagcccgccttttcgaccgcggcgatgatctgctcggacgaaagctgggattcgtcgtattcgacgaccatgctgtttttcagcaggttgaccgcgacctgctgcgcgccgggctgcttggcgacggccttttccacgcggctggagcaggcggcgcagctcatgccggtcacgtcataggtttcctttttcaatttgattcctccttcgggacaaatacaatacccgtgtggggtatttttcatttaccaacagtataggtcggaaattggcggattgtcaagacctcttttcgagaaatttccgtttgggcgaaagttgcggcgtttcggtcgggaaaacttaccgccgccgcgccgctggacagcttgcatcccttatgataaactgacggcatgagttttatgataagcaggtgaaaaatgaagcaaaaacatatcttgaaatggcttggcatctcactgggcgtgtaccttttatatggggtgctgacagccattctcgtcccgctgccgcaaaaagaggcgacaggggagctgtggagccagtatgaagcccgattgagcgaggacgcatcgcaggagcgcgtgaggagcatcgaggatacggacagtgcgctgctctggcgcttgcagctcatcgagagtgcggaaagggaggtcatcttctcgacctttgacctgcgcgcggacggcagcggacaggatttgatggccgcgctctatggcgcggcgcagcgcggcgtgcgggtgcgcgtcatcgtcgacgggctgaacggttttctgcatctgcaaaacagcggcgttctccgcgccctcgcggcggaggagaatgtggaggtgcgcttttatgatcccatcgacctgctgcgcccgtggaagctcaactaccgtctgcacgacaagtatctgatcgccgacgggagcaaatacatcctcggcggaagaaattcgaacgatttgttcctcggctcatatcaggagaaccagaacatcgaccgcgacgtgctcgtcgtgtcggatgggggagagggcagctcggtctcccagcttttgacgtattttgaaagcgtctggtcgcagccggagaataaaaccatcacaggcaagacgtcctcgcagaccgacgcgctgcaggagcgctacgcggcgctatgcgcggtgcatggaaaagagcttgccgccgtcgactgggaggtggagaccgcggcggtcacgcatgtgagccttctcagcggctcgccgcgcgcggaggcgaaagcgcctgagctgtgggacgcgcttgtccgcctgatggcgcagggcgatgacgtcctgctgcaaacgccgtacatcatctgcaacgacaaaatgtataacgatttggaagcacttgccgagacgcggcagctgcgcgtgctgacgaatgccgttgaaaacggcgcgaacccgagcggctgctcggactacttacgcgaaaagcaaaatattttatcgcgcggcgtcgacgtgtacgaggtcgtctgcggccagtcgctgcacacaaagacgattttgatcggaaacgatttgagcgtcgtcggttcattcaacgccgacatgcgcagcgcatatctcgacacggagctgatgctcgtcatcgagagcgaggaggtcaatgccgcgctgcggcaggagagcgtacagtacatcgaccagagccgcctcgccctgcacgacggcggcacggaacacggcgcgcggtttgaagaaatgacgctgccttgggcaaagcgcgcgctgtatacgattctgagcgttgtccagcgcccgatccgccacctgctgtaacgaaaaaacgcggcatagcggaaaatgagggaaaggaatacagattttgcccgtatttccgttttttcgccttgcaaaagacgttcgggtttgctatgataaaaaatacgtatggatacgttccgctttttgtggagacagaggataagaaaggaagatcgttatgatttacacgaccgaagtgcagcatatgtgccccgttgcgaagggcgcatatcacggtccggccccgatccccgaagagggcaagtgggtccaggccaagcagatcgccgatatttccggcttcacccacggcatcggctggtgcgcgccccagcagggcgcctgcaagctgacgctcaacgtcaaggagggcgtcattcaggaggctctgattgagaccatcggctgctcaggcatgacccattctgctgccatggcttccgagatcctgatcggcaagaccattctcgaagcgctgaacaccgaccttgtttgcgacgccatcaacaccgccatgcgcgagctgttcctgcagatcgtctacggccgcacccagtccgccttctctgaggacggccttgctgtcggcgcgtcccttgaggacctcggcaagggccttcgctcccaggtcggcacgatgttcgccaccgccgaaaagggcccccgttacctcgagatggccgagggctactgctcccgcgtcgcgctcaacaaggaaaacgagatcgtcggctacgagttcatcaacctcggcaagatgatggacttcatcaaaaagggtatcgatgcgaacgaagcgctcgaaaaggccaagggtcactatggtcagtgggacaacgctgccaagtacatcgacccgcgtcaggaataaggaagggaggacgaaacaatggctttatttgaaaactacgagagaagaatcgacaagatcaacggcgtcctcgctcagtacggtatctcctccgtcgaagagtgccgcgagatctgcaaggccaagggctttgacccgtatgagatcgtcaagggcatccagcccatctgctttgaaaacgcctgctgggcgtacaccgtcggcgcggccatcgccatcaagtccggcgtgaagtccgcggccgaagccgccaagatgatcggcgtcggcctgcagtccttctgcatcgacggctccgtcgccgaggaccgcaaggtcggtctgggccacggcaacctcggtgcgatgctgctgtccgacgagtcgaagtgctttgccttcctcgccggtcacgagtcctttgccgccgctgagggcgcgatcggcatcgtccgcaacgccaacaaggcccgcaaggagcccctgcgcgtcattctgaacggtctcggcaaggacgccgctcagatcatctcccgcatcaacggcttcacctatgttcagacccagttcgactacttcaccggcaagctaaacatcgtgcgcgagatccgctacagcgagaccgagcgcgccgacgttcgctgctacggcgctgacgacgtccgcgagggcgttgccatcatgcattccgagggcgtggacgtctccatcaccggtaactccaccaacccgacccgcttccagcaccccgtcgccggcacctataagaaagagtgcattgagcagggcaagaagtatttctccgtcgcctccggcggcggcacgggccgtaccctgcacccggacaacatggccgccggccctgcctcctacggcatgaccgataccatgggccgcatgcattccgacgcacagttcgccggctcctcctccgtgcccgcgcacgtggaaatgatgggcttcctcggcatgggcaacaacccgatggtcggcgccaccgtcgccgtggccgtcgccgttgcggagagcctgaagtaagagggaaaaccgcagggtttgtcgttccaaggttccaaaacctgatttttcatcaaacataggcaggaagcacatcttccgcacgaaaatgcggaagatgtgcttcctgtttttgcgtattgggagggaaaaaccgtgaagaaaatcaggatgtgcttcccgaatgagaagacgttcagggaagggttcgaagagtatattttggactgtaaggcccgcaatctgcgggatggaacaatcaaccattatcaggaatccatcaagcagatttacaagcgaatcacaccagatacgctgatctcttcgatgtatcagcaaaccatggcaaacttctatatttcactgagggatgaccctaggctgctatgagcaggtcatgggcgaaccgggcaagtgccttgttattggcggcgggacatatgcgcactttctgaaaaatggcgtggcgtttggcgcttcccgattaggtgtagattatcacatgcacggtgcaaatgagtaccttgtggcagatgagatcgtgcgaagcgcggaactgtttgcgctgaccattgttgcactttgcggcgaacacgctgagccgatgtaaaatgcggttatgtaaatagcacccatcggtatgatccgatgggtgttattatttgtgctgtgttttttgacagacgaatcggattcttgcaaaaatgcccaaagatgtcaatagcatccgttcgcctgcgcaagaattttatggcgtgcggacagaaaagactctttcgtgctgcgagacggcgacagacagcagatttcatggcgataatgacgaatttctgtcattggagtgtttttcgtagaaatacatctgtccactccttgcaatttcctgcacataaagatataataaaggccgttaatgaaagcgcctttgcggcctgagcagagagaagaggatcgtaagagcgttagattttgaaaagaaagaagatgcccctatgaatccctttgtgaagaccctcaaaaaaattgccgccgcgtataacggcgtcagcctgattttgcgcatcgcgatcggccttgtcgtcggcgtgatcctggcgctggtctgtcccggcgcgacgtggttacaggagcttggcaacctgtttgtcggcgcgctcaagggcattgctcccgtgctggtgttcgtcatcgtggcgagcgcgctggcgcagggcacgtccaagctcgaccgccgcttcggtacggtcgtgtggctctatatgctcacgacgttcctcgccgccattttaagcgttgtgacgagcacgatcttcccgcagacgctggtgtttcccgaggcggccgaggcggaggtcatcccgcagggcctcggcgaggtcatgcacacgctgctggctaatatcgtctcgaaccccatttccgccattatgaacggcaattacatcggtattctgatgtgggcctgcctcttcggcgttgcgatgaagaagttcggtgcggactccacaaaggtcttcctgagcaatgtgtccgacgcggtctcgaccatcgtgcgctggatcatcaatttggcaccgttcggcatcatgggccttgtgttcacgaacgttgtgagcaacggccttgcgatcttcacccagtacggcaagctcctgctcctgctggtgggcacgatgctcttcatggcgctcatcatcaaccccatcatcatcttcatctatctgcgctgcaatccctatccgctggtgttccgctgcctgcgtgaaagcggcctgacggcgttcttcacccgctcctccgcggcgaatatccccgtgaacatggcgatgtgcgaaaagctcggcttggacaaggacttctactccgtctctatccccctcggcgcgacgatcaacatggacggcgcggccatcaccatcaccatcatgacgctggccgcggccaatacgctgggtatgcaggtctcgctgcccgcggcgattttgctctcgatcatgtcggccctcggcgcgtgcggcgcttccggcgtggcgggcggctcgctgctgctcatcccgatggcgtgctcgctgttcggcatctcgaacgacatcgcgatgcaggtcgtcggcgtcggcttcatcatcggcgtcattcaggactctgtcgagaccgcgctcaactctgcgggcgacgtcgagttcgccgcgacggccgagtatcaccagtggctcaagcagggcaagcccctgccggaattcctcggcggcaagaagaagtaaagcgtcagaatgtgaaaacaaataaaagtgcgccggctcaacgagccggcgcactttttgcgcggtggtgccgaacgatggtcgggagggacaacttcgcgtttactttgaccaattttgtatatttatgacaggtatcgaaagctgccgcaaaggagacaagcgcatgaagcaagcagagcatccgcccgtgaccgcaggggcgaacagtgcggcagaatacagccttgcaatcatcgaccagctcgcgcgcatcgaccgcacgtgcagcaaagaggagatggacgaattggtctaccgcctgcttgcctttgtcggcgggcatctcggcagcgcgcgggagaacctgcgcatgctgacgctgctggaagaaaagcagaagtcgctcgagcagaatttgcaggccgtgaagattgagcagcagatgctcaaggtgctctgcaaggacagcacgtccgtttatcgtgtggacctgatgaacgaccgggccgagatcgtcaagatcgaggagcactccaactccgcgggcgacctgctcccgcatgggcaagagctgttttcctatgccgaggcggtcgagcattactatcacaagtgcgtccttaaggagagcgcaccggacttcctgcaatttttggacgcagaaaatctgatgcgcgagctcaggaccaaggaccgcgtcagccgccgctaccagagtgtgccggacgccatcggaaacatctatttcgaggtgcgcgccaatagggtgcagcagacggaaacgagctttcaaatcctgctggacttccgcagcgtggatgagatcgtgagggaggagcgcgagcaccagcacgcgctggaaacggcgctcacggagagccggatgagctacgaggtcatctcggccatcagcaagatctattatacgatctaccgtatcgatctgcgcacgggttattatgaagaggctgcaagcgagcggcagatgcaccgtctgaccggacacagcggcagagcgagcgtccacatgagtgaaatgagcaagcagagcatcgttgccggagtatctgccctatgttgaaccgttttttgacctttcgatgctcgcggagagactgcggcacgccgcgcgaacgaggcaaagtccgagttcctctcgcgcatgtcgcacgatatccgcacgccgatgaatgtcatcatgggctttacgaacatcgccctacagcacgcggacgattcggataagatgaaagagtgcctggaaaagatccgtgtcagcggcagcaacttgcaggagctcatcgacgatgtgctggacatctcgcgcatcgagagtggggagttcaaaatcgtctcgcagctggtgaagctgccggagctgtttgacttctactgccaggccatcgcgggcatggcggaggcgaaaaacatccgcttttcggggaagctgcacgacatttcccacaatgtgctgctctccgaccagatccgcctcgggcagatctatatgaacctgctctcaaacgccgtcaagtatatgccggaaaacggcgatgtgaagttagaggtctacgaggaaaagcttgccgagagcggcaaggtccgccttgtctcggtcgtgagcgacacgggcatcggcatgacgccggagttcatggaacagatgtattcggccttttcccgcgcggtcgacacgcgcgtcaacaaggtgcgcggcagcggcctcggccttgccattgtgaaaaagatcgtcgacctgatgggcggtgcgatcggggctgagagcaaggtcggcaagggcacgacattccgcgtgacgctcgacctgcccgccgcggcggacgacgccgagaccgaagagcacaccgagacggctatcacgctgccggaaaagccgctcaccgtgctcgtggccgaggacaacgacctaaactacgagatcaccgccgagcaactgcgcggctacagggtgcactgtgtgcgcgctgtgaacgggcaggactgcttacagcggatcgagcaggccgcgccagacgagttcgatgcgatcctgatggacatgcagatgccggtgatgaacggcctggaggcgactgccgccatccgaaagctcgacagcgagacggcgaagaacattcccatcatcgccctcatagccaacgcctaccatgaggacattcaaaaatgcctcgccgcgggcatgaacgcccacctctccaagcccatcaacatcgaccgcgcggtgcgcacgatcatcgaatgcgcccgcacggcgaaagggaacggataaaaagaaaaaggctcacgaaagcaatgctttcgtgagcctttttgcgatatttactgcttgtcgccgccaaatatcgaaatttgactctcatcgctctggctgtgcatctcggcgatgacggcaagactttcttcgctcgcgccgccgggttcgacctgcggcatcgcgaggaagaagccctgcagaaggtcgacgccgagcgacagcacggtgcgtacctcgtccgcggtctcaaggccctcggccacgaccttcatgccgcgctggtgcgcgtaggacacggtgttcgacacgatttggcgcttgttggcgtcggtgtcgatgctgcggatgatggaaaggtcgatcttgatgtagttgggcgagagctcgagaaggctgcgctcgttgctgtagccgctgccgtagtcgtcgagcgcgaacgcaccagagctgccacggatcgtctgcttgatgcgcagcgccttggggtcgaggcactcttcctccgtgatctcaatgacgatgcgcggcaggatcgaggcgtagcgcgcggagtattccgaaagctcatcgggcgttagatactggcttgcaatcgaattgacgaacagcagcgcgctgggcacgaccttaccggcgttttcgagcgcgtgatatgcacttgacgcacagaagaacgtgatgcgctcgacctcgtgcaggcagttttcctcgcgcgcgaggcgcagcacgtccgtcggggagcgcagcatgggcaggtccacgcgcatgagcgcttcataggcgaagacgctgccgtcttttgcgtcgataatgggctggaagcggtaggtgacaagctcctcgttgatgagacggcggaactcctcatggcagcgtctttcctgcaggctggtgcggtagacctcagggtcgaattccagcagctcgcccttgcgcgagtgcttgacctgatacatggcaaagtccgcgtatttgcgcagtgtgatgagatttgtgctgctctcgggataccacgcgataccaccggagacgctcacgcgcagctcacgtccgctgggaagctggacgacagaatgctcaagggcggctttcagcgcgcggatgtcggcgcgcagcgtatcctgatcgttgtagccgtagaagagtgcattgaactcatcgccgctgatgcgcgcgcagacggtacgcgcgggagcgttcttggcaaagcattcgcctgtgcggcggatgtactcgtcgccccagtcgtggccgaatgtgtcgtttatttgcttgaggttgtcgaggtcgaacatcaaaagcgccgcgtggccgagcttttcgggtgagcagaagaactcggcgcagatgcggtggaaggcacggcggttgtagaggtctgtgagcgtgtcatagtcgcactcgtgctcaatgcgcagcttttcaagcgtgtcggcggtcgcatcctcggcaaggccgacctgcgtgccgtcctcgtgcgtcgtctcgatgcgaaggtagcgctctttgccgcttggcagacggatgtggtagagcatcgcgccgtcgggcgcgggggagtgggggcacgagcgctcaaagcgctgcaaaagctcgcggaaactctgcgctgttaagtcgtctgcgtcaacgccgggcatgccgagaaggtcgaagaaattgtcggtgacatagatgctgtcgggagcggagcgcagctcatagccgccgagctccacgcttgccatgtccatgatgcgcagaaacttggtcgaagtatcgagtacctcgcgtccgagctgcgtgaacgcggaggagaaccggtcgagctcgatgatgccggtggcggagagcatggggatggagctgcggctttcacgcgcgtgcgcgacctcgtcggaaaggcgcgaaatcgggcgcgagagcttgcgcgccagcacaaggctgctgaaaagtcctgcagtgagcacgacgaggaccgcgatgatcaaaaaccgcagcacatagcctgaaaaggcgtaaagcgccgataccggcaccgagccgataagcagcatctgctcattggaaaacggcgcgttgcggttgtagagcgtcagcggtgccacggcggcgtgacaaaggccgtggggggagtcactctggtagccgccgcgctttgacggcttgagcagcagcgtctggtcataggattgctgcggcgcatttgcagcgggggaggcggagatgacgctgacggtaaggtcgtcttttccgatggcggaattcgatgcgacgccgagaagataggcgcccgagctgtcgttctacagctcggtgcccggcagcagggcttgcaggtagctttcaagaatttcgacgccgagcacgccgtagaccgtgccgtcatctaaaataagcgggatggtgtaggcgatggcggagtgatcgtcgccggagagcgtgtagggcgaggacgtccagtggccgtagtccgcggcgtccagttcgccgtttccgtggtaggctgcctgaaagacgggatagagaaagccactgctgccgttggacccatagttgatcgagggcgtccagctcgtgtcggtcgcaatgtagagtgactgtacgacctgtgcgggtgcgcgcacgagcataagatcagaattgcgctgcgagggggaggaattcgggtcaaggtcgcgcagataaaggcagggcagcggctcgccctttttgcgtgtgtcgagatcatgcgtgttgagcacgacaaaaatgccggtgacggggcgatggcgcatcgaggagatcaggctgtcgccgatcgagagcagcaggggggatgcggcgtcgctgccgctgtcgagcgtgtcgaggctgatctcgccgtcgtcgagcatggcctgcgtcacggcgttgatcttgcccgcaagcgacgagaggtcctgcgcgtcgagcatctggccttgcagatagttttggcggttttccgtctgtatctgcaagatgtcgacagcattctgctcaaggctcgtgttgatgcggcagagatagagaatgccgacaagcatcgcgatctcgatgaacaggatccagagcatggagcgcaggatcgtatggaagatggtgacatgcggcacatgatccgatggtttgcgaaagaacataaaacggcccctttttttgtcattgaacagtcactcagccctgaaaggcctcaagcgatgcaagcgtatcctgataccaggcttcaaagcattcgtcggaaaggaactgcgccgaggcctcttcaaagctctgtccctgcgccattgcctctttgaccgcggcacggtcagcgcttgccttatcgctcatggaatattcaagaatggcgcgggcgttcgtgccgccggagaaggcgtggggcgtgtagagatggttttcgttgaccgtgtcgactgcggcggagaggacttcgtccatctcatcgctgagggcaagaccgcttgcgcggatcgcgtcgatggagttgccctcgtgcgtgacggggaggtagcctgagttgacagagaacgtgatgttgtgctcgggtgaggtgaaccatttgaggaacacgaggcttgcctgaatctcggcatcgctcgccttcgtcacgaccatgcccgcgccctgctgcacggcgtagtcctcgccgttcgcaaacttcgggctttcaagcgccttgcgcgtgatgtcgtggctgtccatgtcgtcggcgatgacctgcgtggggaagaacgttgcgctcgaagacgagccgacgtaggcgatgatattgccggtcttcacatcatcgctgcggaagcggccgcttgcggaaaagtagcccttgatgaagggtacatagtagttatcccagagggtgcgcacggcgtcgtggtcaaagttcagcgtcatgctgccgtcctgtgcgtcgaagatcgtgcagccaagctgcttggcgccgatgagcatgtagttcgccatcgcgtcgcggccgaaaaacgcgcgtccatcgttcgggatgtcgggcgtctgcgcgtcggtccactcgtagtagcgttcggcgacggagacgaggccttcgatcgtggccaagtcgtcataggttgcgcctgtggcggcggcgaacggctcccagtccgtttcattgagaaacagcagctccaccgacttggcgacggggaagatcttgatactgcccgagccggagaagtcgccttcgctcagatagtcctcaataaaggcggcgcggtcctcttcgcttagataatcgctcagattggcaatttgacccatctcatcgagcgcgtaggcagtgtcggcgtaggcggagaagatgttgggcatcgcctcggcaccgaccttgccctcggcagaagcgagcacgttgttctcaagatcggtcacgctgccgtggctggagctctcaaccgtgatgccctgttccttgccgacggtcgagttgaactcgtcgacgagcgcgttgaacgcttcgagctgttcaccgttgtagtacgtccagatcgtgatattgacagggttcgccggggaaaatccggggtctgccttgctgccgcagcctgcgagcagcatcatcgccgccgctgcggcgagcacgcgagggagaaatttgttgtgagtcatgatgcttcctttctattttgtgcgccgttccaaaggaagcggcgtgatcggtcaatgcccgccgccttcgggcctgaactgcccgagcgcgtaggaatacgcgcctgcgagagcgggcagcggttcgtcgccgccacgagctggcgcagcagaatatccgtgatggcgcgcacatgcagaatgtgcgtgccggattcgaagttgcgcgactcgacgatgtggctcagaatgttgatgatggcgctgttcgtcttctcgtgctcgtaaacctgctcttcggccaggtggacaaggtgcttctggcgcgcgtagagcgtgagtgcgttgctcacgcgccgctgcgtgaccgtcaggttgaacgggcggcggatgtaatccgttacgccgagctcgtaggccttctggatgaacgattcgtcatcctcggacgaggtgatgatgacgggatctcctgcagtcagttgcgctgcttcatcacctcgagcacgccgaagccgtcgaggcggggcatgttgatgtcgagcagcaggtcgatgtcgaactcggagtgcagcagctcgagcgcctgcatgccgtcgccggcataaggtattcgtagcggccgccgaggatttcggaaaggatctgctggttcattttcgaatcgtccgcgatcaggattttggcttcgaccatagtgtagacctcatacgcattttagggcgcgctcttttgtagaaatgccgccgcggggcgggcggacaagaaaataggcaccggaaaagccagtgccaaacaaaaactgtttatgcgtgttttttagaaacatttgatacttaatgtaaacttagcacagaaccacggaacattcaagggaaattttcccggtttttcctgctgttttgccagaaatgattgaaaaaagagcggaaagggcgaagcgtttctgcaaaaaaacgggagagccgtcagcggacggtaaaaaatgcacgataaatttgaggaaaaaagaaatatggattgtaaaatatgtgcaaaatggggagaaatgctgaggattattgacaatttttagaaaaaagtttatagcaatagcgcattttcctgatatacaacttcttaacatacatcggcagatagcagatggaggtggatgaatatggcgtacatgcgtttgggcgatcttctggtctcgtcgggcgtcatcacgaacgagcagctggaaaaagcgcttgaaatgcagaaggagacaaaggagcgcctgggcgatgtgctcatccgcgccggctttatcacggagcagcctcattgaacgcgcgctttccgagcgcacgagcgatatccacttggagccgcaggacggcgaaatggtcgtgcgtatgcgtatcgacggtcttttgcgccgcgtgcttacggtcccctccgaattgcagagcaccgtcatctcgcgcctcaagatcatgggcggcatgaacattgccgagcatatcgccgcatctttgacattgcgcggctggtcgcgccgacgatctgtgtggagctgacgaaaatggatgagggctacacgcttaaaaagagcgagcactgctacgcggtgtggaaaaagaagcgccgctgcgaaaactgcatttcgtaggaggtgctgcgcacgcacaagccacagacgaagatcgaaacgcgcgagagcgatatctattatgtgctcgcgtcgttcatcgaggtggacggcaggccgtattcgctcgagctggtcaagcgcaccaagagcgacgacatgttcgagcgcgaaaatgtgctcaaccagctgctcgtgcgcaaccggcaggtgtatatggactcggtcaccaaggtctacaaccgccgctattacgacgaacggctcaagaatctggagggctggttctcgttcgccatgatcgacatggacaacttcaagcacatcaacgaccgcttcggccaccaggcgggcgacgcggcgctctatcgcgcggcgcaggccatcaaatcgcagatccgcagcgacgacgagctcgtgcgctacgggggcgatgaattcttcctgctgttccgcgacctgccgcagcagatcttagagaagaaattgcagtccatccgcgccacgcttgacgagatcgtcatcgaggagtatcctgaactgcacatcagcgcgagcatcggcggcgactacggcgaagccaaggcgcgttttcagaacgacgagcgcatcgtgcgcttccttaatatgttcccgggcgatgacagcatgcaaaacctgacgaatgcgatgaacacgggcgacacgactacggcgtttcgcgcggtgcacacgctcaagggcgtggcgctgaaccttggcctcggctcgctcgcccacgccagctctcagatgacggaagcgctgcgcgcggtcaggattcgatgtctgaaagcgtacagccactctatgtggcggtgcagaaggagtacactgccgtgtgcagcgcgctcgagcagctcgaaaagtaattgagaataaaaaaagtcgaaacctttcggtttcgacttttttacttcttacagcagcggggcgatgatgcgcatgccggggccgatgagctttcgcataaacggatcgtttttgagaagctctgcgtccgcgcggacacaccgggcgagcgtttgctggaaatcctgctcaatttttgcgacttcgggcgatgcataaaggtacgtgccgcattcgaagtggtggtacaggctgcggtagtccagattgatcgtgccgacggtcgccttgcagtcatcgctgacgaagaccttcgcgtgaacgaagcccggctcgtactcataaatttgtacaccgttttcaagcagcctgcggtaatacgtgtgcgcaagcgagaaggcaatctccttgtcaggcacatgcggcaggatgagctggacctccacgccgcggcgcgcggcataggtcagcgccgtgatcatctcgttgtcaatgatgagatacggcgtcatgatgtgtacgtaacggttggcacggttgatgatatccatatagaccatctcgccgacgaggtcgcggtcgagcgggctgtcgccataggggatgacatagcccgcttccttttcatgcgccggctgcggcacgtcaagatacttgctgtagacttcgggcgtaaagtgcacggagctgacgtcccacatctgcaaaaacatcagcgtcaggctgcgcacggcgtcgccgcgcagggcaatggctgtgtccttccagtggccgaggcgcgaggtgcggttgatgtactcgtcggagaggttgatgccgcctgtgaagccgatcttgccgtcgatgaccatgatcttgcggtggtcgcggtagttgtagtgcgtggagacgaacgggcgcagcggcgcgaacatcttgcaggcaatgccgagcttttcgagcttttcggggtaggaatagggcagcagcgcgaccgcgcaggtaccgtcgtacagcacgcgcacctcgacgcccgcgttgaccttttccttgagaatttcaaggatgcggccccacatgtagccctccctgacgatgaaatactcgaggaagatgaagtgctcggccttttggagctcgtcgcacatgacctcgaacgcatcgtcgccgagggggaagtattgcgcctgtgtgttttgatagcaggggaagccgcaggaattcaggtaggaggcaaggctttggagctccttcggtaattcctccttggaacacgcgctttccgagggggcgaagtgctccgtctgcgacaggatgtcgttgtagcggcggatcatcagccggtggccgaggtcggtcttgatgtaaacatacagaatcaagccgaacaccggcagcaccgcgaggatgaaaaaccacgtgagcttgatggtcgggttgtcgtcgttgccgaacagaaacagcacgactgccgccgacagcagcgtgttgccgccccagaagtagggcagaaaaccctcaagcttgtaaaaggcggcaaagagaaacaagatctgcacgatcagcgaaacgatgatgatgcccgtgcggccgaagatgatctgcacgaggcctcgcttgcccttttctaaaagaagaatgtgattgtcgtcgtctttcatagatgtcctttctcaaagatgaccgtgcccacgcggggcaaggcacctacatttaatatatatttactttatcataacataactttgccgaaaagccaacccatttccgcagcgaagcgtgaagcgcacgcagacggagaaaacgggacttggcgatttgatgttcctgtgttaaaatggcgaaaaaggcagaaaggggacgagaaaatggagcttaagacgcaggtccataatattccgccgctgtatgacgaaaagtcgcgcgtgctgatcctgggctcgttcccgtcggtcaagtcaagggaggcggcgtttttctacgcgcacccgcagaaccgcttctggccgacgctcgccgctgttctgggcgaggaaacgccgaagacggtcgaagagaagaaagcgatggtcctgcgccgcggcgtcgccatgtgggacaccatcggctcatgcgagatcgtgggatcgtcggatgcgagcatcacgaacgttgtgccgaacgatctgtccgtcattttggatgcggcggacattcaggccatcttctgcaacggcggcacgtcctacgcctgctataaaaaatactgccgcgcgaagctcgggcgcgaggccgtccagcttccctccacctcgccggccaacgccagatggacgaaggaaaagcttgtcgaagcgtggggcgcagcgctgaaaccgtatcttttttgacgcggcgttgacaaagaaaggcaaatagtttatgatacaggctcaatcgatacaaggagtgtggaaccatgggcaaactggcagcgccggtgcgcgctgacaaggaaatgatgtttacgaaccgccagctcgtcgcgctgatgtggccgctgctgctcgagcagcttctggccattacagtgggtcttgccgactcgctgatggttgcgaccgtcggcgacgcggcgatcagcgcggtgtcgctcgtcgactcgatcagcaatctgatgatctacattttctcggcgatggcgaccggcggcgcagccgttgcgggccagtacatcggacaaagacagaaggaggacgcctgcaacgcgggccagcagctcatcgcgctgctcggcgcggtgtcgatcttcttcgtggcgctgctgtacctcttccgcacgcagattttgaccgtaatgttcggccatatcgagcccgatgtcatggcggcgacgaacacttattatttatatgtgatggcatccattccgggcatcgcgctctacaacggcggcgcggcgctgttccgcacgatgggccacagcgacgtgtcgctcaaggtctcgctcctgatgaacagtatcaacgtgatcggcaacgccgttttgatctttggcttcggtatggacgtcgcgggcgtcgcgatcccgacgctcgtgtcccgcacggtcgcggcagtcgtcatcctctcgctgcttttcaaccgcgacttgatgctgcacctttctgatatccgcggctttcgtgtcgatatgcgcctgatgaagaacatcttctacatcggcgtgccaagcggcgtcgaaaacggcatgttccagctggggcgtctcgtgcttttcagcctgatttcgacgttcggtacggcatcgatggtggcgaacgccatcggcaacaccatctcaaacttcaactgctttgccggtcaggccatcaacttgggccttgccgcggtcgtgagccagtgcgtcggcgcgggcgaattcgatcaggcacgcgcgtatctcagaaaaattgtcaagtggacctacggcatcatggcggccgtcaacctgacgatcatcgcattgctgccgctcatcatgcgcgtctacaacgtttctcccgaggcggagaagctcgccgtcacggtcacgctgatccacggcatctcatccatcttcatctggataccggcgtttatggtgccgggcttcctgcgcgcggcaggcgacgcgaagttcacgatgctcgccagtatgctgacgatgtgggtcgtgcgcgtgctgcttgcgtacgtgctgggcaaatacatgggctacggcgtcatcggtgtgtggttcgcacacgcgatcgtggactggtcggtgcgcggcgccatcttcttcctgcgctaccgcagcggcaagtgggagacgatggggatcaagacgtgattattttttaaggatgccattggcatccttaaaaaataggggatgcgctccgcttcgtgcctcgccgcccgtagggcggctcgacacgcgctccgcgtaaagtatttttccgacgcgccggtcgtcggaaaaatgatttgagatcatttcgcggctgcggccgcgaagataacgaggtctccgcttaaaaagcggagacctcgttgccttctgttacacttttacatttcaacggtgatgttgtcggtgccgtgctgctcgaattcgcctaagtacgtgtccatacgctcgcgcagctcgtcgacattttcgggcgtgggcgcgtcgctgtccatatcgcgcagggcaagctcctgagcgagaatttcgaaaaacatcgtgtcctcgtaggccatgatggcctcgtggatgccgccctcggcaaacgcgcgcgaggggatcagttcgccctgataggcctcgaccagcggcaccatgccgtgggagagacagttggcgaatacggtgctctctacatcgtcgtattcgcggatacggtcgtcgccgcgggtggagttcatcacccagttgccgacgtagaccagatcaagaagacggcggaattgcttttccgtcagatcaattttcatagtgacgcctcctttgacggaacagagaatctgcttatcggagattatagcacgcgcttttgcattttaccatagcaaaaacagggaaacgcacaaaaaatgcaaatgcgccttgtgtcccgctctccgccgtagtatgatgacagaaacaaatgagaaagaggactgtatgaaaagaaacgtttggctcaccgtgcacggcgagcagcaatacgaaggcatgagcgccgacggctcagatctccgcgtgcgcggcacgatggaggaaacgcgcgacggctatctcctgcgctatgaggaaacggacggggacggcaaggtgaccaccgcgacgcgccttgccctcgcgccggactgcatcattctgacgcgcacgggcgaggtgacgagcgagatggtctttgcggaggggaaggagcacacctcattctatgccgtgccctacggaaccttgccggtcacagtgaaggcggagtcggtcaagcggaagctagacgaggacggcgggatgctggccctgcgctatgcaattactatcggcgggcagagaggaaaatgcgccctgcgcatccgcgtgagaacagaagaataaaggaaaaggagctgcctgcggcggctcctttttacgcgcccatgagcagccgcacaaaaaacgcggatgcaaggaacatcaccacgtcggcgcagagcgcggcggggatagtatagcgcgttttcgtaatgcccgctgcaccgtaatagacggcgacggtgtagaacgtcgtttcgctcgagccgagcatgaccgccgcaacgcggccgacataggaatcgacgccgtaggagtccatgatctccgatccgacagccagcgcgccgctgccggagatggggcggatgaagagaagcggcgcagtctcggcaggaatgccgatcttgtcgagtgcgggggctaaaagcgcgccgagcgcctccatcgcgccggacgcacggaacatgtagacggcggagagcagtgcgataagtgacggcagaatgtgcagcagcaccgtgagtccctcctccgcgcctttggtgagggcggagtagacgtcgacacgcttgccgagggcaaagcaggccgtgaaggtgagcagtacgggcacgatgagcgtagagagcgccataggttcaattcctccagaagtgggcgaagagctttgcggcaaggagccctgcgaggacggacagaagcgacgtcagccacacggcgggcagaatgtcgaacgggtcggcggcaccgagcgaagcgcgcacgcctgcgagcgtggtgggcaacagttgaatggacgccgtattcaaaacgacgagcaggcacagctcatccgatgcggtacccttgcagccgcggctcatacggcaggcggcgcggatgccgagcggcgtggccgcgttgccaaggcccaaaagatcggcagagaggttagcggagatcgcggccagcgtctcactgtcgcggctcgcgttcggcaggagcctcttgagcagcgggcggaagagggaagcgaggcggtcggtgagatgacactggttcatcacttccatcacgcccgtccagaggcacatcacgccgcacatcgccaaacacagctcgaccgcgctctgcgcgccctcgagcgcggccgcgctgagcgcattcaagtttcccgtcagcgcgccgaaaatgagcgagactgccaccattcccgtccaaagccaggccattgccatgtccatcaactcctttgcccctaaatatatcggcagggagggggcaatatgccgcgtttttgcgccaaatccgccacagttgccgcgaaaagagactgctaaaaaatttctcaagaaaaaagtgaaatttgtcttgacatgtgcaacggaatttggtactatatgcaagtccgcgattgggcgcatcctgccctatttgcgcgatattgcgatgaaccgggagattgctcaggtttctgaggtaactttcggggagtatgtccgaacatcgggcggctgagagaatatctgtacgttgcgtagatcgctgcgccatgtgtggaccggccgtttattcgtgccggtttttctatgagccggaatgatacgcacggataagcgtacaagaaaacctctcaccgtacggcttcgacaaagcaagaaaaccgtacaaaatgaaggagaaaccgaaaatggcaaaagaaatgatccgcattcgtctcaaggcctatgaccaccaggtcatcgaccagagcgcagagaagatcgtcgagaccgccaagcgcaccggcgctaccgtctccggccccatccctctgcccaccaagaaggaagtcgtcaccatcctgcgcgctgtgcataagtacaaggacagccgtgagcagtttgagcgccgcacccacaagcgcctgatcgacatcaccaactccagccccaagacggtcgaggctctgatgggtctcgagcttcccgccggcgttgagatcgagatcaagctctgattttccgtgatgcctcgttgcgctgctttgccgtataccagatccgtataccagatactgtctacagcggcgcgccccgcctgacgaaaaatcaatccctcgcttcattacattttgcgtccgcagacgcgaaaccaatgaaatcgtttttggccgcgacatgcgcgtggacaaaaacacctctcagtttgtttgtgtgcgagcacagcgagtgcgcaaaacaaactgtaaacccaactcaaaaaacggctcgccgttttttgaaattacctttgttgctctacccaaaagcccatcgacttgcgtgagatgggcggggtcaagtcggcagagcaatggcgggagttgccgctaactaagccgaccaataacctttacaggaggatcatacatgaaagcaatcatcggcagaaaagttggcatgtctcagatcttcgacgaaaagggccatgtgatcccggtcaccgttatcgaggccggtccctgcgtggtcactcagaagaagaccagcgaaaaagacggttatgaggctgtccagcttggctacgaggacattcgcgaagcgaagctctccaagcctgaactcggccacctgaacaaggctggcgtttcccccaagaagtacctgcgtgagtttgaccttgacaacgcttccgagctcgagctcggcgccatcatcaaggctgacaccttcaagtccggcgacttcgttgacgtcaccggtacgagcaagggtcacggctacaccggcgttatcaagcgctggaacgccagccgcggtcgtatgacccacggcggcggccctgtccaccgtcacgccggttccatgggctccaccaccgaccccagccgtatcttcaagggcaagatcggccccggccagtacggtgtggagactgtcaccatccagaaccttgaggtcgtcaaggtcgaccccgagctcaacatgctcgtcgtccgcggcgcggttcccggtcccaagggcagcctcgtcaccgtgaagaccaccgtcaaggtccacaagatcaagcaggctggtgctgacatcagcaagaacccgcagaaggcttccggccgcaacccgcagaaggcttccgccagaaatatgtaaggaaaggagtgcttgataaatgtctacgattaaagttgtcagcatgaccggcgctgaagtcggttccgtcgagctgaacgacgcgatcttcggtatcgagccgaacatgagcgttgtccacgaggtcgtcaaaaatcatctcgccaactgccgtcagggcacgcagagcgctctgacccgcgctgaggtttccggcggcggcagaaagccgtggcgccagaagggcaccggccgtgcccgtcagggcagcacccgcgcgccccagtggacgcacggcggtatcgtgttcgcccccaagccccgcagctacagctatgtgctgaataagaaggtcaagcgtctggctctcaagagcgtgctgtccgccaaggcagcccagggcgagatcgtcgttgtcgacaagatcgcgctcgacgctatcaagaccaaggacttccgcagctttctctccgccgtcaaggctgacggcaaggccgctgtcatcactcccgaggtcaacgaggtcgttgtcaagagcgcccgcaacctgcccggtgtcaccaccgcgcccgcgaagcttatcaacgtctacgatctgctcaacgccaagaccctcgtgatcgacaaggaagccctcgcagtcatcgaggaggtgttcgcgtaatggcaaacgtttacgacatcattattcgtcccatcatcaccgaacgttccatggtcgacgttgcgaacaagaagtatgtgttcgaagttgccaaggacgccggcaaggtggagatcaagaacgctgttgagaccgctttcggcgttaaggtcgccaaggtcaacacgctcaacgtcagcggcaaggccaagcgcctcggcgccggccgcctgggcaagacccgcagctggaagaaggcctatgtgcagctcgctgaagattccaagaccatcgagctgttcgagggcatggtgtaaggaggatatgagaaatggctattaagacgtttaagcccactaccccctcccgccgtcacatgactgtgtccgccttcgaggggatcgacaagaaggccaagcccgaacgcagcttggtcgagtctcagaagaagcatgccggccgcaacagctacggccgcatcaccgtccgtcatcacggcggcggcaacaagcagaagtaccgcatcatcgacttcaagcgcgacaagatggacgtccccgcgaccgtcctgcgcctggagtatgaccccaaccgcagcgcgttcatcgctctcgtccagtacgaggacggcgagaagcgctacatcatcgctcctgtcggcctgaaggctggcgacaagatcatctcttccgcctccgctgatatcaagcccggcaactgcctgcccatcgccaacatccctgtcggtaccgtcatccacaacattgagatgcaccccggcaagggcgctcagctcgtccgctccgccggtactgctgctcagctgatggcgaaggagaacggcgacgctcagatccgtatgccctccggcgaagtgcgcattgtccgcacgaactgcatggccgtcatcggccaggtcggcaacatcgatcacgagaacgttcacatcggtaaggccggccgcaagcgccacatgggcgtccgtccgaccgtccgcggttccgttatgaacccgaacgaccacccccacggcggtggtgaaggtaagagccctgtcggtcaccccggtcccatgaccccgtggggcaagccggctatgggttacaagacccgttcgaagaagaacccgacgaacaagttcatcgtcaagcgtcgtaacgataagtaaaaggaggcaatgtaaaaatgagcagaagcattaaaaaaggcccgtttgttgcccctgagctgatcaagcgagtcgaagagatgaacaagaccggtgagaagaaggtcctgaagacctggagccgcagctccaccatcttcccctccttcgtcggtcacacgatcgccgtccacgacggtcgcaagcacgttcccgtttatattcaggaagatatggtcggccacaagctgggcgagttcgctcccacccgtacgttccgcggccataccaagacgaaataaggaaggagaatgcagaacatggaagctaaagcatatctgagatatgtccgcatctctccccgcaaggtccagatcgtctgcgacctgatccgcggtaaggacatcaacaccgccatggcgctcctgatgcagacccccaaggctgcgtccgagcccctggtcaagctcttaaagagcgctgtcgccaacgccgagaacaacttcagcatggatacctccaagctgtacgtgtccgaggtctacgcgacttccggcccgatcctcaagcgcatgatccccgccagcaagggccgcggctaccgcatcaacaagagaacctctcacgtgacgctcgccgtcgctgagagagactaaagggaggagacagtttcatgggacagaaagttaatccccacggcatgcgcgtcggcgtcatcaaagactgggactcccgctggtatgccagagacgagaaggtcggcgacctgatcgttgaagataacaagatccgcaagttcgtcaagaagagcctgtacggtgcaggcgtgcccaagatcgagatcgagcgcagcaatgatgttgtgacgctgttcgttcattgcgcccgccccggcatggtcatcggcaaggacggcgcggaggtcgagaagctgcgtctcgcggtcgaggctctgatcggcaagaaggtcaagctcaacatcgtcgaggtccgcaatcccgacatgaacgctcagctcgtcgctgagaacatcgcccagcagctcgaaaagcgtatctctcaccgccgcgcgatgaagaacgccatgggccgcgccatgcgcgccggcgccaagggcatcaaatgctgctgctccggtcgtctcggcggccgcgagatcgctggcgttgagcactatcacgagggcaccatccccctgcagaccatccgtgccgacatcgagtacggcttcgccgaggctgcgaccacgttcggccgcatcggtgtgaaggtttggatctacaagggcgaggtcctgacccagaccctgcgtaccaccccgcgtacgctcgataccaccaagccgtatgaggagcgccgcgagcgtcgtcctcgccgcgacggtgaccgtcgtccccgccgtgatggccagggcggctatcagcgccgtgagggcggcttcaaccgcaacggcaaccgtccccagggcgatcgtccgcagggcggctatcgcaagccggctgagaataaggaaggaggcgctcagtaatgcttctgccgaagagagtgaaataccgtcgcgttcagcgcggtcgtatgaccggcaaggcgacccgcggcaacaccattacttatggtgagtacggcctccaggccactgagcccgcgtggatcaccagcaaccagatcgaggcggcccgtgtcgccatgacccgttacaccaagcgtggcggtcaggtctggatcaagattttccccgataagcccgttaccaagcagcctgccgagacccgtatgggttccggtaagggctctccggagtattgggtagcagttgtcaagcccggccgtatcatgtttgagatcgccggtgtttccgaagaagtcgcgcgtgaggcgctccgtctggccagccacaagctgcccatcaagacgaagatcgtcaagcgcgaggccgagacccaggaagtaggtgaatgagatgaaggcaagtgaagttcgtgccatgagcgttgctgagctgaacaccaagctcgacgccctgaagaaagatctgtttatgctgcgcatgcagcacgcgacgaatcagctggataacccccagaagctcgtccagaccaagcgtgatattgcccgagtcaaaaccatgatccgtgagaaggaggagaagtaagatggaagagaagagaatttcctcccgtaaggtccgcgttggtaaggtcgtttccgacaagatggacaagaccgtcgtcgttgcgatcgctgaccgcgtggcgcatcccctgtacaagaagatcgtcggccgcacctacaagctgaaggctcacgatgaaaacaatacgtgcggtatcggtgataccgtcaaggtgatggagacccgccccctgtccaaggacaagcgttggcgcgtggtcgagatcgtcgaaaaagctaagtaaggaggtaccggaacaatgattcagcaggaaagttttctgaaggtcgccgataacaccggtgccaaggaaatcaagtgcatccgcgttctcggtggctccggccgcaagtacggcaacatcggcgatatcatcgtcgcgtccgtgcgtaaggctgcccccggcggtcaggtcaagaagggcgaggtcgttaaggccgttatcgtccgctctgccaagggcgtccgccgcgaagacggcacctatgtccgcttcgacgagaatgctgcggtcctgatcaaggacgacaagaaccccagcggcacccgtatctttgggcccgtcgctcgcgagctgcgtgagaaggacttcctcaagatcctctccctggctccggaagttgtctaaggagggcttgaagaatggctatgaatgtgaagaagggcgataccgttatcgtcctgtccggtaaggacaagggcaagcagggcaaggtgctcggcaccgtccccagcgaagccaaggtcgtcgtggagggcatcaacatggtgacctgccacgtcaagccccgcaagcagggcgagaccggcggcattgtgcagcgtgaggctgccatgtacgcttccaaggtgcaggtcgtgtgccccaagtgcaacaagggtacccgcatcgcgcacaagatcgaaaatggcaagaagacccgcgtgtgcaagcactgcggcgccgagctttaagaaaggagagtagttcacaatggcaagactgaaagaacagtataaggcagaagtggcacccgctctctacaagaagttcggttataagtccaccatgcagatccccaagatcgacaaggtcgtcgtgaacgtcggctgcggcgaggccaaggagaatgccaaggtcctcgaagcggtcgtgcgcgacctgaccaccatcaccggccagaaggccgtcgtcaccaaggcgaagaagtccatcgcaaacttcaagctgcgtgaggatatgcccatcggcgcgaaggtcaccctccgcggcgacaagatgtgggagttcctcgatcgtctgttcaacgttgcgcttccccgtgtccgcgacttccgcggcatcagcgccaacgctttcgacggccgcggcaactatgccctgggcatcaaggagcagctgatcttccccgagatcgagtacgataagatcgacaagatccgcggcatggacgtcgtcatctgcaccaccgctcagaccgacgaagaagcccgcgagctgctgaccctggtcggcgctccctttgaacgctaagtaggaggatatcaaaaatggctaagaaatctatgattctcaagcagcaggctcctgctaagttctccacccgccgctacaaccgctgcaagatctgcggccgcccccacgcgtatcttcgtgattatggcgtctgccgtatctgcttccgcgagttagcctacaagggcgagatccccggcgttcgcaaggcttccttctgatctttttccgttatacttcgttgaagctccttggcgtacacaaagtacgccggcgtcgcttcgcctcgtctaacgaaaaaatctcaagaaggacctgctgttgaagtttttcaacagcacgacacctcggagcttgagcctccgaaacaaactcataaccacgaacgttgcgatatggacgttctggcgataaaggatcgcgaaaggtcagtgtcaattacgcgtgttcacacgcgtgtgggcacgttccaaattggcactgatacctcgtgacctaaacggtccatgaccgtaactctaaatcaggaggatttacactatgcatatcactgaccccattgcggatatgctcacccgcatccgcaatgcaaacagtgcccgtcatgacactgtggatgtccccgcttccaacatgaagaagagcatcgctcagattctgctggacgagggctacatcaagagctatcagatcgttgacgatggtacccagggcacgatccacatcaccctgaagtacaatggcaaggacaaggtcatcaccggccttcgccgtgtcagcaagcccggtctccgcgtttacgtcggcgcagatgaactgccccgcgtgctccgtggcctgggtattgccatcgtctccacctccaagggcgttatgaccgacaaggctgctcgcgcggctcacatcggcggcgaagtccttgcgttcgtgtggtaaggagggtataaaacaatgagtagaattggtaaaatgcccgttgccattcccgcgggtgtcgaagtcaccgtcgcggacggcaaccttgtcaccgtcaagggccccaagggtaccctgacccagcagctccagccgagcatgaccatcaagcaggaaggcgctgagcttctcgtttcccgtcccgacgacggcaaggagaaccgcgctctgcacggcctgacccgcgctctgctgcacaacatggtcgtcggcgtcaccgatggctacaagaagacgctcgaagtcaacggcgttggctatcgtgccgccaaggagggcaacaagctcgtcctgaacatcggctactcccacacagtggaagtccccgagatcgacggcatcaccatcgaggtcccccagcccaaccagatcgtcgtttctggctgcgacaagcagaaggtcggtcagtttgccgctgagatccgcgaaaagcgtcctcctgagccgtacaagggcaagggcatcaagtatgctgacgaagtcattcgccgcaaggtcggtaagaccggcgctaagaagtaaggaggtgtgccgatatgattaaaagacccgataccaaagcacagcgcatcaagcgtcataagcgcgttcgcgccaaagtctccggcactcccgagagaccccgcctgaacgttttccgttctgaaaagaacatctacgcccagatcatcgacgatgttgccggcaacacgctggtcgccgcttcctccctggacaaggcgatcgagggcaacggcagcaacaaggctgccgcccgtgcagtcggtaagctcatcgccgagcgcgccaaggccaagggcatcgacacggtcgtcttcgaccgcggcggttacctgtatcacggccgcgttgcagagctggctgaaggcgcccgcgagggcggcctggaattctaagggaggaggaaaatacaatgcctagatttgaacgcgaacagagcgaatacatggaaaagctcgttttcctcaaccgtgtttccaagaccgtgaagggcggccgcgtggccaagttctctgctctgatggtcgttggcgacggcaagggcaaggtcggttacggccttggcaaggccgctgaagtccccgaggcgatccgcaagggcctcgaggctgccaagaagaacatgatcaccgttactcttgatggtaccaccattcctcacgagacgatcggcgagttcggcgccggccgcgtgctgatgaagcccgctgcccccggtaccggcgtgatcgccggcggcgctgtccgtgccgtcgttgaggctgccggcatcaaggatattcgtactaagtgcctgcgctccaacaaccccaacaacgttgttggcgctgcgatcgaaggcctgaagtccatgcgcagcgcggagcaggtcgccaagatccgcggcaagagcgtggacgagatcatcggttaaggaggcagagcgtcatggctaatttaaaagttgagctcgtcaagagcttgaacggcagacacgaaaagcacattgctactgccaattccatgggtctgcgcaagatcggcgatacgagcgtgcagcccgacaacgaccagacgcgtggcaagatcgccaagatcggctatctgctgcaggtcactgaagagaaataaggaggaacagatatggaactgtataatctgtctcccgccgctggttccaccaaggaagcgttccgcaagggtcgcggccacggcagcggcaacggcaagaccggcggccgcggtcacaagggccagaaggcccgcagcggcggcggtgtccgcgtcggtttcgaaggcggccagatgcctctggcgcgccgtaccccgaagcgcggcttcaacaacatttttgcaaagccctatgagatcatcaacctgagtgcgctcgacaagttcgaggacggcgagaccgttaccgcagaggctctgcttgctaagggtatcctgagcaagtgcgcgtatggttacaaggtgcttggtaacggctctgttaccaagaaggtcactgttcaggccgctgcgttttcccagtctgctaaggaagctattgaagcagctggcggaaaggcagaggtggtctaagtgattcagacgatccgtaaggcctggggcgttcccgaactgcgcaagaagatcgtgttcacgctgctgatccttctgatcttccgcatcggtaacgcgatccccgtcccctatatcaacacgacgctgctcggcaactatctcgacagcatgagcggcaccgtgcttggcctctacaacgtcatgtccggcggcgcgttcgcagaagcgacggtcttcgcgctgggcgtccagccctacatcaacagctcgatcatcatccagctgttgacgatcgcgatccccgcgctcgagcgtctcgcccgcgacggcggcgaggccggcaagaagaagatcgcctccatcacccgctacgcgaccgtggcgatcgccctgcttcagggctttggctactacatgatctgcaagaactacaacatcctcgagcagcagggcatctggccggcgctcgtgatcatcgtttcgtttgttgccggttcttcgttcgtgatgtggctgggcgagcaggtcaatgagttcggtgtcggcaacggtatctccatcatcctgtttgcaggtatcctgtcccgcgtgcccaacatggtcacgatgggtgcgagctacatccgcaccaagggctccatcggctacctgtggatcgcgctgctgatcgtcggcatgcttgcgatggtcgttctgatcgtccatgtcaacgaggccgagcgccgtatccccgtccagtacgccaagcgtcaggtcggccgcaagatgtacggcggccaggcatccacccttcccatgaaggtgaacatgtccggcgttctgcccatcatcttcgcgcagaccatcgcgtccctgcccgccaccatctgggctttcgtcggcattcccgaggagggcaccgttggccgcagcatctacaacgcgatcgacaccaagtctgtgctgtatctgatcgtctacttcctgatgatcatcggcttcagctatttctacgctaccattcagtttaaccccgttgagatctccaacaacctcaagcgcaacggcggcttcatccccggcttccgtccgggcaagcccacgtctgacttcattgccaaggttctcaacaaggtcacccttttcggcgccatctacctcggcatcgtggccatctgcccgctgatcgccggcaaactgctgggcaactccggcctcgccatcggcggtacctcggtcatcatcgttgtcggtgttgcacttgagacggtccgcgcgctggagtctcagatgatgatgcgccagtacaagggcttcctcgagtaagagaggcgtttctatgaaactgattttattgggcgctccgggcgctggcaaaggcacgcaggccgctgtcatctcccgcgagttaggaatccccgcgatttccaccggtaacattctgcgcgcggccatccaagagggcacgccgacgggaatgaaggccaagacctatatggacgaaggccacctggtacccgatgaggtcatcatcggcatcattaaagagcggctcgccgagcccgattgtgcgaaaggcttcatcttagacggtgtgccccgcacgatcgcgcaggcggaagctcttgaggcagccggtatcaagttcgatcatgtcgtctccctggagatcgctgacgcgaccatcatggagcgcatgagcggacgcagggtttgcagcaagtgcggcgcaagctaccacatcgtggcagtgccgcccaaagccgagggcgtctgcgacgtctgcggcggcgagctggtcacccgcaaggatgataagcccgagacggtgaaaaaccgccttgcggtctatcatagagaaacagaaccgctcaaggacttctaccgcgagcgtggggttctgtatccggtggaggacatggggccggtggaggccacctccaaggcgatcctcgcaatactgagacaggatggttaagatatgatcattgtgaaatcagagcgcgagatcgaattgatgcgccgagcgggaaaaattaccgcggctgcccgtgcgttagcaggggaaatggtaaagcccggcgtaacaacccgagaaattgacaaagcagtgttccatttcattcgttcgcagggcgccgagccgtcgttcttaaactacaacggctatcccgccagcgtgtgcgtgtccgtcaatgacgagatcatccacggcatcccgggtccccgggtgctcaaggagggtgatatcgtcagtgtggacgtgggcgcatacatcggcggcttccacggcgactgcgcagccacttacccctgcggaaaaatttccgaagaggcacagcggttgatcgacgtgactcgtcagagcttttttgaaggatttgcgcaggcccgcgagggcaaccgcatctccgacatctcccacgccgtgcaggcgtatgtggaggcgaacggcttctccgtcgtgcgcgagtatgtcggccatggcgtcggcagaaacatgcacgaagcgcccgagatccccaactacggggctccgggccacgggccgaagctgctgcgcggcatgacgatcgccgtcgaaccgatggtgaacgcgggcaccgcagccatccgccagatgagcgatggctggaccgtcaagacccgtgacggcaaatacgcggcgcactacgagaacacgatcctcatcaccgccggcgagcccgaaattctgacggctccggcaccgtaagaggacgccatggacattgcgaatcttgttcaggcaactgccggcagagagcagggcaaatacttcttcgtgctggaaacagacggggagtacctgctgctggccgacggcaagagccgcaggatcgaagcgccgaagcggaaaaagcaaaagcatgtccgcttcatcgcagagagcgcggcgcctgtcgccgagaagatcagaagcaaggaaaaaatcacaaacagtgagcttcgtaaagccatcgccgcatacagcggcaaggaaaatccggaccaggagggataacacttggcaaaatccgacatgattgaagtggaaggcgttgtcgttgaggccatgcccaacaccacattccaagtagacattggaaatggacacacgatcttagcgcatatttccggaaagctcagaatgaatttcatcaggattctgcccggtgacaaggtcacagtggagatgtctccctatgacctgacccgcggccgaattacctggcgtactaagtaatggaggtttatcgacatgaaagtaagaccgtccgtgaagcccatgtgcgaaaagtgcaagatcattcgtcgtaaaggccgtgtcatggtcatttgcgagaatccgaagcacaagcagcgccagggctaagacttaattggaggttaaaaagtatggcacgtattgccggtattgacctgcccaaggataagcgaatcgaaatcggtttgacttatatctatggtattggcagaaagagtgctcaggagatcctggcacagacaggcgtgaaccccgacacccgcgtgaaggatctgaccgatgctgacgaggccaagcttcgtgaagccatcgaccacagctacatcgtggaaggcgaccttcgccgtcagaccgcactcgacatcaagcgtctgagcgagatcggctgctatcgcggcacccgtcatcgccgcggcctgcccgttcgcggtcagcgcagcaagaccaacgctcgtacccgcaagggccccaagaagaccattgcgaacaagaagaagtaaggagggagaatagaatatggcagcaaacaatgctaaaaccggtaagaaggttatccgccgtcgccgcgaaaagaagaacgtcgaacgtggtcaggttcatattcgttcctccttcaacaacaccatggtcacggtgaccgatacgcagggcaacgccctttcttgggcttcctccggcggcctcggcttccgcggcagcaagaagtccactccgttcgccgctcagagcgccgctgaaacggctgctaccgctgcgatggagcatggtctcaagacggtcgaggtctttgttaagggccccggccagggtcgtgaagctgcgatccgcgccctgcaggctgtcggcctggaggtcacgatgatcaaggacgtcacgcccatcccgcacaacggctgccgtcccccgaagcgccgtcgcgtctaatcgaaagaggaggtaaaaagcactatggcaaagaatatgcagccgatcgccaagcgctgcaaggctttgggcatttctcctgctgtgatgggctatgcgaagaagaccacgaatcgcaaccccggcagccagatgagaaagaagaagagcgaatacagccttcagcttgctgaaaagcagaaggtcaagttcatctatggtatcctcgaaaagcagttccgcggctactacgagtctgccgctgccgcccccggcaagaccggtgacaacctgctcatcacggtcgagcgccgtctggataacgttgtttaccgcatgggctttgcgatgacccgccgtcaggcccgtcagctcgtcagccatgctcacttcaccgtcaacggcaagaaggtcaacattccttcctacctcgtcaaggccggcgatgtgatcgaggtcgcggagagcagccgctcttccgaggtcttcaagcgcctgatgggtcaggacgctcccgtgttcctggtccccacctggatggagcgcgataagaacagcctcaagggcaccgtggttcgccttcccgcccgcgaagaaattgatgttcccgttgaggagcacctcatcgttgagttgtactccaagtaatcggcggcgagccctcaacagacacacgcagaattttggtgtggactttgagaccacagaatggaaatggagggtaactgcatgattgaaattgaaaagcccaagatcgagtgcgtggaagaccccgcgaacggcacctacggcaagttcaccgtagagcctcttgagcgcggctacggtatcacgctcggcaatgcgctgcgccgcattatgctctcgtccctgcccggcaccgcggcgacctctatcaagatcgccggcgtgcagcacgagttctccaccatccccggtgtcaaggaggatgtgaccgagatcgtgctgaacgtcaagagcctcattacccgtctgcacaataccgacggcatcaagaccgtctatattgaggctgtgggcccgtgcgaggtcaaggccggcgacatcaagggcgacagcgaggtcgaggtcctcaaccccgacctgcacatcgcaacgctggacgccggtgcgacgctcaacatggagctgacgctttctcacggccgcggctatgtgtccgccgaccgcaacaagacagcgcagacggctatcggcgttattcccgttgactcgatctacacgcccgtgtacaaggtcaactacaccgtggaaaacacccgcgtgggcaacatgaccgacttcgacaagctgacgcttgaggtctggaccgatggcaccatcagtccgcgtgacgccgtctctctcggcgctaagatcctctgcgatcacttctcgctcttcaccgacctttccgacgcgatgggcagcaagtctaccgtcgtggagaaggccgaggcgcagcgcgacaaggtgctcgagctgacgatcgaggagctcgatctcagcgtgcgcagcttcaactgcctcaagcgtgccaatatcaacacggtcgaggatctgatttccaagaccgaggacgatatgatgaaggtgagaaacctcggccgcaagagtctcgaagaggtcatcaacaagctggccatgatgggcctgtccctggccagcgaagacaacaactaatgaccggcaccctacgcccacgcgtagaacgacggccgacaacttatccttacaaggaggaaaaccactatgcccggaactcgtaagctcggtaagactaccgatcagcgtatggcgatgctccgtcagcaggtcaccgatttcctggataacggcaagatggagactacggtcacccgcgccaaggaaatcaagcccgtggctgagaagatgatcaccctcggcaagaagggcgatctggcagcttaccgccaggcgatgagcttcatcacccgcgaggatgtttgcaagaagctgttcaaggagatcgctcccggctatgctgagcgcaacggcggctacacccgcatcgttcgcaccggcgtccgccgcggcgacgctgccgagaccgcgatgatcgagttggtctaaaaattaggctaacgtgcggtcgaggcgctgccgacgcccgcccgcaggcgggtgtgcagccgtgcaaccgccgaaggcggctcttggcacggcgctgaccgcgatgatcgagttggtctaaaccaaccccgcagtcaaaagctgaattataagtaaaaagcccttttgtatggcagatcgcgaagccatacaaaagggctttttatcgtttctggaaaggaaaattgactagcgaggcagaatgctgtcaaaacgcacagagcagagtgacttgccgattgtatcaattcccgctgtttgcagcaggattcccaaatgcaaaaaagaagagcggaagcatttgcttccgctcttcttcattatggattcgtttgctcttacagcatattcagcacgagcgtcaggacgatgaacgcagcgccgacccacttggtggcacgcgcaagacgggcatccgtgctcttggccttgttcttggccatgaaggaatcggccacgccgccgattgcaccgcttaagccggcggacttgccgctctggaacaggacgatgccgatgacgatgagaccgcagagaagctgaagaatcgtaacgaataaagtcatggtgaaaacctccaaattgttgaacgtgtgatcacgctatattcacaggtactcataataccatagaaaggtgcggaaagcaagcctatttttcaatttctgccgctttctgcgctcagagcattgcgaccttgggatgcggcaggctgatggacggagcctcgggcggctgcggctttttcggggtggcctcctgcgcgtgcagcgcgcgctgcgccgcggtgagcatcagcttgatgcggttgagctggttcacttcgctcgcgccggggtcatagtcgacagcgacaatgtttgcgccgggataggccgcgcgcagcgccttgatgacgcccttgccgaccacatggttcggcaggcacgcaaacggctggatgcacacgatgttcggcgtgccggaggtgatgagctctgccatctcaccggcgaggaaccagccctcgccgtactggttgccgattgaaaggaagggcttggcaagctccgccacatggttgatggccatggggggatcaaagcgcttgctggccttcagcgcttcgatcgcggggcggcgcatgcgctgaagtgccggaatgccgaacttggcgctggccgaagcagtccacccctttccaaggtgggtgtgcttgaagtcctgctcatagatcgtggcggcaaagaaatcgagaagatcgggaacgaccgcctctgcaccctcgcgttccaaaaggtcgacaacatggttgttggcaagtggcatgtatttgacgaggatttcgccgacgacgccgacgcgcggctttttgagcgtttcgtcgatgggcagcgcgtcgaaatcctcgacaatgccgcggcagagctgggcgtagcggtacttgggatgctcgctcgtcagcgagtcgatgcagatgtcgcgccacttgcggtgcagcgcgttcgcgctgcctttttcgagctcatacgggcgcacgcggtacaggcagcgcatcagcaggtcgccaagcacgataccgtgcgcggcgtccaacagcagtgacggcgagatgcggaagccctcgttcgtctccatgccgttggcgttgagcgagatgacagggatgtgttcaagacccgcttttttgagcgcgcggcggatgaaggcgatgtaattgctcgcgcggcagcagccgccggtctgcgacatgatgagggcgaggtggtcggtgtcgtaccggccggaggtcacggcctccatcagctggccgaccgccgtgatcgagggatagcaggcgtcgttgttgacgtacttgaggcccgcgtcgatggcggcgcggtcgtcgttttgcagtacctcaaaattatagccgtggcggcggaagataggctcgagaatgtcaaaatggatgggactcatctggggggcgaggatggtgtagtgctgcttctgcatctccttggtgtagtagacgcgctcgaacggctgtacgtgagaggtcgaatggatcccgcgctcgcgccgcatggcgacggcggcgagcagcgagcggatgcggatgcgcaccgcgccgaggttgttgacctcgtcaatcttgaggcaggtgtagagcttgccgccctgctccaaaagctcgcagacctcgtcggtcgtgacggcgtcgagaccgcagccgaacgagttgagctgaatgagctcaagatcgtcgcgcccgcagacgaattccgccgcggtgtagaggcgggagtgatagacccactggtcattcacgcgcacggggcgcttggggacaaagtcgatgggcaggcaatcctcggtcagcaccgtcaggccgtaggccgcgatgagctcggggatgccgtggttgatctcggggtcgacgtggtagggacgtccggcgagcacaatgccgctgccgccgtttttctccatgtcggcgagtgccttcgcgcccgcggcgcagacgtcggccttggccctgcgctgctcttcccacgcgaggtgggcggcatggcgcgtttccttttcgggaatgctccatacttccttacagaactggacaagacggtcggaggcgaccttctcgttcgtgaaagcgaggaagggatgcaggtagcgcacggagccgtcggtcacggcttcgacgttgttcttgatattctcgggatatgaaacgacgatcgggcagttgaagtggttctgcgcgcccggcacttcctgatgttcgtagaacacgcaggggtggaagatggtcttgatgccgtggtcgataagccactgggcgtgaccgtgggcgagcttggcaggatagcactcagattccgacggaatgctctccatgcccagctcgtagatcgcgcgcgtggagaacggggagaggatgacgcggaagccgaggtcgcggaagaacgtcgcccagaacgggtagttttcatacatgttcagcacgcgcgggatgccgatctcgccgcgcggcgcattttccggctcgagcgggggataggcgaacatgcgctcacgcttgtaggcgaagatattttcgccgggtttggcagcgctttcgccgcgcagggctttttcgcagcggttgccgctcacatggcggcggccgccgggaaagacgctgaccgtgagcatgcagtggttctggcagccctgacagcgtgcggcagaggtcttgtacgtgagctgctcgatctcctcaagagggagcattgtgctctgctgcccgtggtagcggtcgcgcgcgagcagtgccgcgccgaacgcgcccatgatgcccgcgatgtcgggacacgtgacctgcgcgccggagatgcgctcaaacgcgcgcagcacggcctcgttgaagaatgtgccgccctgtacgacgacgtgcgagccgagctcactcgcgtcggagagcttgatgaccttataaagagcgttcttgatgacggagtaggcaaggccggcggagatatcggagacgcttgcgccctccttctgcgcctgtttgacgttggagttcataaacaccgtgcagcgcgtgccgaggtccacgggggccttggcaaagagcgcttcgtgcgcgaattcctgcgccgtcatgccgagggagttggcgaaattctcgaggaacgagccgcagccggacgagcaggcctcgttcagaagcaccgtgtcaaccgcgccgtccttgagcttgatgcacttcatgtcctgtccgccgatatcgagcacgcagtcgaccttggggtcgaagaacgacgcggcggtgcagtgggcgatggtctcgacctcgccctcgtcgagcgagaacgcggacttgagcagcgtttcgccgtagcccgtggagcaggagcgcgcaatatgcgcgcccgcgggaagatgctcgcgcagcgtatgtaccgcctgcatggcggtctggatgggattgccctgattgttggcgtagaacgagtacaaaagctcgcccttttcgccaactaacgcgagctttgtcgtcgtcgagcccgcgtcgaagccgagaaagcagtcgccattatacgttgcaagatcgccgcgcggcacgaccgccgtatggtgacgggtgcggaaggcctcgaggtcggcttcgtcttcaaagagcgccggcaggcgctttaattcaaaatccatctgcacgccgctgtcgagacgcttgatgagcgcgctgagcggctgcgccttggcgggcgtttcgtcgatggccgcgccggtggcggcgaagagatgggaattttcagggtcgatggtcgtctcatccgtcagcttcagcgtgcggataaacgcggccttgagttgggggaggaagtgcagcggcccacctaagaacgcgacatggccgcggatgggcttgccgcaggcaaggcccgaaatggtctggttgacgaccgcttggaagatcgaggcggcaaggtcggccttcgtcgcaccctcgttgatgaggggctggatgtccgtcttggcgaacacgccgcagcgcgcggcgatggggtagatctgctgatagtgcgcggcctcgcggtcgagccccgaggcgtcggtctgcaaaagagatgccatctggtcgatgaacgagccggtgccgccggcgcagacgccgttcatgcgctcttcgagcccacctttgaagtagatgatcttggcatcctcgccgccgagttcgatggcgacatccacctgcggcgcgacgcgctcaagcgcctgcgcgacggcgacgacctcctgcacaaaggggatgccgagcgccttggcaaggttgatcgcgcccgagccggtggcgcgcaattcgagcgcgcactcgccgagcgctgcgcgcgcctgcttgagtaagtcggacagtgcgcgctgtgtgtgggacagatggcgctggtactgcccgaagatcatttgtccgttttcatccagcacgacgagcttgaccgtggtggagcctacgtcgatgcctgcttgatacgttttcatggggaacctctcttttcatgtcgatgcgatttggcggtaaaagagtcccgccggattttcagattgttattataattgtatgccgcaaaaggacaagaagtaaagtttagggtctgttaagaaaatgaacaaaaatttacaaatatttttggcttgacatacctcgtaactctatgtatactacaagcatagacactctatgtatcatcggaggtgcaacatgaagaaaaagagcattgaccacacgcagcttttgctgctcaagctcctctcgaccgaggacatgtacggctaccagatcattctggagttggcgcgccgctcgagcaatgtcttcgagatgaaggagggcacgctctaccccgtgctgcacgggatggagagcgaggggtatgtggaagcctatgaaaaggcggcgcccacaggccgcgtgcgcaaatactatcacctcacgcgtgccgggcgggccgcgctcacagaagaggagaaagcctggcaggagtacagcggcgcagtgaacgccgtgctgcactttgcttaaaaagggtgaggctatgaacagaaacgagtattgcgatcgcgtgctcgcgcaggtcggccggctgacggctgacgaggcgaacgatctgagaaatgaactcgccggtcacatcgaagaccacgccgaagcgctggtcgagcacggctacacggaggacgcggcctacgggcgtgcggtggcgctgatgggagatcccgaggagacgggcagggcgctgcgccgttgctaccgcggctggtggctcgttatcgtgcagcgcgccgcgcgcatcctcacggcgatgctgtgcgtgatgatcgcggggttgatcgtgaagtcgagcggcctctacggcgcgatccgcgaccggatcaccgtgcagaagccaagcgacggctgggagcgttgggacacggagacaccggggacgcgactccctatcggcgatgatatcgtgcgcattgatgcggtctcctgcagtacccagcgcgcagaagtacagttgacagcctttgaccgtattcccggcggcgtggtctatgcgcggctgctgcatacgctgcggctggaaaacgagcgcggcgaggtgatcgacgaatgggaagactgcgattatccaagctgcgtgagcagcagtggcacgctctatgtgtgcatcgcgagtcaccgcgtcaatatcgagccggacgatacttatatcaggctcatttacgaccggctcggtgagcatgtcgaggtggagatcccgctgccgggaagggaggcgcagccgtgaaaatgatcaagcaaaaaccgagcagaatgcgccgcgcggtcaggagcgttgccgtgctgctgtgcgtgctggcggcgtatgtcgttctgtccgacatgaagctcacaccgcgcgcggcgatccgcatgggagagcagtattacggcatctatgagccgacgcgcaccgttgcgatgcagcgtatgcgcatcggttggcaaaactaccgcgtctatctgacggcgggagagaactcgctctactgcggcgcggcacggctgactccctccggctgggacatcatttttatgggcgatgcgatctcctgtgcggatggggaaagcgtgcatgtcggcaattggtgcccgggcttcaataagatcatcgggcaggagatcgtattcggccgcgtcgacgatcccaacattgcgctgctcatcattgaggaatggggcggcagagactggacaaagccggggtgcgagaatgaaaaactccgcaggctgcgtaccgtcacggtggaagaattcatcgaggacggcggctgccgctatttccttcttgacgcgcgtgagcgcgaggaaaatacaagatcctatgcggcggaaaagggagttctgcatattacgggctacgatgccatgcaccgggaaattttgcgccgggaaattgagatcggcgcaaatagcctcctataggcgcggagggggagcgcggcagctttgccgcgctccctttgcatcgatgcaagggggaagaggcatgaactttcggtgaattcttccgcgcacacgttgacggaaaaaagccaaaatgatatcctactctggaattcttattcattcatttcctcagaaagaaggcaggatatgctgaagctgcaacagatcgtcaaggattatcaggcgggcgacaccaccgtccacgccctgcgcggcgtgagcttacagttccgtgagagcgagtttgtcgccatcctcggccattcgggctgcggcaagacgacgcttttgaacattatcggcgggttggatcagtacacgagcggcgaccttgtcatcaatggcaaatcgacgaaggacttttctgattcggactgggacagctaccgcaaccactccgtcggcttcgtcttccagagctataacctcattccgcaccagacggtattgagcaacgtggagctggcgctcacgctctcgggtgtgagcaagtcagagcgccgcgagcgcgcggtcagggcgcttgagagcgtgggccttggcgaccagctcgacaaaaagccgaaccagatgtccggcggccagatgcagcgcgtcgccatcgcgcgggcgctcgtcaacgatccggacatcctgctcgccgacgagccgaccggcgcgctcgacagcgagacgagcgtgcaggtgatggagatcttgaagaacatctccaaggaccgcctcatcatcatggtcacgcacaaccccgagcttgccgagacctacgcgagccgcattgtgcgcttaaaggacggcgagatcgtagatgacagcgcgccgtatgaggaggccgtggaagaaaagcccgccgcgggcaagagcaaaaagacctcaatgagctttggcacggcgctgtcgctgtcgctcaacaacctgatgacgaaaaagggacggacgtttttaacggcctttgccggcagcatcggtattatcggcatcgcgctcattctgtcgctgagcaatggcatccagacctatatcgaccgcgtgcaggaagatacgctatcgagctaccccttgaccatcgaggctgagagcatggacatgtccagcatggtcagttcgatgatgggcgtccatgcgcaggacgagggcgacggggagcagcatgacctcgacgccgtctactccaacaacattatgtacgacatgatgagctcgtttgcctcggcggagacgcagacgaacaatttgaaggacttcaagacctacctcgagggcgacgacgagctttcaagccacatcagctccatttcctatgactacgacctctgcatgagcatctatgccaaagacaccgacggcaaggtcttcaagtccgacgtgacggagcttttgcagacctgcatgagcgagctctacggcggcgattacagcagctatttcgagcgcttcggctcggcctactccgcgatggagacctgggagcagatgctcccgccgcaggatagtgagagcggcgagctcgtgggcgacctcctgcacgagcagtatgacctcatttacggctcctggccgcagaattatgacgaggtcatgctcatcgtcaacaaggacaatgaaatttccgaccttgtcatctattcgctgggcctgagcgcacaggacgaggtcgtggagtcgatgcagcacatgctcgacggctcggaattcgacagcaaggacatccagagctggagctatgaagacctgtgcaatatgagcttcaagatcgtcctgcccgctgagcgctaccagtacgattccgcaagcggcacatataccgacgtcagcacgacggacacggggctcgacttcctctataactccgacgatgtcggcacgcgcgtgaagatcgtcggcatcctgcgcccgaatgagaacgcggtatcctcgatgctctccggcgcgatcggctatacgtccgcgctgacggactacctcgtcgaaaaggcgggacagaccgagattttgcagaagcagaaagaagaccccgataccgacgttatcctcggcctgccgttcctgaccgatgactactccgtgagcgacgagcagaaggaagcggacgtgaccgactatctcgagggcctttccgtcaccgagcgcgccgcggcctacaccgcgatgatgagcgtgccgagcgaggagtatctttccgccatcgtggagcagcagatgggctcgctcgaccgcgcgagcatcgagcagatggtcatttcgacctacgcccagcagatgagcgtggatgaggcgaccgtcaagtcctatattgcgcagatggacgacgagacgctcttcggctacgtggagcagtctatccgcgagcaggtgacagagcagtacgccgcgggcgtgcaggcgcggctatctaacatgacaagcgatcagctcgccatggcgctcgacctggcgctcgaaaaatcgcccgctgtcacgccgctgacaagcgagcagtacaactggctttatgataactacatgcccgcgacggtctcgaacggcacgtatgaggacaatctgaagctcctcggcgacgtcgacctcgcaagtcccaagaccatcaacatctacgcctcgacctttgccgacaaggatgccatcgccgatgcgatcgagcagtacaacagcagcgtttccgaggatgaccagatcgactacaccgactatgtggcgcttctgatgagctcggtcacaacgatcatcaacgccatcagctatgtgctcattgcgtttgtcgccatctcgctcatcgtgtcgagcattatgatcggcatcatcacgtatatctcggtgcttgagcgcacgaaggagatcggcatcctgcgcgccatcggcgcgagcaagcgcgatatctcgcgcgtgttcaacgcggagacgctcatcgagggcttctgctccggtgccatcggcatcggcatcacgctattgctgatcatccccatcaacctcgtcgtgcaccacctgacgggtatcgagagcctcaacgccatcctgccgcctgtcggcggcgcggcgctcgtggtcatcagcatggcgctcacgtttatcgcgggcctcattccctccggcatcgccgcgcgcaaggaccctgtcgaagcgctgcgcaccgaataacacgatatttgaccttcaaaaaggacgttttccgacggaaaacgtcctttttctcttttaccgcgattttacaaaaggcgactttctgattttacaacctgcctttatgatggcaaatgtagcaaggaacaacatcttggaaaaattgaaaggaagtatttcaaatgaaaaagtttctcactcttgcgctgaccgctgtcatggcgctgagcctgctgaccgcctgcggcagcaagaacgacaacagcgccgacaccaacactgacggcagcaacaccgaaacgaccctctccggcaccgtctcgaccgacggctccacctcgatggaaaaggtcatcaactctcttggcgaatccttcatggccatgaacaaggacgtgaagttcacctataaccccaccggctcgggctccggcattcaggccgttagcgaaggccgctgcgacatcggcctttcgagccgtgcgctcaaggatgacgaaaaggcctccggccttgttgagaccgtcgtcgcgctcgacggcatcgccattgtcgtgaaccccgagaaccctgtctccgatctcgacattgacaccatcgccaagatctacaccggcgagatcaccaactggaaggacgtcggcggcaacgacgccgagatcgtgctcatcggccgcgaggccggttccggcacgcgcgacggctttgaatccatcaccggcaccaaggacgcctgccagtaccgtcaggagctgacctccacgggcgacgtcatcaacaccgtgtcccagaaccccgacgccatcggctacgcctccctctcggcggtgggcgagagcgtcaaggcgctgacagtcggcggtgtggaagccacggaggcgaccgtcaaggacggcagctatgtggtccagcgtccgttcgtgctcgtcacgaaggagggcaccaagctttcccccgcggcacaggacttcttcgactacgcgctgtccgctgacgcggcaagcatcatcgccgctgccagtgcggtcgcagccaactaacagaacacaggaaccatcacgggaggcggcgtgagccgtctcccgctgacagcaaaaagaggaaacaattatggcgcagaggaaaaaaatgtttgaagccgtcgtccacggtatttttctgcttctcggcctcattacggtcggatgcgtgctgctgatcacggtgtatctcatcatctccggtatcccggccattcagaagatcggccttgtgccgtttctcacgggcaaggtgtggtcgtcgacgtcggcggagccgaagtacggcattctgccctttattttaacgagtgtttacggcacggcaggcgcgatcgtcctcggcgtgcccatcggttttttgacggcggtgtacctctccaaggtcgcgcccaagaaggtccgcaccgtgctggaggccgccgtcagcctgctcgcggggatcccgtcggtcgtgtacggccttgtcggtatgctggtgctcgtgcctgccatccgcaagacgttccacctgccggacggcgcaagcctgtttgcggccatcatcgtgctggccgtcatgatcctgccgtcgatcatcaaggtgagcgtcacagcgctcgaggccgttccgcatgaatatgaggacgcctcgcttgccctcggtgcgactgaggtcgagacctatttccgcgtctccgttccggcggcaaagagcggcatcgccgcggcggtcgtgctcggcgtgggccgcgccatcggcgaagcgatggccgtgatgatggtctcgggcaacgcgccgaacatgcccggctcgatctttgagagcgtccgctttctcacgacggcggtcgcgagcgagatgtcgtattcgagcggcttgcagcgtcaggcgctcttttccatcgcgctcgtgctgtatcttttcatcctgctcatcaatgcggcgctcaacttcttcttaaagcgcgacaaggagggtaactgatgctgaaaatgcagtcctcggcccgccgcaaggcctatatcacggcgatgaagctcctgatgggcgtcgccgcagtattgacttgcgcgctcgtagtcggtatgattggttatatattgggcaacggcattccgaacatcacctgggagatgctctccaccgcgccgagctatcttgccaaccgcgtcggcatcctgccggacatcctgagcacgctctacatcgtcatcgcgatgcttttaatcgtgctgccgctcggcgtgggcgcggccatctacttaaatgaatacgccgcgaacaaaaagctcgtctccatcatcgaatacgcgtccgaaacgctctccggtatcccgtcgatcatctacggccttgtcggcatgctgatcttctgcaaaaacggcacgtcgcttcttgcgggtgcgctgacgctgacgatcatgaacctgccgaccatcatgcgcacgacacaggagagcctcaagaccgtaccgcagagctaccgcgagggcgcgttcggcctgggcgcgggcaaatggcgcaccatccgcacggtggtgctgccaagctgcgtggacggtatcgtgacgggctgtatcctgtcgatcggacgcatcctcggcgagtcggcggcgctcttattcacggcgggctcggcgcacatgctctacaacttctttgagggcatgcacaacgcgggcgcgacgctgacggtggcgctgtacttctacgccaaggagtcgagcgatacgggggtggtgtttgccatcgcggccattttgctgctgctgacgatgctcattaacctcatcgccgatctggtcggccgatacttcaggaggaaacagcaatgatacgacctgtcaacggaagcggcatgaagcgcatggcgctcttaaatgacctttcctgcttcggcaagtgttcgctgagcgtggccatgcccatcctctcttcctacggggtggagacggtaccgctgccgacggccattttatcgacgcacacggcggacggcttcggcagctacgtcatgcgcgatatgacggacgagatgaaggcctttgccgcgcactggagacagcttcaaatcaaattcgacggcatctgcatgggctttttcggctcggtggagcagatgcattttgcaaaagatttcctccgcgactttgcgggggaggataccatcgttgtggtcgaccccgtgctcggcgacaacggcgcgctgtacggctgctttaccgaagagtacgtgcaggcgatgcgcgcgctgtgcgagagcgcacagcttatcacgcccaaccgcacggaggcggcgcttctcgcgggctgcgggatggacgcaccgatagaaacgcttcttaaagcgctcacggtggaaaatgttatcatcaccggcgtccaccgcggggaggagatcggctactgcgcgcggctgaacgggcagtatatggaaattttcaagccctgccttccgcagacgctgcatggcacgggtgatgtgttcgtctccgccctgtgcggcgagctgatgaacggtaaaggcatgccgcaagccctgaaagacgcggcggaattctgcgacgactgcgtgcagaaaacggcaaaacgcggcgagagccactggtacggcctcgcctttgaagacaaattgaaagaggggagagggctatgaacaacatcctttccgttgagaacctgtgtctgtggtacgggagccatcaggcgctcaaggacatcaacattgaaattcccgaaaaaagcattacggcgctcatcggcccgagcggctgcggcaagtcgacgtttttaaagacgctcgaccgcatgaacgatttgctccccgatgtgaagatcacgggcagcgtcctctataagggcgaggacatttttgacccgtccgtcgatgtgagcgagcttaggcgtcaggtgggtatggtgttccagaagccgaaccccttcccgatgagcatttacgacaacattgcctacggtccgcgcacgcacggtgtgaagaacaaggcaaagctcgatgagatcgttgaaaaatccctgcgcggcgcggcgatttgggacgaggtcaaggaccgcctgaagaaaaacgcgctcggtctctccggcggccagcagcagcgcctttgcatcgcccgcgcgctcgcggtcgagcccgaggtgttgctgatggacgagccgacaagtgcgctcgaccccatttcgacgtcgaagatcgaagagctcgcgatggagctcaaggagaagtacaccatcgtcatcgtcacgcacaacatgcagcaggcggtgcgtatttccgaccacacggcgttcttcctgctcggcgagctcgtagagtacggcgagacggagaagctcttctcccagccgcaggacaagcggacagaagattacatcacggggaggttcggttaaatgagaagccggtttgatgaacagcttgcgcttttgaaccgcgagctcattgagatgggcgcgctgtgcgaggaggtcatcgccctttcggcacaggcgttgacggagggcaacgcggagctggccgcgcgcgtcgcaccgctcgatcaggagatcgaccgcaaggagcgcgagatcgagtcgctgtgcctaaagcttcttttgcagcagcagcccgtggcaaaggacctgcgccagatctcggcggcgctcaagatgatcacggacatggagcgcatcggcgaccaggccgaggatattgccgagatcatcacgttcctcggcgggcgcggtgcggaaaacagtaatctcctgcgcgagatggcgcgctcgaccatcaagatggtgaccgagagcgtggacgcctatgtcaagcacgacacggcgcttgccgatcaggtcatcgctgaggacgacaccgtggacgactatttcgcgcgcgtgaagaaggacctcatcaagcgcatcgcgcaggaccctgatgatggtgaattcgcactcgacctgctgatgatcgccaagtattttgagcgcatcggcgaccatgcgacgaacatcgccgaatgggtcattttctctgtgacaggagagcataaggaggggtaaagtatgatctggtgcgtggaagacgatgccagtatccgcgatatcgaggtatatgccctgcaatcgaccggctttgaggccaagggctttgaagatggtacctcgttctgggaggcgctgcgcacgggaagacccgagcttgtcgtgctcgatgtgatgctccccggcatcgacgggatggagctgctgcgccgcatgcgcgcggacgcggcgctttccgatatccctgtcgtcatggcgacggccaagggcgcggaatacgacaagatccgcggtctcgacctcggtgcagactactatctgacaaagccgttcggcgtgatggagctcgtctcctgcgtcaaggcggtgctgcgccgctgtggcacaaagagcgcatcccagttccgctgcggcggtctggtgctcgacgaagagagccacaccgtcacggcggatggagagagcgtcgcgctgacatacaaggaattcgaactgctgcgcctgttcctctcgcatcccggcacggcgttttcgcgcgaccagctcatggcggacgtgtggggcacggactactgcggcgagacgcgcacggtggacatgcacatccgcacgctgcggcagaagctcggcgcgtacggcgagaagatcgagaccgtgcgcggtgtgggctaccggatggagggcaaggcatgacaaaaaagatctttcactccatcctgcttgtggcgggcacggtgctgctggcgagcctgctcgtcatcatgggctgcctgtacgaatacttcgggagcgtcgaaaaaaagcagctgcgcgacgagctggagcttgccgccgtcgccgtgaaggaaaacgggacggagtatctctctcagctctcctccgagcgctaccgcctgacgtggatcgaaaacgacggtacggtgctctacgacaccgtgaccgatgccgaaagccttgaaaatcacgccgaccgcgtggaggtcaagcaagcgctggaatacggcgagggcgagagcacgcgctattcctcgacgttgctgcaaaagacgatgtactgcgcggaaaggctcgcggacgggagcgtgctgcgcatttcgatgagccgcgcgacggcgggtgtgctgctcgtcggcatggggcagcccattttagcggtgctgatcgtggcgctgatcctgtcctctgttttagccaagagcctgtcgcaccgcatcgtccagccgctcaacaagctggaccttgagcatccgcttgaaaatgacgcctatgaagagctcgccccgctgctcgggcgcatcaaccgccagcacttgcagatcgacgagcagatggacgaacttcagcgccagcagacggaattttcgcagatcacaagcagcatgcgcgaagggcttgtgctgctcgatgaaaaagagcatgtgctgagtatcaaccccgcggcggaaaagctcttcggcacggacgagagctgcgtcgggcaggactttttgaccatcgaccgcagccacgacatgagccttgccatcgagcgcgccatggacgagggacacagtgaggcgcgcgtggagcgcggcggccgtatctggcggtttgatgtcagccgcatcggcgcaagcggcgcggcggtcggcgctgtgttgctggctttcgacatcaccgagcgcgagacagcggagcagacgcgccgtgaattcacggcgaacgtgtcgcacgagctcaaaacgccgctgcaaggcatcatcggcagcgcggagctgctggaaaacggcatggtgaagcaggaggacgtcccccgcttcgtcggccatatccgaaaagaagcgcagcgccttgtcacgctgatcggcgacatcatccgcctgtcccagctcgacgagggcgacgaaatgccgcgcgagacggtcgacctgctcacgctttcgcaggaggcggcggacgatctcaagaccgcggcggcggagaagcacatcgcgattgccgtcgagggcgggagcgagaccatcggaggcgtacggcggcttttgtacgaggtcatctataacctctgcgacaatgccatcaagtacaacgtcgagggtggcagcgtgaccatgagcgtcggtgaacgggacggcaaggcgttcgtctccgtggccgatacgggcatcggcatcgcgccggagcaccagagccgcatcttcgagcgcttctaccgcgtggacaagagccactcgaaggcaagcggcggcacgggcctcggcctttccatcgtcaagcacgccgtgcagtaccatcacggtacagtcgagcttcatagcgaagagggcaagggcacgacgatctgcatcctgctgccgaaggagtaagtgaatcgtaagagagccgcaggcacagcctgcggctctcattttagttgacgattctcaataattctccgcgtggacttcgaagtagctctgggggtggttgcaggtggggcagacgtcgggggccttggtgccgacgacgatgtgaccgcagttgcggcactcccagatcttgacctcgctcttttcaaagaccttggcggtctcgacgttgcgcagcagcgcgcggtagcgctcttcgtgatggcgctcgatctcgccgacgaggcggaacttctgcgccagctcgggaaagccctcttcctctgcggtcttggcgaaagaatcgtacatgtcggtccactcgtagttttcgccctcagcggcggagagcagattgtcggcggtggagccgatgccctggagctctttgaaccacatcttggcgtgctccttttcgttgtccgcggtcttctggaagagcgcggcgatctgctcatagccctctttcttggccgtggaggcgaagaaggtgtacttgttgcgcgcctcggattcgcccgagaaggcggtgcgcaggttctgctcggttttggtgccggaatatttgttggtcttcatggtgaaattctcctttttctctcaaaatttaatgctcttcctgcgctttgcggcaggcggggcagagatagtgaatgcgaaggtcgtaggactggatgcgcgcgccgagcgcggcttcgatgtcgtgcgtcaggtcggtgaacttgaagtctgcgagcgcgccgcagcgggtgcagatcaggtgatcgtggcgcgtggtgttgtcgtagcggtcgggcgcgccgggctgcgacaggcggatgagtttgccgtccgctacaagcgcgttgaggttgttatacaccgtagcttgcgcgattttggaattttcctgcttcatttgcagaaaaatctgctcggcggtcgggtgctcggtggagcacaggacgagatcgagaatctgctgggcgtacttggtcatgcgtttctcctaaataagaattagaataattcttattatagcgataaaaatagagttgtcaagcaaaaaatcaaaaatagtttgcgtcatgcgcgcacgcgctgcggcataccctttatggaaaagggggaatgagatggaccagacgatagcatttctgggcggcgacgcacgcatgcgcctgcttgcccagatgatggctgcggagggatacgacgtctgctcgtgggagctgaccggtgcgccgaataaacgggcgctgtgcgacgcactgaaagcagacatcatcgtcctgccgctgccggcggagaaaaacggctatttgagcggcacagagctcacgatggagagcctgctgcgctcgctgcggcgcgagcaccgcattttcgcgggcaatgtgggaaacgacgcgtcaacgctcgcgcagtcgttggggcttacgatcacggactactttgcctcggaagagctgagcgtgcgcaacgcgatcccgacggcggagggggccatcgaggcggcgatgaagcacacgagcgtcacactgcacggcacgccatgcctcgtgctcggctttggccgcatcggaaaggtgctcgcgcacgatctgagcgcgctgggagcgaaggtcagcgtcagcgcgcgcaagcggtcggatcttgcgtggatcgacgcgttcggctacgcgccgctgcacacgaaccgcctctccggcacgctgggggaattccgcgtggtgttcaacaccgtgccgcatcaggtattggacgaagcgcttcttgccgaactgccgccggactgcctgctcatcgagcttgcgagcgcgagcggctttgacatggacgcggtcgaaacgctgcgcctttcgtatctcaaggcagggggactgcccgggcgcgtcgcgccggagacggcggcgcgggccatcaaaaagacgttatgtcgactcatcaaggaggaagcatgaagatcggatttgccttttgcggctcgttctgcaaccatcccgagctgctgaaactctacgaggacatcgcgcgcgagcatgagatcgtcccgattttgtcggaaaatgcggcgaagtattccacgcgcttcggcacggcggaggacttcgtcacccgcgtggaggcgctggcggggcggagggccgtgcgcaatatcgtcgaagccgagcccctcggcccgcagggggcgatggaagtgctcgtcatcgcgccctgcacgggaaacacgcttgccaagctcgctcacggcatcacggacggcgcggtgacgatggcggcgaaggggcacctgcgcaacggtaagcccgttgtgcttgccattgcgacgaatgacggcttatccgcgagcgcgccgaacatcgcggtgctgctgaaccgcaaaaactactattttgtccccttcgggcaggacaacgccgaggtgaagcccacgtcgctgatcgcggacttccgcaaaattatcccgacggccgaagcggcgctggagggaagacaaattcagccgattttgctgtgaaacgaaaaaaggcaggaatgtcctgccttttttgcgatgtaacaataaacttgcgcgcgatttttgtcaatgctcgctgaatttgcttgaaaaatccccctcgcttctttatactttgccatagagagaagagaggagggagcgcgaatggacgaaaacctgcgcgagacaacagagcttccggggagcggagggactgcgccgaacgaagagaatgagcccgagacgaagagcatccgctttgtgcccagcgcctatgacccgcgcggcatcgagcagtggctttctgagcgcgcggcggaggggaagctcctgctccgctacgacgattttgtgatcggcgagccgcgcgactgccgctatcatctggagcccgccgcggacgatgacgaccccgacgaaagcctgcgcgaaaagcgcgcccgcctgggctgggagtacgtctgccggacgaaggacggcattttctacatctggcgcggcgaaaagaccgcgcacgtccccacgccgaaggactgtacggattcctacggctaccgaagactgtgtaaaaagctgcgccgcagctattttctgccgatgttcttcctggtggtggacatctggctcgtctatttcctttttagtgtcttgagtctcccggtgatgtcgttcctcacgatggaaaagagcgaggtcattcagtttgtgtccattatcttaggcagtatcctcggtatcctgagcgaggcaaaggagagaaacgagatgtggacgctcaagcgcgcgatggaggcgtgcgagcgcgtggagaagatgccgcgcaaccgttgggcgaaagcgaaccgcgcgcttacgatcattgccggtgtattggcgctcacgctgattttctggcgagtgaacgatacggcctacggcgacagctatgacgagccgccgctgccgtatatcgggaccgagatgctcggcggcgaaaggggatcggactggtatggtgtgcgcgatctctcgacgccgctcggcgggcacgtgtactctgtcggcgaaacgccgtatgcgggaacgatcgacacttggatgcagtacagcacggagcttgacttctacgctccgcgtatctccgcactggcaaagcccttgacacatgagctgcgggactattttatggaagacggtgcgcagacgctttccatcgacggctttgacgaagcgtactacgcagaatttatcaaaccaaatacccggcttcccaatgaaccggacgaagtccaccagtttcttatcctgcgccgcgggggagagatgctttacttccgcaccaaggcgcccgacagcctgcgcgagcatctggacgaatttgcagacatctttaatcagtacagcgaattagcataaaaagaagtgcgttcctaacgggaacgcacttcttttttgctatcttgtcactgctctaactttttgagctcgtcgagctggccctccagcgtggtgaacgcctcgggcagctgtgcgacggcagcgtccgcgcgcttgagctcgttcgacacgctctcgcaagtcgcgccgagcgtcgagagcacctgctcgcagtgccctctgcatgccgcgatcatcgcctgcaaacgctcccgcgtggcggcgtcgagcgcgtcggcgcgctcacgggcggagagctcaatgtcggcgatgtgcgccttgacgcggccgtattcctcgacctgcgggcggagctcgtcaagctcgcttaaaaggcgcttgcgctcctgctcggcggcggaaaggcgttcggcgtgctgcgcttccagctcggcgatgcgctgcccggcagcctcctctttgactttcagctggcggtcgcagtcggccttggcgctcgcgagcttctgcgcaccctcttcgatctgcgcgcgcagctcggagatcgtctcctgcgcggcggtcagaccctttttgagcgcgtcctgcgcgctggacgcggtcgaataggactcggcaaacttgtcgcgctcacgctcggcggcggcgagcttgtcgcgcagctctgcattctcgcggcagaggccgtcgctctcctgctcgagcgcttcgatctgctgcttgctctcgagcgaggttttttcgatataacgaatgacgtcatcgcggttgaagccgccgaagacggagctcttgaaggtattttccatgattttcccaccttttcctttgtcaatgttatggtaacacaaacccgccgcgatgacaaggaaaaaagcgcgacctcttaaggccgcgcttttacggttttatcggagagggaaggaaaaactcttgcccttcttggtgaaagtaaagctctcctgctcttcgccgccggctttggtgcagcgcacgcgctcggcgctcacgctgccgctgatgtcgccgcaggtgacgctgtcgcttgcacggacgttgcccttgacctcgccgcagcggacgctgtcgcttgcggacacgtcgccgccgacattgccgcaggtgacgctgtcgctcgcgcggacattgccctgcacgtcgccggtgcagtgcacactgtcgcccgcctgcacattgccgccgacattgccgcaggtcacgtcatcgcccgcggtcacgtcgccgccaacgtcggtgcaggtcacgccgtcaccggctctgacgctgccggagatcgtcgaatcggtgcagacgacggaaaaatcgctgtaaatatcctgcgccgtgccggaaaagtgcagctcgacggtcttgcggatctcgtcgtatttgtcgtggcggaacaggctcccctgtttcggttggagcagccggtgcccctggaagagcacggcgtggatggcgtcgtcatcctcccacggcagttcgaccgcgatgggcaaaatctggctgtccgcttccgctttttgggcggtttttgccatgctttcgcgtccaaagagctcgtcgaggctgagctccagcgtgtcggccagcagcggcaaaagctgcaggtcagggcagcagacatcgccctcccactttgacacggcctgattgctgacgccgagctgattggccagcgcctcctgtgtcagtcctttttctttacggcggcgcagaatgcgcgcgcccattgtcgattcttccaagttgtctatcctcctgcactgcattataatagtaaagtgagcgttggaaacgcgatgagcgggtgtcccgcgtcgaacgggaagtcaggcgccgacgtttccctcgtattcaggcagcacatcgcgtgcaaacgcctgatcgccgatcgtaacatgttggtccttccttgccccgtgctgcagccgcggctttgaatcaccggttatggactcagtatagggggcatggggaggattgacaatggcgcggtggttgaatcgggaaaaatcctttccaaccgccggttggaaaatgagattttccctgatttttcaagaaaaactcagtgccggatgacggtgatctcgcccatatccttggtgtagtcgaccacgtgctggaggaaaagctgcgtgatcgtggaggggagaaagccctttttcacggcgatgccgatctcgcgcgactgcttgacgttgagcggcagcacggcgacgcggtagcgtccgggcttgatgagcaggctgtgcacgatgctgatgccaagtcccgcctcgaccatggacaagagcgcgaagtcgctcgtcgtgtcataggtgacctcgggatggatgttgtaatggtcgagcagacggttgaattcgtagtcttcgatctccatcaggcgcacgaagttctcgtgcggcagctgctcgagcgggaagacggacgcgtccgccattgggtgatcctttgggagaatggcgaccatcgtgtcgtgcaggatgggcgtcgtctcaaagtcgttggaggccgggatggcaagaaagccgcagtcgatcgcgccgcggcgcagccattcggaaatttcataatactcgccagtcatcagctggatctgaatgttggggtacgtctggtggaagtccttcagaatttccggcagcaggctgatggcaaggcttgtaaagcacccgaggcgcagcgtgccggactgcacgccatgcagctcggacacggcaaagttgaggtcctcatagtccttgacgatctcgcggatcgtgggcaggagcaccatgccgtcggaggagatctcgatgccggagtggttgcgcgttaagagcttgacctgccagtcctgctcaagatcggagatcatcttgctcacggcggactgcgtatagcccaattcgttcgccgcctgggtgatgctgccggtctccacagtgcggagataggcaatatatttacgaatactcattataaatgccctcaataatcaacaatacctcaaagattccattttggaatgcgcatataaaaatatattcgcttttcaaaactgcttttggattatacaatatcaacaaagaaaattcaatgcctacacacgggattttccaagcagtacaaaattgtcagacaaaatgtcgaatcaacaaggaggaaaacagacatgatccattattcctgcatcggtgctaccggttatgtttgcggcgaagtgctccgcatgatggtcaaccaccacgagggagagcttgtcaacgtgctcgatacctacggtgtcggcgatgccatctctacgcatcatcccgctctgcgcggcttctatgatcaggtcatcatggacctcacggaggagaacgtccgcgagaccgcgaagaagagcgatgtcatcatgatccaggtcccctctggcgacgtggccaagtgggcggagatcgtgctcgctgaggactgcgccatcatcgatatcggcgctgacatccgcttccgcgatgtcgacgtctgggagaagtggtacggccagaagcaccccgacgccaagatgacccacgacgctgtttactgcatccctgaggtcatgcgcgaccttgccaagggcaagaagctcatcgccaaccccggctgctatcccaccgcctccaccctcggcctccagcccatgctcaaggccggtcacatcgttgacaacaccatcgtcatcgatgccaagagcggctacaccggagccggccgccgtcccgccctcaacaagctcctcactgaggcggagaacaacttctgcgcttacgccctcggcggcggccaccgccacacgcccgagatcgagcagaacatcgcctacatcaccggcaaggatctgatgaagcccgagacttggcagtacatcaacttccagccgcacctcctgccccaggtccgcggtatcgaggtcaccatctacgctacctgcgacagagacttcaccaacgaggaagtttacgagctctacaaggacttctacaaggatgagcccttcgtcaaggtcttcccggcgagcctgcccgttcagaccaagtgggtctacggcacgaacttctgcgagatgaccccgaccttcgacgcgcgtacccaccgcctgatcgtctcctccgtgatcgacaacatcggcaagggcgcagccggccaggccatccagaacatgaacctcatcatgggcctgcccgagaccaccggcctcatgatgcccccgatgtatccgtaattttcggttcgacgagtttcgacccgatttaggcaagaatgctgttaaactaacgttaagagaggagatccccccacatgtccaatctgaaaaagatcgagggcggcgttaccacgccgcagggcttcaccgccggcgcggtctacaccgccatcaaaaagcgcgagaacaagaagcccgacgtcgctgttctctactccgacctgccctgctcctgcgcggcctgcttcaccacgaacaaattctgcgcagctccggtcatccttgaccgcgagatcctgaaaaagggcaaggcccgcgccgtcgtcatcaactccggcaacgccaacgccgccaccggcaagcagggcatcgaagacgcccgcaccgttgagcgcgaggcggaaaagctgctcggcctcggcgaggacgaagtgttcgtctgctccaccggcgtcatcggccagagacttccggtcgacaaggtgcttcagggcatccgcgagatcattcccgcaaagcttgccaaggagaacggctccgaggctgcctacgccatcatgaccaccgataccgtccgcaaggagtgcgcctatgagctgcagctctccaccggcaccgtgaagatcggcgcgatggccaagggctctggcatgatccaccccaatatggcgacgatgctcgtctacgtgacgaccgacgccaaggcggatcccgcagacctgcagaagatgctctccgcggctgtggataagagcttcaacatgtgcaccgtcgacggcgacacctccacgaacgactcgatcttcctgctcgccaacggcgcttccggcgttgagatcaagaccgaagaagacaagaaggcgatggccgacctcgtgctcgccatctgcaccgatatggcccgccgcgtcgcttccgacggtgaaggcgcgacccacctcattgaggtcgaggcctacggtctgcccaccgagcacgacgcgcgcctggtcgccaagtccatcgcgggctccatgctcttcaaggctgccgtcttcggccgcgacgccaactggggtcgcatcatggccgctgccggttactcgggcgctgacgttgacccgacccgtgctgactgcatcatcaagagcgctgccggcgaagtgcaggtcatgaaggacggcttcggcgcggacttcagcgaagagctcgccaagaaggtcctcaccgagcatgacattaccgtcatcgtccgcttctatcagggcgacggcgaggccaaggcctggggctgcgacctcacttacgattacgtcaagatcaacggcgactaccgcacctaatttttgaaggaggctccaccatgagcgatatcgcaaacaaggtcgaaactctgatggaggcaatgccttaccttcagaagtatcagggtaagatcatcgtcatcaagtacggcggcaacgccatgatcaacgaagaactcaaggacgccgtcatgcacgacgtggtgctgctcaagctcctcggcatgaagcccgtgctcagccacggcggcggccccggcatcaacaagatgctcgaaaagctcgacatccccgtcgagttcatcgagggcctgcgctacacctccgccgacatcatgcgtgttgtcgagatggtgctcgtcggccaggtgaacaccgagctcgtcggctttatcaacaagctcggcggcaaggcggtcggtctttccggcgtcagcggtgacatctatcactgccaccagcgcgacgaggtccacggctacgtgggcgacatcgactatgtcgatcccaagcccatcttcgccatgctcgacgcgggttacatccccgtcatcgcccccgttggcaccgacggtcagggccacaccttcaacatcaacggcgataccgccgcgggcaagctcgcttccgcgctgggcgctgaaaagctcgtgatcctcaccgatatcgagggcctgtgcaacgacatcaagatccgcgacgtcatcagctatctgaacatcgaggatgtcaaggcgctcaaggacaagggcacgatcgccggcggcatgatcccgaaggtcgactgctgcgtgcaggccatcgaagagggcgtgacgagcgtcaacatcatcgacggccgcaagccgcactccgtgctctacgaggccttcacgaacgagggcaccggcacgacgatcggcaccgcacagccgagcgtcggcatcaaatggtaaaacatacacccaacttttattataggaggacataataatgatcgaaaagttcaagaccaacgccgaagtcatcgagaacggcgacaagtacctctatggcaaccacgtccgtatgcccctttccatcgagcgcggcgaaggcgcttacgtcttcgataaggacggcaacaagtacctcgacttcatcggcggtatcgccgtcaacggtctcggtcactgccatcccgcgatcgtgaagtgcctcgaagagcgcgcccacacgatcctgcactgctccaactacttctacaatgagcccgccgtccagaccgcgaagctcatcgtcgagaacagctgcttcgacaaggtgctgttcgccaactccggcgctgaggccaacgaaggccagatcaagctcgcccgcaagtacgccaaggatcacggccatcccgagcgcttcgtcgtcatcacgatgaagaactccttccacggccgcaccctcgcgacctgcacggccaccggccagtatgcggtgcaccgctacttcgagcccctgccctccggcttccgctatgctgagttcaacaacctccagtccgtcaaggacatcatggacgagtacgtctgcgccatcctgaccgagcctgtccagggcgagggcggcgtgcgtcccgcttcccaggaattcctgcagggcctgcgtgacctgtgcgatgagaagggcatcctcctcatgttcgacgaggtccaggtcggctccggccgtaccggcaagctcttcgcgcatcagaactacggcgttgagcccgatacctgctccatggccaaggctctcggctccggcgtgcccattggcgctgtctgcgcccgcggcgaggctgccaagaccctgacgcccggcacccacggctccaccttcgccggcggtcctctcgcctgcgcgctcgctgccaccacgctcgacgtgatgatcaacgacggcgtcatcgagaactcccgcaagatgggcgagtacttccgtgaccagatgcacaaggtcatcgagaagaaccaccccgacgcggtcaacgagatccgcggcctcggcctgatcgacggtatccagctcaacaagccctccggtcagcccgtcgtcgacctgtgcttcaaggacagcaaggttctcatcaacaacaccaacggcaacgtcctgcgctttgtcccgccgctgatcgtcaatgaagaggagatcgacattgtcatcaaggctgttgatgaggccatgaccaagctcggctggtaattatctcggatactacctcgcgtttcttgcctgcgaggccggcggcacgggttcccttcccgtgccatgccggaagtatacatgacctcatccccggcctgccgatgggggatcggcgggccggggagagaggtattttctgcattttacaagcagcatttcaccccttgtgttgtgccagtgtaaaatccaaaaggaggagtgcgatccaaaacctgcatcggtagataccacgagaattgaagaaggaaagagcattaccgtaaaactgcgttcaccattcaaaaacacttgctatcgctatggaatcatgctaaaatgaatgcatagatatccatgcaagtagcgaagcgacccccaaaatttcgaaaggttggtaacactatgagtaaggaaaaaagaatgcccaaactgtgggaagccctgttgacgctggcgatcctgatcgcggcactcgcggtcggtatcatcatcttcggtgttgacccgcacgtacccatgtttgtcggcgtaatggctgccgcaatcatggcactgcatctcggttataagtgggatgaagttgaaaagtccatgatggacggcatctacaaagcattgcagtccatctgcatcctgatcatcgtcggtatcctgatcggcgtatggatcaacgcgggcgttgtgcctacgatgatctactacggcctgaaagtcctcaagcccgcgattttcttcatcgcgtgcgttctcatttgctccatcacctctcttgccaccggtacgtcctggggcacgatgggcacgatgggcgttgccctgatgggcattggcttcggccttggcatgagccccggcatgactgccggtgccgtcctctccggcgcctacttcggcgataagatgagcccgctgtccgatacgacgaacctcgctcccgccatggccggtacggacgttatcacccacgtcaaggccatgatcctgcccaccggcatcacctacgccatcaccctgatcttcttcggcgttctcggtgtgatgcagtatcacggcggcgatgcggatatgtcccgcgtgatcgagttctccaacgcgctgaacgccgcggagggcggtatcttcaacatcaacccgttgctgctcctgcctccggtcgtcgttatcgtggcagttgccctgaaggttcccgcgatccccggcatcaccctcggcattgttgccggtgtcatcctgggcctcatcttccagcccggtgcctgcacgcttggtaccatcttcgattatggtaagaacggctactacttctccgacgaagcgctcgccatgttcgaagccagtctttctcctgaaacgagctacaccatgacgagactgctggaaagcggcggtatcatgggtatgatgtcctccgtctccatgacgatcatcgccatgatgttcggcggtatcatggaggagacccaccagctcgaggtcatcgtcaactccctcaagaagtttgccaagggccctgcggctctcgttggcctgaccgaagtgacctgcgttctctccaacgccaccatgcccgagcagtacatctccatcgtggttcccggccgtatgtatgccgaggagtatcacaagatgggcgtgcacccggcagttctgtcctctgcccttgaaggtgccggtaccgttacctccgctctgatcccctggaacacctgcggtgtgttcattaaggacaccctgaacatcgctccttggggcgccggcggttacggtccctgggccatcttcaactggctgatgcccatcatcaactggctgtgcgtgctgatcggctggacgctcaaggatcttgcgggcaagcccttcaagaagagcaagaaagtcgcgcagtaaatcagttagcgacccaacagaaaggtccctacctaaaggaattaaaaaatcatgacaatgaatcggaatcaatatccctgtgtggaattcgatctcgataaattggcagcgaatctggcagcgctcgtagagcgctgccatgattcgctcatcgaggtcgcgggcgtcgtcaaggctgtgtcgtcgctgccggagatcgtgcgcgtttatgaagagagcggcgtgaagttcatcgccacgtcccgcatcagccagatgcgcgcgatccgcgaggcgggtatctgcaaaaagccgctgatgctcattcgtatcccgatgctctccgagctccccgacgtggtggagctgtgtgacatcagcctgcagagtgatattatcgtgctgcgtgcgctgaacgaagaggccaaaaagcagggcaaggtgcacgaggtcatcctgatgatggatctcggcgacctgcgcgaaggcttttggaacgaggaggatgcgcttgatgccgcgctcgagatcgagcatgagctcaagaacctgcgccttgcgggcgtgggcgtcaatttgagctgctacggctctgtcacgccgaataagcgcaacatgcagggccttgtcagcctcgcgtccgacattgagcgcgagatcggccgcaagcttgactacatcagcggcggcgcgtcgacatccgcctacatggcgatgaacggcacgatgccctaccgcatcaacctgctgcgccttggcgacatcgggcttcgcggcgagacggacaacttcgctcccgactttttggaaacgggcgtcatgacgatcaaggctgaggtcatcgagtgccgcgacaagccgagctttccggtcggcgagttgagcgtgaacgccttcggcgaggttggccactacgaggatcgcggcatccgccgccgtgcgcttgtcgcgatgggccgcgtggattacggtaactgcttcgatcttgtcccgcacatggagggcatcgaggtcatcggcgcgtcgtctgaccacacgatcctcgacgtcgaggccgtgaaggacaaggtccatgtgggcgatgtgctggagttcggcatcaaggcctacgggccgatggcgtatctcaccagcagcgacggcgttcacatggtgttcaagggcggaaagcaaaacgcctgatcgaaaagagaaaaaagagagaggaaaacggtatgccgacggtgagcgagttttgggacggccgtgcgcagaattacgacgctcaggtcggcacccactacgcggaggcctatgaaaagacagccgcgtgtttcaaaaaatatctcaagccgacggataccgtgctggactttgcctgcgggacggggatcgtgacgtttgcggtcgcgccctcggtgcagtctgtgcgcgcgatcgacgtatccggtgaaatggtgcgccgcgcgcaggaaaaagtcaaagcgcaggtcgtggagaacgtgaccgtcacgcagacggatctgttcgacggctgccttgcagagggatctttcaatgcggtgctggcctgcaatgtgctgctctacatcgaagatcggagcgcggcgcttgcgcgcatccgcgcgctcttgaagccgcagggaacgctgctgctggtatcggactgtctgggagagggactcacgcgcgagcgagtgcgcaagtggttcgaatacaagaccggcaaacgcccctacgttgcatttgacacgatgcgctcgctcgaacggtcggtcgccgacgcggggttcgcggtgctggagcgggagaatctctttcccgcgccgccgaatttgttccttgcggcgaaaaaggtataaatgcccaaaatgtaaagaccccgcacaccgttttgaaacggtgtgcggggtttctttattgcttttgcctgcgggaaattttgtcgagcagctttccgccatagcggaacgtcagctcgccgatcagaagacccagcagcgctgcgacaaacacgtcgctcgggaagtggacgtacaggtacagccgcgacagggcgatgagcaccgcgagcggaatggcaacatagccgaaacgccggtcggtctttgccaaaatcgttgcggcgatcgtcgaggacagcgtgtgtcccgaggggaacgagtagtccgtcggcgtggcgatcaaaagctgcacggagggatcgagccagcagggccgcgagcgcgcgacaagatgcttgagcgcaacgtttccaacgagaagtcccgcgagcagacccatcagcacgagcgcgccctgacggcggtattttttcgtgcacagcaggagaacgcctgcgaggatccagatgatgccggcgttgccgagcatcgtgagctttgggaccacggcgtcgagaaacgggcaggagatgttgttctggatccagtgaagaatgctccagtcgagcgccatggacgtgcagctcctttctgatattatttgtgcagcagcggggagagcggcttgtagatgaggaagcacagcgccacatcgatcatgcctttgacaaaggtgaacggcatattgaagaccatcaggcactcaagaaggccgttggtcgagggacggatggcctgatacatgccgatgatggcttcaagcggcaggtgatagcacacaacgtaggcggggtagaccacaaagtagttgaggggcacagacagcaccgccatcagcagcgcgccgacgagagcgccgataagcgcgttcttgcgggactttttcttctgatagatgaagcccgcggtgaaggaaaacacgctgcccatgatgaagttgaaaagctcgccgacgtacgcggacgacgtgccgtgcagcacggagaacagcacgttcttgagcagcgtgacgatcacgccgtagatggggccgagcgagaacgctgccagaagctctggaaggtcagagatatcgagcttgacgaacgcggggatgagcgcggggatcgggaactcgatgaacatcagcaaaaatgcgacggtcgagagcatggcggtcaccgtgagcttgtgggtgcggctgaccgcacggggggtggagatggcgctggcattggattcggacataaaaatacactcctttttgtcatttcccctgaaagaacaagtcttccaaggtgcatgacgcaaaagagcgtgaaaattgcgtggtagatcgcgcagcacatcttctctcatccggactttgaccgtcggtaccggaatttcaccggttcgtgcgataaaaaaataccgcttgcggactgtaaccgccggtggggagtttcaccccgcctcgaagacaagtgattcagttgatagcttgagtatacgacaaattttcggtttgtcaagagggaaaatgctttacaaagacgaacgaatgttctataatggcaaagagagaggaggcgatgtccatgcgggggagaccctgttcctgcgcattcaccggccaccggccggggaagctgccgtggggagaagatgaaagcgaccttcgctgtatcgccctcaaggcgaagctgcgcgccgcggtggagagcgccatccacgaggggatggaacatttcatctgcggtatggccgagggctgtgacctctactttgccgaaaccgtgctggcgctgaaaagcacatacccgcacatcacgctcgaggcggccatcccgtgtccctcgcaggcggacggctggggcgaagcgcaaaaatcccgctaccgcaacattttagctcgctgcgactatgagaccatggtgcagcagagctacacgccgggctgcatgcagcggcgcaaccgctacatggtcgaccatgcgagcctgctgatcgccgtgaacgacggcgcgcgcggcgggacgcgttcgacgatcgaatacgccttcaagcgcggtgtgaacgtgctggacatcccactggactgaaaaaggagaggaccatgtcctttgacttcaagaaagaatacagggaattttacctgccgaaggcaaagccggagatcgtgaccgtgccgtgcgcaaactatatcgccgtgcgcgggcggggtgacccaaacgaggaaaatggcgcgtatcagcgcgccatcggcgtactttacgccgtggcctacacgctcaagatgagcaagcgcgcgggacacgagatcgacagctttttcgactatgtcgtgccgccgctcgagggcttctggcagatgccggacacggagacggtcgactatgggcgaaaatcggattttcgctggatctctgtcctgcgcctgccggatttcgttacgaaagcggacttcgactgggcggtcgaggcggcagcaaagaagaaaaagctcgactgctcgaaagcggaatttctggccgtcgacgaggggctctgcgtgcagatcctgcacctcggctcattcgacgatgagctggagtccgttgcgaagatggacgcatttctgcgcgaaaacgggtatgaaaacgacctgaacgacgtccgcctgcaccacgagatctatctctccgacccgcgccgtgtcgcggcggaaaagcggaagaccgttctccgccaccccatcaaaaaggcttgaaaaaagaaaagagtgctcccgccttggcgggaacactcttttttatgcataaagatcaaatgtcgaacacgcccatcacggcgatgccgatgacgacgagcaggatcatcgcgtagtgcttccacgagagcttttccttcaggaagaggcggctccacagcacgctagccgcgcagtaggagctgatgatcggcgcggacatcgcaaggtgcgatgtgtccgcgatggcatagatataggcaaactgaccggccgtttcgcagatggcgccgatgtacttcggcgcttctcgcttgggcagcaggcgatccttcttgatgaagaccacgtagatgaagcacagcaccgcggcaaacaggaacgtcagctcgtaggcgcagtttgcgctgccctcgtccagcgtttcgagcacgcggttgtcggcaaaggtgccggcggcgtcgagcaggcagtaggccgcgggcagggcgagggccaggaagctcttggaatacttgcggttgccctccacctgacgggcggcgcgcagctcggggtcctccgtggcatccaccacaccgaggccgatcgcgcccacgcagacgaggacgatcgcgccgagggcgagcggggaatagtcctcaccgccgacgaacagcagcgtcatcacggcgacgagcgcacccgacgagttgcagatcggcgacgagacggacagctcaatgtagcggaggccgagatagccgagcgtcatcgagccgatgtacagcagcgacacgggcagataggtccagataatggaccagctgatctccgtgccgccgacgaaaatttcgaacgcggcgtgaagacccatcacggtaccgacggcaatgaccatcttgaggtgggcgagatgatcgtcctccccctgacagccgatcttggaaaacaggtcgctgccgctccagcagagcagcgcgatcagagaaagccagaaccacatattgaattgttaaactcctttgtactgttagattttttatgtcagatggaaaaacaaacagtacgcgggggcggacggcggcgaaaatgccggttggttgcgggtgttctacggatgagcataaaaaagcggtatcctttacggaaggggaaattttcgttacggcagggtgatgagtccggcgtcgagcatcttttgcagcgacagcagcacgccaagcttggcgtggtaccaggtgagaccgccttgatagtagacggcgtagggctcgcgcacgggaccgtcggcggagagctcaatggagctgccctgcacgaacgcgcccgccgccatgatgacgtcggagtcgtagccgggcatcggcgcggggacagggtcgacatagctgtcgaccgcggcggcggactggatgcccttgcagaaggcgaccatgccctcaggtgagccaagctcgacgcactggatgatgtcgtggcgcgcctctttcgaggaggggacgaccgtgaagccgagcttttcatagcacgcggcgacgaacaccgcacccttgacagcgccggagacgacgctgggggcgaggaagaagccctgatacagcgcaggcatcaatccgaggtttgcgccgacctcctgcccaagtccgggggcggaaaggcggtaggcgcagcggtcgatgcacttctgcgtgccgcagatgtagccgccgatgggggcaaggccgccgccggggtttttgatgaggctgccgacgatcatatctgcgccgaagtcgctcggctcgttcgcctcgacaaattcgccgtagcagttgtcgaccatgacgacgacgtcggggcgcagctttttgcagaacgcgatggcctcgccgatggcgtcgaccgagatcgtcgggcgcgggcagtagcccttggagcgctggatgtggatgagcttcgtcttatcgttcagcgcgcgctcgatggcggggaagtcaaagctgccgtcttcgcgcaggtcgacctgcccatagctgacgccgtactccttgagcgagcacgggctttcgcgaagaccgatgacctcctcaagcgtatcgtagggcttgccggagatagcgagcatctcgtcgcccggcagcaggttggcggacagcgcgatggccagcgcgtgtgtgccgcaggtgatctgcgggcggacgagcgcggcctcggtgtggaaggcactcgcgtagacgcgctccaaattgtcgcgcccctcgtcatcgtagccgtagccggtcgaggcggcgaagtgtgtcgcgttcacgcggtttttctgcatcgcgccgatgactttcgcctgattgagctcggcgatctcttcgatttcggcaaagcggggtttgagctcgtctaaaacggccttgccgaattgaagcactttgtcgctcacgccgagcgacaggtacatttcatctctgttcatttgtcctcctccggcgtgtcgggaaattcgacgccgttgcacattagaataaaccgcagcggatagtctcggtccagatagtttttactgtaccattcataggtcgcggcaggcaggtgccgcagctcgggcgcttcggtgcggaagagttcgaacgtcttctgatcgcctgagagcagtgcccccagaagctcgccctgcttttcttcatagaggcgcgcgaagcacgcgtccatgatggccgcgcaggcgcgctcatcgtccgtgccgtagtcctcgcgatgggcgagccagtagagaaattcgcgcgggtcgaggtccagctgcgtcgtgacctgcgagagcttgtagaacgcggccttgtccccacacttcaaaatgtcgatgaggtacgcgacgagctgctcgtcgagctccacgcagtcgcagaagacctcgaacgcgtgcttgcccgcgtcgggatcaggggtactttctgctgcgggcggcttttcctcgggatgctccagttccgccgcggcggtgagcatttgcagtagtgcgcgggagaaatcctcctcgctgaaatggttgaatatcgcctcgtccagctcgtcgcctgcgcttttggcgcacaggcgcacaaagtccggcacactcatacttttcagcgcgctttgcagctgcgcggcgcgctcctcagtggtatcggcggtgagcgcaagctccggcggcgcgggcattgtgccctcgcacagcgcgctcatataatgtaagtagcgttcgcacagctccattgccgcgccccctcggtttataatctctaatagtctatcatacggcgacagaaaaagcaactgaaaaccgaagaaagccatcaaatacggctttctttctgaattttcgccctgagcagtgcgcagttttcctgcaaacgcgcatcgtccggtgcaagcgcaaacgctttttccgcgtttttcagcgcgctttcccactgcgaaaggtgaaagtacgcgatgctcagcagatcgtaggggaagctgccccacgcgaacggctcgcagatataggtgcgcggccgctcggtgatcgcgagcgcgcagtttaccataaaaatgacgccgcaccagtccttttgctgataaagcaggtcggcaaactccagatacggctcgcgcaggtgcggcgcttccgcgatggcgcggtgcagccagagcgcggcttcgtccccacgctccatacgacgcagacagcgtgcgatgtagcgcatcgaggcgcagcgctcatcgcgccacacggcctgcggcatcgcgaggtgcgccttcagggtcgagactgcctgcgcccactcgccgcggaacatgtactcgcggcctaaatagtggcggttgcggtcgttttgcgggtcctcccgcacggcaagctctaaaagtggaagatactgcccgcgcgatttgctcgggtcggggtggtggtcgagctgcacgccctcggcgtcgacaaagcgctcgccgccctcgcccagatattgaagaacctcgtgcaccggatttacccagcggtagcagccgtttttgtgaattttgtccgtccagaagacacagccctcgcgcccatcgggcagaaagctccacgtgtagcggtagcgggcgcgtgttgtgtccggctgccacgcgcgctcaagctttacgcgccagccggactgaaactgctcgtcgaggtcgatgcagcagcaaatatcggcgtcctttgggatgagcttcagcgattcgctgcgcgcgacatcgaagcgccacggcgaaataaccttctgctcgacgtgcgcgccgcgggctctgagtttttcgaccgtattgtccgttgaccccgtgtcgagcacgcagatgtcgtccgcctcggacatcgagtccatgaagcgctcgacaaactgcgactcgtttttacagatggcgtaaacgcagacgcggtaggaaatgatgattcctccttttatatatgtatcgcggtgcggcttgcgccgcaccgcttattgctcaggtcgagaggagacccgctgcgcggagatttgccagcagcgcgttgaactgctcgacgacgtcctctacgcttgtcgcatcggcaacagctgccgccgcgcgcgtatcgctcggtccagtcggacccgtaggacctgttgggccggtaggacccgttgcgccggtaggaccgactgcgcctgctgcacccgcaataccctgtgggccgatggggcctgtcggtccggttgcgccaaccgcgccggcggctccggctacgccttgaatgccctgcggtccctgcgggcctgcggcgcctgtggcacccgtctgaccttgaggtccggtaggcccaatggcgcctggcgcaccggggacgccttgaagaccctgtacaccctgcggccccgtcggcccgatcgggccgggaacaccctgaatgccctgcacgccctgcggccccgtcgggcccagcacatactgaggcgggaacggcggcggaggaaacggcgcggggcagggcggcgggcagcggtctgcacagccgcacgaattctgaaaacgattcatcgaaaataccctccttttaagctcggggcaggaaaactcctgcgcttcattctatgccgtgggcaggaagaggtgagcgcgatagaatgtgcacgttttgtgaacaatggggaaaagccttgcaacgcttccggtggtatgctaacatataataatatgttttacagaatcaaaatgttcgtcagaacaggaggagctcatgcagaagaaattgctcatccccatcctcgtcatgctggtgcttgtgatcgtgctgatggtgcggggctgtgggaataaggatgcatcacagggtgataaacaggacgaaacgcaggacgtgcagacggacacgttcgacaatacgaacacgaccggaaacgacgtgcgcacagagcttggcacgatgaccgccaatgaaagcggcggtgtcgacatcaccgtcacggcggacggtctgcagacgacttacacctataccgatgtcgcacccgacgcgtggtacgccgacgcggtcaactatgttgtctccaccggcgtgatgagcggcgacgacacgcagcatctcttccagccggaatatggcgtggagagatcacagttcgccgtcatcgtgtaccgctttgccggcggcacgccgacggaggaggacgcggagttcagcgacctcgcgggcgacgagtggtattatgaatatgtcaagtggatggtcggcaagggactcatgggcggcaacggcggggcgtttgacccgagcggctttttatcctgcgagcaggcgatcatcgtgctctaccgtcttgcgggtgagcccacagtcagcggcacgctcgacgactacccctatgcgcccaaagtgtcggagagcggcagggatgccgtgacctgggcgtggaacaacgggctcatcactgaaaaagagtgcgtctggtatccgacgcaggccgtcagccgcgcgcaggtcgcgcttttgctgatgcgctatgacgccttgatcggccgaaatgcggcgtaaatgaatgaacacggaaaaatgcgggcattctgttcttgacagaatgcccgcaaaccgttgaaaatactgaatttttgagctgcctgtaaaggagcagacaagaaaaatgtcaaaaaagtaaaattaactgttgacaaacgcctacccacgtgctaagataacacctgttccgcgaatggagcgtgcaccttgtaaattaaacaacgaaactttgacaagcaccagatgaaaaactgtgcgaaatgcacagagcttgcggagga

SEQ ID NO: 10112 - DNA, 18834 bp, Unknown
  gut microbiota DNA sequence
cgttagctttgacgcttaccttttctaacacattccggcaaaaggctgtttttgggcacaaaaagcaatcataatagagaaagtaacgctcccaagatcaagatgatctcgggagcggtttttcgttcagatgacggcggtatatggccataagacaggttcagtagaatgcttctctttctactcatcctacgttgtgggacatttaatgggaagtgtctgcctacttggtcagaatattcggcagctgcgcgcgcagggcggccacgccctctgcggagccgaggtcatagcgctccaccatgctcaaaaccgcctgcaacgaggtcttcggatcgcaccagaggtccggctcatagcctttgccgtctacattctccatattgtagatgaagtgaaacgcctgcccgaactggaagccgatgccggagtttggaagcgtccagcctcgcacatttccgaccagctgcgcgcctctcgtcgggccgccgatcacaaggcagttgtcaagtgtcctgcaataggtcacgatgctctcgccggcggagccggacatgctgtctgtcagaagaagaatcggagtgctgttttccagcagctttccctgaaacagctcatagtccttatcgcctgtccggaaggcggcaaattcttcacccaggtccgcgtaggcttggatcctatcgaacatagcagtgccccagttggagataatcgttttctgttcgggttcttctcccgtgtagcttttcagccagtttttgataaagtcttcatcgccgccgctgttggagcgggcatcaatgatgatgagcttcgcgtttttaaggtcagaaccggtgcggacgaactcgtccattgtctcctcataattccagtcaaacctgcgaatcgttatcaaggcaataccgtttgatttcagataatgataatccgggacctgcgaaccgtcttccagataggactggctcagcgaccatgtgaccgaaaccgttttggtctcagcgcccttggtcagggtgattctgtctgccgtatgcgcagccgttgcgggacagaactgacgcagggaatagcacactcggccgctgccgtcaagatacggcttcatttcgacattcgcgttgccgcaggaggtatagtaccacttctcggtttcccccagcagatagtacccgctttcatccttgccaaagctttgaccgctgtaatagtaaagatactgaacgcttttttcaaaggccggttcataccgcccggcgatcgagaaatgtccgtcccgaacgaaaagcaggtgcgagtaaatgagcgagacgaactggtcccacttgatcgtctgataggatgcaagctctgcacggatggcatcttccgccttttggaacgtctcctcaccgaaatagtagtaagcgccgtaggagtaatgcagcgcgcggaagaacagatccacatcctcaagcgcttccgcgcgcgtaagaaccgccttgccgggattgttcagatttttcaggctgtcgatctctgcctgcgtgatctcgacctcgccgcggtgatgctgtaaatatgcttcaaagccgtcgaacgactcttcccttgccatatcggcgcggcgcttctcgttcacgtccttaagcagtttttcaaatgcgttttggtagaccgctgtggagcccttgctcaaaacgatggcagtattgctgtcggcgtcataatcgacggtaaagccgagcgcatcgccgaggtcgcgcagcttaaaatagttgtttcccccgatgttgtagacagaaagaccgtccgcagcctttccgtcgatcaaaacggactgcttgctgacaacggctgttttggactgatcccgcccgcgcgcaagttcgccgccgacaggggcatattccttcccggaaacgaccgtgaccgcattgctttgctcatcgaacgaaacggaaaagcggctgtccgtcttgctcagaagctgcgcaagatcgcgcagcttgaaatagttgctgccgtcgatgttgtatttgtcacagtctgcatcgacgccgtcgactgacaggttttgcggcgaagccaccacattcgcggcggaggcataagacacggcaatgcaaaccaggagcagcgtcaaaatgatgggcaatcgctttttcatggatgattctcctctcccttatcacgctttcggtgcgccgctttcaaagaagcgttccccgtcagagcaatttttcactttaagggtagcatactccatcgtatgctgcaacgcaaattttgcataaaagcggtatcgcccgtctaaaggcgaccgatagcttcatccgcggcctttcagccgagcttctgcgcaaggtcctcgagcgcggcggtcatcgcctcttcaaatgaggggtgcggacgcatggccagcaggaattgatcgaccgtcatgtggttggcgagcgcctgcgagacgccgccgatcatatcgcttgcatgctcgcacatgagctgcgcgccgagaagctcgcgtgtttcggcgtgggcgacgaacttcataaagcagcggcccgggtcggcgataagcgtcttggcgttgtcgaacatgacgtgtttgccgaccttgacggggatgcccgcctccttggcctcggcctcggtgaggccggcgaccgcgatctccggacggcagtagatgcagctcggcacgacggacatggatgtgtgattttcccttccgtagagcaggtcgacgcaggcgatgccctgcgcggtcgccacatgggcgagctgaattttggccgagacgtcgccgatggcgtagatgtgggggatgctcgtctcgtagcgctcgttcacggcgatgctgcggcggttcatctcgacagaaatgccatccgcgaacaggccgccgcagtacgggcggcggccgatggcgcagagcacggcctcgccggagacggtctcgctcttttccttgcaggtgaagttgacggcgatatcctcacccgtcttctcgacgctctggaccatcgcgttcgtgaagaccttcacgccctgctttttgaggatgagcgcgaggctctggccgagctccttgtccatgttgggcagcaggcggtccatgccttcgatgacggtcacttcacagccgaggtctgcgtaaaacgtcgcaaactcgatgccgatgacaccgccgccgatgatgacgatggagcggtacaggtggtcgcacccctcaagcagctcgtcggaggtcatcgcgaactcaagtccggggatcggcgggcgggacgggacggagccggtggcgatgaggatatcgtcgcaggtgtagtcgttggcaccgccctcggcatccgtcacgcggacagcgccgggtgcggtgatgagcgccgtgccgcgcagaaagtcgatctttgcggtcttgaaaagcgattcaatgccggaggacagcttttgcgaaatttcgcgcttgtaggcaaaaatctccgtcatgtcggtgcggatatcgtcggtgtggatgccggcgtgtgcgccgtgcttggcgtcgtggaagatctgagaagagtgcagcagcgttttcgtcgggatgcagccgcggtttaagcaggtgccgcccgcttcgcgcttctcgacgacggcgaccttcttgccgagcttggccgcatggagcgcggcttcgtagccgccggggcccgcgccgatgacgatgagttcataatgagccataatagttcgttcctttttgagagcaatgccgccgacttttcggcggcattgcgtgatgttaagatatgcgctgccttcgtcaggcaaactgataacgtaaaaccatgttgcgcgccgcgccgacctcgtcgagacggcggacgggcgtggagtggggagcggtgtggagcgtctcgggatcggagtgcgcgagttcaaagagcttgcagtagatgccgcagacctcgtccatggtctccttgctctcagtctcgcagggctcgatcatgagcgcctcatggacgatgagcgggaagtacatcgtgggcgggtgcaggccgaagtcaagcatgcccttggcaaggtcgagcgcggagacgcccgtctccttgtggagatcgacgagcgacatgacgaactcgtgcatgcagatctcgtcataggccatggtgaaggtatccttgagcctgacgcgcatgtaattcgcgttcagcacggcgttcatcgccgcctcgcggatgccggacttgccgagcgtgagcacgtaggtcagcgcgcgcacgacgacgtcgaagttgccgtagaacatcttcacgcggccgatggacttttcgggggatgcaaagccgtacttgccgcccttttcgacgaccagcgggccgggcatgtaccttttgagaaattccttgcagccgaccgcgcctgcgccggggccgccgccgccatgcggggtggcgaaggtcttgtgcaggttactgtggatgcagtcaaagcccatgtcaccgggacggacgacgcccatgacggcgttgaggttcgcgccgtcgtaatagcacaggccgcccgcatcgtgaatgatcttcgtgatctcgaggatgttcttgtcgaaaataccgacggtgttcgggttcgtcagcatcaatcccgcggtgtcggggccgacggcagcgcgcagcgcgtcgaggtcgacgcagccgtctgcgccggacgggatgttgatgacctggaagccgcacatcgcggcggtcgcggggttcgtgccgtgggcggagtcgggcacgatgatcttcgtgcggttaaaatcgccgcggtcagtatgataggccttgatgagcagaacgcccgtgaactcaccgtgcgcgcccgccgcgggctggaacgtgacagcgtccatgccgaagacctcgccaagctcagagcctaacgtgtgcagcgcctcgagcgcgccctgcgcggtctcgatgggctggagcgggtggagctgggtgaagcccggcagcgccgccatgtcctcgtcgatcttggggttgtacttcatcgtgcacgagccgaggggatagaagccgtcgttcacgccgtggatgcgcttgcaaagggcggtgtagtggcgggtgagctcgttttcactcacgtggggcaggtgcagcgcctcgctgcgctcttcgggaagctgatattcggggacgtcacactccggcatgagggtcatgccgcgaccttcgacaccaagttcaaaaatgagcttcatttacagcacctccttcacgatggcgacagctttgtcgagctgcgacctggagacgagctcggtcacgcaccagagaatgccgccctcgacctctgcgccgccgaggatgccctctgcttcgagcgcgtcgaggatcttcctgcggcagttggggcattcgacctcggtgacgaactcgtggaagaattcacccttgtacttcaaggtgcagccgatcttttggagctcagaagcgaaatagtgcgccttcgaggtgcagagccgcgcgcactgcttcatgcccttttcgcccatcgcggccatgtagacgccggcggcgaaggcgcatagcgcctggttggagcagatgttggagctggccttttcgcggcggatgtgctgctcgcgcgcggacagcgtcagcacgtagccaacctcgccatccacatccttcgtctggccaacgatgcggccggggagctttctcgtcatggcggacgtcgtggccataaagccgaggaacgggccgccgaacgccgtgtcgaggccgaggggctgaccgtcgccgacggcgacatccgcgcccatcgcgcgcggcgtgggcaggatggcacaggcgatggggttcacgcccatgacgaacttggcgcccacggcgtggacgatctcaccggccgccttcgcgtcttcgatctggccgaagtagttcggctgctggaggtagaagcacgcggcgtcatcgccgagcgcttccttgagcgcgtcgagatcagttctgccgtcctttgcggggacgacaaaaagctcggtattcgaggcaaagcagtaggtcttcatgacctcgatgacctgcggatgggcgcaggcggagacataggccttcgtgcgcttgcggtccttgcacatggggatcgtctcggctgcggcggtcgcgccgtcgtagtgcgaggcgttggagacgtccatgccggtcagctcgcagatcatggtctggaattcgaaagtgccctgcagcacaccctggctgatctccgcctgatagggggtgtagcaggtgaggagttcttcgcgggaggtgacggatctgacgaccgacgggatgaagtggcggtaggcgcctgcgccgcgcagaacggtcttgaagaccttgttcttttcggccatggcggtgacggcctcgcgcacctcaagctcgctcagcccttcgggaatgttcagcccgccatccggcaggagcatttcctgcggaacggctttgtaaagcccttcgagactgtcgaccccgatggcggcgagcatttcttcccgttccgcagccgtggtgggaacgtaagagcccatgttagccctcctgcgcgcaatgcgcttcgtaagcggcggcgtcaagcagcgcctcagtgtcggtcacgggggagaccttgatgatccatgcaccgtaggggtcggagttcagcgtctcgggtgcgtcggccagcgcttcattgacctcgcagatcgtgccgctgacgggacagatcacgtcggaaacggccttgacggactcaacgtcgcccagcgcttcgccggcggtgacgctgtcgccctcggcgggcaggttgataaagaccacatcgcccagtgcatcctgggcaaaatcagaaatgccgatcacggcgacgccgccgtccatcttgacccactcgtgggacttggaatacttcagctcagcagggatgttcatggtaatttcctcctcaaaatcgttctcaatgaatgttggttgttatttacggtcaaatggtttccgaatattcggtcaaaaatctctatttcagcgttcgagcttgtagaacggcattggtacgatctcaagctcgaccatgcggccgcgcacgtcggcgttgaggtgcttgccgatctcgatatcttgggcggggatatagcccatcgcgacgccgcagccgatatagggtgcgaacgtgccggaggatgcccagccgatcttttctccgtccatcgtgtagaggtcgcagtgctcgcgcacgatgccgcggccgacgaccttcatgccgatgcgcttcattttcggcgcgccgagcgcgacaagcgcgtcgcggccgatgaagtccttgcccgtgagcttgcacggaagtcccgccatcttcggcgtgatctcgtcgttcatctcgtggccgtagagcggcatcgaagcctctaagcgcagcgtgtcgcgcgcgccgaggccgcaggggatcaacccctcgggctcgcccgccttcagaagcgctttccacaggtcgacggtgtcctcggccttgcagtagatctcaaagccgtattcaccggtgtagcccgtctgggagacgagggcgcggatcgtgcgctcgccgaggttcaggggcacgtcttcggtgaaggtgtagtacttggcggggatgtactgctcgtcgcagagctttttgagaatgtcgccggacttggggccctgcagggcgatctggccccagtcgttgccctcgtcgcggtagtcgacgtcgccggagagatggctctcgacccaggcggcgtccttttcgcggttgcccgcgttgacgacgagccagtaattgtccgctgcgcagcggtagacgatgaagtcgtcgatgatgccgccattgtcgttgcagaacatcgagtacttgatctcgccgtctttcatattcgaaatgtcggcggtgatgatcttctgcacgttggcgacggcgtcagggcccttgaggcgaagctcgcccatgtgggaaacgtcgaacagaccggccttttcacgaacggccatgtgctcggcaatcacgccggtgggatactgcacgggcatcaggaagccgccgaattcgacgatcttgccgcccatgtccacatgcgtttggtaaagtggggtcttcttttccatagtgcgcatcctccgaaaacaataattttaatgaatattataaaaattattaaaattaagcatcaaaaaagaggcacaaaactcccttttgagctttgtgcctccgttgatcacctgagagattccccgcccgagtcatcgcggcaggttgcaccttcggcgtgcgtaaacgcacttttcggagcgtcgtccgagttcggcccttttgcctgagagcttctgcgttccccttcggcgccgcggcagaatattccgcggtctctcccgaactcatcatccgatcggttgattcattttactttttaaagctaacataagaataggcctttgtcaagaaagaaaaaataatattttgttaaaatatttcaagcggaaattcggcaaaccgaaaactgccgaaacgggtcaaaatttgaaagcatcccgttgttatgactgcgttgccggccaggttccatttcgcttcggcatagctttatttgtatttcgcatttgcattttgcctaaagcggcggcggagaagtgatggggcgtctattttcttcgacgaaatccgtcctgcgtggacaaaattgtattgacaacggcggaggatgggtctattgtacacacatcattcgtcaaatgctttgagcaggacacgacttccccggatcaccgctttcagagagccgttggtggtgcaaaacggcagcaaggaacgggcaggccatcccctgtgagcagccgcggtgaaaggcgcaaacgccgagtaatcgcagccggtcccccaccgttaacagggtacgctctccgatccattcgggcagcggtcgagcggccggttttccggcaagcaaagtggtaacgcggaagttgagatctgcggcggatatcgccgcgatattggccttcgtctttgcgatgggttttcgttgtggaaaatccgcggcagaggcggggcttttctttttgctcccggcattggcgaagaacacagcttttttaggaaagaaagggaaatcacatgaacacactcgtcatcgtgctgatcgcggcggtcgtcctcgtcgctgcctacgcgctctatgggcgctggctcgccaaaacctggggcatcgaccccaaggcgcagacgcccgccgtcaagtataacgacggcaaggactttgtccccaccaacggctggaccgtcttcagccatcagttttcctccatcgcgggcgcgggccctgtcaccggcgcgatccaggccgccgcgttcggctggctgccggtgctgctgtgggtgctgctcggcggcgtcttcttcggcgctgtgacggacttcggcgcgctgtacgcctccgtcaaaaacgacggcaagtccatgggcatgctgatcgaaaagtacatcggcaagctcggccgcaagctgtttctgctgttctgctggctgttctgcctgatcgtcatcgcggcgttcgccgatatggtcgccggcacgttcaacgcctacaccgtggtcgacggcgtgacgcagcttgctgacgccgcgcagaccaacggcgcagccggtatggtgtccatcatgttcatggtgttcgccgtcgtcttcggccttgtgcagaagaagctgaacctctcgggttggaaggaggccgtgctcggcatcctctgcatcgttgcctcgttcgccgtcggcatgaactgcccactcatcttcggcaaggcgacttggagctacatcacgttcgtctacatcttcttcgccgccgttctcccgatgtggcttttgaagcagccgcgcgactacatgaccaccttcatgttcatctgcatgatcgcgggcgcggtcgtcggccttctcgttgcgcatccgacgatgaacctccccgtcttcacgggcttcaacaatgaaaagctcggcacgatgttccccatcctgttcgtcaccgtcgcctgcggcgcggtgtccggcttccacagcctcgtctcctccggcacgtcgtccaagacggtcgaaaacgagaaggacatgctcaaggtcggctacggcgcgatgatcctcgagagcctgcttgccgtgctcgcgctctgcgtggccggtgcggccgccgcggcggacggaactcccgccgccggtaccccgttccagatcttcagccgcggcgtcgcaggctttttcgagatgttcggcgtgccgaactacgccgccacggtctttatgacgatgtgcgtctccgccctcgccctcacgagccttgacgccgtcgcgcgtatcgcgcgcatgagcttccaggagcttttcagcgtggacgacatggcccacgccgagccctggcgcaagctcctgtgcaacacgtatttctccacggtgctgacgctcgtgctcggctacgtgctcacaaagatcggctactccaacatctggccgctgttcggctcggcgaaccagctgctctccgcgctcgtgctcatcacgctgtgcgtcttcctcaaggtcacgggccgcagcaacaagatgctcttcccgccgctcgtcatcatgctctgcgtcacgttcacagcgctggtgcagcgcctgatggccatggtgagcgccatccaaaatgccgctgccgtcaccatccccgcgggcgagacgacctggggcgcggtgtttatcgccaacggcttgcagctcatcatcgcggtgctgctcatcgtgctcggcgcgaccatcgtcgtgaactcgatgagaagctacgtcgccagcaagcacaacagcgaggccaaggtctaattttgaaaaatgtgcaaaaaaggaggccttccgtcgggaagcctcctttttttgctttattaccagcttgcgaccgtgccgtcgcatctcggttcggtgcccgcggcgtaaacgccgttttcgcacttccagatgatctcgccgcggcccatggccgtgcggtcgtcgacgatctcgacctcgtgccccattgctcgcagctgctcggcgatcgcctcgcccgcctcgcgctcgatctggagctttttgccgccgatccactggatgcgcggcgcgtcgagcgcctcctgcgggttcatggcatagtcaatggtgtttgtcagcacctccacctgcccctgcggctgcatgaatgcgcccatcacgccgaacgggccgacggcctcgccgtctttgagcagaaagcccgggatgatcgtgtggtaggacttctttccgccctccaaatagttatcgctcttcgggtcgagggagaagttcgcgccgcggtcctgaagcgagatgcccgtgccggggatggcgatgcccgcgccaaagccgcagtagttgctttggataagcgagaccatgttgccctctgcgtccgcggtgcagaggtagatcgtgccgccgcagtgcgggtcgcccgccttgggctcgagtgccttgtctgtgatgagtgcgcggcgggcagcaagatagtcgggcgagagcagctcgctgacctttgttttcatatagcgcgggtcggcgacgtaggtcttcgtgtcggcaaaggcgagcttgatggcctccatgaccttgtgatagtagtccgcgtcctcgcgcttttcaggcagcgtcagcccgttgagcatgccgagtgccatcagcaccgtgatgccgtggccgttgggcgggatctcgcagacggtgtagccgcggtagtcctgcgtgatgggctcgacccattcggggtggtagtttttaaagtcatcctcgcagaagtagccgcccgtggcgcgcgaatgggcgacgatcctttccatcagctcaccgcgatagtagctctcgcagttcgtctcaacgagggagcgcatcgtgccggcataggcggggaaacggaagacgtcgcccgcgcggtacggcgagccgtccggcttcataaagctcttccaccagtattcatagggggcggggtcctgcgccatgaccctggcgatgcgcctgctgtcgcgcgcccagagcttgccgacattgacgggcacggcatagccgttttcggcgtaggaaatggcgggggcgaagagctcggagagcggctttgtgccaaagcgcctgttcagcgcggcccagcccgcgggcgcacccgggaccatcgtggggagccagccttcctcgggtacctcggaaaagccttttgcgcgaacctcgtccgcgctcagcgccatcggcgcaacgccgctggcgttcaagccgtagagctttttttccttctcgatccacacgagcgcgaaacagtcggacccaaggccgttgcccgtcggctcgagcagcggcatcgcgccggccatggcgacggcggcatcgacggcgttgccgccatttttcagcacgtcgaggccgacctgtgcgccggggggaacggacgtgcagcacacgctgtttttggcgtagaccacgttgcggcgggaagaatatcggtaagttaacggatcaaaattcggcatgatcgttctcactttcgtcgtttttcccagtatagcagtccgcgcgaaaaaggacaagaaaaagacgctgtgcggcgcggatagagcagcgtgacggaaccatacggaaaactggatattcgccctgcaaaagggcgataaattcacgctttcccgcttgacatcctataaaaatgcattataatacgatcaacttcatcatcaatgcctcctttggcaccggccggggagaaaaggcatccatgactgagccgtaggtattccgggcgaccggataaggctgggtcgtgggtgctgttacttttttatagagaaaaggagaacgatatgaacatcaagccctttgcggtggaagaatggatgaacgagtacgaggtgggtgcgcgatacaacatcgccgagacctgcgtcgactccgtttcgctcgacgagcttttcgagctcacgggcgagaacaaggaggacttcttgaaggacttctgtgcccagcgcttgacctatggcgatatctggggcagcaaggcgctgcgcagcggcatttccaagctctatcacacgatcaaagccgacgaggtcgtgctcacgcacggcgcggcgggcgcgaaccatcatgtgttctgctcgctcatttccgcgggtgaccgtgtggtcagcatcatgccgacctatcagcagctctactccatccccgaggccatcggcgcggacgtcgccatcatgcacctaaagcaggaaaacgactatctccccgacctgaatgagctcaagagcctcgtcacgcctgagacgaaaatgatctgcatcaacaaccccaacaaccccaccggtgcgctgatgagcaaggagctgctggggagcatcgtggagatcgcccgcggcgtgggcgcgtacatcctctgtgacgaggtctaccgccacctgacgcaggaggacgagtggtgcgagtccgtcgtcgacctctatgaaaagggcatctcggtcagcagcatgtccaaggtcttctcgctcgcgggccttcgcatgggctggatcgccacgcacgatgaagcggcgcgcaaggcgttcctgtcgcaccgcgactacaatttaattagctgcggcatgttcgacgatgcgatcgcgtccatcgccctgcgccacagcgacgtgatgctcaagcgcaatcagcgcatcgtgcgcgagaacctcgccatcctcgatgactggatcaaggaaaatccgcactttttctacaccaagcccaaagccggtacgaccgcgctcgtttactacgatttcgatatcccctcctacgagttttgcaagcgcatgtaccacgagaccggtgcgttcgtcacgccgggcgactgcttcgagcagccccacagcatgcgcgtcggctacgcctgcgacgtcaacacgctcagagacggccttgccgcggtgacgaagtttgccgcgacgctgtgagcggcgaaaacacgcgataaataaaagaaatccgtccggtcatcgaccggacggatttttgacttgtaaggggttcacgccttggccctgttcccgcgcatgaagtgcagaataaggccgatggccgcgccgataagcgtcgggcagatccagccgaggccgaggtcggcaaacggtaggtactgctgaccgaacgccttgatggccggaccgtggatggcgttgaacacgctctcgggcagcgcgatgatcagatcgtaaacggcagcgatgagcgtgaagccgatcgtccagcagtacaccgtgcggtcgtggccgaagaatttaccgagcagcgccagcgcaatgagcgcgatggagagcggatagaggaacatcagcaccggcagcgaatagctgatgatggcgctgaggccgaggttcgcaaacagcagcgatacaaggctgaaaatgattgcccagatgcggtactttggcccgtcggggaagagcgcgctgaacgtctcggcgcagctcgtgatgagaccgacggcggtcttgaggcacgcgagcgtcaccgtggcggcgaggatgaagagaccggcggagccgaggtagtgctgtgcgatctgcgcgagcgccgtgccgccgttctcgctggcttcaagcacgccgcggctctgcgtgccggcgatcgtgacggcgatgtagatgaacgccatcagaaggctgctgaaaatgcccgcgcggacggtgctccccgccacagcggtgggatcgtccacgccgaggtcacggatgacctgcacgacgatgatgccgaaggcaagactcgccagcgcgtccatggtgttgtacccttcgaggaaaccagcgaaaaacggctgggacgcgtagtcgccgagcggctcgacatccgcgatggccgcactcggagagaggagcgcgacgacgaccagaatgccgaggaagacgagaaagcaggggttcagaattttgccgacccaggtcaggatcttgcccgggcgcagtgcgaaaaagagcgccgcagcgaaaaacgctaccgagaagagcagcaggtacagtgtgttactgccattttgcggaagcacctgctcaagtcccacggtgaatgacgtcgtcgcgcagcggggaatggcgaaaaacggcccaatggtcagatacagcgcgcaggtgaagaacatcgcgtaggggcggttgaccttgctgctcaggtcaaaaagaccgttggagcggctgatgccgagcgcggccacgccgagcagcggcaggcccacgcccgtgatgagaagccccagaatggcctgccaaacgttggaaccggccatctggccgaggtgcacggggaaaataaggttacctgcgccgaaaaacaggccgaagagcatgctggcaacataggtgtattccttggcggtgagcttgcgtttcatggtaaaaaatttcctttcatggcggtggggcaaaaatgccccgtcctgaatgattcgggtaacaaaaaaaccggtctgttcccgcgctctgacattgcaaggggatactcccatgcttgtggaacattccacaagtgctttgccagatcaatggagcataccggatccatgctgccgatcattgcaggcagcgaatcaaaccgagccttggaaaatgaggtcgatcaaaccgctgccgactgcttcgacgacatagattcggacgaatgcccctctacgccaacgatcagtcgccagcttactccaaaattgacatttttggacgtaaccatggtgttcaaacgatcgcctcctttgctgcggaaattggcatcattataccatgccattacattttgtcaagtatcaatgagaaaatggtatgttaaaatcggaagcgaaaaattgggccgatggatgaagcttcattcgggccacgcaaagaagcatgcggcgcgataatgcgccaccttgcggtaaaggcgcgaaaaaggcgcgaaaacagactgctttcgcaccttttcggtaaataaaaagatcagaacaccacgacgagcagcatcttgaactgctcctgaccgtacaccgcgtgcgggtgacgcgcgggcatgacgatggattcgccctcgtgcaggatgtgctcgacgccgtcgatcgtgatccgacccacgccgtcgaggcaggtgaccatcgcgtcgccgccggattcgtgggtgctgatctcctcacccttgtcaaacgagaagagcgtgacgctcacgtgctcgttctgcgccagcgtgcggctgacgacctgaccggactgataggcgacctgatcgcgcagggtcagaacctctgccttgctgatatttttcataccgtccatgatagtttcctcctgttgaaacgcgcggcgtttaccgccgcgcgtgatatgactttcttatcatgccctttttgcggaaaaaggcaacgattattttgctttgtgcgccagcacgcagtaccactcgctgttttcgatgtcaaacgcgccgaactgcacgggaaaggccttgacctgaatgtcctgatagccgagctgcgtgagcttgtcgagcagtaatttctgcggcacggggtggtagtgctcctcaaaacgctctttttggaagattttgttatcgcgctcgaaggtgtagacaagattgaagacaatggagccgtcggataaatggtcccagacctgcatgaggttcacgcggtcgccgtttggcagaaaggcgggattgtagcagtaaaaacgctttttctgccccacgatacggtcccagttgcgaaggtcgaagtagaggcagcctccgggctccacgagcgcgtccatctgctccaaaacgccggtgatctcgttgtttgtcacgtaggcaagcgagttgccggtgctcatcacgcagtcgaagctgcggtcaaaatgagacgtcaggtcgcggaaatcgctctgccgcaggtcgatggcgatgccacgctcgtccgcctttttgcggcagcgcgcgagcatgctgccgctcaaatcggagccgtacagcgagacgccgagctgcccgagcggcagcgtgagcgagcccgtcccgatgctcacatcgagcgccgagcggatgggcctgccgtcgaaaacggtctgccagtgggagagggtctgtgcatcctttttcggggagtcgaagaggtcgtagatgtcggtgcggtcgtagacgctggccatagtgaatgttcctcctgataaaatattggatcgcgcccccgctcagcgctttttgcgctgggacgaggacggaatgtccatttccgcgcggtacttggcgacggcgcggcggctgacctcgatgccgagagccgagagcgtcagacgaagcgcctcgtccgagagcggcgcggatgggacctctgcgcgaatgaggctttgcagccgctgcttgaccgcgtgggacgagactgccgcgtcggggcggatcgccgtggtgaaaaagctgcgcacggggatgatcctgccctggaactgaatgtatttattctgcgccgcacggctcacggtggaggtgctgacgcccattttttcggaaagctgctgcatcgtcacgggcagcagtgcctcgccgccacagaaaaagccgtgctgctcgcgcccgatgagcgtgagcatctgtacgagcgtgtcgcagcgggtgtggacgcccttgatgagggcctgtgcttcggagagcttttctttcacgtagcgctggacctcggggtcgtcgctcgtgttcatcagcgcggcgtattcggcgttgacggacaggcgcggcagaatgcgctcgttgagctcgatgacgagctggccctgctgcacggaaaattccgcgtcaggggcgacataggcgatctgctcgctgccggcaaagctgcgcgaggggatcgggttgagcgcgagcaccttggaagcggcggccttggcttcgttgacgctgacgccgagcagaacggcaaggccggaaaagttgcgcttgccgagcatttctaagccgttgcgcacgatcttcagtgccagcgggtcgagcgagcggtcctgcgcaagctggagcgtcaggcattccgacagattccgcgcgccgacacccggcgggtcgagcatctgcacggcaaacagcgcctgctcgagcgagaagagcgggatgtcgaattcgcgtgacagctcttcgagcggacagtcaagatagccgcgctcgtcgaggcagtcgatcaaaaagcggcacaggcgcagaagctcgtcgtcgacgagcttcatctgcccgatctgctcggtcaggtggtcgcggaacgttttttcgcgcgtcaaaaaggcggtgaagtcctgcacctcctccataccggaggaggtgacgccgcgccacgagtccgtctcgcgaacctcgagcggttcacgctcggcgggagcggcctcgctggggagcccggtctcgtaataggtgggggactgtacgtcgagcagcgggtttgagagcgcgacttcctgcacgtattcggcaagctccggcgcggagagctgcaaacagtcgagcgactggcgcatcgtctgcgtcagcacgagcttttggctcagcgtctgcctctgttcaagctgcacgatagattccctccccaaatgatgctcattcagtaaattaaagtatagcagttttcgccttttttcgcaacacacagatgcgcgggaatggccccaaaaaagcaagggggcattcagatcgcgcaaaaaagcagggcggcccaaggccgactccgcataagaaaacatgcggttttgcctgcgcctttttggctgaaatacaaccgaaaaaatctccccatacgccagtatggggagattttttcagctgatttca

SEQ ID NO: 10113 - DNA, 23774 bp, Unknown
  gut microbiota DNA sequence
gatcgaggtgctgaagctgtccaagcacctgaaaactcccatcagtcagcgtgggaaaacaaccatgacccacggcaagggaaaacggaaacgaaaataagtaaaatcggcacctgcttttaaggcaggtgccgatttctgttaccctataatgcgcttgaatttttggcgtaagtggcgtaagtttggcgtaaatccgcttttgcacactcaaaaaatcaagcaatttcaaggctttgcggtgtctcttagtacatgccgcccatgtcgcccatgccggcgccgggagcggccggtgcggggggctcgggtttgtcggcgacgagcgcctcggtggtcagcaccatggaactgacggacgcagcgttctccagcgcggagcgcgtgacctttgcggggtcgacgataccggcggagatcatgtcgcagtagacttccttgtaagcgtcgaaaccgtagccgaccttgccgctggtcttgatcttctcaagaacgacgctgccgtcgataccggcgttggccgcgatctgacggatgggctcctgcagggccttgacgatgatctggacaccggtcttctcatcgccctcgacctcgctgatgagcttttccacagcggggacggcattgacataggcagtgccgccgccggcgacgatgccctcttccacagccgcgcgggtcgcgttcagcgcgtcctcgatgcgcagcttcttttccttcatctcggtctcggtggcagcaccgaccttgatgacggccacgccgccggcgagcttggcaaggcgctcctgcagcttctccttgtcgtattcgctggtggtcacgccgatctgggcgcggatctgcgccacgcggtcagcgatggcctgcttgtcgccggcaccgtcgacgatggtggtgttctccttggtgaccttgatctggcgggcacggccgagcatgtcgatcgtggtgttcttgagctcgtagccgagctcttcggagatgacctggccgccggtcaggatggcgatatcctgcagcatttccttacggcgatcgccgaagccgggcgccttgacgcacacaacgttcagcgtgccgcgcaggcggttgacgatcagggtggagagagcctcaccctcgacgtcctcggcgatgatgacgagcttcttgccgctctgaacgagctgctcgaggatcgggagaatgtcggagatgacggagatcttcttatcggtgatcagcaggtaagcgtcgtcgatgacggcttccatcttttcggtatcggtgaccatgtacggggtgatgtagccgcggtcgaacatcatgccctcgacgacctcgctgtaggtctcggcggtcttggactcctcgatggtgatgacgccgtcggcgctgaccttctccatggcctcggcgatcagcttgccgatgaattcgtcaccgctggagacggtaccgacgcgggcaatgtcgtccgtgccgttgaccttctgggagttggccttgatggcggagacagcagtctcaacggctttggccatgcccttcttcatcacgacggggtttgcaccggcggcgaggttcttcaagccctcacgcaccatggcctgcgccagcagcgttgcggtcgtggtgccgtcgcccgcgacgtcgttcgtcttggtggaaacttcgcgcacgagctgcgcgcccatgttctcgaacggatcgtcgagctcgatctccttggcgatggtcacgccgtcgttggtgatcagcggagcgccgaacttcttgtcgagaacgacgttgcggcccttggggccgagggtgaccttgacggtatcagcaagaacgttaacaccggcctcaagcgccttgcgcgcctcttcgccggacttaatcagcttggacataagagtgtacctccattagaaatttcgcggaacgcgaaaataatttaaatcatttttgccgcgacatgcgcgtggcaaaaatactttgacccagccgccttgggcggcgtcgccagtccgcagactggcggtggggaatccaaagggggagcctgctccctctttgcgagtcttactcgacgatggccagaatatcgctctggcggacgacgacgtactcctcgtcatcgagcttgacctcggtgccggcatacttgctggtgatgaccttgtcgccgggcttgacggtcatcacgacatcgtgaccgtccaccatgccgccggggccgacggaaatgacttcggcaacggagggcttctccttggcgctggcggtcaggatgatgccgcccttggtggtctcttcgacctcgaccatcttgaggatgacgcggtcagcaagcggtgtgagtttcatggcttggtgcctccttgtatattttaaaaattttaacggtttcaggcgggttagcactcaaacttgatgagtgctaaccaacggtgctatcatagcgcaccgtcaaggcatttgcaaggggtatttggggattttttcaaaaattcacagcttattcaaaatctcctccgcccgcttgcgtccgcttttccaccggagaggagaaagaggtcgaatgccgcagcattcgacctcttttgtcatttatttcgttattgagctgccgcgttaccgcgccgtcgcgtccggatcgcagcccttgggcgcgaagaaattgaccttcttgtccgcgagtttgagcgtcacgcactgggagtgcatgctctcgccgtcaaggcaggtcgtgaggtcgccctcaagcgcctcgatgcgcacgaccttcgctgtcgagacgcggatgatgtcctgcggcagctttttgtagtcgcccgcgctgtagccgccgaaaagcgtcgcaaagcgtgccttgctgacgttcttgacgagcaccgtatgtaagacgccgtcggtcatgcgcgcctcgggcacgggggtggagccgccgccgtagtagcggccgttgcacatcgagacgagcgcgaacgtgtcctcgatcacctcgtcgtcgagcgtgacgcgccacctgcgcccaatcttgtggaagaggaagttcaccgcgacgctggctaaatagctcccgcggcccgagagcatcggcgacgcgccaaactcgtgtacactctcggcgatgcgcgcgtcgatgcccgtgcaggcgatcgtcaggcaatatttgccgttgcagtcgatgaggtcgagcggtgtcacgtcaccgttccacaggttttccgcgtcaagaaacagcggctcggcgtccttaccgaagtttttaaggaaatcgttgcccgtgccgatggggatgcaggtcatcgcggcgttgggaaagcccgcgatgccgttggcgatctcgttgaccgtgccgtcgccgccgcaggcgtaaaagcggacatagtcgcccgtctccgcaatggcgcgcgtcaaagccgtcgcgtgcccgcgcgatttggtcagcatacactcaacgtccaaattgtgatttcttttcagcgcctcggccatcgtatagacgcgctggcggctgtcctttttccccgccgcggggttgatgataaaaatgtgcttcaagaagctcactcctatgcagtttgctattttcaatataccgcaggtcatttgaaaatggaatgggcagagtgttaagagattgtaaagaagttgcgattccttttcgcgcgggtgcgaagcgctatgcggcacttcggccgcggggattgcagcgccaaaggcgctgcacaaggcaagggggccattctctcacgtgagagaatggcccccttgaacccccaagagaacgcgaggggagtccccctcgacccccgacattggcagtctcgatcttgaaaaactgctcagcctgcggaatcgggtgcagtgtacatggcttcgccatgaacccctacttttcgtcaccactctcaaccgcgccttactatcgtgaggcgcgagtgacgttcatctggcagcagactgcctgccgaatgcggcattgctggcgctcgccgcattgttgggactggcggtagacgatgattactgcgcactgctacaagatgggcagagcggcagcggatgatagaagcagaggcaaatcgtatcgcagcgctaaacgcggcttcgccgcgcgcaagcattcccattccggaggcataaaggtcattcgagattgagactgccaattaaaacctttctctcgggggatcaaaagggggatactctcttttgtgaaagagagtatccccctttgtccgctcccctgcgcggcgcaggggaataaggagcagcgctggcgcgctgaaatttcagatgctcaaaccattgagcctgcacaatgtattgaccaccgcaaaaataatgaccgcgccgaggttggcggtcgtattatcctggtcgaaccgcggggagatctcgcagatatcgaacccgcggaccttgcgcgtgcgcagcacatgcttgatgagcggcagcacgatctcggggtcgaggccgagcgactgcggcgcgctgacgcccggggcgaacgcggacgagaagacgtccgagcagacggtgatgtacgtgtcgtcgcactggtagagaaactggtccatgcgctcaaggatggactctaagttcgaggcctgtaaatccttggcgagcacatagtcgacgccgagctcctcggcctttttgaagaggctcacggtgttgctgtgctgctggatgccgatggggaaatagtgatacggtgtgccctcggccttgcagacatccgccatctggcggaacatcgtgccggacgagttgcccatgtcgtacgggcgcagatcgaagtgcgcgtcaaagttgacgatgccgagctccggcgtcttgcccttgtcctttaagaaattgtgctggccctggaagtggccgaacgtcgtctcgtggccgccgccgagcacgatggggaacaggttccggcgcagaatttcctccacggcgcagcccagctcgcgctggccctcttcgagcgaaatttcatcgcagatgatatcgcccgcgtcgtagagcttgacctcctgcgagaacgtgcacggaaggcccgacatctggccgcgcacaaagtccggcgcgagcgccgtgcccgtgcggcccttgttgcgcgcgacgcccttgtcgctgcaaaagccgatgaaagcaaagccgagcttgccggtgaacggcgcgctgccgtcgttcaggtcgatgggctgtacccactggtgccagcgaaacgcatcgtaatcggtctcgctgtcgatgcgccctttccagctgtccatggcactgacataatgatccaaaagcatatctgatcgcactcctttactgtctttctgatcgtggttttcttattcatccagcttgaggacagcgaggaacgcctctgtcggcacctgcacggtgccgagcgagcgcattttctttttgccctccttctgcttttcgagcagtttcttctttcggctgatatcgccgccgtagcacttggccaaaacgtccttgcgcatggccttgacggtctcgcgcgcgatgatgcgcccgccgatggccgcctgaatggggatctcaaagagctggcggggaatgttgtccttgagcttttcgcacagctttctcgcgcgggcgtaggccttgtcgcggtgcgcgatgaacgacagcgcgtccacctgatcgccgttgagcaggatatcgaccttgacgagctcgctcgggcggtagccggagagctcgtagtcgagcgaggcgtaacccttggtgttggccttgagcgtgtcgaaaaagtcgtagatgatctcgttgagcggcatctcgtaatgcatctcgacaaggtaggtgtcgaggtactgcatgtccttgaactcgccgcggcggtcctgacacatcggcatgatgttgccgacgtaatcgggcggcgtgacgatcgtcaccttgacgtagggctcctcggcacgctcgatgtgcgcggggtcggggtagttgtgcgggttgtcgacgcgcaccatcgtgccgtcggtcttgtatacctcgtagatgacgctcgggagcgtggtgacaaggtctaagtcaaattcgcgctccaaccgctcctgaatgacctccatgtgcagcatgccgaggaagccgcagcggaagccgaagcccagcgcgacggacgattccggctcaaacgtcagcgaagcgtcgttgagctgcaatttttccagcgcgtcgcgaagatccgggtatttgctgccgtcctcggtgtaaatgccgcagtagaccatcgagcgcaccttgcggtagcccggcagcggttcgctcgcgggatgctcgacgcctgtgaccgtgtcgccgatctgcgtctcatgcacgtccttgatgcttgcggtgaagtagccgacctgaccggcctctaactgcttcgcaggctccagacccagcgggcgcatcaagccgcattcgagcaccttgaacgttgcgcccgtcgccatcatcttgacctccatgccgggcttgatcgtgccctgcttcaagcgcatgtagacgataacgccacggtaggcgtcgtaatagctgtcgaagatcagcgcctgaagcggcgcgttcgggtcgccctgcgggcagggaaggttctgcacgatgtcttcgagcaccgcgtcgatgttgatgccctgcttggcggagatttcgggcgcatcctcggcggggatggctaaaatgtcctcgatctcctgcttgacgcgcttggggtcggcggcgggcaggtcgatcttgttgagcacggggcgaatttcaaggtcgtgctccatcgcgagatacgtgtttgcgagcgtctgtgcctcgatgccctgcgaggcgtcgacgacgagcagcgcgccctcgcacgccgcaagcgaacgtgagacctcgtagttgaagtcgacgtggcccggcgtgtcgatcaaattgagcgtgtagacctgcccgtcggcggcggtgtaatcgaacgtgacggcgcgggccttgatcgtgatgccgcgctcgcgctccaagtccatgttgtcgaggatctggtcctccatctcgcgcgcagaaacggcgttgcacttttcaagaagccgatccgccagcgtcgacttgccgtggtcgatatgcgcgatgatggaaaaatttcggatgttcttttcgttcatagctgttgctcctgtttgttgtcggcaaggcgacgccgcgcgccaaatggcgcgtccaagcgttttgccctcgggcaaaaccttgccgcagggcgaattcatttcgcccgaggatgttcaatcaaaagggttcccgcaagggcttcagcccttgtgggaaaacgacttgccgtggtcgatgtgcgcgatgatggaaaaatttcggatgttcttttcgttcatagctgttgctcctgtttgttgtcggcaaggcgacgccgcgcgccaaatggcgcgtccaagcgttttgccgcaggggaaattcttatttcctgccgagcagggaattcgtcttttcttcggtgctgtggagtacctgcgtcacgctctgcatgaggccggggtagagggacgcgagcgcttcatcctccatagaggcgaacgcgccgtccttttcggaaagctgcgcgagcgaggaggcgtaggcgatgtagtccgtgcgcatctgcgcgtccactgcgccggactggtaggccgtggcatctaagccgaagtacccctctttcccgccgctcgcgcggtgcagcgcgcggtagagctggtagaacgcgccgccaaggtagctgcccgccgacgtgatgagcgtgcggtcgttcgtcttgcccagcagctcgaagaggacgcccgcggtgttgacgagcatcttcttttgcagcgtcgcggcgatgctgccgcgcagcgtgcccttttcatcgctcgaatcgtagagcgattcggcgtcgatcatgccgccgtcgcgatcgagcgtgcgcccgagcagatagtctgccgagacgtggtagtaatcgcacgcctttttgacgaacgcgagccccggctcgcggatgccgttttcatagtgggacaaaagcgcctgcgaaatgccgagctctttcgcggccttgcgctgggagatccccttttcctgccgcagcagggcaagggtgcgggaaaagtcagcattcatggcaataacctcgtcaaataaaatacggtaggttatagtatagtctattgataaccgcttgtaaattaaaaatttgcgctgatttgccgttttgcgcaaaaaaatcgggcgcggcaatttcgccgcgccccaaaaacggaggagaaaaaacaatggactaaatgagtacgctgagtaaccatgccagcgcgatgccgcccgcgccgatgcagccccacagcgcgggcgagccgcgcctaaaaaagctgcgcttgctgcatgtcgccgtgcggccgcaggtgcgcgccacgcggcaggcttcgtctaccaatcgctgcgccgtgacgccgtttcggttcatggcgtcgttgcgcacgatgaaaatggcctgttcaaaaagctccgtatccggcgagtcgaccacgatcactctccgcgatgttcccttgaccatattgaaagcagcacctcccgatggaaaaacattctgcctccagtatgcccgccgcggcgggcgctatacgggaagagcgaaaatttttgctgcgttcagaccgcctgcgcgccgcccgaatcctcgggaatgtagagcgccagaacaccagcgtcgtccgtgccgccgcgcttttccatactgtcggccaagatcgccgcgacgagctgctggggatcatgtccctcccagcccgcaagcaggttttgcagccactcgtcgtctaagctgtcggccacgccgtcggagagcattacgaaaaagcaccccggcgagagcttgatatgcgtcgcctccggcgggggcgagccctcctgcaagcccgcgggcaggcacgagcaggtcacgcggcgcaccgtgcctccgcgctttagatagctcggcgccgcgccgtacttgtagagctcgccctcgagcgtctggagcgaaagcgtcagcaggtcgactgtcgtaaagctgtcggtcgactcggcgcgaagagacaatgcgctgttgagcgtcttgagcgcgggcggcgcgtcgatgcccgcgctcagaaagcgctccaacagccgcgcggccatcgacgattcgcgctgcgcggcctcgccgcagcccatgccgtcggagagcagcaggcagagcgtgccgtcctcggtctcaaagtgggcggcgctgtcgccgctcacgcgttccccgcgcttggggcgcagcgaaagaccgatctcataagaatgcaccggctgcgtcgacacggggcgcagcgcgccgtccgccgcgctctgcatgagctcggagagctgggcgtactgcgacgcggccttcgcgcggtcgtcctccagcagccgccggtactgccgccgcagaagataggcgcgcagctcgccgttcacggcggagagaaatgatgaaaaatggatgcaccgctcggaaaagtacgaggggaaatcctcgcccctgccctgcccgcggcgcagcagcgccgccgtcgcgtcgttgagcgcggtataggtgcgctgatactccttttcccagcagtagctgcacagcgcacagccgcggcagaccttttccgccgcgcggtcgaagatggcggcgggattttcctccgtcagcgtgcgcggacgggcgatgctgtcgtaaagctcgcgcagcgccgcggcagaggccgcgatctttctgcgcacggcggcgtcctcctgcgcggcctcgtcgctgcaaaggcgcttgccgcgcaggaaccgcgacgggatcagcaggaataacagcgtcgccgccagcccctcgtagagcagcacaagccccgcgtgcgcgttcatcggcagggcaaagcacagaatgctcagcgcaaaccacagggccgagagcacgcggttgccccgcgctgtgacgttcaccagcaccgcggaaaacgcatatgacgccgcgtggacaaagctgccgccccccgcgccgaggtccatccccagcccgatgcacagcgccgccggaatggcgaacgcgctgccgcgctcaaaggcgaacagcagcaccgccagcatcgagaggatgcgacccggcgcaaagccgtccgccgtttcgaacgaggatgcggccatcagcacgccgagcaggatgaaaagcggcgcgtaggggtgctcctccttttccttgtcgccggtcgacaaaagcgcgcggccgctcatcgcgccgagcgcgcacagcagcagcgccatcaggcagtttgccgcctcgcccacgccgtcgcgtaagacgtagacaaactcgacggagaacatcatccccgcgcacagcagcggcagaaacgcccgctttttgtagagtttcagatcgaaaaacgcgttgttcgccgtgaagatcagaacgcccgcggcgaaggtcctaagtgcgtgcgaaaacggcagaaacagcacagcgcccgccgacgcgccgatcagcgcgctcaccccccgcaatcctgcgcccgatgcgccgatcatgccgagcgcgagcggcgcgtagccgccgaacacctgcgcacccgcaagcgcgaacgagagcgcaaagcgcagcacgcagtcgatgacctttccggaccattccttgcttttgagcagctcgatcaccttcacagcctgtcccctccctgtgcgtcgatttattgtgtcggggattattgtaaacgagcggaaagaaaaagcctgtcgggaaatacacgcgcaaaaaaagaaccggcagttttgaaaactgccggttctctcgttcacgttactgcttatttgacgatcatttctgcctcgcgggcgttttgcgcgatcatgtcgtgcagctcctgcgtggaggagaacttcttctcctcgcgcaggtagtcgaaaaagtcgagctgcaacttctgcccgtacaggtcgccatcgaagccgacaagatacgtctcgatcgtcacggtgttcttgtcgctcaccgtcggccgcacaccgacgttcgttacgcccacacatgtctcaccattcggcaggtgcgcgcgcgtggcgtacacgccgcgcttcaaggcgatgatgtgctcttcggggatgaggtttgccgtcgggaaaagggcttttttgccgatgccctcgccgtggcgcaccgtgccctccacggaaaaataatggccgagaaattccgaggcgcgcctgacctcgcccgcttccagaagcgagcggatataagttgaagagacggtcacaccgtctttttcgacgcgcgggatgatgtcgcagccaaggccgtgggcggcgcagtaacttctgagcttttccacatcgccctcatttttgtggccgaagcggaagtcgtgtcccgcgacaaggtgtaccgcgtgatacttcctgacgagaagctcagagataaagtcctcccacggcatggtcatcatgttccggtcgaacggctcgacaaagacctcctgcacgccgtattgtgtgcggatgatgtttgcgcgctcagacggcgttgtcagcagcggcacgggctttcccgtgacgaattcacgcggcgagcggtcgaacgtgaacgccgcagagcggcagccgcgctcctgtgcgcggcgcactgccattttgagcagctcgccgtgcccgatatgcaccccgtcgaaaaagcccagggcgatgactgtggatctattcatagtttcggtttcctttttgcgtcagcgtcacacgctgaaaaaatttcgtttcgaggtgagcgtgccgtccttcgcctccgacagggcaaggaacgccccgtcgcgcccgtagacgcggtacagcccgtcggggaactttgcgcgcagtggattgccgcagaggcacttgcgctcctgttcagtgctcgggatggtgtaggccggatactgccggaacaggctgtccgtggggcggagcagggcctcgccctcgcgctgcacgtcctcgagcgtcacggcctcgtcgatgcgaaagttcgacgcttccgtgcggcgcagcgccgccatacagccgccgcagccgagcgcctgaccgagatcgtggcacagcgtgcggatgtaggtgcccttcgagcacacgatgcgcagggcgtactgcccgttccccaaattctgtgtgagcgcaaggtcgaagatcgtgatcttgcgcggcttgcgcgcgacctcacgaccctgacgggcaaggtcgtagagcttctggccgtttaccttgatggccgagtacatcggcgggatctgctcgatctcgccgagaaagcgcggcagcgccgcgcgcacctcgtcctccgtgacggtcacggcgcgctcttcgagcgtttcgccggtcgtatcctgcgtgtcggtcacaaggccgagctgtaaaacggcctcgtagaccttttgcccgccctcggcaaaggagacggccttggtcgcctgcccgacgaacacgggcagaacacccgtcgccatggggtcgagcgtccccgcgtggccgacgcgcttttcatgcaaaatgccgcgcagcttggcgcacacatccatactcgtccagccctggggcttatcaataattacaatgccgttgggcataaatggcctcctttgcgccaagccttcggcgcttttgcgccgtacaagcgttttgccggcaggcaaaacgcagttctctttctactctccgcgcaccaagatatgcgcgttcatgcgaaagccgtatttctcgtagaggtggacggcgtcgttgccgtcgaccaccttgacttcgatcttccggacgccgctgcccgaaaataccgccatcgcccagtccatcagggccttgccgtatttcctgccgcggcactgcggcagaacgacgaggtagtcgagcttgcccgtgccgtctccgtgcaggtcgatcttgcagaagccgacgatcccgctgacctcttcgatgaccgcgatgcgcgagacgttttcttccagcgcctgtgcaaaaagcgacaacgttttatcatagggccggctcggatagctgcccttgaaattcacggacacgcggttgtggtgctcggacaaggcctgcacgcacgcgcgcaggcgcggcgcttcgtccgccgtgatttgtcgcagcggcggcagccgcttttcaagcagcacgagctgcacgccggcgataccgttaaacatgcacggcacgacgccgatctcggcgtagccgagcttttgatagaagcggcgggcgcgcgcattgcgcgcgttcgtgtcgatgcgaaggtaccggcagccgtgcgcgagggcatagccctcgtaaaatgccgcaaactcgcggccaaggccgcgcgatttggcctcggggtcgatgacgagcgtgtgcagcaccatgacctcgctgtccggcgcgtcatagcgccagttcgcccccgcgtaggaatcgacctgcgtttggttgagaatggccgtgccgacgatctcaccgttctgctcctgcacgaaaaggtcgccgcgcgcaagcgcggcctccgccgtctcacgctcgggatacacgccgcgctgccagccgatcgcggcctcgccgcgctcctctgccgtgtggatctggtcgtaaatgcggcacaccgcgtccaaatcggcgcgcgctgccttgcggatcgtgctcatgcctcttccgccaccgcttcggcgatggcgttcaggatcatggcgcgcgcggtctcatagtccgcgtgctcaatgaggcagccggacgccgcgcggtgtccgccgccgccgaggaacgagcaggcgcgcgtcgcgttgacacgcgcgcctgtgcgcacgctgaccttccacgcgccgtccttcgtttccttcatcgtcacagcgcagtccgtgccctcgaccaagccgccgagggacgcaaggtcttccatgtcggcctcggaaagcgccatgctcttttgcaaggactgcggcacggcgacgatgacgacgcggtcctcgtcgtagaattccatcgtgcgcagcagttctccctcaagcgccaggcgctttttgctctttgtgcggaagtgcagcttgttggcggctttatagtcgatgcccgtctccatcagcgccgcggccacgcggtgcgtgttcgccgtgacgttggagtaaacaaagcagcccgtgtcggtcgacacggcgacatagagcggcagcgcaacagcaggcgtcagctggccgagctcctgcgcgagctcgcacagaatttcgccgcaggcggcgcactcgggatgcacacagctctccttgccgaagccctcgtagctcgggtgatggtcgatggcgaggtcaacgcgcgttttgaacatctcggcgttgtcggggaacaggctcagcgcggcgaggtcgacggagacgaccgtctcatagtcaaaatcgtccgcgacccaatactgctcgacataggactcgaagtgctcggtcgtctcgcggttatagaggatgcccgcggtcttacccatctggcgcagcatggcgcacagcgccgcagcgcagccgagcgtgtcgccgtccggacggcgatgggtgagaatgaggtacttgtcgtgcgcgcggaggtatgccgcgacttcggaaacggtcattcctgctcatcctccgtgttcagtgtttcgttttcggggtttgcgggcttcaccacgcgcgggtcgcgcagcatctctaagatgtgcgcgccgtattcgatggagtcgtccgcgatgaactgcagctccggggtgtagcgcagcgacatgttcgcgcccagctcgcgccggagatagcccgccgcgctcttgagaccgcgaatgacgtccttttcgagcgacttttcgagaacgctcacgtaaatgcgcgaatagcgcaggtcgctcgtcgtgtccacatgggtaatggtcaccatgccgctctggacgcgcgggtccttgagcgtgcggaagagcgagctgagctcgcgctggatctcttcattgatgcgtccaatgcgattgcttgccatttttattcctcctttgaaaaaagcaggggcgggcgaacgcccgcccctaccttaaggcttctaaacattgcgccgcgcacggcgcaaaaatcttgatctgtatttctgacgacctgcgcgtcagaaatacactttacaggctgcaaacgtgcgagcgcagcgagtgcgctgccgccgcctgaatcctactcaaaaattcgcttcgcggatttttgaagtcttactgctcgatctgttccataacgtacgcttcaacgatatcgccgaccttgatgtcgttgtacttttcgaagctcaggccgcactcgtagccctgcgcgacttccttgacggagtccttgaagcgctggagcgaggcgaggtgaccctcgtggacgacgatgccgtcgcgtacgatacgcacgtcgcacgcgcgctggatcttgccgtcggtgacatagcagcccgcgacggtgccgacggacgagactttgtaggtctggcgaatttcggcgtggccgatgatggcctcgcggaacttcggcgcgagcatacccttcatagcggcctcgatctcgtcgatggcgtcgtaaatgacgcggtacatgcgcatgtcgacatggttgcgggccgcgctgtcgcgcgccgcggcatccggacgaacgttgaagccgacgatgatggcgttggacgtggccgcgagcatgacgtcgctctcgttgatcgcgccgaccgcgccgtggatgacgcgcacgcggacctcgtcgttggagatcttctcaagcgatgccttgacagcctcgaccgagcccatgacgtccgccttgacaatgatgttgaggttcttcatttcgcccgcctggatctggctgaacaggtcctcgagcgagaccttcgtaatgggggcgttggccttgcgcttttcctcttccttgcgctgctccacgagctcgcgggcaaggcgctcgtcggcgacggcgttgaagtgtgcgccggcctcgggcacttcgccaaggcccgtaatctccacaggcacgctggggcccgcggtggtgagcttctgacccttgtcgctcatcatcgcgcgcacgcggccgacggccgtgccggcgatgatgatgtcgccctgatggagcgtgccgttctggacgagcagcgttgcgatcgggccgcggcccttgtcaaggcgcgcctcgaccacagcaccggacgcggcacggttggggttggccttgagctcggcgacctcggcggtcagtgcgaccatttcgagcaggttgtcgatgcccatgccggtcttggcggagatggggcagacaatggtgtcaccgccccagtcttcagcaacaaggccgtactcggtcagctgctgcttgatgcgctcggggttggcgtcgggcttatccatcttgttgatggcgacgatgatgggaatttcggcggccttggcgtggttgatggactcgatggtctgcggcttgatgccgtcctccgccgcgacgacgaggatggcgatatccgtgatcatcgcgccgcgggcgcgcatggaggtgaacgcctcgtggcccggggtatcgaggaaggtgatgggcttgcctttgatctgcacctgataggcgccgatgtgctgggtgatgccgcccgcctcgccggaggcgacgtgggcattgcggatatagtcgagcaggctcgtcttgccgtggtcgacgtgacccatgacgacgacgaccggcgcgcggggctggagctcgtcggcgctgtccttgtgatcgtcgatgagcttttcctcgatcgtcacgacgacttccttttcgaccttgcagccgagctcttcagcgacaaaggacgcggtgtcgaagtcgatcatctgggagagggacgccatcacgccgtttttcatcaggcacttgacgacctcggcgcccgtcttcttcatgcgggaggccagctcgccgacggagatctcgtcgggaattttgacggtcagcggcgtcttcttcgcgatctcaagctgcaggcggcgcatcttctcggcctcctcctgcttgcgcttgccggagaacggctgctgacggttgttgcggtttctgttgttgcggaacttttccttgctgccgcgctctaagtcgcggcggtcaccggagcgctcggccatgtcctgcagcttttcgtcgtacttgtcaaggttgacgttcgtgaccttgcgggtgtcgacgatcttcttttccggcacgcgcgtcgtgggatgctgcgtggcggtggacttgctctgctgctgcaccggctgggtgttctgctgcggctgggcgggcttaccctgctggccctgctggggctgaggacggctgccgccgttattattgctatttctcggctggttctgggcattattcgccttcggctggttctgcgcgggggcgggggcagccttgggctcgggctttttctggggagcggactcggcgtagatcgactcgatcttcacctgatgcttctgcgtcagatgctcgaagatcaggttgacctcgtccgcggacaacacctgcgaaggcttcttgctcccgtcctcataggtactcagaacggacagaatgtccttcgacgtaaggccgaagtcctttgccatatcggataccttgttcttgttcattgtagtagccaaattattgcacctccgtgtgttgtgatctctgcttactgtctttcttgatgctgcccttgcccttcttcacggggcgggaatgggcaaagcgccttgccgcgcgctgcttttctgcggcgcggtgcgccttttctctctcggcgcgcgtgcgtccgtgcttgaccgcgcctctcgggcgcttgctctcgctcttttccgcgctcttggcctttgcggcgggagcgggctgcggctcttcctgatgcggctttttcttgccggtgcgcacatttttttcgtgctgcctgagctctttcctccgctcggcggcgcgtgccgccttgatcgtcaggcgcttggccgcctcgccgtagtgcgcttcgtcactttccgccagctttttcgcgacggcctcggcaaagccgatgtccgtcagcgccagcagcgcgcaggatgtgcgccccagcgctctgccgaggtcctccttcgtcggcgggatctcaaggcagatgcactcgcccgcctcgccgaagtggagcgcgcggcggcgcgtgttgtccgccgcatccgaggcgatgaggatgagccgcgcgtgcttgcttcgtgccgccgcgccgacgggctcttcaccgacctccagctttccggcctttttggcaaggccgatcagattgagcagtttatccaccgtttgccatctccttttccatttcttcgtagacgctctcggggatggccgtgtccagcgcgcgctcgagcgcgcgggatttgcgcgcccgcttgaggcattcgctgttcgggcagacgtaagcgccgcgcccgggctttttgcccgtaaagtcgagcgacacctcgccttgcggcgatttgacggcgcggatgagcgcgcgtttgtccttcatctcgcggcagcccacacactggcgctgcgggatcttctttactttctgcatgagccgccctcctctttggcgctttcagcgcctcggacttttttgcgccgcgcacggcgcaaatgaactgaaatcgtttttaccggcgaccggtgcgtcagtaaaaacacttctcgccccgcaagtgtgcgagcgcaagcgagtgcgcgcagcggggtgcaaatggaagctcaaaaatgtgcctatgcacatttttgaagatcactcttcttcgcgatagctttccggcttaatgtcgatcttgtagccgacgaggcgcgcggctaagcgtgcgttctgcccctccttgccgatggcaagggaaagctgatcgtcgggcacgatgacgcggcaggccttgccctcttcggcaaggcgcacgtcgacaacgtccgccggagcgagcgccgcggcgatgtactccgcgggatcgtcgctgtacttgatgatatcgatcttttcgccgcgcagctcttcgacgatgctgttcacgcgctggccgtgggggccgacgcacgcgccgatgggatcgacgttctcgtcgttgctccacaccgccatcttcgtgcgggagcccgcctcgcgggcgatggaacggatctcgaccgtgccgtcgtagatctcgggcacttcaagctcgaaaaggcgcttgacgagacccggatgcgtgcgggaaatcacgacctgcgggcctctcgactggcggcgcacgtcgacaaggtagaccttgatgcgctgaccctcgatgagcgtctcacccttgacctgctcgccggcgagaagaatggcgtctgtcgcttccgtgccggtgccgatgcgaagggatgcattgcccgtgcggggatcgatgcgcgtgacgacaccggtgagaatttcatgctgcttggagttgtattcgtcgtagaccatgccgctctcggcttcgcgcaggccttggatgatgacctgcttgccgttgcccgcggcgatgcggccgaattcgatgttgtcgacgggaatgttgacgatatcgccgacattgtacttggcggagatggccttcgcgtcatcgaggctcatctgcgtgccggggttctcgacctcatccacgacttccttctgcacgaacatcttgagctcgcgcttgccctcgtccacatcgaccacgacgttttccacgccctcgtggtcgcgcttgtaggcggtggtgagcgcctgaacgatcttatccatcataaaggtctgagaaatgccgcgttccttttccagcatcgcaagcgctgcgaagatttcatcacatttcatgggtatgctcctattctgtataatcaaagtaattggtattctttttggtcaaaagtcgcagcgcaggcgcacgagcgcgaccgcgtccttttcaaagcgcttttcctcttcgccgatgcggagcgtgaccgcgccgttgtcgtagcccgcgaggtcaccggaaaattccttgcgcccgtccacgggcttgtaggtcttcaagagcacgggcgagcccatgaactgctcaaagtcaccgggccgcttgagcgggcgctccgcgccggcggacgcgacctcgaaaatgtagctcgactcgatggggtcggcctcgtccagaatatcactcagcgcgcgggagatggcctcgcagtcgaggatgttcacgccgccgtccttatcaatgtagatccgcagataccactgtccggcctcgcggacatattccacgtcccagagcttgcagccgttctcttcgaccacggggagcgccagttcgcgcacggcctctgtcactttcttcattgtatccctcgcaatccgtgttttttccgaaatttgcaaaagaaagagcgggccaaacggtccactctgcgtttcctgcatccataacacaagcatactatcacacaaagctgcggaatgcaagcgtttttgcgcgcagtttgcagcttttttgaaaaaatttccgctgttttcgttattttttgcgcgccgcacccttcccgcttgcaaagcggggaaaagtatgctataaggataggactctgaatagagaatgagagagagggatattttatggcgcgttccaccacgctcgatatgacgcagggcagccttggccgccagatcatcggcttttcgctgcctctgatgttcactaaccttttgcagatgctcttcagcatggtcgaccttgcggtcgtcggccgcttttcgagctccgccgccatgggctcggtcggctcgaccacgacgctcatcttcctgttcacgggctttctgatgggccttggcagcggcgtcaacgtgcttgtcgccacgcacttcggcgcacgcagcgagaaaaacgtgcgcgagtccgttcacacgtcgtttcttgtctgcctgatcgcgggctttttgatgctggcgctgggccttatctttgcccgcccgctgctcgagcttctgaacacgcgcgacgatctgatcgacggcgcggagctgtaccttcgcatttacttccttggcatgcccgccgccgcgctctataactacggcaacggcgttctgaatgccatcggcgacacgaaaacgccgctcatcttcctttccgccgcgggcgtgctcaatgtcatcctcgacctcgtgttcgtcatcgggctcgggatgtcgaccgacggcgtcgcgctcgcgagcatgctctcgcagtgcgtgtccgcggggctcatcgtccgctcgctcatgcgcagcaaggagatctacagcctcagcttaaaagaggtccgcttccacaaggacaaggccatccacgcgctgtctgtcggcgtgccggcaggtttgcagaacgcgatcttctcggtcgcaaacctcttcattcaggcgggcgtcaattcgttcagcaccgtcgtcgtcgagggcaactccgcggccggcaatgtggataacctcgtctactccgtgatgaacgcattttacatcgcctgctcgagctttgtcgggcagaactacggcgcgggcaaatcgcgccgcgtgctcaagagctacctgctgacgctctgctattccgcagtagccgcagcggtgctcggcgggctgttcctgctgttcgggcaccagtttctctcgctcttcacgtcggaatccgacgtcatcgaggcgggcctcgcgcgcatctgggtcatgtgcttctcgttcccgatctcggccacgatggactgcaccaccgccgcctcgcgcggccttggaaagggcctcgtgccgatgatcttcgtgttcctcggctcgtgcgtgttccgcgtggcgtggatctacaccgtgttcgcccacttccatacgatcccctcgctctatatgctctatccgttctcgtgggtactcacaggcgcggcggagatcgcatactttttgtattgctataagaaatatgtcaagccgctggatgcgtcccacgcagcggaatgaaaaagagctgtccgaaaggacagctctttttttgcgaccacactgggcgcgtgtgctttttcgcgcttgtgcgaaccccccaaaaattttcacagcttttgcaaagctgccaacttgcggtttttgtaatccgcgtcccccgtcacctcgcggagcacggtgatctcctcgggcagcgcggcactgctttgcccgtactggaacagcacggccctttccgcgctgaaggggtacatgtcgatctcacagcggcggtcggcgaagacgaaacgatactttgtcttgcgcacgggcgagagcgccgtgtcgcgctctaagaggtatttttcatactgcttttgcgagatggggcgttcggtgtcccatttttcgccgttttccatgcgatgcttttcggtgtagaagtacagcgtctccgcgccgcttttctgcatgcgcacgcggcgctcgatgttcgggttcgtcagcgcgagatacgtctgcgtcatgtcgatggccgcggcgcggtatttgtgggaaaacgccgccatgtcgggcatggcgatgaggtacttgcgcttttgtgccattggctcgacctcgcccacggcgcggtaaatttcgcgcagggcgcgctcgattttactgttgaaatttgcgtcgttgtcgatgatgcgcagattcgggtgcgcgctccacgcgcgcagcgtgcggtcgtccatctcgcgcgcgaattcgatggattccgtgcgcgcgttgttgccgaggtcataggcaaactccgcgcccttggcgcaggtgatgagatggagtaccatgtcgtaattggcgagcacacgctcttcggtgcggccgtcaaagcgcgcgatgacctgcgcgaactcctcatccgacacgtaggccttgtcgtccatcagcgcgcggtcgtagagaatgagaatattgtcctccggcacgagctgcgcggcatccagtgcgagcttttccttgtggatctgatcgccgacgacaaagtcctgaaattgcagcattgacatacagttgtcaaagggcttgatgccaaagcccgaaatgagctcagttgccgtctcggggatcgtgatgacgcgccagccgtcctcctgcttgaattccttgagcacacggctcacgagcgtggttttgcccgccgcggggccgcccgtgaggacgatctttgtgatgcgctttgccatagttacgcttcctttccgtgcagaagatagtcgccgaatgcttcgacggtcttaaagtacaggtcgcagttttgacgcatgaacgcctcaatctctgggatgtcgttcgaccagcccgcggcggcgaagcgcacattcgcggcctttgccatgtcatatccgggctttaagtcgtcgagcacgagcatctgctcggcggtgaagccgagcttttccatgatatcatagagcgcgtgcggctggggcttgcgccggtcctttggcacctcccagccgtagacgagcctcagctcggggagcttattttcgcggtagtcgcgcagaatgttcggcgagagcgagtgcgacacgacgcagatcgtgccgcccgcgtgcacgtagtcccacagaatgtcgcgcatcccgtcatagacctgcggcacatggtgctggacgtattcgtgccagtacgcctgctcgtgcttcatatcctcctcggtcatgccgacctcgccgtggaaaaagtcatagacgccggggtcaaagtttttgaggacgtattcctccagcgtgtagcgcttcgccctggggaaaaacttcgccgtgtactcggcaaagcagggatag

SEQ ID NO: 10114 - DNA, 9695 bp, Unknown
  gut microbiota DNA sequence
tttagcggcgtggacagtgtatctatttccaagcggttaggtcatgcgcaagtcagcacaacggcgaacatctatgcacatgtgatggagagcgccgatcggaaaaacgctgacattttagctgacgtgtttttgaaaaaggcttgaattttcaaagtgagttgaactaaagttgaattatctcttcttgtcacaaatagaatatcttgtaaaagttacaaaaacagccgttttcgtaaagaaaacggctgtttttctggttgcggaggcaggactcgaacctacggcctccgggttatgagcccgacgagctaccaactgctccactccgcgatatgaaattaagggaatactggtgccggtgaccggactcgaaccggtacagtatcgctaccgggggattttaagtcccctgtgtctaccaattccaccacaccggcagatatcggcaactgataatataccatacctccgccgtgatgtcaacacctgtttgcaaaaaaagttctccgtccgcgttttgttcctttgacttgccggtcttgctatgctatactatgcttgtattgttatcgaaaagaggcggactatgcagatcggaacggtaaaaattgaatcgaagctcgcgctcgcgccgatggcgggcgtaacggatgctgcattccgccagatctgctccgaaaaaggcgcgggctacaccgtcacggagcttgtgagcgccaaggcgctgtgctaccacgacacgaagaccgcgcagctgcttcgtccgtttccgggcgaaaagccgtttgccgcgcagatctttggcagcgatgtgaactgcatggccgaggctgcgcagatggcgatcgaaatttccggcgcggacatcctggatatcaacatgggctgccccgtgggcaaggtcgtcaaaaacggcgacggcagcgcgctgatgaaggatcccgaaaaggccgcgcgcattgctgaggcggtcgtgcgcgccgtcaaggtccccgtcacggcgaagatgcgccgcggctgggacaagggcagcatcaacgccgtcgagctcgccaaaatgctcgaagaagtgggcgtcagcgccgtcgcggtgcacgggcgcacgcgcatgcagatgtacggcggcgaggccgactggaacacgatccgcgacgtcaagcaggccgtcagcatccccgtcatcgccaacggcgacgttttttcgcccgaggccgcggtgcgcatccttaaattcacgggcgcggacatggcgatgatcggccgcgggagcttcggcaatccgtggcttttcgagcagtccgccgccgcgctctcggggcgcgacattccgccgctgccgccgtttgccgagcggtgggacaccgccgtgcgtcaggtggagctctccgcacagtatcaaaacgagcgcgtcgccatgctgcaggcgcgccatcacctgtgctggtacttaaagggcatcagccacgcgaattattataaggagaagatcgtgcagctctcgacgctttccgagctgcacgcgctcagcgcgtcgatcaagcgggatctgcgctgaggatcaataaaaagctatggacgaacgggaactcattgcgcgccttcaaaagcgggatgaagccgccttcgaagagctgatccgccaatatgagaaaaaagtgtatacgctgtgcttccgcatgtgcggcaacagcgaggacgccgaggaggccgcgcaggatgcctttcttgcgctctggcgcgggatcgaccgcttccgacaggagtcatcgctttcgacgtggatctaccgtctggcgacgaacgcctgcatcgacacgctgcggcggcgaaaaaaacagagcggcagcgtctcgctcgacgacgaggagctgtttgtcgacgcggtcgacacctcgccccagccgcaggagacggtcgagcaccgcgaggcacagaaattattgcaggagggcctctccgccttgccggaggagtaccgaaaggtgctcatcctgcgcgagattgaaggcctgagctacaccgagatcgcagaaagcgcgtcgatcgagctgggtacggtcaaatcgcgcatcagcaggggccgatcacttttgcgcaactttttatccggaaacgggaacttttttgaaattacttcgtcaaaagttacagaatgtaatcgtgaggagatgagcgccaaatgaaatgttgtgaacagtacgccgccgcgctctctgcctttgtggacggagaattgagcgaaaacgaaaaggaagaggtgctctcgcacgtagagcactgccagaactgccgggagtatctctcggaactgatgatcgtgcacacgatgttcgaggaaatgcccgagctcgacgcgccggagggcttttccgagcgcgtgctcgagcgggtgcatgaggaaaagcgcgagagatcgcgccaccgccgtgcatggccgcgcgtgctggccgcgtgctttgcgctgcttgtcgtcacggccgcggcgtggaagctggcgcccgcgatggtcagcagcaacgacagcgccgcggactgcaataccagcggcaatgacacggcgagtgcgcccgctgcgtccggcgacacggcggaggactttacctacagctattccgccgtgcagaaggagggcgtgcaggccgacgccagcccgttcgacacctatgacacggaagacggcgcagacgaccgctccgccgacgcaagcggcggctatgccatcatcacgctggatgtgcccgcggcggcggaatttctgcacgagcgcggcatggccgtgtacgcggaaaatgacaagtacgtcagctacctcgtcgtggccgaagcggcacatgacttagcagacgccatggagctgcctgaggctgagcgcaccgcgctccgtcaggcagacgatattctgatcgtcggggtcgccaagaccgcaccggcggtcgaagagcctgcggaaaacacccccgcaggagaagaggagagcgaatgaacgatatcggcgtgatcggcggcgcggacggcacgacacagatcgtcgtctccggcagcatcggagggccgatcctgtggatctttttcggcgcgctggcgctgatggtgattttatacgctgcattttaccgacgcggcaagggcaaggcggtctgccttgccctcgcggcggttttctgcgtggcggcggatcaggccgtcaaattcctcgtcgtgaacacaatgtcgcccggcgaatcggagccgctgctgccgccgctgttacagctcacgcgcgtgcacaactacggcgcggcgtggtcgagcttttcgggcgcacggtggctgctcatcgcgctgacggcggcgggcatgtgcgccatcgcatggctgctcgtcaagatcgtgcgccatccgctgggccagtggtcgcttgcgatcatcctcggcggcggcatcggcaatctcatcgaccgcgtgcgcctcggctacgttgtggatatgctcgacacgatgttcatggacttccccgttttcaacgtggcggatgtgttcgtcgtgtgcggcacgatctgcgcgctcatttactaccttgccttttacggaaaatacgacgagaaacaccgggagaacaagaccgatggaaccgatcctgctgcaaacaagtgaagaagaccgcggcgcgcggctcgacgcctttctcgcccgctcgcttgaagagctgacgcgctcggcggcggcgaaagccatcgaagaagggcgcgtgctcgtaaatggcaaagtgccgagcaagagcctcaagctcacagggaatgaacccatcgagttcacccccgaggagcccgcccccatcgacgctgtgccgcaggatatcccgctcgatgttgtctacgaggacgacgacgtcatcgtcgtcaacaagccgagcgggctcgtcgtccatcccgcgccgggccatccggacgggacgctcgtgaacgcccttttgtatcactgcggcgacagtctctccggcgtcggcggcgcgctgcgccccggcatcgtgcatcgcatcgaccgcgacacgagcgggctcatcatcgcggcaaaaaacgactacgcgcaccagttcctctccgcccagctggccgaccacacgctcgcgcgcacgtatgagtgtatcgtggtcggcaacttacgtgaggacagcggcacggtcgacgcgcccatcgcgcgcgacagccgcgaccgcaagcgcatggccgtcgttccgggtggacgccgcgcggtaacgcactgggaggtcatcgcccgttatcccggctacacgcatgtgcggtgcaggctcgaaacgggccgcacgcatcaaattcgcgtgcacatggcctacctcggccacccgatcctgggcgacacggtctacggcgcaaaaaaggccgttccaggcctgacgggtcagtgccttcacgcggtggggcttcagttcatccacccgcggacaaaggagctcgtctcgctcacatgcccgctgcccgaggaattcaccgccatgctgcgcaagatcgaccgatagatcaaatcccgcaggcgagggccgacgcctttgccttattctacaggaaatacaggtgaacaatgtgaaagacctgcaaaccattgaggagaccctcaaatatctgcaattcgacaactgggagcagagcgtaccgggccttgcgcgctcgcgcgagcttttgggtctgctcggcaatcccgagcagaagctcaaattcgtccacatcgcgggcacgaacggcaagggctctaccgccgcgatgctcgcctccgtgctccggcgcgcggggtaccgcacagggctctatacctcgccgcacctgctgcgcttccacgagcgcatgcgcgtgaacggggaagagatcgacgatgagtccctcatttcgctcacaaacaccgtgcggaacgcggcggagagcatgagcgaaatgcccacgggctttgagatcatgacggccatcgcctttttgtacttcgtgcaggagcagtgcgacatcgtctcgctcgaggtcggcctcggcgggcgcatggattcgacgaatgtcatccccgcgccggaggtctgcgtcgtggcgaacatcggcttggagcacacggccattctcggcgacacggtcgagaagatcgccgcggagaagtgcggcatcatcaagcatggctcgcacgccgtgctcttcggccagagcgagggcgtggagaacgtcgcgcgcgaaaagtgcgcgcaggaggacgtggctctcacgatcaccgcgcaggaaaagcttgagcgcatttcgtcctcgctcgacggtcaagagttcaaataccgcggccgcgggccgtaccacctgcggcttctcggcgagtatcagctcttgaacgcgctgacggtcatcgacgtgtgcagcgcgctgcgctcgcgcggctgggacaagctcacggacgaggccattgacgaggggctttcccacgcccagtggcccggacggctcgagctcctgcgccgcgggccggacttcatcgttgacggcgcgcacaatcctcagtgcgtcgacgcgctgatggattcgctcgccgcgctctacggcgacaaaaaactcatcttcctcacaggggtgcttcgcgacaaggactggcagcaaatgctgcgccgcgcgctcccgctcgccaaggcgttcgtcgtcatcacgccgccttctgcccgcgcactcgatgaaaacgagctcgccgcgtggctgaatgcacagggcgtgcaggccatccccgccaaggacaccgacgacggcgtccgccgcgccctggagctggcaggcgaggatgacgccatctgctcctggggctcgctctacttcaccggcgaggtccgccgcgtcctgacggaacagtaaacacgataaaaaaggccgctgcgaaacgccgcagcggtcttttcatgatccccatgccgcatttgccgcgaccagcggcaaacaggcccccacacccaaaatcggcacaaagaggcatcttgcccgccgcattcgctgcctccggcagcgaacaggccagaagcaacatcctccgtcccccacccgccgcattttctgcccccacgggcagaaaacaggcaccagcgtcgcagactttgccgcccgcaggcggcaaataattttaatcataaatcgccgcgacatgcgcgtggcgatttattcttctcgcttcgcgcgtgtcgcagccgcctacggcggcaaggcacgaagcgaagtgcgatcccctaaaatcaaaggggtcccatccatcggatgggatccctttgattttaacttagatagttgagcgggttgacgtagctgccgtttctctgaatgccgaagtggcagtggacaccgctggcgacgccgctgcggcccgccttggcgacctgctggcccttgtagaccgtctgtcccgcggaaacgagcagcgacgagttgtgctcgtaatacgtgacatagccgttgttgtggtcgatgataacgacgtagcccatcgcgcccttgtagcccgcgtaggtcacgcggccgccgtcggcggcatagatcggcgtgccgtaggagcaggcgatgtcgatacccttgtggtttctcgtcgcgccgcggatgccggtgttgcggtaaccaaagcgcgaggtgatgcggcccgagcacggccagcggaagctgccggtggggtaccaggtcggacggaccttcgtgccgcgggcgcgcgtctcggccacagggtcggagagcgtgacggacgagatgaccgtgcgctcctgctcctcgccgttgacataggtgacatcggccacgatatcagccttgccgaacgagcccttggagatcacgcgctcgtcgccctgatacatggacgaatcgctcacgtagttcacgtcatagttgacgtcctcgacatagttctgccgctcggtgaccgtgacggtcagatacggcacggcgttcgagagcgtcagcgcatcgccgatgtggatgcggttgatgtcgtagccggggttcagcgcttcgagctcggcggcggtcatgccgttgttgttggcgatctggccccaggtgtcgcccttgacgacggtgtaggtcacctcgcccgacttcgtcgaattcaggatctcggcgatctcgccgaggttcatcacgctgtcggtcgggacgtagccctccgcgatgcggacattttcgacaaagtcgacgctcagcgtatccgccgaggcgtagacctgcttgatctgcttgagcagctcgtccagcgcaccggcgtactgcgtcgaaccgatgagctcatcgtcgacatagagcgagtagccgtaggtcacctggccgagctcgtcggcgaggtcctgctcgaaggtcgtcgaatccgtcacatcgctgcggcggacgaaagccgtcgaataatggatggcatcctttgcgatctcgtaggacttgccgagcgtctcggtcgtgatgctctcgagcttggaggccgccttgcgtgcctgcgcggcactcgcgacggtgtcgaccacgctgccgttatactctacggtcgttcccagcgtgtagaacgagaaaaacagcgcgatcgcggccacaacagctgcgccgccgataaagtagaacggattcacgcgccgcgcgtgcctgcgccagcggtcctcgtgctcgccggcagcgtggctgcgctggcggcggtgtgccatcaccctttcatgcagcagcgagcgccacatcgggaacatcccgccgatgacgagaaagacctgcaccaaaaagcggttggattcaggaaagttgcgcgccctgctctcgcgcatcacggtgcgggcgcgtgggccgatgcggcggatgcgcgcaccgagcgtggaaaaaaacagcgccatgtgctcgagccagccgctcagccattgcggcatgccgccgcgcctgctcggccgtcttcgcggcgaggcattcgaacggcggcgctgcgtgggtgcatcgctgcgctgcggggtggatcgtttttgctctgacatatcaaaactccttaaaggatgcaagtaaaaataaaagttacaatttgtaaccattgaccagtatacttggttttcaaggctccgtcaagccttttgggaaaatgatactgctaatatgttgtaagagtttggaaaatttgtaaacttttgcatgaattttgcgttatttttccttgagagggtgaaaaagtgggtgtatactatatccgtaaatctgtgcccgcttgaccggcacatcatatatcaggaggaatcaacatgtttgcacaactgatcagcacgctgaaaaagagccccaagacgatcgttttcaccgaaggtaccgacccccgcatcctcgaagcgagcgcccgtctgctgtccggtaacttcttaaagcccgtgctcgtcggcaaccccgatgagattgccgacgccgctgaggacatcggcttcaacatccgcggtgccgagatcatcgatcccgagaattacgacggcatggacgagatggtcgacaagatggtcgagctgcgcaagggcaagatgaccgccgacgagtgccgcgccgcgctcaagaagagcaactacttcggcaccatgctcgtcaagatgggcaaggccgactgcctgctcggcggcgctacctactccacggccgacacggtccgtcccgcgctccagctcatcaagaccaagcccggcaacaagatcgtctcttcctgcttcatcatggtccgtcccgccgcttccggcgagaacgaagtgctcgccatggccgactgcgccatcaacatcaagcccaacgaggacgagctcgtcgagatctgcaaggagaccgtttcctgcgccaagatcttcggcgttgacccgaaggtcgctttcctgagctactccaccctcggctccggcaagggcgaggacgtcgacaagatgcgcaatgcctgcgagaaggccaaggccctcatgcccgacaccccgatcggcggcgagttccagttcgacgcggcggtctctccggctgtcgccaagaccaagcacatcaccgacgcggtcggcggccacgccaatacctttatcttccccgacatcaacgccggcaacatcggctacaagatcgcccagcgcctcggctccttcgacgcctacggcccgattctgctcggtctgaacgcgccgatcaacgacctctcccgcggctgcaacgcccaggaggtctactccatggcgatcatcaccgcggcgcttgcctaacgacttcaaaaaaagaggacggcgaaagccgtcctctttttttgagggggatgcactgcgcttcgtgccttgccgcccgcagggcggctgcgacacgcgctccgtgagaagagttttttctgacgcacatgtcgtcagaaaaaacgattaggattatttgcgccgtgcgcggcgcaaagtctgcgacgcttttcggtgcgtgatgagggtctctgcttctattttgcgtttttagcgctgttttgcgcggggcgcaaaatgcgcgtcggggtacctgagctgttttgcgccggaggcgcaaaatgcgcggcgggggtgcgttagctgtttcgtgcggagcacgaaatgcgcgtgggggacgttggcttatttcgagccttcggctcgaaataagccaacactgaatttagactgaagtaaaacggccctctttgagggccgttttcgttttgcaggtttgctgtcattt

SEQ ID NO: 10115 - DNA, 47472 bp, Unknown
  gut microbiota DNA sequence
ctatacgatttgcctctgcttctattatccgctgccgctctgcccatcttgtagaagtacagcctaatttccgtctatctccagtctccacaatgcggcgagcgtcagcaatgccgcattcggtaggcagtctgccgccaagcaaacgtcactcgcgcctcacgatagtaaggcgcggttgagagtggtaacgactcgcagggattcatggcgaagccatgtacaccgcacttacattgcgcagcgcgtgcagttattcaagctgcaaacccgcaatgtcggggtcaaggggcggcgccccttgcgttctcttgggggtccaagggggccattctctcacgtgagagaatggccccctttcccgcattccctgcgccgcgcagggaatcccattgctgccttcaggcagcaagaatctgtaaagcgctattgctttaatagtcttttaatttctttctctgcgagcgcagtgcccccctcgaaatccacgcagggatgatatgcggattccagcgcgtcgtgcgccttcttggcatccgacagcgcgcccacagcctcatctaagagcgacgcctccacgcggcgggtgaagcgcagcttcgccttctgcgcgcgcgtgagcttctcctccgccatcgcgtcgagacgcaggcggcggtagggcttcccgtcgtacgggttgcgcgcgttcgttgtgataaacgccagccctttttccgggatcaatacgtgatggagctcccgcggccggtctggattcgggcaggcgatgatgtcgaaatgcttcgcctgtgccgcctgcacgacggtctcaagcatttcgtttcccagccccgcactgtcgatgatggcatagatgcgcgggcagagggcttcgacggtgtcgaaccggcaaatctcgccccgatgcgtcacaccgcccaaaaacgcgcggtcgacgcgcccgctgccgcctccctcaccgcgcagctcgcgtgcgaggatgccgtcggtgcggcggcggagcttcgaaaaatccatctgcgcgtgcattgccacgcggcgctcgctctccacctcgcccatcgcgcgcaggatgcgataggcgctgcggtagtgtgcgcgatattcgtcgctcagcgcgacgatctccgcgcggcgtgccttagccgcgtccacatcgtagaagcgtgtcaggtcgacatagcgctcgctcgcgaccgcataggtcggctcgagcacgtgcgggctggtaccatcgacaatggcggcgttacggtccagaaagatcgcagcgtcgagtgaatcggggtcgcccgagcagttgatgtacacgatgcgctcgcccgcgcgctccatcgccgcgcccacgcggcgcatgaaggtcgacttgccgcagcctgggccgcctttcagaatcatcagatcgtcgagccgaccgcccaaaagctggtcatagagcgagaaaaagccctcttcgctgtttgcgccgaggaaaaagtacaccggtttcataagatccctcccaaaattggtgctttctccatagcgtatgcgtgcgtggctgtccccgcttcccgcccttcccaaattttgtttgtaaggcagcaacgttccgtcgttcaggaatgaaaaaagctccgtttgggattcccaaacagagcctttttatgtactttcttacgccgtgaagatcttgtcctccgctctgcgcgtgtagtcgcgttcgagcatcgcgcggtgcgagaggaacgcgggatcgtcgaaatacttcgcacccatcgggcagttgcgcacgcaggagtggcatttgatgcacacgcccacgacctcggtgacatcatcgggattgatcgagcccatcgggcagagtgaggcgcacacaccgcagtgaatgcacttctcaagatcagtcttgggcttcgccttcagaaacaccttcggttcgccatcgaggcccagcgggcggtaatacggcgcgtcggcgtcaccgtcgaccgtgacgggcgcgggatactcggtcatccgcacgatgcggcccacgaccgccgagccgagctttgcaagctccgccatatcgtcggaatcgggtctgccgttggcaagcgcgtcggtaaaggcgtggcggcaggcaaaggcgcccgcgccgatggtgtggaagccgtccccttcgaggcaggcgcagagctcggcaagcgaattgtcgaagctgcggttgccgaacgtcacgaccggcacggcgagcgcgccgtttccgcggaagccggacttcacaaagtcgagcagcttatttggaagctttcccgcataggtcggcataccgaagatgacaaggtcgcccgcggcaaactcataggtttcctcgcgcgcggcgggcagcgtgaaatcgcgcacctcgagcggcacgtcgaagctgacggcaagggcatttgcaagcgtggtggtcacctttctggtgttgccggtggcgctgaaatagactgcgtaaacctgagaaacgttcatgggaatcggccttctttctttattgttcggggcgctgcccggccttacagggaaaaatcctcggacgtgtacttgtcgttcagcgtggcgggacggggcggcacacgcttgagcggatcgtagcagaaatggcggcagtggtcggcagagtcgaccacgccgcggcgggagcagatgacctgcccttcgttgatgacagatccgctcttgcagtaggcgcagtgcttttcaatgtctttgcggaacagatggaacatggtctccctcccctttcttttacaggctgcggacgacgagcttgccgtcctccatcgacgcatggatctgcgtgacggggtgctcgtaggagtcgatgatctgcgcggccatgacgtcttcgagctctttctgaatggtgcggcgcagattgcgcgcgccgtaggtcgcggagtaggacttcttgacgaggtagtcctcaacatcctcgtcccacgtaaagtgcaggcccttgtcctcaaggctcttttgcagctcatcgagcatgatgcgggcgatgccggcgaagttcttctcgtcaaggcggttgaagcagatgacctcgtccacacggttcaggaattcggggcgcaggaactcgccgagcgccttcatagcgcggtcgcggttctgctcgttcaccgtgtggccgaagccgacagtgccctccttgcgctcgctgcccgcgttggacgtcatcacgatgacggtgttttcaaagttgaccttgcggccgtgggagtcggtgatctcgccgtcgtcgagaatttgcagcaggacgttcatcacgtcgggatgcgccttttcgatctcgtcaaaaaggatgacggcgtagggcttgcggcgaatcttttcggtcagctggccggcttcatcatagccgacatagcccgggggcgagccgacgatgcgggagaccgagtgcttttccataaactcggacatgtcgaaacggatcagcgcatcgggcgaattgaagaggtcctgcgccagctgcttgacaagctcggtcttgccgacgcccgtggggccgacaaagatgaagctcaccggcttatgcttgggcgagatgcccacgcggttgcggcgtatcgccgcggcgacagcctcgacagcctcgtcctgaccgacgatgtgctcttttaagcgcttgtcaagctcgctcagacggcggaactcgtcttcacggatacgcgaggcgggaatcttcgtccagagctcgatcacgcgggcgaggttgtccatcgtgagctgcgggtcaccctgcgcgcagagctcgtcgagctcggtctgcgccttgatggtaaggctcttgagctcggccagacgctcaaagtcgggttcttctgcgccctgcaaaagctcgcgctccttgtcgtaatcctcgatctcgcggcgcagctccatgcggcggttgatgttcttgtcgtgcaggttcagatccgagcatgcctcgtcgatgaggtcgatggccttgtcgggcaggaatcggtcggtgatgtagcgctcggacagcagcaccgcctgacgcaggatgccctcgggaattttgacgccgtggaactgctcatagtagtgggcgatgcccttcaaaattttgagcgtgtcctccatgttcggctcgttgaccgtgaccggctggaagcggcgctcgagcgcggtgtccttttcaatgtgcttgcgatactcggtgaacgtcgtcgcgccgatgacctgaatttcgcctcgggagagcgcaggcttcaagatgttggcggcgttcatgctgccctcggcgtcgcccgcgccgacgatgttgtgcacctcgtcgatgacaaggatgacgttgcccatcttgcggatctcctcgatgaggcccttcatgcggctctcgaactggccgcggaactgcgtgcccgcgacgagcgcggtcaggtcaagaagatagacctccttgcttctgagcttgaagggcacgtcacccgcgacgatgcgctgggcgaggccctcggcaatggccgtcttgccgacgcccggctcaccgatcaggcaggggttgttcttctggcggcggttcaaaatctggatgacgcgttcgatctcctcctcgcggccgatgaccgcgtcgagcttgccgtcgcgtgcgcgctgggagagattgatgcagtaggagtcgaggaatttgtgcttgctccccttttcgaccttcttgttgctgcgcgggctctgcgtctgctcgccctcgttgccattttgtgcgtcgttcgctgcgggatttccgccgaaaaagcggctcaggaacgggaacgtggcggtcttgccctcctcgtcctcgttatcggcgtccggatcgtcggcgtcggtcagaccttcgaggttttccgcgccgccgaaagcgcccatcatttcattggagatattgtcaaggtcctcatccgtgatgcccatgcggcgcatcatctcgtccacctgcggcagtccgagatttttcgcgcacttgaggcaaagtccttcgttgacgttctgcccgttttcctgacgggtgatgaacacaacggcgatattctttttacatctggaacaaagttgcggctgcatagtatttcctccttggggtaaagatcagggtaacagcgcggcgacaagcccgcgcggagtatgactcataaaaaacgataacagatacgtgccctcgtagtcggcaaaggccttgacgccgagcttcggtgcgacatcgcagacgagaaacagcaaaagtgcgccctcgatcaggcccagcgcgccgccgccgatggtgttgagcgcgttcagcactggcaagtctaacaccttgtcaatgccgcctgtcactaagcggagcagcagcgtgagcaccaaaaagcacagcacgaacacgagcgtcctcaccacgctgccgagcagcgtccttacggcggcaagcgctgcgtcgcgcgcggcatttcgaagcgactgacgcaccgcgccgtcgaaatcgaagcgcagcagctttttgagaaggcctgtcaccgcgagcggcgaatcgtcctgccgaacgttttccgcgtcctgcgcggcgtcaccgtttggcgtttcacccgaggcgtcgctctctgccggggtctccccctcgatctgcgggacatccccctgcggtgtctgcgattcggtatcaaaccactcctctacgctcttttcaaggcgcggcatcagcatgtcggtcacgggctcggtcaaagcgtcggtcaggagcgacgcgccgatcagcgcgagcacgatcgccgccagcgccataaagctgcggaacagcccccgcttggcaccgaacacgacgcctaatatgagcacgagcgcgaagactgcatcgatcataagaccattattcacgtttcccgcgctcctttcaagtcataaattgtaacatttttagcgttttacagaaattacggaatataaagccaggcggacgacgagccgatcagcaccgccgtaccatcctcgcgcatgatgacagagcgcgcgtactccgtgccgtccagccgcgcgtattcctgcagctgcggcgtatagagcaccagactgtcgctgtacagcacggcgatatacttccccgccgcggacatggacagaacctcctgactgctgtcgagacttgccatctctgtaccgtcggacgagacagtcacgagcttcatggtgctgcccgagcggtagcggctcagcagcagcgccgcgtagttgtcgccgcccatgctcgaaccgcgcagatacgggtattcgtagcgatagctgccggaaagcgtaccgtccgatgaaaagagcgtcaagctctcgtccgtcaggcatgagagcgtaccggccacgctgtcgagcgatagcaggagcgagcccgtgagtgtgttgaccgagtccgccttatcgctgccgagggaatagatgctcaccgtgtcggcgaatgtgccgtccgactcgccgagcgtcaccgccgccatgcgcttgcagtcgcgcatgacgaccgcgtcgatgacatagtgctccgaggagttgagggcaaacgtcttctcgcccgaagcgtcgtacaccgtaacagcggacttgtagccgctcttttcggcgttgagcgccagatagtccgaggaattgacgctgaccgacaaaatattgccgctgcactcgccgctcatatcgcgcacaaggccgcttgcagagtaaataagaagcgtctgcccgccgatatcatagaccgcggcggtctggccgccgacagcgatggcgggattcgtgagcttcacactcatgctgtccaccacgctgccgctgctgctgtagatcgacacgcccgtcgtcgaagcgacgatcagatggtcgccgagcagcgcaaaggtgttgctgcggtcgttgctgaacgaacacaactctaccttgccctgctcatcctgcgtgaccttattgtaggagaaaaggcggcgcacactgtcaaggctgctcaggtccttccacgccgcggcgacgaccacggccagcacgaccacaagcgccagaatcaccatcagcgcccgcttgagcccgccgccggagcggcgcggggccgcctgcgagcgcctcagctcctcgcgtgttcccttttcctctttgagatcattcattgagccgttcatcctcataccaaagtctcgtcatgtacagtccgcccggcggcaccgtggggccggcgagcgagcggtcgccggaggccaggatctcggggatgtcctctggcgtgagcttcccctcggcggcgtagagcaccgtgccggtgatcgcccgtaccatgttatacaggaacccgtccgcgcagaccttgagctccaaaagatcacccgagcgcgacacgcggcagtagtgcacggtgcgcatggtggtcttcgtctccgtgccgacagagcggacggcgcggaaatcgtgcgtgccctcaaaggcgcgcgccgcgcgatccatcacctcttcgtcgaggtgctttgggtaaaagtaagccctgttgacatagaacgggtttttgatgcgggaattataaatacggtaggtgtattcctttttttgacacgagaggatcgcgttgaaatcctccgccacctcaagcgcctcgcgcacgacgatatcctccggcgtgtgcgtgttgatggcaaacggcaggcgctcgaccggaatgcgcgactctgtgtggaaattggcgatgtagcgctcggcgtgcacgcccgcgtccgtgcggccgcagccgacgagcttgacgttcccgccgcagacctttgagaggcccttttccatcgtctcgcagacgcttgagaccgtcttctgcacctgccagccgtgataggccgtgccgttatacatgagcttgagggcgatgtttcgcataaaagcgtcctttcttcttatcgcagcgcgatgaccgcggccacgagcacggcataatagccgagcaccagatagtcgcgcgtctggtagtgcagcacattgagcttcgtgcggccttcgtcgccgtggtagcagcggcattccatggccgtcgccagctcgtcggcgcggcggaacgcgctgacaaacagcggcacaagcagcggcacgagcgctttggcgcgctgcataaggcttccggtctcaaagtcggcgccacgcgccttctgcgcggacatgatcttatccgtctcttcgatgagcgtcgggatgaagcgaagcgcgatcgacatcatcatcgcgagctcatgcacagggaccttgatcttcttgagcggacccagcaggctctccagaccgtccgtcaggcggatgggagaggtcgtatacgtgagcaggaacgttcccatgatcaaaagcgtgatgcgcagcatcatcgtgatggcggcgcgcacaccctcgatcgtgatgcggaagatccaaaaatggcacagctccgtgccgggggtgtaaaagaggttcaaaagcgccgtgaacgcgataatgaacagcaccggctttaatcccttgaaaagcgccttcgcgcccacgcgcgagatgcgcacggcgacaatcagcgtcagaatgagaacgccgtaggcaatgtagctcttcgccgtaaagagcgccacgacgtagagcaccgtgacgaggagctttgtgcgcgggtcgagcttatgggcgagcgtgtcgcccgggaaaaactggccgagcgtgatatccttcagcattttttgccgccccctctcttgagcgcgacaagctccttgctgagctcatcgacggtgtaaacggcggggttgatggcaatgcctttatcgcgcagcgccatcgcgacgcgcgtgacctgcggcacgtcgaggcccgcggtcatcagctcgtcgccgcgggcgaagacctcgcgcggcgtgccgctcatcagcacgtggctgtccgacaggacaacgatgcggtcgacgtttttcgcgatctcctccatgctgtggctcacgagcacgacggtcgtgccgcgcgcgcggtggaattcgcggatgtttgaaagcagctcttccctgccctgcgggtcaaggcccgcgctcggctcgtcgagcacgagcacctcgggctccatcgcaataacgcccgcgatggccacgcggcgcttttgtccgccggaaagggcgaacggcgatttttccagcagatcgtcggtaagccccgcaaagtgcgcggattcacgcacgcggcggtcgatctcgtctttggataagcccatgttcgtcgggccgaacgcgatatcgcggtaaacagtctcttcaaaaagctggtattccggatactggaacacgaggcccacgcggaatcttacgtcccgaattttcttcgggtccgaccagatgtcctctccgccgagaagtatccggccggaggtcggcttgagcaggccgttcaagtgctggatcagcgtcgacttgccgctgcccgtgtggccgatgatgcccaaaaattcgccgcgatagatcgcgagcgacatatcctgcaccgcactgcggcagaacggcgtgccctccccataggtgtgcgtcaggttttctacacgaatgatctcttccaaggttacagtcctcttaggtaaaatttttcgcaatgacgtctgcgcattcctctacggtgatggcgtccacggggacgtccatccccgcctcgcgcagggaaaagagcagcgagaccgtgtccggcacggcaaggccgatgtcctccagctcctttttgcgggtgaagacctcgcgcggcttgccgtccatgacgacaaggccgtcgttcatcacgatcacgcggtcggcgtgctcggcttcgttcatgtggtgggtgatgaggacgaccgtgatgccctgctcgcggttgagcttttcgacggccgcgagcacctcgcgccggccgatggggtcgagcatggcggtcgcctcgtcgagcacaatgcactcgggtttcatcgccagcacacccgcgatggcgatgcgctgcttctgtccgccggagagcaggtgcggcgcgtgcttgacgaactgcgtcatgccgacggcctcgagcgcgtcgtccacgcgctttctgatctcggcgctcggcacgcccaaattctcgggagcgaacgcgacatcctcttcgacgacattcgccacgatctggttgtccggattctggaacaccatgcccacgcgcctgcgaatttcaagcaggagcgattcgtccatcgtgtccatgccctcgacatagaccttgccgccgcttggcagcaggactgcgttgaaggtcttggcaagcgtcgattttccgctgccgttgtggccgaggatcacgacaaagctgccgtgctcgatggtcacatccaccccgcgcagcgcgcgggtgttcacctggtcttccgtgcccggataggtgaaggtcaggtcttgggtcttgatcatttccataaaagttgcgttccttaatcgttatcccgaaagagcctttcggggattcatcgccgcaaagcggcggattcctttattccgagaaccagcggcccgtcgcgccgcagggcagcgcgagccccgtctccgtcacgggcaggcccagctcgtcccacgtgaccttgccgccgtacttttccgcaacgagcaggtgcagcatgtagccgagcaccgagggagcgagccccgtcgtatacgagttgatgatgacaaaaagcggcttgtccgataagacctgcgcgcagagcttcacgaacgggaaaagattgtcctccaacttccagacctctcctccggggccgcggccgtagctcggcgggtccatgatgatggcgtcatacaccttgccgcggcggatctcacgctcgacaaatttcgcgcagtcgtcgatgatccagcgcaccggcgcatcggaaagaccgctgacacgcgcgttctcgcgcgcccagttgaccatgccctttgccgcatccacgtggcagacctgagcgcctgccgccgcacacgcgaccgtcgcgccgccggtgtaggcgaagaggttcagcacgcggatgggccggcccgcgtttttgatcttctcgcgcgcaaaatcccagttgacggcctgctcggggaacaggcccgtgtgcttaaaattcatgggcttgacctggaatttgagatccttgtaatttaccgtccagctctcgggcagcttctccttgtcccaatgtccgccgcccgaggacgaacggtaatagcggccctgcgcgttgcgccagccgcggttcgtgcgcggcgtctcccagatcgcctgagggtcaggccgcaccagaatttgctttccccagcgttcgagcttttctccgccgccgcagtccagcagctcataatcttcccaaccgtccgcgatccacatacattttctcctttgccgcatgggcatacttgttcataataatcaatgtattatactacgcattcgattgaatagtcaatgtataaatcgtgaacgatcctgcgccattcgcttaattttcttttcccgtggactttgccgcgcgcttgtggtatgctggcagaaacgacacaaggaaagctggtcttttttgatggataaactgctgctgcactcctgctgcgccccctgctcggtctactgcgtggacacgctgcgcgccgacgggatcgagcccacgtcactctggttcaacccgaacattcacccctggacggagtatgacgcgcgccgccgcacgctgctcgaatatggggaaaaagagcatgtagaagtgcatattttagaggattacggcctgcgcgactttgtccgcgccgtgagtacggatatcgaccaccgctgtgcgcactgctacaccatccgcctcggcacggcggccatatacgccgccgaccacggctacgacgcgttcacatcgtccctgctcatctctccgtatcagaaccacgagctcttaaaggccgtgggcgagacgatgggcaagaagtacggcgtcgaattctactaccgtgacttccgccccggttttcgcgaggggcaggccaaggcgcgcgagatgggcctctacatgcagaaatactgcggctgcatcttctctgaagaggaccgctattcgaccaagatcgaaaaggcgaaaaagcgctacgccgaagaataagcagcttgcaaaaggcaagacccgttggatgctccaacgggtcttttttcattctttcgcggcgatcagcgcgtcgtgcacgagctgcaaggcgcgctctgcgtcgtcgcgcacgacgtaaaagctcatgaaccgctcccccgccgcaacggcgaagacggtgatctccgcccgttcgagcgccgtgacggctattttctctttctcgatgctcggcagcgcgccgccgaccgccgtgatggccgcaaggcggctccgcccgctctttttctgcgtcacgccgacgacgcttgcgtcttcatccgtttcgcaaacgatgctgcccgcgccgccttccctgcacgagcgcacggtgatgggcacgccgcccgcctgcgcgagcgccacgctgcggtcgtgaagcacctgtgcgcccttctgcgcgagcagcagcatgtcgccatacgagatctcctcgcgccgcacagcgttcttgcagatgcgcgggtcagaggaaaatatcccgtccacgtctgtgtagatgacaagctcagcggccttcagcgccgcggcgagcgccactgcactcgtgtccgagccgccgcgtccgagcgtcgtgacgtcgccccgctcgtcgacgccctgaaagcccgccgcgaccacaacgtggccctcggccagctccttccggatacgcgtggtgtcgatcagttcgatctccgcgttcccatgtgtaccgtccgtttcgatggggatctgccatgcgcagagggataccgcctccacgccgatggagcgcagcgtcatcgcgccgagcgcggcgctcatctgctcgcccgcggagagcagcatgtcgagctcgcgcggcgaaggccgctcgctgatctcctttgccttttgcagcaggccgtccgtcgtgtcgccctgcgcggagagaacgacgaccacgtcgtcgccttcgtccacccgcgatttgacgatgcgcgccatgcgcagaagatgcgcatagtcgcgcacggagctgccgccgaatttctgtacgatcaggctcataagaaccacttccaacaaaaaatggattgacagcgctcatctcagccgctgccaatccatcgtatgaacttgtacaagcccgcgtgactcaggccgcgaggatatcgaagcgcaccacgccctcaagcgcgagcgcccgcgccatcatctcttcgatcgactcctgcatttcggacgtctcggccgagatcgtcaccgcggcacagccgttggtgggaatactctggttgatggtcagaatattcgcgcccgaaccggcaaaaatagaaaggacgtcggacaatacgccggggttgttcttgagcatcgtgtagaacgtgatgatgcggccggtcttcatgtcgttgaaggggcgcaccgcatcgcggtacttataaaatgcgctgcgactgatgccgacggtgcgggcggcgtcgcccgcggtgcgcacctcgccggactggagcatgcgcttcgcctccgccaccttgataaaaatttccggaagggcctctgacgagaccaaataaaatttcgttgcaggcgccataatgtttctccttcgcggtcatctgtctttatatggcaggattttagcatatcttaacgcatattgcaacacttttttcggtgggaggtctgcaaaatttgaatgaagaacggctgagacgcttcctcactttgtcgctcgcgcttttcatgggtgcatctctcttttatgtctgctttcactatgtgctgccgtggtgtttgccgtttctgctcgcgctgctcgtcgcggcgctgctggaaccggtcgttttgtatctgcggcggaaatttcactttcaacgtggcttttccgcgctgatcctgacactgacgctgctgtttctgctcggcgggctgctgtcgctcctgtggtctacgctactttctcagacgaacgcgctgctcgccgccgcgcccgcgtttttcgacgcgatccccgccgcagcggacgatctgctctcccgattggagcagttcagcgcgtcgagtcccgaatggctcagcggctatctgcacgagcagcttttcagggccgtcacggacgcggacagcctgctgcgctcgctgtcttcgcgcgcgatggcgtggctcggctctgccgccgcggcgctgccgggcggcgtgctcgccatcgcgacgggcgtgcttgcgatcttcttcacctccgcgtcgtaccccgagctctgcgcggcactcgaacacgccgtgccggaagaagcgatggcaaagctgcggctctttcgcggcggcgtaatgcgctcgcttgcgcggtggctgcgcgcgcaggcaacgctgtcgctcatcacgttttcagagcttcttatcggctttctcctcatgcgccagagctattccctgctgctcgcctttctcatcacactgctcgacgcgctgccggtcttcggcacgggcacggcgctcgtgccgtgggcggtcttcacgctgctgttcggcttcccgcccaaggccatcgtgctccttgcgctctacctctgcacgctcatcacgcgcaacacgctcgagcccaagctcctctccgcgcaggcggggctgccgccggtcgcgtcgctttttgcgatgtacctcggctactgcacgttcggcgtggcagggatggtactctttcccttcctcctgctgctgttcgcgcagattcgaaacgcaaaagcggaagctgccgcataaaaaagagaacggtgaaaaccgctctcttttttattgctttttaccggcctgtgccgccgttgttgagcagccagttgaggaactggccgttgtctccgacatcgccggatgcgctgtctcccgccgtgccggtgttgtcagacggcgtctgtgtgccgctgtcgccgccagtggtgtcatcaccgcccggcatcgtgccgctgccgtcatccggtgcatccgggtccggcgtgggctccagcggcgttgtgtgcgtcgtgcacatgccgctgtacatcagatcgctgtatagctgcactgtgccgctgttcgtgcgcaccggttcgcctgcagggatcgacgaaatgagcccttcttcgagctgtgcctgatacgttgcctgaagcgcggcgctcagcggcgtcgtgagaagctcgcgcttgtagccccagccgctgctgacgttcggctggctcagatcgagcacataggccgtcgtaacattcgggcagtagtcggaggcgagcatgccggaatcggcgcagacggttacgctgatgtgtccgtcgcagctcagcgagggcgcatagctctttgcgaccttgacagtctgcgagggacagccggccgaggccagaagtcccgtctgcgtgcagacggtcacgctgaccatgtcggcgctgctgacttcaaagtccttgttcggaaggcccgcgtggaccttgctcataaacgtcttccacagcgtggccgcggggttgccgctcgccacgatgcgcgtcggcgtgtcgtagccgacccagaccgctgccgtgtaatacggcgtgtaaccgacaaagtaacggtcgttgttgctgttggtcgaaccggtcttaccggcgatggtcatgccggagaagttcgcgcccgtacccgtaccgttgcgcacgacgtttttcaggagctcgttcatcgcataggcggtgctctcattcatcgcgacgtgggactcggtcttattttcaaggatgacgttgccgttgtggtcaagcacctcggtatacgttctcggcgtggtgtaaacgccgccgcgggcaaatgttgcgtaggccgcggccatctcgcgcgtcgtcacgcccttggaaaggccgccgagcgcgagcgcgcccgccgcggtcatatcgtcgttcgtcagcgtcgtgaagcttaagttttcggtcataaaggcatacgacgcgggcagcgtcagcttgatggccgtgcgcaccgccgtggggttggacgaattgcggatggcgtcttgcagcgtcataatgctgcggtagcccgagtaggcgtttaccggccagatgcttccgccgagcatttcaacgggatagtcgtcgatgacgctcgcgggcgtgatgacgccggcatccagcgcgggcgcgtaaacgctcaaaggcttgatggcagaaccgcactgacgcacaacggtcgaatagtcgagcaggaaccggccctcgcgctcgcccacgcggcccgcaacggcgacgatgtcgcccgtcgtgttgtcgatgatcgtcgcgccggactggagcagctcgcccttggacgaggtgtagttcaggttattgcggtcggcgtaaacgctctccacgatggactggatctcgggatcgaccgtgcagtagatcgagtagccgccggtgtagagcagatcctttgcgaccgactcatcatatccgagctgttcgtgcatatcggcgacgatgtcgttgaacatgcgctcaacaaagtaggagtcatactccgtgctcgaggcggtatccaccctgcttgcaacccccgcagaaggaacaaaacccgggtcccaggagaagacgagcggctcgacctttgcctgctcatactcttcgtcactgatcttgccaagctcgtgcatcttataaagaacggtgagctggcgctccttgttctgctcgcggtaccagtcgccgcgcgacggatcatatttataggggaactgcgtgatgccgacgatggacgccgcctccgcgatgctcagctcaccaacggtcttgccgaagtagccctccgccgcggcctcaatgccgttgcagccgttgccgaagtagacgaggttcaggtacgtctcgagaatttcgtctttcgagtagttcttctcgaggcgcagcgcacggaagatctctgtcaccttgcgcttgatagtcacctcgttgtcgccggtcatgttcttcacgacctgctgggtgatcgtcgagccgccgcgggtcgacgtaccggtgagcttgccgagaatggctctcgccgtgctcttccagtccacgccgtggtggctggagaagcgctcgtcctcgatggagatcagcgcctcccgcacatgcttggggatctcgtcgatactcacgagcgtgcggttctctacgccgtggagcttcgtgagctccacccactccccgcttgttttatcctgatagtagactgtcgagctctgcttgagcgtgtaggccgagatgtccacattcagatcgagcgacgtatgcacgtagaccatgaagatggcgaaaaacatcaggcaggtcgtgagtccgatggctaagatggtgccgatgacctgcttggccgtgccggactttttcttcttgtgtgcctgatgcgtggggtgctgggtgtgctgtcttcggggcgtctggttttctgcgcggttttcttccataaagcgcctcctcctttgcgatagaaatatgcgcgcgagcgcatagccgattttcaatagtgatacagaatacagtatagcacggctgtcaagtggtacgtatcttgtcttgcattttgccgcaaggtgcggtataatgcgagcacaaactttcaggaggtgttcccccatgaacgatgagttcggccccaatttcgtcacgctgaccgatgacgagggcaacgatatagagctggaatacgtcgacgcgctcgagcataacggcacgacgtatatggccttcttccccgtggtcgaagaggacagcgaggacgaggaaaacgaagaggaatacggtctcgtgatcctcaaaagccagatggaaaacggcgaggagttccttgtcaccattgacgacgaagaggagatcgacaaggtctacgacctcttcatggagcagatcctttccgacgaagagtaaaacttcgattgcgacggatttttttcgaaaactgagataaactgaacatgccctgcggggtgcgtgataagttctttttaaacccacatttcgtcataagggacgccggtacgctccggtggtttgcaggcctcccggctgccgtctgcggctggacgttggaagcaataaagccggacagaggcgacccacctgtccagaatggtgcaggttttgacggggcttacacggccgctgcggggcatctttttatctttccacggattgcacaaaattacgtttttattttctacgtcagtttagacgaaaaaaacgtgcattttgttcgcgattcctgtaaaatatttttacaaactaaattaccgtttggtagctgcaacgtagtgcttcgcgcacgggctgtacggtctcccctttcggggagatgataaggtctgtgtgaggagcgctttttctttccccttgcggtgccgctttcgcggcggggaaaaggcaaaagaaaaaggaggagcaaacttatgaaacttgtcaccaacggtcgtctcatcacccgcgacgcgagcgcgcagggctatttcgagcacggcgccgtcgcctttgaggggacgaagatcgtcgaagtaggcgaggaagcgatgcttcgcgccaagtatcccgacgccgagatcatcgacgccaagggcggcgtcatcatgcccgcgttcatcaacgcgcacacgcatatctactctgccctcgcccgcggcctttccatcgtcggcaacaatccgacgaacttctacgaagtgctcaacggcacatggtgggccatcgaccgccacctgatgatggacggcacgcgcgcctccgccgccgcgctgtacatggactccatcaagcagggcgtgacgacgattttcgaccatcacgcctcttacggtgagatccccggcacgctccacaccatcgccgaagagagcaagcgcctgggccttcgctcctgcctgtgctatgaggtctcagaccgcgacggcgaggagaagtgcttacagaccattcaggagaacgccgattttatcaccgaatgcgaaaagaataaggacccgatgctctcggcaatgttcggcggccacgcgctgttcacgatctccgataagaccttcgaccgcatggtcgcggccaacaacggccgcacgggctatcacatccacgtgtccgagggcatgaacgatgtgtacgactccctccagaactatggccgccgccccgtccagcgcttgcaggatcacggcattctcggtcccaagaccatcctcggccactgcatccacgtcaacaccgccgaaatggagatcatcaaggagaccggcacgatggtcgtgaacaatccggaatccaacatgggcaacgccatcggcatctgccccgtcctccaactccacaagcgcggcattcttctcggcatgggcacagacgcctacacgaacgatatgctcgagtccctcaaggtcgccctctgctcccagcgcagccagaactgcctgccgaacgtcggctggtgcgaggtcacggacatgctcttcaagaataacgcgaagatcggtgaaaaatacttccccgacacgctcggcgtgctgaagcccggcgccgcggcggacatcatcgtcatggactataagccgttcaccccgttctccgacgagaatatcgacggccacatgatcttcggcatgacgggccgccaggttgagaccaccatcgccgccggcaagactctcatgctcgaccgcgagctcgtcggcatcgacgaagaagccgaaaacgcgcacattcttgaagccgccaagaaactctggggcgagctgaatcacagaacctattaagcaagcgggaggaaaaacaatgtctgaaaaaatgtatcccattccgttcgactctctgatgaactgggtgacgagcgaatacgcgcagtgcggcgatgtgttcggcgttcataagcactatcacgcaagcggcaagagcctgccgatcttcggcgagcgcatcgaaacaccgtttggccccgccgccggccccaacagccagcttgcgcagaatatcatcgcggcctatgccgccggcgcgcgctttttcgaggtcaagaccgtgcagaaaatggacggcgcggagcttgccgcctgtgttccccgcccctgtatcctcgccgctgacgagggctacaaccaggagtggtcgaccgagctgaccgtgcagcaggcgcaggacgagtacatcaaggcctggtgcgcgctcaagatcatgagcaaggtctacggcttcggcgatcccgacgggttcgtgttcaatatgtccgtcggctacgacctggacggcatcaagggccgcaaggtcaacacctatatcaacaacatgatggacgcgggcaagaccgcgcagttcaaggaatgtaaaaaagtcctgaccgagctcttccccgaggaaaaggacttcatcgcctcgatctcccccaatgtttcccgctctgttacgctctccacgctccacggctgcccgccgcaggagatcgagcgcatcgcaagctatcttctcaaggaaaagcatctgcacaccttcgtcaagtgcaacccgaccattctcggctacaagaccgcgcgcagcatcctcgattccatgggctatgactacatcgtcttcgatgagcaccacttcaacgaggacctccagtgggaggacgccgtgccgatgttcgagcggctgcaaaagcttgcggacaagcagggtcttgaattcggtctcaagctctccaacaccttccccgtcgacacgacgcgcggcgagcttcccaacgaggaaatgtacatgtccggccgcagcctcttcccactgacgatcgagatgtgcaatcgcatctcccgccagtttggcggcaagatgcgcatttcgttcgcaggcggcgcggactacttcaactgtgacaagctctttgccgccggcatctggcccatcaccgtcgccaccaccatcttgaagcccggcggctacaaccgcctgcaccagatggtcgaaaaggtcgaggatatgccctaccgcgcattttccggcaacgaccccgccgcgatctccgaccttgccgcctccgcgctgcacgacttccaccacctcaaggcaatcaagccgctcccctcgcgcaaaaaagatgaacaggtgccgctgctcgactgctttaccgcgccctgcaagggcggctgccccatcgagcaggacattcccgaataccttgagctctgccgcaaggggctctacggcccagcgctgaagctcatcaccgagaagaacgccctgccgtttatcaccggcaccatctgcgcgcaccgctgccagggcaagtgctcgcgcaacttctatgaggaattcgtccacatccgcgagacgaagcttcttgccgcggaaaagggctacaacaccttgatggcctccctccgtatgcctgagccggtcgaggataaaaaggttgccatcgtcggcggcggcccgaccggtatcgccgcggcgtacttccttggccgcgagggtgttcccaccacgatcttcgagcgcgagcgcaagctcggcggcgtgccgcgctacgtcatccccgccttccgcatcagcgacgaggccatcgacaaggacgtcgcgctcatggagcgctacggcgtcgaggtcaagctcggcaagcctgctccgtccgtcgaacagctcaagaagatgggctacacgcacatcctgatggccaccggcgcgtggaagcccggcaagctcgacattgaaggcaacgtgcagggcgtcatcgagtggatgaagcgcatgaaaaagcaggtcaagccctgcctgagcggcaacatcgtcgttgtcggcgcgggcaacaccgccatggacgccgcgcgcgttgcaaagcgcatgggtgcgcatgcgaccattctctaccgccgcacgaagaaattcatgcccgccgacgagcacgagttacagctcgccatcgcggacggcgtcgaattcgtcgagctggccgcgcccgtcaaacagagccgcggcaagctcctgtgcgataagatgatcctcggcgagccggatgagagcggccgccgcagccccgtcaaatccggcgagcagttcaccattccctgcgacatggtcatctccgccgtgggcgagcaggtcgacgccgatctcatggccgcgaacggcatcgagatggagcgcaagggtcccgcgttcgagacgaacgtccccggcgtgtactgcgcgggcgacgcgcaccgcggccccgccaccgtggtcgagggcattgccgacgccgcgcgctttgccgagatcgtcgtcggtcacccccacgtttacgacattcccgccgaggccgatgtgaccgagttcgacgcgcaggccaagaagggtatcctctcgatggccagtaagtgtgtctgcgacggcgagcgctgcttacagtgctccaccgtgtgtgaaaactgcgtcgattcctgcccgaaccgcgcgaatgtcgtcatcaagatggccgacggctcgcacgagatcgtccacgtcgacaagatgtgcaacgaatgcggcaactgcacgcagttctgcccctacgcaagcgaaccctgccacgataagttcaccctttttgatacgcgtgaggacatggacgagagcgaaaactacggcgtgctcttcgaggacgacgatatggtccgcctgcgctacgaggacggcgtgaaggaatacgacttggcctcctgcgacaatgatctccccgtcgagctcgaggcgttgatcctcaccgtgcgcgataagtacagctatctgtacacataacaacaaaatcgcaaaaatgaaacggggagccggtgcgtcgcaccggctcctctcccctttgcaacaaaaaagagcgctgcctaagcagcgctcttttttgcgtttatattttgccttacttctcgatcaggttcagctgatagatgatcttggcgatctgcgcgcgggtcagggacgcggcaggctcgaaggtggtagcggtcataccgtcgatgaccttcgcgtcgacgagcgccatcacgtaaccgtcggtgcagtcagtgaacttgctctcggtcttggactcggcaagcttgttgagcttggcagcgacctggcagaactcgaggcgggagatggccttcgtgccgtcgagatcggcggcaacaagacccagctcagcagccttggcgatgacgttcttgctccagtcggcgccggtggcgtccgcagccttgagatcgccgttgctgacaagcaggagcttgagcgcggcagcccaggtcagggtgtcgttgggcgcataggtggtggcggaggtgccggagatcacgccatcctcatagagacggatcatgtagttgaagtaccaggaggtggtcttcacatccttgaagggattgaagtaggtgacgcggccctgaggcgcggcatactgctcgccgatggcgcccttgagctccttggttacatactccatcacagcctcgtccagaggaataccggtgtcgaactgggcggaagcggccttaaaggcatagtaggtgtcgccgccggcggcgcagaagttgttcgtcacaacggcgtagacctcattggccttgaattccttgccgttgacgctgttgatgaccacgcggttgatggtcttggggccgtagtaggtggatttgggataggtggcgtcgttcttgtcatacgccttgccggtgtggatggtgaagttgatgccggaaacctgcgggaaaccgccgaccgccgtcggggtgctgaaggtagacgcctcgagcgcttcgagcagctgctcacccgtgacatagacgaccgcgaccgtgttgccgaacggcagaacggtgttgatgtccttcttggtcacatcgcccttggcgatcgccgcacggatgccgccgccgttggtgatggcgaccacatggtcttcattcacggtcaggccgtccttgttctgcaagaccttccagcgcatcgcgtcggtgatgaggtcgccgttgttggtctccacgtcgcggttgccgttgggggccttcgcgccgttgagttcgaccttgctggtggcgaacttgacaccgtattcattgttgacacggtcaacaatgacctttgccgccgcggcaacggtcgcgtccttggcggtgtcttccttgatctcataaagggagttgctctcgatcttcttgctggcattgtcgatgacaatcacgccgatgttcttgaacgcggtgccggtggactggatgggctcgcccttctcgcccttggtcatcacggtgtgggagtggccgtcgacgatgaagtcgatgcccttgactgcggcgtaaagatcggtggagcggtaaggagcggactcagcgtccacgcccagatgcgcaaggcagatgacgacatccgcatccttgagcgccgcgacctgatcggcggcagccttggtgaaggcgtccttgtcagcgaaggtcaggcccttgatgagcgcggggttggccttggtctgggtctcgggggtctccatgccgaagaagccgaccttcacaccggacttggtggtgtaggtgtagctcgcgtcgaagatgggggtaccgtcctcattgaagacgtccgcgcagacgaccttgaacttggccttgctcatgttttccttgagctgggcatagccgtagtcgaactcgtggttgccgagggtgacgacgtcgtagcccgcggcattcatcatcgtgaccgcatcagcgcccttggtggagctgacataggtcgtgccctggctgaagtcgccggcgtcgacgaggatgacctcggcgcccttggcctcatagtcggccttgagctgtgcgatgtaggcatagccctcgaccgcaccgtgcacgtcattcgtatgcagaatgacagtcttgcccgccatctcggctttcgcatcagcggcggtgtccgccgcaaagctggtcacagtcaggctgaggaccatcgccattgcgagcaggacggataggaacttgcgcatagtgttttcctcctcaattttttcactccgctttttctctgtccgctcttcgtgacacacagcttcttttcacatctctcagttggtctgcgcgccaaaagttcgctttttgtacaaataaaagcggaatgtggtatgattttattgtatcgtatgtctgctactttctcaatacggcattgttccgaatttgcggcaaaaatcttggcgcttctcacattttttccaaactctatggaaatcaggtaaaaagtatgctatgcttttgctaatttggaacggtattttttcaaaggagggttcttccatgaaaacactgcttcgaggcggctatgtcgtcagtggccgcggctgccgccgcgccgacgtgctcatcgacggggaaaaggtcgaaatgctcggccacattccgcccgagctcgccgcgcagagcgaggtcgtcgacgtgacgggctgcatgctcttccccggctttatcgacgcgcacacgcacttcgatctcgatgtgtgcagcaccacgacggccgacgactttgaaagcggcagcaaaagcgccatccgcggcggcacgacgacggtcatcgactttgcctgccccaataaaggggaatcccttgcctatgggcttgatctctggcataaaaaggccgacggcaagtgctactgcgactacggcttccatatgaccatcgacgactggaacgagagcatcgagtctgagctcgacgcgatgttcgacgccggtatcacgtctttcaagatgtacctcacctaccccgccatgatgatcggcgacggcgcggtctaccgcgcgctgaaagcgctcaaggcccgcggcggcatcgcgggcgtccactgtgagaacgcgggcgtcatcgacgcgcgcatcgccgaactcaaggcgagcggtttgggcgcggacgtcgtatcgcacccgatctcccgccccgactatttagaggccgaggctgtttcgcgtctgctgcgcatcgcgcaggcggccgacgcgcccgtcatcatcgtccacacgacgaaccgtgcttctcttgacgagatcgccgcggcgcgccgccgcggacagaccgtgtatgtcgagacctgcccgcagtatttggcgctccacgacggcgtttactacgatcccgacttttcctccgccgcgcgctacgtctgcgcgccgcccatccgctcgcaggaggacagtgaagcgctctggaaggcgctgcgccgcggcgaggtgcagaccatctcgaccgaccactgctcgttcacgctcgagcagaaggacatgggccgcgacgactttacgaagattcccggcggtcttcccggtgtcgaaacgcgtggcgaggtcgtctacactgtggccatcaatgaaaacaagctctcgctcggcggcgtctgccgcgcgctgagcgaaaatcccgccaagctctacggtctctacccccgcaagggcgtcatcgctgcgggcagcgacgccgacatcgtcgtctacgatcccggcgcgagccacgtgctccacggcgcggacatgctctccaaggcgggctacacgccgttcgagggcttccgcacgaatggcggcgtgtcgaaggtctacctgcgcggtcagctgcaggtggacggcggcaaggtcgtcggcggcaagatgggcgaatacttgaagcgcggcaaatgcgcactgtgaggtaagatatggatctgagggaaattttatttgcgcagttccctgcgttttttctgctgagtctgctgtttttgatcgcgcacctgcgcgtgcgcaagcacagcgccgtcaagtcggtgctgtgggtactgctgttcggcgcggcgctggccgtgtcgatcctgttctgcttcctcggcatgcaggcgaagtactggacggtcaagacgctcttcgagctcaagttctggagctggctcggccttgcgatcgtggtgtttgtgttcgtgctgcggctggtgttcaagctgcaaaataagcacgctcagcacatggtcgaaaaggagcgcgccaaggcggaaaagacccgcgaggaggccgtaaagcaggcgcgcgaagaaggccgcgccgaggccatggccgcccagcaggcgcaggaggccgaagctgtcgcggcagagcccgcagcggatgagtctgcctcccccgctgccgaggagaccgcaccagcagagaacgaagatcctgaaaaggcggtcgaacgttaagtatggaacagacacaaccgcagcgcatcgcgtattttgacgtactgcgcattctggcgactttcgccgtcatcgtgctgcatctgtccgcgcagcactgggccgacacggatgtctattcaagagcctggcaagccttcaacctttacgacagtgctgtgcgctgggctgttccggttttcgtgatgatcagcggctcgctgttcctctccggctcgcagagtcttttgcacattctcaaaaagaatgttctccgtcttgtcacagcgtttgtcttctggtcggcgctctacgccgtcttcatggtgaacttcgagggatgcccgacgaaccttattttgcaacagtttctcaacggtcactatcacatgtggtttctctttatgatcgtgggactgtatctgatcgtaccgtttcttcgccccatcgtgcgggatgaaaagctcctgcgctattttctactgctcacgctcatctttacgttcctgctgccgcagatcgcgtcggccgtgtcgcttctctcgtggcagtactgcgctgaattcaaggcgctcacgggcaaattctattatcatttcacgctcggcttcgtcccctactttgtgctcggttactatttggtccgcaaggagttttccttgaccgcaaagcgtgtgctttacgtgctcggtgtgctcggcttcgtcctcacggtcgtgctgacgtcgttcgcctcgcgtttgcagggcgcggcaacagagctgttctacggctacgattcgctcaatgtactgtttgtctgcgtggggctgttcgtctttgccaaagagcatctgaacttcccgaacttaagcgaaaagtgtcacaggtgcattcgcgcgctgtcgcgctggagcttcggcgcgtacctcgtacacccgctgttcatcgaatcgttcgacatttttctgcactttaacacgctgtcactcaacgtgtttttctccgttcccctgctgacattgatcatcggcgcgctgtcgttcctcatctcagcgctgcttcaccagatcccatttgtcaaaaagtattttgtatgaaaagagccccgcggatcatgcgattcacggggctcttctttttctgttacgcttcggtcttgatgccgcgcttgtcgaattcctcgaccagcaggtcaaggtcgttcggcaggctcatcggctcgccgcagaacttgatggcgttggccacgtccttgaggccgttgcccgtcacgacggagacgaccgtgtcgttctcaccgagcacgccctgctcgcagagcttcttgactgccgccgtgccagtgacgcccgcgggctcgccgaagacgccgcaggtcgtgccgagcagcttttgcgccgccatgatctcctcgtccgtcacgttcacgacgatgccgttcgactcgcggatcgccatgagcgccttgtccgcgttgcgcggcacgccgacggcgatggagtcggccagcgtgttctcctccatcggctcccagggcttgttctccgcgatggcgcggttgatggggtggcagccctcggcctgcgcggaaatgaggcgcgggagcttgtcgataaagccgatggcgtacaggtccttgaggcccttccacacgcctgcgatggtgcagccgtcgccgacggagatggcgagataatccggcattttccactcaagctgctcggcgatctcgatcgaaacggtcttcttaccctcggagaggtacgggttgatggccgcgttgcggttgtaccagccccacttgtcgatggcctttttcgacagctcgaacgtctcttcatagttgcctttgacggagatcacgtttgcgccgaaggtcatcagctgcgcgaccttgcccttgggcgcgcgctcgggaacgaagatgaaggtcttgaggccagcggccgcggcgttgcccgcaagagagctcgcggcgttgcccgtggacgagcaggcgatgatcttcgcgcccgcctcccccgccttggcgaccgccatggcggacgcgcggtccttgagcgacgccgtcgggttctgtccgtcgtccttgacccagagctttttgaggccgagctgctttgcaaggcgcggctcttcgtagagcgggctccagcccacgcgcagcggcgtgtcgggtgtcgtctcctccaccggcagcagctcgcggtagcgccacattgtgttcgggcgggacttgagcgtttccttcgtcaggttctttttgatgtagtcgtagtcatagatgatgtcgagaatgccgccgcacgagcagttcgtgaggttcggcgtggcctcgtattctttcccgcacttgacgcagcgggcgcatttgacgttttttaacataataactccttattgtccgcgcgctgcgcggtgggtttttgcagcgtgaaagcgctgctgctttttgtccccctattcgcagggggcgcgagacaaagggggtattctctttccaaagagaataccccctttggaacccccagagaaaggcaaggggtcttaccccttgaccccgcacattggcagtttttatcttgaagcgctgcacgcgctgcgcaatcaggtgcggtgtacatggcttcgccatgaacccctgcgtttcgtgacaactctcaaccgcgccttactatcgtgaggcgcgagtgacgttttctcggcggcagactgcttgccaaatgcggcattgctgcgctcgccgcattgaggagtgccgcggtagacggatattagtctgcactcctacaagaccagcagagcggcagcggatagtaggagtaagtcaagtcgtatagcaacaccaaacgcggctccgccgcgcgcaggaagtcgcattccggaggcacaaaggtcattcaagcctgagactgccaatctaaacgcctttcttttggacgggcgacgcccgttttctttctcgggaaagaaaatgggggtcgcattcgtgcagcgcctgcggcgctgctttccccgcgcccgcagggcgcgtcccccctttgaggagtataaaaaagagggcatctcttcgagatacccccttttatcatcctaacagggtttggagcaaggggttcctgctcccctttcgcgctcttagagcgctttgagaaggccggtggcctcgttgaactcgttgatgagctcgtcgagctccttcgcctgcgcgtggacagcgtcccacgtgcccttggtgtcgtaccagagggcgttgaggtccttgacgtcgcgcgcctgctgctcgacccaggtgtagtacttgaggttgtggatgcgcttgcggtcctcgtacgtcagctccatcatgctgtcggtcttcaggccgagcatgtgcaggttgtggtcaaggcgggcttcctcttcgctgtaggcgccgtgcttctcgttgagctcctcaatgcggctgccatacatcacagcggagtcggtcagaacggtgcagacgacatcgtcctcggtcagctcatagtacttggccatcttgatgcagcacaggacgtttgcgatgccggagatgccgagccaggtgagcttttcgatgagctcgtcggagagcttgagctcttccttgaggtacttcttgccctctgccgtgttgaaaaggcgcagcaaacgctgggaatcctcgtcgtcgatggcgatggccatgtcagtgttcttcacgttgtggatccaggggatgtgcttgtcgccgatgccctcaatgcggtggccgccgaagccgttattcaggatcgtcgggcactggagcgcttcgcccacgccgagcttcatgcctggataacgctccttgaggaggtcgcccgcgctcatcgtaccggcggaaccggatgtgaagcacgcgcccgcgagacgctggccgggcttcttcacggcctcgaagaggtctgcaagggcgtagcccgtgacattgtagtgccacagcgggttgcccatctcttcaaactggttgaagatcatcatgctggggtcctgcttgagctcccaggtcttgtcgaaaatctccttgacgttggactcgcagcctggcgtcgcaatgacctgaccggcaatcttggagagccagtcgaagcgctccttgctcatctccgcggggagaatggcgacggagtcgacggcgaggagcttcgagttgaacgcgccgccgcggcagtagttaccggtagagggccacacggcgtgatgatacgtcgcgtcgaactggccggtgacgaggcgcggggcgaggcagccgaacgaagcgccgaccttgtggcagcccgtggggaaccacttgcccgccatggcgaggatgcggcagggaacgccggagagctcgggcggaatttcaacataattcggcacggcctgatagaggccgccggactccttggcctcgttcttccacgtgatgcggaagaggttcagcgggttgacgtcccaaaggccgacagtcttgagcttttcctgaattttctcagggatggtctcaggatgctgcatctgcgcgatggtcgggatgataacgttgttttccttggccttctcaatgttgtgctgcaggccggtcttgttgatggtcaaatcgatcttgcccatggttcacttctcctcctgttgtttgtcaatataagaatatagtgtgtatttggatatgccgaagtattttgcgatcttgtctccggactttgtgacgaggaatgctccgttctggctcaaaaagccgatggcgcgcatcttatcttccttgttcatcagcgcgacgggtttaccgacaagcgcgaccgactgggcgatgagctcgtcaagcaggtcattgacgttgacgatcttttccggctcgccctgcgtcttatcctttgtgtcgatcaactcgtgcaccgcatcctcgaccatcaggagcgaggaaatgtcgtaattgatgccaaggattgcaaccaccttgccgttcctgccgcggatatacatggtagaggacttgaggatcttcccgtccggcgttttggtgaggtagctcaagtggtcgctcggctgcgcgtcggcctgacgcacctgctccaaaacaacgtgcgacgcgccgtcgcccaccttgcggcctgtgacgtggccgttctcgatggcaacgatggaatgctcggggtgcttggcgcccacatcgtggatcaccacctcgcaatggctgccaaaggtcgcggcgatgccctttgcgacctgctccagggtcttcagcgttgcggcttctatggtctatccctcctctgcctgcccgggcattttgctgtgcaagttgcacagctttccatcggcacgggcatgttctttcatccctataataccataaattgatcgaattgcaatcactttcttaaaaaatttttgaaatgcaaattttttgtttgacaactgccgttcttatgctatgataaggacagtgtaacagaaaattgaccccgatcgacagataatactattacttttaacggaggttttaccatggatttcgaagccatcaagaaagccgcacaggcctacggccccgaaatgacccgcttcctgcgtgatatgatcgccatccccagcgagagctgcgaggaaaagggcgtcgcccaccgcatcgccgaggagatgaagaagctcggttacgataaggtcgagttcgacgcgctcggcaacgtcatcggctggatgggctcgggcgacaagatcatcgccatcgactcccacatcgacaccgtcggcatcggcaaccgcgaaaactggacgcacgacccgtacgagggctacgaggatgacaaggtcatctacggccgcggcggcagcgaccaggagggcggcatggctgcggcggcctacggcacgaagatcatgaaggacctcggtctcattcccgagggctacaaggtcatggtcgttggctccgtgcaggaggaggactgcgacggcatgtgctggcagtccatcgtcaacgaatacttcaagggccccgaggatgcgagaaaccagatcgaattcgtcatctccaccgagccgaccgacggcggcatctaccgcggtcaccgcggccgcatggagatccgcgtcgacatgcacggcgtctcctgccacggatccgcccccgagcgcggcgacaacgccatccacaagatggccgaggtgctgctcaacgtgcgcgacctgaacgagaacgacgccgctgacgacaaggagatcaaaggccttgtcaagatgctcgatccaaagtataatcctgagcattgggaggatgcgcgcttccttggccgcggcacctgcaccacgagccagatcttcttcacctctccctcccgctgcgctgtcgccgacagctgctcgatctccatcgaccgccgcatgaccgcaggcgagacctatcagtcctgcctgaaggagattgaagacctgcccgcgtgcaagaagtacgccaaggatatcaagatctccatgtacatgtacgaccgtccgtcctggaccggccacgtctacgagaccgaggctttcttccccacctggatcaacaaggagaccgcgccccacgtgcaggcgctcgtcgacgcgcaccacgctctctggggcaccgagcgcatcggcgcggacgaaaaagccatgtccacgcgcactggccgtcccttaactgacaagtggacgttctccacgaacggcgtttctattcagggccgctacggcatcccctgcgtcggcttcggccccggcgctgaatctcaggcccacgcgcccaacgagatcacctggaagcaggacctcgtcacctgcgcggcgctgtacgcggctgtccccggtctctacaagcccgagaacaaggacggctctgccacctccttccgtcaggagttaacgggcaataatatcaaataacgtgcttcgcccgtcatttgatattaagaggctgcactccgcttcgcgcctcgcctttggctcgacgcgcgctgcgtgagaagtgttttttgccacgcgcatgtcgcggcaaaaaacggatcaagatcatttgcgccgtgcgcggcgcaaatatttcaaacgatttttaatatactataaaataaaggagaaaattatctatgagcaagactgttgaactggcacgccaccttgagacgctgcacatcaataacatgtacaagagcgacttctactggacgtgggacaagagcgacgaggagatcgacgcggtcttcaccgtggccgacgcgctgcgcgacctgcgcgagcgcaacaagaacacgaagatcttcaattccggcctcggcatttcgatcttccgcgacaactccacgcgcacgcgcttctcgtttgcctccgcgtgcaatctgctgggtcttgaggagcaggtgctcgatgaaaagaagtcccagatcgcacacggcgagaccgtgcgcgagacggcgaacatggtctcgttcatggccgacgtcatcggcattcgcgacgatatgttcatcggcgagggccacaagtatcagaagaccttcatggacgcgctcgaagagggctaccgcgacggcatcctcgaacagcgcccgacgcttgtgaacctccagtgcgacgtcgaccacccgacgcagtgcatggccgatatgctccacatcatccactacttcggcggcgtggagaacctcaagggcaagaaggtcgccatgacatgggcctattctccgagctacggcaagcccctctccgtcccgcagggcgttatcggcctcttcacccgcttcggcatggatgtcaccctcgctcaccccgaaggctacgaggtcatgcccgaggtcgaggagatcgccaagaagaacgcagcggccactggcggcagcttcaagaagtgcaacgacatgaaggaagccttcaaggacgccgacatcgtctatcccaagtcctgggcgccgttcaaggccatggaggagcgcacgaagctctatcaggccggcgacaaggacggcatcgacgagctggagaaaaagctgctcgcgcagaacgccgagcacaaggactgggcctgcaccgaagagatgatgaagctcaccaaggacggcaaggcgctctatctccactgcctgcccgccgacatcaccggtctttcctgccctgagggcgaggtcgacaacagcgtgttcgaccgctatatcgtccccctgtacaagcaggcttcctacaagccctatatcatcgccgcaatgatgttcctcgcgcaggtcaaagaccccgtccgcgcgctgatggagatggacaagagcggcgaagagcgcaagatgttctaaggcgcatttcatatgtaaaaaggcgggtcagccgcttttgtcagccgcttttgagagaagagagttttcaaaaaatcaaaggagagatagtcatcatgagcaaaagaatcgtcatcgccctcggcggcaacgcgctgggcaacaccccctacgagcagctcgccctcgtcaccgagactgcaaagcccatcgtcgacctgatcgcgcagggcaacgaggtcatcatcgcccacggcaacggcccgcaggtcggcatgatcaacctcggcatggccaccgccgccgaggccaaggccatcaagtccgacatgcccttccccgagtgcggcgcgatgagccagggctatatcggctaccacctgcagaacgccatcggcaacgagctcgcctcccgcggcatgaacaaggacgtcgcgaccgtcgtgacgcaggtgctcgtcgacgaggctgaccccgctttccagcatccgaccaagcccgtcggcgcgttctacgataaggagaccgccgaccgcatcgccgcggaaaagggctacaccatggtcgaggacgcgggccgcggctaccgtcaggtcgtcccctctcccaagccgatcgacgtcatcgaaaagaacaccgtcaaggcgcttgttgacaacggcaccgtcgtcatcaccgtcggcggcggcggtatccccgtcgtgcgccgtgacggcaagctctacggcacacccgcggtcatcgacaaggacttcgcctccgccaagctcgcagagctgctcgacgcggacatgctcgtcatcctgacggcggtcgagaaggtcgccatcaacttcggcaagcccgaccagaagggtctcgacaccctgacgccggacgaggcgcgcaagtatatcgacgaaaagcagtttgcccccggctccatgctgccgaaggtccaggccgccatgtcgttcgccgaaagcaagcccggccgcgtcgcgctcatcacgctgctggaaaaggcggccgagggcatcgagggcaagaccggcacccgcgtgcagatgtaacattcgttccaaacaacccgcacttttatgcaaaagacccgctcattgagcgggtcttttttcgttttttccatggagtatccactcttttctcccctatgactaaaagagccaagccttttttggtcaagtttgatcaccgattttcgtttttcctgttgattaattttaccattttatgtatcatggtgataacggtattcaaatcttttgattgccgtaaaatttaaggaggatttaccgaaatgaagaagttccttgcactgctcctgagtctcgtgatggtcctcgccctcgtcgcctgcggcgataagaaggacgataccaacaccgacgatcaggacaacaacgaagtcaccgatttcaaggtcggcttcatcatgctccacgacgaaaactccacctacgacctcaacttcatcaacgctgcaaaagaggcctgcgagacgctcggcgtcgagtacaccatcgtgaccaacgttcccgaaggtcaggagtgctacgacaaggccgctgagctcgccgacgccggctgcaacatcatcttcgccgactccttcggtcacgaggactacatgatccaggccgcgaaggacttccccgacgtgcagttctgccactccaccggcaccaaggcgcacaccgagggtctgagcaactaccacaacgccttcgcttccatctatgaaggccgttacctcgccggtatcgctgccggtatgaagctcaacgagatgatcgccaacggtgagttcaccgcagacgaggccaagatcggctacgtcggcgccttcacctatgccgaggttatctccggctacacctccttcttcctgggcgctcgctccgtctgccccactgccacgatggaagtcaccttcaccggcagctggtatgacgagaccgccgagaaggaaggcgcgcagaagctcatcaagaacggctgcaagctcatcagccagcacgccgactccatgggcgctcccaccgcttgcgagaccgccggtgttcccgacgtttcctacaacggttccaccgaggccgcctgccccaacacctatctgatctcctcccgcatcgactgggctccctactatgagtacgccatcaccgctgccatgaacggcgaggccatcgacgctgactggaccggcactcttgcgaccggctctgtcgtgctgaccgacctgaacgagaacgttgctgccgagggcactgctgaggccattgccgatgcgaccgccaagctcgagagcggcgagctccacgtctttgactgctccaccttcaccgtggacggccagcctgtcacctcttacatggctgacgtcgacaccgatcccgactacacgcccgacaccgaggttgtccaggacggttatctggctgagtccaccgcccgttccgccccgtacttccagctcatgatcgacggcattgatctgctggatactaatttcggctaattgtttctgctactacatatcgggctgccttcgggcagcccgatatcttttttctttttatggcacttttcgctattttgctaaaaatttttgtgcgcttctaattttttttgtgtttttttctgttttacatttacaacgccgttcaattatgctaatatatgacttgtacaaatacaatgctgcggggttttcttcctgtgccctccagcggaaaaaggggtgaccgccttgggaactgcatgcgcagttaaaatggagaatgtcacgaagcggttcggcaaagtggtggcgaacaacgccatcaaccttgagctgcacgagggcgagatcctgtcgctgctcggcgaaaacggcagcggcaagacgacgctgatgaacatgctctccggcatctatttccccgacgaggggcaaatctacattcacggcgaacccgtcacgatcgcctcccccaaggatgcgttcgaacacggcatcggtatgatccaccagcacttcaagctcgttgatcttttcaccgcaacggagaatatcatcctcggccttgaaggcaagctcgacattgccgaagccagcaaaaaggtcaaagagatctgcgacaaatacgggttcgacatcgaccccaatcagaagatctacgacatgtccgtttcgcagaagcagaccgtcgagatcgtcaaggtgctctaccgcggggcggacatcctcattctggacgagccgaccgcagtgctcaccccgcaggagacggacaagctcttcgctatcatgcgaaacatgaaggccgacggcaagtccctcattatcatcacgcataagctgcacgaggtgctcgacgtgtccgaccgcgtggccgtgctgcgcaagggcgaatacgtcggtgacgtcgccaccaaggacgccgaccagcaatcgctgaccgacatgatggttggccacacggtgagcctgaacatcagccgccccgagccgaaggacgttgaaaagcgcctcgtcatcgaaggcctgacggcttacgacgagcttggcgtcaagcgtctggacgatgtctccttcaccatcaacgcgggcgaggtgctcggcatcgcgggcgtcgcaggcagcggccagcgcgagctgctcgagtccattgcgggcctctaccccgttgcctccggccatgttacgttctatccgcccgacggcggcaaggaaaaggagctcgtcggtctcgacccgatgaagatccgcaagagcggcatttcgatgtcgttcgtccccgaagaccgactcggcatgggtctcgtcggctcgatgggcatgacgggcaacatgatgctgcgctcctggcgcaagggtaagggtctgttccttgaccgcaaggatcccgaagcgctcgccaaccgcatctgggaagagctcggcgtcgtcacgcccagcacgtctttccccgtgcgccgcatgtccggcggcaacgtgcagaaggtgcttgtcggacgcgagatcgcccagtcccccgccgtgctgatgaccgcttacgccgtgcgcggcctggacatcaacacctcctataccatttacaacctgctgacagagcagaagatgcacggcgtcgccgtcgtttatgtcggcgaagacctcgacgtgctgcttgagctgtgcgaccgcatcgtcgttctctgcggcggtcaggtctccggcgtggtcgacgccagaaagaccgacaagcgcgaggtcggcgcactgatgacgctcgtgaggggaggcaacaaggatgaataagaaacagtcgctcttccacatcgccaagcgcgatacgctcccctggtacaaggccgttttgatccgcggcggcgcgatcgtgctcgctttgatcgtctgcgcgatcgtcacaacgctgctgacgggcgaaaatcccatcaaggtctactccacgatcctctacggcgcgttcggtacgtcgcgcaagagctgggtcacgttccataacctcgcgatcctgctcggcatctcgctcgcggtcacgcccgcgttcaagatgcgcttctggaacatcggtgccgagggtcaggtgctcatcggctgccttgccaccgcggcctgcatgatctgccttggcggcaagatccccaacggtcttctcatcgtcattatgatcgtcgcctccgtcgcggcaggcgcgctgtggggcttcctccccggtatcttcaaggccaagtggaacacgaacgaaacgctcttcacgctcatgatgaactacatcgcgacacagctcgccgcgttcttcatcatcgtgtgggaagtgcccaagggctcgggcaagatcggtatcatcaaccagaataccgaggccggctggctccccgttctcggcggccagcgctatctcctcccgatcctgcttgtggcgatcctcacgggcgttatgtacatctatctcaattacagcaagcacggctatgagatcgccgttgtcggtgagagccagcgcaccgcgagctatgccggcatcaaggtcgagcgtgtcatcgtgcgcacgatggtgctctccggcgcgatctgcggcctcatcggcctgctgctcaccgccggtacggaccacacgctgaccaccaccatcgtcggcggacgcggcttcacagcggtcatggtctcgtggatggccaagttcaaccccatcatgatgatcttcacgagccttcttatcgtggttctgagccgcggcgcgagcgagatctccagcgtgttcggcctaaaccactccttcgccgatatcctgacgggcatcatcctgttcttcatcatcggcagcgaattcttcatcacctacaaggtcagcctgcgcaagggcaaaaaggaggcgtgagcgatgtttgatcttgcttctttccttccccgtgcggtcatgcagggcattcccctgctctacggcagcaccggtgagatcctgacggaaaagtccggcaacctgaacctcggcattccgggcgtgatgtacgtcggcggtatctgcggcgtcatcggcgcgttcttctacgagcagtccaccccggctgccgacatgaacgcgttcctcgccatcggtatcccgatgctctgctcgcttttgggctcgcttctgatgggccttctctactgcctgctgactgttacgctgcgcgccaaccagaacgtcacgggtcttgcactcacgacgttcggcgtcggcatcggcaacttcttcggcggctcgctcatcaagctgaccgacagcgaggtcccctctatcgcgctgagtgcgacgagcgcctatttcagcaaatccctgaatgtcggcggctggttcggtcaggttttcctgtcctacggcttccttgcctacctcgccatcgtcatcgcattgttcgcgtcgtacctcctcaagcacacccgcacgggtcttcacctgcgcgccgtgggcgagagtgcggcgacggcggacgcagccggcatcaacgtgacgaagtacaaatacctcgccacctgcatcggcagcatgatcgctggtctcggcggcctgtattacgtcatggactacgcctgcggcgtctggtccaacaacgccttcggcgaccgcggctggctcgccatcgcgctcgtcatcttcacgatctggcgtccgaacgtcagcgtgctggcctccatcctgttcggcgggttctacatcctctatatcttcatccccaccggcaccaaccttgccatcaaggagctctacaagatgctcccctacgtcgtcacgctggtcgttctgatcatcgtgtcgctgcgcaagaagcgcgaggatcagccgcccgcatcgctgggtctgagctacttccgcgaagagagataaaaacacttaaaatgaaagcacccgatgggtgctttcattttagataggcttcagtgtttgtcgctcaccgctccaaacactgcaaagtgtcgctgcggacgcacatgtcgtcctccgcgacgaattctattttttgccgccgtgcgcggcggcaagtctgcgacgcttttttccacgcacgtgtcgcggcaaaaaacgatcaaattcatttgcgccgtgcgcggcgcaaaatagcgcgcgcatgtcgtcctccgcgacgaattccaatttatttcacgccgcgcggcgtgaaactctgcgaggcttttgagctgttttgccgctggaggcagcaaaatgcgcttcttgctatttttcactaaatctgcctgcgtttggcgcgggtctaagaggtattgctatgtctactctgctcattcaaaacattcgttcgctggtgtcgtgtgatgacgcggacacggtttatgaaaacgtcgatctgtatgctgaggatggattcatccgcgcgatcggtaagaatctgccgcaggaggcggaaaaggtgattgacgcgagccacatgctctgctaccccggccttgtcaacacgcaccatcatctctatcaggtcttttcccgcaacctgccggaagtacagaacatggagctcttcgactggctcaaaacgctctatgagatctggaaaaacctcgacgaggacgtcatccgcctctcgacgctcacgggccttggcgagctgatgaagcacggctgcacgacctgcttcgaccatcactatgtcttccctgcgggcgcgggcgacctcattggcgcgcagtttgccgcgtcggacgagatcggcgcgcgcatgtacgcctcgcgcggcagtatggatctctctgtcaaggacggcggcctgccgcccgacagcgtcgtgcagacggtcgacgagatcatggccgattctgcccgtgtcatcgagaaataccacgacaagtcgttcggcgcgatgcaccgcgttgcgctcgccccgtgctcgccgttctccgtgtctgccgaccttctgcgcgagagcgccgtgctcgcgcgagagtacggcgtgcgcctgcacacccacctgtgcgagacgaaggacgaagaacacttcatgctcgcgcgcgagggcgtccgcccgctcgagtacatggagcgcctcggctggacgggcagcgacatctggttcgctcacggcatccacttcaacgacgaggagctgcgcgtgctggcaaagacgcacaccggcgtggcgcactgcccgatctcgaacatgaagctcgcctccggcgtcgcccgcgtgcccgagatgctgaagctcggcgtgccggtcggcctcgcggttgacggttcagcctcgaacgacggctcatcgctgatggaggaactgcgcgtcgcgttcctgctgcaccgtttgaacagcagcaaagctgcccccagcggttacgacgtgctcaagatggcaacatgcggcagcgcggccatccttggccgcagcgacgacatcggctcgctcgaggtcggcaagtgctgcgacctcttcatgatcgactcgcgcaggctcgagctcgtcggctcgtgctttgaccccaaaagcgtgctcggcactgtcggcgtgcgcggacccgttgactacacagtcgttcagggccgcgtgacggtcgaccacggtcatcttgtcacagtcgacgaagaacagcttgcgcacgacgcggaggcgaagtgccgcgcgtatctgaaccgctgaggcggctgccatgaccgttgagatcatctgcggggacatctccgccctcccctcttccgaccatgcgaccgaacttctgccgctcacggacggcgacacgctgaccctctcctgcacaggcagcgacctgaaggccgcctaccgcgtcctgcgcgccatcatggactacggctatgagcacgcacagccgtcgcgcgtgcgtctaatttgcgcggacgaggcgtcgcgtagggcgtactccttccagtggaacatgtggttcgccgcggaaaagccaaaacacgaagattaaaaagaaaagacgagcgaattttcgctcgtctttttctcataaatagcggtccactttttgcaaaatcgtctcgtagcgctcggcgagctcctgctttgtctcgccgaaccgcccgtgaagctcctgccgcgaacggacaatggtctgcaacgcctcgtcgcgctcaatgcgcagccccgcggcgatctcctcgctcagctcgcccacgctggcaaaggccttcatcagcccaccctgcgttttgaaaaactcgtcgccgaagcgctcgcgcttcggatattttccgctgcggtaattgtcgatgacgacctcgtagcgtgccatggcgcgctgcaccgccgtctcccatgaaacgtacagctcgcgctgggcgttttcgccgaccacttgcatcacctccggcgcacggcagagctcttcgagctttgccgccatcgccgcggcgttttcctcgatgcaaaagccgtttcgcccgtcgcccacgccctcggacgcgcaggaatttcggatcatcacagtcgccgtaccgctggctgcggcctcgcgcacgacaaggccgttcgtgtcgaacgtcgacgggaagagaaacaggtcggatctgccataccacgcgcggatgatctcgcggtcagagatcgcacctgtgaaaaagcagcggtcggagagcttccgctcttccgcatagctgcggatctccgcgccgtctgcgccctcgccgacaaacaccatgcggaagtcgacatttttctcgcgcagcgttttcagcgcgtctaaaatgatgcggatacccttgtaccacatcagccgcccgacgaagagaaagaccggcacgttctgcggcaggtcatatctgcccgtcgccgcggcgatggcctcgtcagacgcccgcccgcgcggcacgtccacgccgttttccatcacgatgtagtcgccctcgtagccgagcgagcgcagattttcccccgctccgcggctcacgacccagacctcatcgcagcttgcgatgttctgcaccagcgcgcgaatggcgctctcctgcaagagcttgccgcgcacagccttggcgatgtcgacatcgtacttcgtgtgatacgtcagcacgagcggcgcggcgaccacggcgcgcagcgagcgcgccagcaggcacgacgtgatgggacaatgcgtgtgcatcagttcgaccttctgctccgtcagcacgcgcgcggtctcgggtgaaaacggatagcccgccacgtagccgagcttcttgcgcgtgtcgatgctcgggtagcgcagcacggggaatgggaacgcgctgtcgtctgcgccgggcattgtcggcgtgacgacaatggcgttttcgccgcttttcgtgatgttcttcgcgtagttcacgacggcgttcgccacgccgtcgatctcgggcggaaaggaatcgttcaaaaggcagatggttctcttgtccatgccattgccctcctgttgctttttttcggcagcgccgaagtgtgattcagtatatcatttttcgtgcgaagatggtatactatgtgtgaattttacgcgccgtttacttcgggaaaggagaacttccatgcgcattctcacatacaccgtgacgccggaggaggacggccgcatggtcaaaggcatcctgcgcggcagtcttcagctttcctacacgctgctcaaaagcctcaaatggcgcgaaaacgccattttattgaacggacagagcgtccatgtcaacacaatcgtccacgcgggcgacaccgtcagcgtcgtcctcagcgagcgtacgccgcgtgaggacttgtactgcgcaaatgcggcaaagcccgacatcgtctacgaggacgacgacctgctcgtgctcaacaagcctgcgggcgtcgccatgcacccgaagtcgggtgacgcctccgcgccgagccttgcagcgatgctgacgagttatctcggcgagggcagcgtgccgcattttgtgagcaggcttgacaaagggacgtctggcctcctcatcgccgcgaaaaatggctatgtgcacgaccgcctgcgccgcgcactgcactcaagcgatctgcggcgcgagtaccgcgctgttgccgtcggcagagttgaaccgccgtgcggcgtcatcgacgcgccgatcggccgcgcggagggctccatcatccgccgctgcgtgcgcgcggacggacttcagagcctcacggagtacgagactctgcaagtaaacgaccgcttcacgctcctgcgcctgcgcccacagacgggtcgcacgcatcagcttcgcgtccacatggcatacctcggtcatcccctcgcgggcgactggctctacggcacggaggacaaaaccctcatcgcccgccccgcgctgcactcgtacgagctgtggttcacccagccggtcaccggacaggaattacactttacagcgcctatcccgcaggatatgcagcgcttgatggaatgaaaaagcaccgcacaaaggcggtgcttttttcagacgtgtggtaaaataccataggtctataaccaatttttacttttccttgtagtacaaacggcagtggcagtagccctcgaattcggggtcagcgatctggtcgcggaactccttgcacatgcagacgttgtcctcgatcttctgcaagcggcaggggcactgtaaatcgcgctttaagagcgcggcgcgcaggcgggcgacgacctccgcgtcttcgttgtatcgaattctcatgccttgcacttctccagcatcgccttgatgtcggccttatcgtgcacaccgaccatgccgctcagcgtgtggcggtcctgcacgacggcgagcgtcgggatggagtcgataccgaacatcgaagcgaggttcggctgctcgtcgacgttgaccttgcagaacttgaccttgtcctcttccccgttgagctcggcaaagacaggcgccatcatcttgcacggctggcaccactcggcccagaagtcgatgatgatgaggcccggatcgtcgagcacctcagtctggaagttttcttccgtcagcgtgacgatatcggtgaacgtgcgcgtctcgacgtacggctcgtggaagccgccgccacaaccgccgcagccaccgccgcatgcactgcatccggccccgcagcccgcgccgcagccgccggcactcgcgctgctgtcgccggtcatcagttccagattgccctggagaaagctgtcgaccgcctcgtcggcatttccggtcacgccggaaatgagcagcatatgcgcgttgtcgatggcggcgtgcgcaccctcgccgatattcccgcagatgacgagatcgacgccgcgggatttgagcccgcccgcgaccttctcgtggttggtatcgtcaaacgtgacggtctctttttcgatgggcttgatatcctcgatggtgtaaacggtaaactccgtggcatggccgaaatgctgcatcacttcgccattctcgcagggaattgcaattttcatagtatgttcttcctttccggtctattgcttcggcggcagcgccgccatatcgagccgagagtagtttaccacgcttttgtgcgccgtacaaccggaaatttgtaaacaaaccgtaggcgggt

SEQ ID NO: 10116 - DNA, 65053 bp, Unknown
  gut microbiota DNA sequence
gattcgtggagtcttgcaaagcaaagcgggatttacttcgcaattgcttgcgtgattatgttccctatctcttattttgccaactggatgccccattcgaccgctggaattctgtcttatgtaggcatattcgtagcgatcttcctcgctgcttgggtaactcagtattctgtgtggaaaaggaagatcaagaaaatgaacgaaggcattaaagataataacgatatgaactgatcccgccgatctgcaccctgcgtcttgttttaacagcagaataaaccacatacatagccgcttggttttcaaaaaaatcaggcggctatttctattttgaaggaggtgttcgctatgagcgtaacagattacaatgctcgcctttatgagaaaataaaagccgaacaggacaaataccgccacctccaccatgacgggtctgggcatcgtgcagggtcatagcggtactacctttgatcccgaggcccccatcacgcgggctcagtttgccgccatttgcgcccgatttgataccggtgccggcggcaccacccagaccttctccgacatcagcggacactgggccgaggagtatatccggcgagttgccgggctgggctggatcaagggcttcgaggacggcaccttccgcccggatgcctacatcacccgtgcccaggctatgaccatgatcaaccgggtgctgaaccgcatccccgaggagaacagcgacctgccggcaggcatgaacacctggccggactgcaaccccggcgactggttctacctggcggtccaggaggccaccaactcccacgcgttccagcacaagacaggaaactacgagacctggaccggcatgaacaaaaaaaccgactggacccggtatgagcactgatattgggcaaaatttcagaaatacacatatcggttgctgctcctaaataaaagcacaagcggcgcaccagatctggtgcgccgcttgtgcttttgccttgctctaaacgattcttttaaatgttgcccttatgcgagggtggctatgggccagcctctcttttttgaagtcataatagcatcgtgaccccattatcttcgatcccgatctccacgaccggcgcgccggggtcgtactcgccgtcgagcgtccagggaatgtcctcggccgtctccgccgtcacgtgcttgacgtggcggaagatgagcccctcggagtcgtagtagtccttgttgatgagcgctaaaatgagcgcctgcatcgcagccggcgttctcggcacgggcacgagcagcagctcgaacttgccgtcgtcgaacgacacctcgtcgggcgagagcttcatcagccccgcgatcgacgtcgaattgctgatcgcaccgaagaggtattccccatcgaagacctcgccgtccgccgtgatcttcatgcggtacgggcagagcgtgtcgagattcttgacgccctcgagtaagtaggcaaagtgcccgaacatattcttgatatcctgctggacggtgtaggtcgtttttgtgaacgcgccgaacgacgcgacatagacgaagttccgctcgccgaatttgcccacatcgagagatctcggcttcatgcgcatggcggaggccgccgcctcggcgggattcgacgagatattcaggctcgcggcaaagtcgttcgtgctgccgccgggcagatagctcacgagcgggcggtattctcgcggaatgcgcatcacaccgttcaccgtttcgttgagcgtgccgtcgccgccgtggcagacgacgacgtcgaattccggcccgagcgattcggcgagctccgtcgcttctccgcggtgcgtggtcttgcgcacggagacgagatagcccgcctcggaatagatcgcggcggcgtcaaacagcggtgcgagggatttggtctttcccgcgcggggattgacgataaagagcagctttttgtcgtccatgggttcctcctcgtttgctcttcacagcatcagaccggcaaagcaccctgcgccctgtcggttaaaatcaccctctgccaaaaaagtcaagttctgttcatcttcattaacagagagtaaagattatcataacacacgaaatgagcggttgcaattcccagcaaaaaatagtaagctgtttttggtatctttttagcagtcatttaacgccttttgcccaaaaaaagggggagcccatgaagcagaacaaaacctatcttcacctcggcgtaacgctgatcgtctcggcctgcgcggtgctgatgttttacgacacgtttttccagtcccgcgtgctgctggactttttcgacaagctgatgagcgtgctctcgccggtcatctacggccttgcgttcgcgtaccttctcgcccccatcgtcgactttttcgaccggtatatccaaaaggggctgccgaaggtcaagtcctcgctcgtccgggggctgagcatcctcgtcacgtggatctgcgtcatcgccctcatctacctgatgttcagcatcctcatccccgagctggtcgacagcacgaagacactggccgacaactttgaaagctattataaaaccgtctacaactgggtcaacagccttgtggagaatcaggcgatcttctccgacgacatctactccgaccagctgctctccgcactcaacggctactacgataagctcgtcaagtgggtcaccgacacggtcatcccgcaggcgcaggtcgcgatcgtcgccgtgaccggcggcatctggagcgtcgtcatcttcctcaagaaccttctcatcggcatgatgatctcggtctatctgctcgcgcgcaaggagagctttgccaagcagtcgaagaagatcctctacgccattctgcccgaaacgccgtaccgccgcacgctgcacgccgtggccgaggctgaccgtatcttcagcggcttcgtgcgcggaaagctgctcgactcgctcatcatcggcatcctctgcttcatctgctgctcgatcctcaagttcccgtatacgccaattatttcggtgttcgtgggcgtgacgaacatcattccgatcttcggcccgttcctcggcgccattccgagcgcattcctcatcctgctcgtcagccccaagcagtgcctttatttcattctcttcatcatcgcattgcagcagtttgacggcaatattctggggccgaagatcctcggcaaatccaccggcatttcgagcttctgggtcatcgtggccatcgtggtcggcggcggcttcggcggggtgctgggcatgttcctcggcgttccgatcttcgcgtgcatcagctcgcttgtgaactggttcacgaaccgcagcctcacgaaaaagggcgtgacggacgacgcgatgttcgcccccgcgccgctcgcctctccggatgaaaaaaaggactgatctccccatgaaaaccctgtaccgtgacaacaaaggactgcaccgctggcttttcgcctgcggcgcagtccttgtgcttttctatcttttccgcggaaaccgcgcggccgtcaatttctgggtctattcggtcacgctgcccttcgagcaattcttaggccgcgcgtgcgcggcgctgccgttttcggtcgcggagcttctgtatgtgctcgcggcgatcacggcggtcgtgctgctcgtgctgatggtgcgctatcttataaagtcgcgccaaaaagggcgcgccgcgtaccgctgcgcgctcttcgtgctcgacttgtttctcacggtctgcgccgcgttctcgcttctctggggcgcaaactactatgcggacgacttctgcgacagaagcggcctttcgcccgagcccgtcgcgtatgaagacttagtccgcgtcacgcagtatttcgcggaccatcttgccgaggcgtcgacgcacatcgcgcgcgacgaaaacggcctcttcaccgccgaccggcaggagattcttaactacgccgacacggtgtatgactgcctgtacgacgaatttccgttcctcgacatgccggaccagaagcccaagggcattttcttttcgaagatcatgagcgcgatgaacttcacgggcttctactttccgttcacgggcgagtcaaacgtgaacatggactcgcccgcgatgctgctggcctcgacctgcgcgcacgagctctcgcaccagcgcgggatttcgtccgagcagcaaagcaacttccttgcggtcctcgcctgcacgcgctgcgacgacgcaaactacaactatgcgggctggatgctcggctacattcacctcggcaacgcgctgtaccgcgtcgaccccgacgcatggcagcagattcgcgattcgcttcccgacgagatcgtgctcgatctgcgctgcaacagcgcctactgggcgcagtacaagggcctcacggccaccgtcacccagtcgctcaatgataagatgatcaaatcctacggcgatgaactcggcacgcagagctacggtgcggtcgtcgacctgctcgtgaattactacgcctgagcgctgctcgtctcgcggtacgatttcaagaactctctcgtccgctcctgctgcgggttttcgaagacctgctcggggctgccctgctccacgatgacgccgccgtctaaaaacacgacgcggtcgctcacggcgcgggcaaagggcatttcgtgcgtcacgatgaccatcgtcatgtgctcgtcggcaagagagcggatgacgcgcagcacctcgccggtcaaaagcggatcgagcgcggaggtcggctcgtcgaaaaagagaatttccggcttcatcgcgagcgcgcgggcgatagccacgcgctgctgctgcccgcccgagagctgatagggataggcgttttccttgccttttagtcccattttgtcgagcagcgccatggcctcggcctcgacctcggctctatcgcgcttttgcaccaagaccggcgcgtcgcagacgtttttcagcactgtgtagtgcgggaagaggtcaaactgctggaacaccagcccgaactgccgccgcacctgcgcgagcgcggcttttccggcgtagacgcttttgccgttttcctcgcgcgcggcgacgttttcgccatacgcgagcgtgccggaatccatcgtttcaagcagcgtcgcgcagcgcagcatcgtcgacttgccaccgcccgaggggccgatgatcgacacgacctcgcccttttccaccttgagcgacacgccctttaagacctcgagcaagccgaacgcctttttagcgttccgcatttcaaaaactgccattgctctcccctccctttagcggtaatagcgcagcgcctgctcccatttttccatggcgaaggcgaccacatagttgaagacatagtagaagacacccgccgccaccagcgccagcatgcccggcgtattcggcgaggcaacgatctgcttggcgcgcgtgaacatctccaccgtgccgatgacggacgcgagcgacgtgtccttgacgagcgtgatgacctcgttcgtcaccgcagggatgacgcgcttgaccatctgcggcaggatgatcttgaaaaatgtctgtgccttggtgtagcccagcacctgcgcggcctcatactgcccgcgcgggatggactcgatgccgccgcggtagatctcggcaaaatacgccgcatagttgatgacaaacgcgacgatgaccgccgtgaagcgccagttgcccggcaccgtgacgccaagcaggagcttcggcccgtagaagacgaccatcagctgcagcatcagcggcgttccgcgcatgatggagatatacgccttgatgaagccgcgcagcggcgtcaatctgctacggcggccaaacatcaccgcaaggcccagcggcatcgagaatagcagcgtcagcacgaagatcaaaagcgatgtgacaaagccctcggataatagcgaaagcatcgtggatacagtcatggaatgattctcccttattcggtcataagcgggaaaaagcgggggctttcgcccccgctccctccctgagaagaggatgggcgcctatgagttataattggtttttacagtcgcccgaggtaaacgtttttacttgttgataaggcacaggctgtcgagcacgagaccctgatcgacgtacttctgcgcgatctccagcatggtaccgtcctcggccatcttgagaagctcggcgttcaccgcgtcgcgcagctcggtgttgcccttgaggaagccgatggcgtactgctcggtggagaggggctcgtcaaggatgacgtagtcgccgtcgttgttcgcgatctgatactgcgcaacgccgaggtcagcggccacggcgtccaccgtgccctgggcgaggtccataaagcccatgttgtagtcgcccagctccacgacccccttgagcgacgccttgaagtcctcgttttcgttgatcgcgtcgaccgcggaggacgcggcctgcgccatcacgctcttaccggcgaggtccgcgagcgaggtgatgccgctgtcggccttcacgaccatcacgatggagttatccacataggggtcggagaacgtgtagtcattttcgcggccggtgtaggtaaagccgttccagatgcagttgatcgtgccgctcgaaagctcggcgtccttgctgttccagtcgatggccacggcctcgtactcccagccgaggcgcgcgcacagctccttggccattgcaaggtcaaagccgtcgtacgtgccgtcggcggcgatgaagccgaacggcggaaactcggcatcaaagccgacgatcagcttttgcgtctcgccgccctgcgtgtcctgcgcatcaccggtatcgtcggcggtgtcgttcttgctgccgcaggcggcaagggccagtaccatcacggcggcaagcgccatggctaagaattttttcatcgtttcttcctcctgtaagttccggcgctcggccgtttgatttagtgtggtaacacgataacataataacgagtgacagtaaatgcatgcactttacaaagatggagcggtaaagcgaatcgttttttgccgctttccacagttttcacggtttctggacggcagcgcggtgtttgcctcccgtttttccccgctttgcgcttgtttctttttttgccgtgtgctacaatgcaagcaagaatttttgatcgcaggaggccatttttatgctgtctatcgacgtatcccatgccgtatcgtttctctcgttgccgtatgaagcggcgctgcgcccgcgtctcgagcgcgcggcgggctggctgcaaaacggcggcggaaagggctctgatttcatcggctgggtcacgctcccgcgcgactatgacaaggatgagtacgcccgcatcctcgccgcggcgaagaagattcagggcgattccaaggcgctcgtcgtcatcggcatcggcggcagctatctcggcgcgcgcggcgtcatcgaatgcctctgctccccgaactataacttaaagaagaagtccacgccgaacatctactttatcggcaacggcctctcctccgacgcgctgcgcgaggtgacggagctcatcggcgacgacgatttctccgtcaacgtcatctcgaagtccggcacgacgaccgagcccgccgtcgcgttccgcttcttccgcgaaaagctcgaaaagaaatacggcaaggccgaagccgcgaagcgcatctacgccacgaccgacgcgcataagggcgcgctcaagtccctcgccgatcaggagggatacgaggaattcgtcgtgcccgacaacatcggcggacgctacagcgtgctcaccgccgttggtcttctccccatcgccgtcgcgggcgttgatctggttgaactcatgggcggtgcgcaggagatgatgtcgctctgcgcgaaaaacgattacagcaatcccgcgtggcagtacgccgccatgcgccacgagctctaccgtcagggcaagaaggtggagcttctcgcgtgcttcgagcccgcgttccgcttcatggccgagtggtggaagcagctctacggcgagagcgagggcaaggaggaaaagggcctcttccccgcgagcgtcgacttcaccgcagacctgcactcgatgggccagtacatccagcagggcgagcgtatgctgatggagaccgttgtgcgctttacgcccgcggagcagcagatggtcgttccctttgacgaagtcaatggcgacggactcaacttccttgcgggaaagacgatggacttcatcaaccgtcaggccatggacgggacgctgctcgcccatgtcgagggcggcgtgccgaacatcattttgaacctcgatgagaacaacgcccgcacgatgggccagctcatttacttctttgaatacgcctgcgggctgagcggatacctcctcggcgtgaatcccttcgaccagccgggcgtggaggcctataaaaagaacatgttcgcgctgctcggcaagcccggatacgaggaaatgggcgaggagctgcgtaagcgcctgcgctgaattttttgaataaacctgaaactttccattcagcattgcaaatttgtttcatttatgctatgctgatgccatcagaaagaccatcccccgcaaaagaggcggggatctattgaaaggagtgatttctatggtcagactcatcatgggtgaaaagggcaccggtaagaccaagaagctgatcgaaatgatcaataccactgcgcaggaggataacggcagcgtcgtctgcgtcgaagcaaagtctaccatgacctttgacctgcactatcacgttcgtctgatctctgcctacgagtacgacctgtccaactacgaggccctgcgcggcttcctgttcggcctgtacgcgggcaattatgatatttcccacatcttcatcgacaacctgttcaagatcaccggcggcgagtgcaaccaggcggccgacgatttcctgaacgagctcgagcgcttcagcaacgccaccggcgtcaagttcaccatctccgtctccggcgaccccgccctcgccaccgacggcatgcagaagtatctgtaaattttactttcgcaaaaataagaagaacgcctcggaagaggcgttcttctttctttgctgaaaggcaggatttttggcagcgcggtgctctgcactttgttccctgcgtgccgcagggtgcgcagtaagggggatactctctttctcgaaagagagtatcccccttgaacccccgagaaaaagacgaggggtcttgcccctcgaccccgcttacattgacagtctcttgcttgaagagctacaatgcttgccaaatcaggtgcggtgtacatggcttcgccatgagtccctgcgagtcgttaccggtatcaaccgcgccttactaccgtgagacgcgtgtgacgggagcacggcggcagacatcttgcgggcgcggcattgctgcgctcgccgcgcgttggatgaaacaaatgttgcaatttgtcggaacttatgatacggtaataacaaggcgctgcacgaacggcaggcggttggctacatcctccgagaggaggtggtagatatgcctattacgatcacgttacatatccttggatatgtggttacgatccgtataaaaagcgaaaaccgccactcggccaagtgacggtttctcattttgagtcttcctaacttcccgggctgaccgcttgtcgcagcgccctttctacgcccattatagcaaattctcccgcgctgtcaagcgacagtgcgggctttgtttttatctgccttatttatgccaaatctcgcagctgtccggtgcgtatttctataagctgcggaccgttcacagaaaagaacactgttgaaatagaaaagcagcaatcccacctgcggcgagcgaagcaatgtcgcccgcacgcagtccgccgccgtgctaccgtcactcgcgcctcacggagtagggcgcggttgatatcggcaacgaatcgcagagattcgtggcgaagccacgtacaccgcacccgattccgcaggccgcgcagctcttcaagtgccgatctgccaatgtgcggggtcgaggggcaagacccctcgtcctttctctcgggggttcaagggggatactctctttctcgaaagagagtatccccctttatccgtgcagcgctaagcgctgctctccccgcggcaccagtgccgcagcttcctttgcacttgtgcgaaaaagagaaaaaaggaaacaaaaagcccccgccgggagaggcgagggcttcttgctgtgttgtgtgtgtatttttaggagggagaaaatcacatcgggggggagttcccctttgcaagtattaagataccagtcaatcttggctaaagtttgaatcggttgtaaacaaattatgaataccaccggaaattttgcacatcttcagcccatgagcgcgcagagctcggaaaaatcgagcggctggagcgcaaggtcgatgccgtagccgatgacgcgggaaagctcgcggatctgcgcgtcgatgtcgcgcgtcgtgaccataacggtctcgtggccgcgcagggcggcgggatcgacgtccgactttccggcctcttcgagcacgtcgagcgtcagcgtcgccgcgtcgacgaccgtgggaacgccgatggcgtagaccggcacgccgagcgtgtcgcggctgaggggacacctgtgattgcccacgccgctgcctgggacgatgcccgtgtcagagagctgcaccgtggagcagagccgcatgagcgagcgggacgcgagcgcgtcgatcgcgatgaccgcgtcgggctgcaccgcgcgcaccgtgccgcgcagcgtctccatcgcctcaatgcccgtccgtcccaaaacccccggtgtcagcacgctgacagagcaaaatgcggaaaacgcgccgttttgccgcaggtggcgcgtcacgagcacgtgctccgcactcctcggcccgatggcgtccggcgtcatgctcgcgttgccgagtcccgcgacgagcacgcttttcacattctcgccgagcagcgccctgagttccgcccccacggcgcgcgacgcgcgctcgagcagatcgtccgcgtttttttgcagcggcgagaggtcgagcgtcacataccgcccgcggggcttgccaagctggcgcgccgcgccctcggtgtcgatgcgcacgctcgtcacgctgcacccgcggcgaaaaaccgtccggctgtccacgccggagagcgtctgcgcgcggcttctcgcgcagagcagctcgtgcgcctccatggcaagatcggtgcggtattggagcattttgcctctctccttttactaaatcttgttttctttccctattttatccacaaagttttgtgtcatacaaaaaaatcagaaaatttcgaaaaaatgcttgcaatttcttgcattctttgctaaaataccattctgcacggtggattttttgtccgccggcgcgaattccaaccggaggaggtgtttggtttgccgaatattaagtctgccaagaagcgcgttcaggtgtctggtgtgcgtaatgagcgcaacaaggccgacaagtccgcactgaagaccgcactcaagaagttcgaggcggctgccgctgaaggcaatcgcaccgaggccgagagcgcttacaaggtcgcagtgaagtctgtcgataaggctgctgctaagggtattctgcacaagaataacgccgcgcacaagaagagcgcgctgaccctgaagctcaacagcgttggctaatcgagcgaaaatgagagccatcctttcggatggctctttttttgtgcccaaaggggcactggctgatccgcgcgatgcgcggaaccgggaaagcagcgccagtggcgctgcacggagaagggggatactctctttctcgaaagagagtatcccccttaaaccccgagagaaaggacgaggggccttccccctcgaccccgctgcattggcagttttaggcttgaagagctacgcggcctgcggaatcgggtgcggtgtacgtggcttcgccacgggtccctacgtttcgtcaccactcgcaaccgcgccttacttcgtgaggcgcgagtgacgatagcacggcggcggactgcctgctggcggcattgctgcgctcgccgcgggacgggggcaaaaaacgaccgcgtcagcggtcgttttcttctattggaatctcaccgtgctcctgttcgaaagctgcgatgcggcgcttgatcatctgctccagttcacggtttttggtgcgtccctcgtattcagcgatatatccgagcttttccagcagcaccggatcggtgcgcagggtgtaacgactttttgaatccatttgccaacctccgtgacgaagtattgacaaaattttagcgtcaaattatactaaaaagaaaaagtgacgcaataatgacgcataaaagggggaaataaaatgacaacttatcgaaacctttaccacggcatggtgcgcagcatgagcgaggccattgatctctacgacgagggcaaaggcatccttgcccgcgaagtcctgaaaaaagccctgctggacgcagaagagcaaatcatcgcgcaagatatcattcccgacgaacccatcaacagtaccgactcagcgaaggactaaaaaagaagcagccctgagcgcggcgagcaaagcaatgccgcccccgcaggcagtctgccgccattctctcgtcacacgcgcctcacgatagtaaggcgcggttgatactggtaacgattcgcagagacccgtggcgaagccacgtacaccgcacccgatcccgcaggccgcgcagctcttcgagcctcaatctcgcaatgtagcggggtcgaggggcaagacccctcgcgttctcttgggggatttaaagggggccattctctcacgtgagagaatggccccctttgttcgcacccctgcggcacgcagggactaagatgcagcgctgcgcgctgcttactttttgttaggattataataatccgtctcctccggcaggacgatcggcagcccgttctgatacaccggaagcgtctggaacttgaatctcgacaccttgtgcttgcggtcgatctgctccttgatggcggggtcgacctcgcccttgcggatgtactcgttcaccgcgtggtaggtaaagccgaggttgtcctcgtccgtcttgccggtcaggccgtcggacggcggcttgatgaggaagcgctcgggcagacccagctctgcgcccagcgcgatgacctcctcggtcgtgtacatgccgagcggcgagaacgcgcccgcgctgtcgccgtagatcgtgcagtagccgacccagtcctcggagaggttcgaggtgttgatgacgatgccgccctcctcgctctgcgcgatggcgtacagcgtcgccatgcggatgcgggacggcaggttcaccttcgtctggcggctcgcgtcgatgcccacgcgcgccatctcgtcgagaatgccgctcgtgccgccgtgaatattgaacgtgtagtggcggatgttcagcacgtcgacaaggccgttggaatagtcgatgtccggctgcacgccgtcgggcatcagcacgccgacgacattctcgcgaccgtaggccgccacgctcagcgccgccgtgacggagctgtccttgccgcccgaaatgccgatgacggcggtcttgcctccgcaggccttcatctgcgcgcgcatccagtcgagaaggcccggaagctgctgctttgcgttgaattctgccatagtcttttgctccttcatattacttcagcaaagcgggaaggctcccctccctgctgagaaaaaatttgcttttgttgtaccacacttccgctaagctttcaagtacccttcggcctgctttaaaaacatttcccgatattttccgttctgcgccatcagctccgcgtgcgtgccggattctatgattcttccatcggagagaagataaattcggtccgcgtccacgaccgtggagagccggtgcgcgaccataacggtggtcgtcggcgagcggtcgaagatcagctttgcgatgcggtactcggcgatcggatccagcgcgctggacggctcgtcgaggatgagcagcccaaattcgctgtgcagcagccgcgtcaggcataggcgctgcgcgtctccgcccgagagcaccgcgccgttttcgtcgaactccttcgtgacctgcgcgtccagagaaagccgcaggccgacctcctcaaggcaggatttgagccgcgcatcgtccgcgtcggcgtaggccgtcatattttcgcggacagacagcgcgtacaggcgggactgctgaaacgcgatgccgatcctgccgcgcagcgtgctcacgtcatagtccgtaattgggcggtcgttgatctgcaccgttcctccgtccgcgtcgtacaggcggagcaggagctttgtgagcgtcgtcttccccgcgccattttcgccgacgatggcaatcttttctccgggcgcgatggcaagactcagatcacggatggcaaactcatcgctgccgccgtagcggtaggacacatggtcgaatcggacggaaaacgggccgtctgacgctttttcgccgtctgtcgacgcttcgatggtcgaatctgtgtcgaaaaagcgctgcaccttctgcgcgtaggcaacgcctaaggcgacctgcgagctccaccagccgagcgcgttgagcgcctccttgagcgcgagcgacgaggcgatcagcgtcgcatagacgccaatgccgccgatattgcctgacatcacgccccatgcgacatagactggcacggcaaacgtagtgccgagctgcgcgaggttcaccagaatatcggtcaaaaattcctttgcgccgtattttcgatagatcgcggccctgctcttcacagagccgtcgaacagcgaaaaaagcggctttttgatgtttgacgcgcgcaggtctgcgaccgccgtatgatcaaaaaacagccgtcgcagatagtcagccttccgctggtcgttgaccatggccgtctcacgctctacggacaccctgctccagtaaatttgcgcatacgcgacaaacgcagagcagcccagaacgatgagcagcagcgcaacgccctgcgacgcgatcagcgcgccgtagacaatgcatttcgcgacgccgctcaaaagcgagaagagattttgcagcgtctccgacgactgcgaggcaaatttctccgtcgttagcttgtagctgtcgaaatagctcggatcgtcaaagtgccggtagtcgaccatcagggctttttcgtagatcgaccgctcgatcgtcccctcgatctcctgctttttccaccggaggtaaaaatcctcgtacgccgcgtggagcagatcaagcgccagcgcgagcaaaaggtatgtcaggcccgtcaaaaatgccgcttcaaacggctttcccgcttcgatcatttcgatcaccgcctgcgccagcgtcgcggaaaaataccccgccgccggcacaaacagcaccgatgagataaacgagccgaccattaaggtcttgccgtacttccaccagggcgctaaaaggaagcaaatgctgccccagccctgcctgagctttccaaccgtcttctccggaatcaaccttctttctgtaattgtcgttggttttattcttacttaaactgattcaccgtcgcggcattattttcccacgcggcaggccgcgcgggagccctgttttattccatgtcttgcggcggcgaagtgaatccgccgctcgcgccgccggacttccggcgaaaggccacgctatctcttacttaaacttgtgccactcattaacagccatctcatcgcagcggttgttgtactcattctccgcgtggcctttgacccagtggtagtgcatttcgtgccgggcgatgagggacaagagctgctcccacaaatcgacgttcagcgcaggctttttgtcgcttttgacccagccgcgctgcttccagccgtagacccagcgcttttccagcgcgtcgatgacgtagcgcgagtcggaatagagctccacgacgcacggctcttttaagagccgcagcgcctcgatgacggcggtgagctccatgcggttgttcgtcgtgctcgcctcgccgccggagagctcgcgctcgtgcgcgccgtatttgagcaccgcgccccagccgccggggccggggttgcctgagcacgcgccgtcggtatagataatgacctgtttcatgcgtttcctcaataagagctgatctcgagcgatgcatcgtcctcgcccggcgtgatcgaacgaatttcgaccgtgtacttcatttccggcgagacgacgatctcgacgcggtcgccgacctttttccccaggatggccttgccgacgggcgattccttgctgatgaggcccttgagcgcgttctgccgcagggtggtcacgagctggatgttctgctctttccccagtttttcgttatagagcgccacgtggtcaaaaaggccgacggtgccctctttttcgttcacttcgatgaccttcgccgtcgcgatcatgcgctccaagtaacggatgcggctctcgttgcggtttttctcctgcttggcgaccttgtactcgtagttttcgctcaagtcgccgaacgcgcgcgccgtctgcacatcttcgatgagcttggggcgaagctccaaacggcggtgctccagctctgccttcatcttgtcaatgtcgacctgtgtcagttcgtcatacatggtgtgttcgcttccttttttgctcaataactgccgctctgcgcgtgctgacgcttgacgcgcgcgacgcgctgggcgtattcctcgcggtccagaatgcccgcgtcatataagaccttcaaactctcaagccggtcctcgcagctgtccatgtggacagaatgcacctcgccgctgtcggcctgcttcctgcgcgcgatctcccagcgcttttcgctgtgtgcgcgctcatcggcgtggcgctgctcgtttctctcccactcgtcggcgcggtgctgcttgtggagcgccttgatctctgtcgggctcgggcgctttttttccgtctgcccgcgcagcgcatcaagatcctcggctgtgcgctttgcctttttgatgagctcgtcgggcgatgccgaaatgctgcccgtttcccgatcattgacctttttgtcctcgttggcgacagccgccttaaaccaccagacaagtgcgatgataataaggatcaaaacttctcccattgtccgcgctcctttctcttacagccggtccagaatgtccctgcgtttttcctgatactcctcttccgtaatgaggcggcggtcgtaaagggtctgcaactcctcgagccgcacctccgcatcggattttctttcctttgcaccgtcgtccgtctcgtcggtgatctcgtagccgccgttgtacttcacaacgcccgccgccagcagaaaattgtagatgcccatgccgaaggccatcaggcaccagatggccttgaagccgatcatcgcgccgatgctcggaatggtaaacaggccgaacacgcccatcgcgcacgcgatgacgcccgacagaatgctcgcgcttttgctgggcttatagtggatgtttcttctcatggtgacctccctttattttcttttctctttcaaaggaaatgcagcgcgtcacgctgctgcatagcacaccccccattttctttcccgagaaagaaaacgggcggtgtgaccgtccaaaagaaaggcgtctgcattgtatgtcttcccttgaacatcctttttgcctgcggattgcactgcctgccaagtgtcgtatctaaacgacttggtttgcttctatctccgctgtcgctctgcctgcgtatcggcagtctccatcaatttccgtctatttcggatatactactgtacttcattatagtggacagaagcgtttctttccagcaaattcaagtttacatgcagagtttttccgcaagtttggtgttacacaccgtgttctgcctttcggcagaccaattcgtccagtgaaagatcataaaaatcggccagcgcaatgagcgttgacatccgcggttcactttttccgtattcatacgcctgataagcgcggacggtcacaccgattgacaacgcaacatcgctttgttttagcccgcgctcctgtctcagttttaagatatattcgggaaaattcatttctgtttcctattgacatgaagttttcttcgtattacaataaaggaaacatgaagaaaacttcgtttcttgttaaggttattgtatgctgcatctttacgaatccctgttccgtgccggatatggcgaacatccggaacgctttttgtcaaaggacgaactcgacgattatcgggcatccttgtcctattacaattcacagtatcttgaattgctcgccatgcttaacaccgaacagtccgttctcttcaaaaaattacaggacaatcgctctgacattatcggtcttgagcgcgacgcttcttttcgctgcggcctgtgtgtcggcctaaagctcggcagtctttcttctcttctgctctcatcaatgcggcgagcgaagcaatgccgctatttcgcaagcagtctgccgccgggctaccgtcactcgcgcctcacgacagtaaggcgcggttgctgtcaggtcgcgactcgtagggattcatggcgaagccatgtacaccgcacctgattacccgcaaggggtatgccacatccgtaaggcagcagagctgccaacggctgtgcaatgcgcagcgtgtgcagtcattcaagctgcaaacccgcaatgtgcggggtcaaggggcaaggccccttgcgttctcttgggggtccaagggggccattctctcatgtgagagaatgaccccctttcccgtgcagcgccaaaggcgctgccacccctccgcgcgacgcgcggaaaagagggccgaggccttacgcctcgtcatcctcctcatgctctgtgagcgccatggaaatgacgctgtctccctcttccttgaagcgcatgacgatcacgccctgcgtggctctgccagtggtacggatcgcctcgaccggtgtgcggatgaggatacccgcgcgcgtgacgagcagcagatcctcgctgccgtccacgaccttgacgccgacgatgccgccggtcttctcggtcaccatgtagttcttgatgccgaggccgccgcggttcgtgatgcggtattcctcgaccggcgtcttcttgccgtagcccttttcggtgatggtcaggacttccttgccctcctgggcgcgggcggcgccgacgacatagtcgccctcgcgcagcttgatgccgcgcacgccgaccgccgtgcggcccatcgcacggacatcggtctcgtcaaagacgaccgccatgccgtcgtgcgtggcgatcagaatcttctgctcgccgtccgtctcgcgcacgctcaccagctcgtcgccctcgtcgaggttcagcgcgcggatgccgttgttgcgcaggttcttaagcgtttcgaccggcagacgcttcaccgtgccgttgcgcgtgaccatggtgaggaacagattttcggcgttcaagtcgcggaagtggatcatcgcctgcacgcgctcgcccgtctccacctggatgatgttgacgatgtttgtgcccttggcagccttgccgctctcggggatctgatagcccttcttgcggtacaccttgccggtgtccgtaaagaagaggatatagtcgtgggtcgaggcggtgaacacgtcgaccaccgtgtcctcttcgcgcgtggtgatgcccttcttgcccatgccgcccttactctgcgcggtgtactcgctcgcgctcgtgcgcttgatgtagccgttgcgggtcagggtgaagacgcactgctcctcctcgatgaggtcttcaatgtcgatctcgtcctcgacctcctgaatttcggtcttgcgctcatcgccgtacttgtcgcggatctcaagaagctcgtccttcaaaacgcccttgagcatcgtctcgttggagagaagctcgacaaagtaggcgatcttcttttccagctcgtcaaactcgttctggagcttttcgcggtcgaggccctgcaaggccttcaggcgcatatcgagaatggcctgcgcctgcacgtcggagagcgagaagcgttccatcagcttttccttcgcgtcgtcgtagctcgtgcggatgatgtggatgacctcgtcgatgttgtcctgcgcaatgagaagaccttgcagcaggtgctcgcgctcgcgcgcctttttgaggtcatactgcgttctgcgcgtgataagctcttcctggaaggtaagatactcgtcgatgatatggcgcagggacagaattttcggctgcttctggttgtcgacgagcgccagcatgttgatggcgaagctcgtctgaagctgcgtctgggcgaacaggcggtttaagaccacctgcgggtttgcgtcgtgcttgacctcgatgacgatgcgcatgcccgtgcggtcggtctcgtcgcggatgtcggaaatgccctccaaccgcttgtcgttcacctgatcggccatgttcttgatgagcatgcgcttgttcacttgatacggaagctcggtgacgatgatgcgcgtgcggtcgcggccgaattcttcaaattccgtgcgggcgcgcaggatgatcttaccgcggcccgtggcgtaagccgcgcggatgccgctgcggcccataatgatgcccttggtcgggaagtcggggcccgtgacgtgctgcatcaggtcataaagcgtcgcctcgggattgtcgagcacgcagacgcaggcgttgatgacctcggtcaggttgtgcggcgggatgttcgtcgccataccgacggcgataccggaagaaccgttgaccagcaggttcgggaagcgcgcgggcagcacgcggggctccttgcggctctcgtcgaagttcgggtcccagtcgacggtctccttatcgatgtcgcgcagcatttcgttcgcgatcttcgacattctggcctcggtgtatcggtaggcggccggagggtcgccatcaatggaaccgaagttgccgtggccatcgacgagcatatagcgcatggagaagtcctgcgcgagacgcacgagcgcgtcgtacaccgacgcgtcgccgtgcggatgatagcggcccagcacgtcgccgacgcaggtcgccgactttttgaacgccttgtcgctcgtcaggccgtcttcgtacatggcgtacaggatgcggcggtggacaggcttcaagccgtcgcgcacatcgggcagcgcgcgcccgacgatgaccgacatcgcgtattcgatgtaggaggactgcatctcgtgcacgagctcgctctgcacgatcttttggttggggaattgaatgtcttcgggtttgtaatccacgtttttgtgtgccattttcttcgtcctcctctcttaaaagtccagattgaccgcgtatttcgcgttctgttcgatgaattccttgcgcggctcgaccttctcgcccatcagcaccgtgaacgtctcgtcggcgagcaccgcgtcctcgagcgtgatgcgcttgagcgtgcgcttttcggggtccatggtcgtctcccacagctcatgcgggttcatttcaccaagacctttgaagcgcgaaatatcgacctttgcgttcggattgtcgccgcgcagctcggcggagtattgatcgcgctcctccggcgtgaaggcaaggcgcgtcgccttgccgcgtgtcagcttgaaaagcggcggcaccgcggcatagacatagccgttttcaatgagcgggcgcatatagcggaagaagaacgtcagcagcagcgtccggatgtgcgagccatcgacatcggcatccgccatgatgatgaccttatgatagcggagcttattgatatcgaaatcctcgccaaggccggcgccgagcgcgatgatgacgggctggagcttgtcgttgccgtaaattttgtcggcgcgcaccttttcgacgttgagcatcttgccccagagcggcaggatcgcctgaaagcgcgagtcgcgtccctgggtggcagagccgcctgccgagtcgccctctacgatgtagagctcggtgagctcggggttattttcgttgcagtcgcgcagcttgtcgggcatcgccgcgccgccgagggcgctcttacggcggatggattcgcgcgccttgcgcgcggcctctcgcgcgcggttggccgtcatcgccttatccaaaatcgtgcgcgccacgacggggttctcctcaaggaactgcatcagccggtcggagacgatgccgtcgaccagtgtgcggatctcgctgttgccgagctttgccttcgtctgaccttcgaactgcgcgttcgtgagcttcacggagatgacgcaggtcaggccctcgcggcagtcttcgccgctgaccttgtcgccctctttgatgatgccgtttttgatgccgtaggcgttcaaaacgcgcgtgagcgcggccttgaagccggtctcgtgcatgccgccctcgggtgtgtggacgttgttggcgaacgacaggatattttcctgatagccgtcgtcatactggagcgccaattctgcgaacgaatcgcccttcatgccgctcatgtagatgacgttattgtgcagcggctctttcttcttgttgagccacgtgacgaattcgcggataccgccctcgtagcacatcgagtcacggcgctcgctctcgggcttttcttcactctcaaggcgcttgtcctcgatggtgatgcgaaggcccgcgttcagaaacgcctcctcgcgcatgcgggtgtgcagcgtttcgtaggagtattcgagctcttcgaacatctcgggatcgggcttgaacgtaacggtcgtgcccgtgtggtcggtcgagccgatgatggtcatctcctgcgtgatcttgccgcgggagaatttcatctcgtagatgttgccgtttttgtggacctgcaccgtcagccattcggacagcgcgttgacaacgctcgcgccgacgccgtgcagaccgccggagaccttgtagcctccgccgccgaacttgccgcctgcgtgcagcacggtgtagacgacctcaagcgcgggacggcccgtctgcgcctgaatgtcgaccggaatgccgcggccgttatccacaacggtgatggtgttgccctcgttgatcgtcacttgaatttccgtgcagtagcccgcaagcgcttcgtcgatggagttatccacaatttcatagacaaggtggtgcaggccgctcaccgacgtcgagccgatgtacatgcccgggcgcttgcgcaccgcctcaagcccctcgagaacttgaatttccgaggcgttataatcattgttttcatccaccgccgtggattgaaggatctcattttctgccatttgggttctcctttcgtcatcaggcaggaagaaccgggtcggagccctttccggcccgtttctccctgcctcgagcactattttgatgggaaagccgcttacatcgcggctgttgttttcttcttttgaatcacgcagtaaataccgtacaccagcgcctgactcattaggtacagaaacaaaatgcccgtgatcggcccgacgggaaacgtcgaatccgcaccgtggaactgccagagcacttcgcatgcaagccagaagagcgccgacaccttcattttcttccgaaagagccacttgtcgccatcgtccgttttgagccgccacgtgaaatacaccgtcagcagcgtgaaaaagccgagcgcgatgggcagtatccagcgctcattgtggggaagggaaaagggacttgccagcattgtcaaagcaacggggatcttcatgtctgctcctccattctcttttgcagtgtttggctcgaaagctcggataaataaaccaattgcgggtgatacgggtggtcgcacactaaaaacgacttgggaatgtcctcgcaggcgtcgatgacaaggctttcatcctccgcccggcggagaaattctgatgttctcttcgattgcgacgtgatctcgagatcaaagacgccgatgatgtgtttttctggcagcatgacattgttgccgatgtgcaggtacatggtacctcctcagatatcgcgcccaaagggcgcggggtggtctcccattggcatgggagtgcgcagtcaaagggggtattctctttccaaagagaataccccctttggaaccccaagagaaatgcgaggggagtccccctcgacccccgacattgcgggtttgcagcttgaataactgcacgcgctgcgcagtgtgggtgcggtgtacatggcttcgccatgaatcttctgcgagtcgtcaccactctcaaccgcgccttactgtcgtgaggcgcgagtgacgtcccctcggcggcagactgcgtgcggaatgcggcattgcttcgctcgccgcattgataagtctcccagtagacggtgattactgcgcacttctacaagataggcagagcggcagcggatgataggagcagaggcaaatcgtatagcaacttcaaacgcggcaacgccgcgcgcagggaagtgcaatcggcaagcgccgcacttcttcgagctgcttgctctcaatgggaaacgcctttcttttggacggtcacaccgcccgttttctttctcgggaaagaaaatggggggtgtggtcttgccgcccgcaggcggcatatcccagccgcataggtgcggctaaactaccgctccctgcgagatatggaacacttttccactcaaaagtgtccccaaccgatcctcttcacagcacgtgataaacacctgcccgccaaggatgcggttgagcacatattcctgccgccgtgggtccagctcggacagcacatcgtcgagcaataacagcggtgtgcgggatgtgatctcgcggtaaatctcccgctcggcgagcttgaacgccagcgccgccgtgcgggtctggccctgagacgaaaactgccttgcgttcacgccgccgatcgtcatggcgatatcgtccttatgcggccccgataggcacattcttgatgcccgttccgccgccgcgtgcgatgcctgatgcgcgcgcagctggtcgtaaatcgtttcaattggcgcgagcgggtctaaaatggtcgaaaccgtctggtattcgacgcccagctcttccctgccgccggagcattcgcggtgcgcgatgcccgcatattccttcaatcgctcgcagaaccgcgcacggtagtagatgatgaccgcgccgctctgcgccatgcgcaggtcaaattccggcaaagtatcaagaagcgacggatactcctcgctgtcgcgcagaatgcgcgttttgtgctcgtaggcgcgatgatagtcgctgagcgcctgcgcgtagcgcgcgcgaagctggcagagcgcgtcgtccatgaacttgcgccgcgccgccgcgccgtcgcggatcagcagcagatcctccggacagaagtagaccgcgccgagcacgtcgctgaggtcgctcccctttttcacgggcaccttattgatgagaatttttcgtcttctccccgcggcgagcgcgatctcgagcagaaaatctcggttgcgcgcaaacgcgttcgccttgatgctgcattcgctcttgccgaacgaaataagctctttttccgccctcgcgcgcggcgaacgggcagacgagagatagacgatggcttcgagcagattcgtctttccctgcgcgttctcaccgacgatgacgttgcagtccggcgcgaatgtgacattcagcgcgtcgtaattgcgaaagttccgcagcgccaacgcgtcaattcgcataggagaccgtcagctctttgccgtcgaaggcgaccgtgtcgcccggacgaatcttcttgccgcgcatcgtgcagacctcgccgttgaccgaaacgtcgccgttctggatgacgatcttcgcctcgccgcccgtgccgactaaattcgccagcttcaagaggtcctgcaatttgataaattccgtggtgatggtaatgtcagtcataaaaagtcctttacaaagcgattcctatcagaaatcgttgtaccattttatacgatatggattcagtttttttgtctcaatttgccttcaggcgcacgggcagcaccatgtagaggaagttctcttcgccctcgacgggaacgatgatggccggcgaaatgccggtgttgagctccattctcacggtgtcggcgggcgcgtagcgcagcgcgtccatcagataacggttgttgaagccgatctcaagcccctgaccgtcgcccgcgatgcggcagacgtcctttgcatcgccgttggcggtcttggcggacatcgtcaccttgtcctcgccgaactggcagcgcacggggctcttgagcttttcactgatgacgacgctcacgcgctcgaggctctggagcatcgtctttgtgtcgacgacgacgttgatggggtttctgcgcgggatggcgttcttataatcgaggaattcaccctctaagcggcggcagatgagctcggtctcaccgacctcgaagagaatatggcgctggccgagcgtgatggtcacgacctcgtcgatctcctcgcagatgcgctcgacctcattgagcgccgtgccgggcgcgacgaacgagaacgcgccgccctcgatcttttcaagtgcttccttgcgaagtgcaaggcggaagccgtcgacggagacgacggtcagcccctcggcagatacctcgaacagcgagcccatatgcacggggcgcgcctcgttcgtcgaaacggcgaagctcgtctgctggatcatggtcttgagcgtcttttcggcgatctggacggcgtacttctcctcgacctcgggcagctcggggaaatcggcggcggagaggcccatgatgtcgaaatccgcgtcgccgcaggtcaggtggatcaaaaatttgtcgttcgcggtgaaggtcacgacgtcgtcgggcagtcttcttaaaatctcgctgatcaggcgcgcgttgacgaccagctcgccggactcctcgacctcggcggcaaacttcgtgcggatgccggtctgcatgttgtagcccgaaacggtcaggctctcgccgccgcaggtcagcagcagtccttcgagcgcagggatggagcttttcgccgcgacggcgcgggaggcggtattgactgcattttgcagcagcagcttttcgcaggagaatttcatagcggcgttcctttcgtaaaacggatgattttttctcttttggaaaagaaaaaggatagtttttagaaatagcagcagtaggggcgcaaaaatgtggaaaacccaattttagcccgaaatggcaaggaaaatttatccctcgcgggttgttgaaaagttctatcactttccacacccaaaattttgaaaaaatgtttccacagcttccctctgcacaaccctgtggataatgtggaaaactttgttatctcttggagttgatgttaatagtgatctccttgatcgtctggttgaagacgggatcggatttcatcttcttttcgatctgctcgagcgagtggagcacggtcgtatggtcgcgcttgccgaactcgcggccgatatcgggcgtcgacagatttgtcatgcggcgcacgaggtacatcgcggcctgacgggcgttgacggcctcgcggcttcgagacgggcccttgatgacctcttcgtcgatgccgaagtagcgtgacgtttcggtgatgatcatcgccgccgtgggggcgagattcgcgttctttttcataaagtcctcgaccgcgcggtgcgcggcgtcggcgtccatctcgcgtccgatgagatcgcggtaggcgagaatcttgttcatcgtgccctcgagctggcggacgttggacgtgacattttcggcaatgtaacgcgcaatgtcgtcgtcgatgacggtgccccactgcgcagccttattcttcacgatggcaaggcgcgtttcaaaatcgggcggctgcacatcgacaagtaagccccactcaaagcgcgtgcgcaggcggtcgtcgagaaggtgcatgtcagagggcgggcgatcggaggtcaggacgatctggcgtccggcctcgtagagcgtgttgaacgtatggaaaaattcgttctgcacctgctccttgccggcgacgaactgcacgtcgtccacgagcagcaggtccgcgtcgcggtacttcgcgcgaaactcactgccgcggcccgcgcgcacgagctcgatgaattcgttgatgaaatcatcgcccttgatgtagatgatcttcgccgacgggcgcgtcgtgcggatctggtgggcgatggcgtaaatgaggtgcgttttgccaaggccggagtcgccgtagataaatagcgggttgtagtgccccacgccgtcggccacggcgcgcgcggcggcataggccatcttgttcgattcgccgacgacgaacgtgtcgaacgtgaattcgccggaatcgagcagcgcggtggactttttgacctcgggctcgaaaagggcggtgctctccgcggtggagaggagcttgacgtcgaaatcggcggagtaaatgtcccgcagggaatccttgatgcggtcagagaacatggattcgatcgtgctgcgcttaaaatcgttcgggcagtggaggtacagcgtgcggtccttgatggacacggcctccacctcgtcgaaccaggtggagatggtcgtctcagacaggtcctggctgaggcgggagagaacgatcttccagatgtctgcaacagagttcacggaagcgctcctttctttctttggaataaacggctgtgacagccgaaaatttactccctacattataccaaaaaacgcgcgcgaacgcaacacatattctaaatataaaacgctgttttttgcagtgcaaaagccctgaaaaacaggcaaaaggacacaagagatagttgcatgtttcgatacgcgccacaaggttttgcgggaaatggaaacatgcaccgatttttgtatttttggttgacagaatgcggcaaaaccgatataatactccccgtatgccgcatcaatacggcactatttttatcaactgcggtccgcggggagctttctccgcccgccgtcgagtaagtgcagtgtctccccaaaggggtgctgccggtaaaattttttcaggaggtaaaacgaaatggctacttctcgcacctaccagcccaagaagctccagcgctccaaggagcacggcttccgcaagagaatgtccactgccaacggccgcaaggttatcgcccgccgtcgtgcacgcggccgcgcccgtctgacccactaaagcgggagcaacttgcgtatcgtatgctacacatgaaacaatgagggacggccgatgagaatgtgtttcgatcgccgtcccttgcaggctatgcggagaaatccgcaaaagcagggagatcacgcgtgaaaagcaccaccaccgtcaagaaaaattacgaattccgccggatgtacgccaagggcaagtccggtgtttcgtcctgccttgtggtgtattaccggaaaaaccggctcggacacaaccgcctcggcgtcacggtcagcaccaagctcggccacgccgtcgtgcgcaaccgcgtccgccgccgcatccgcgagatcttccgcctgagtcaggggaagatgaagcagggctacgactgcatcgtcgtcgcccgcacaagggccgcccacgcggactactgggagctcaagcgcgcgtttgaaaaaacgtgcaaaaagctcgatttgtgggaaacgcaggcatgaaacgctttctgctgtttctcatccggttttaccgcagggccatctcaccctaccgtcccccctgctgccgctttatccccacgtgctctcaatacgcgctcgaagcgatcgagaagtacggggcggtcaagggcggctggcttgccttcaagcgtatcatgcggtgccatccgttctacaagggcggaaaaatctacgacccggtcccgtgaccgaacctaaaaccacggaggaaaccaaagaatgtcaaccatcggctactacatttgcgttcccttcgcctgggtcctgcgcaccttctatgagctgaccggctcctacggctgggctctcgtgctcttcacgatcgtcgtgaagctcatcacgctgcccttccagatgaagtcgaaaaagagcatgatgcgcatgaatctcttccagcccaagatcaaagagatccagacgaaatatgccaacaatccccagaaaatgaacgatgagatccagatgctctacgccaaggagggggtcaaccccatgagcggctgcctctggagcttcctgcccttccccatcctcatcgctctgtattccatcatccgtcagccgctcagccgcttcatgatgctctccaaggacgtcgtgacggagatcacgacccttgccaccaccctgggctacaatgccgagctcgtgcgcaagggctatgaggagatcggccttgccaagttcatttccgacaactttgcggatttttccggcaagtttgacggtcttctcaacgtgaactacagtttcctcggccttgacctcacggtcatgccgggggatgtgtggaaggatttcttcaccggcggctggcccgtgatcggcgttgtgctgatcccgttcatttccggtgctttgagcttcctgcagtccaaggtctccatgtccggcaacatcgccgctgagggcaacgacgccgcggcccgctccaaccgcatgatgatgtggatgatgccgctcatgtcgctgtggatcggctttacgctgcccgcggctctcggcgtctactggatcgtcaactcgctgctctacgccatccaggaaaaggttctgaccaagtactataagagccacatggaggacgagctcagcgagaaggaaaagcagaagcgcgacgaccgtctgcgccgcatggaagccgcccgcgagcagcagcgcaagtacgctgccgaagaggccgagaagaagagcctcaaggaaaagcgtgcggaaaagcaggctgccaaggccacaaaaaggaaaaattccacgaatgaaagcggacgcgtcggcgaccgcccctatgcccgcggccgttcctacgaccccgagcactacggagaataattgtaaggagcttgtctgaatgatcaagtttattgacgtaacgggcaagacggaggacgaggcgatccagagcgcgctcgcgcagctgaagatggacagagacgacgtttctgttgaaattcttgagcgcgcgaaagccggattcctcggcatcggcagcgcgcccgcgcgcgttcgcgtgagctatgacgacggcaaggccgaagaggtcaagtcggtggaaaagcctgccgcacccaagcccgaaaagaaagttgaacccgcttctgcgcccaaggccgtgcccatgtacgcgcccgaggtgctgcagaaaaaagaatcccgtgcaaacgacaagccgcgtaccgaacgcggcgaccgtcccgcgcgcgaagaccgccgcgagaaccgcgctccccgcgccgagcgcgcggagcgccctgccccgcagcccaagcccattgtcgacctcggcgaagagtgccacgacgagaagagcgagcagatccgcgcgttcctcaagggccttcttgagcacatggactccgccgctgaggtcaaggtctacgagagtgagaagggccgctacaaggtcttcctcgaaggggaaaagctcggcgcgctgatcggccgccgcggcgaaacgctcgacgccatccagcagttgacgaactacagcatcaaccgcggcagcgagaagaaccgcgcccgcgtgcaggtcgacgcagaaaattaccgcgaaaagcgcgagcagagcctcgagcgcctggcggaaaaggtcgccggcaaggtgacgaagtaccgccgcaatgtcaccctcgagcccatgaacgcctacgagcgccacgtcatccacaccgcgctccaggatacgccgagtgtgacaacgttctccatcggcaccgagccgaaccgtcgtgtggtcgtttcgtacgatcgcaccaaggcgtgagtgatttccacattctgtggagaaatagggtcccctgcaagcagggggcgcgaataaaagggggatactctctttcacgaaagagagtatcccccttttgatcccccgagagaaaggttttaaattggcagtctcgggctcgaatggcctttgtgcctccggaatgggaatgcctgcgcgcggcagagccgcgttgggtgttgctagacgatttgatttgcttctatcatccgctgttgcgcagccgttggcggctctgctgccttacggatgcggcacaccccttgcgggtgccgctctgccgatcttgtagaagtgcagactaatttccgtctatcaccagtctcatcaatgcggcgagcgaagcaatgccgcattcggtatgcagtctgccgccagactaccgtcactcgcgcctcacgatagtaaggcgcggttgaaagtagtaacgactcgcagaagattcatggcgaagccatgtacaccgcacctacactgcgcagcgcgtgcagtctttcaagaataagacccgcaatgtcgggggtcgagggggcctcccctcgtcctttctcttgggggttcaaaagggggatattctctttcgtgaaagagaatatcccccttttacccgttccccacgtgggcgtgggggtgagaatcactttttttgatttttaagtacccccaacgatttgcacagcgtgtaagaaaacaccaccagcgcggcggagatcgcaatcgcgagcacgttgcggctctgctcggaaagggcgagcgcgccggcggcaaacagcacaacgatcacgatgccggcaagcatggccgcaccgctgatgatcagggtgatcttcgtgcggccggtcatttcctgtttgttgagtttcatttttcttcctccttgagctcaagcagcacggggcagtggtcgcttcccatgacctcagctaagatatccgcgttttcgatgcgggagcgcaggcgttcggagacgatgaaatagtcgatcctccaccccacgttccgtgcgcgcgactgggcgcggtagctccaccacgaataggcgtccgtcttgtcggggtacagcgtgcggaacgaatcgagaaagcccgaggacaaaagctgcgtcatcttgccgcgctcctcgtcggaaaagccggggttaaagtggttcgtcttcggatttttgaggtcgatctcctcgtgtgcgacgtttaagtccccacagtacacgacgggcttgatcgtgtcgagctcgcagaggtactgccgcagcgcatcctcccattccatgcggtacgaaaggcggcgcagctcgtcctgcgagttcggcgtgtagcagcagacgaggtagaagtctggatattcacacgtgatgacgcgcccttcatggcggtggatgtcctcgccaaagtcataggtgacggaaagaggctcctgcttggtgaacaccgccgtgccggagtagccctttttgtccgcgctgttccagtagatgtggtactgcggcaggtcaagttcgatctgatgcggctgcagcttcgtctcctgtaggcagatgacgtctgcgtcgatgaatttcacaaaatccaaaaagcccttgccgatgcacgcgcgcaggccgttgacgttccatgagatgagtttcattggggaaaagtcctccgaaagtttgatggtgagaccattgtactatccgggggagggaaaagcaataaaaatcacagcgagcctccctccatgccgcgcaaaatgccgcgttctgttaagccaaagcggcaaaaaccctcattttctgcggactttttatctctccacagagaagcgtttacaacgctcgctgacatacggtaaaataaactcaatcacacggtctggaggagtttttgcatgaaaaagatctttctctccgcgatccttgccggcgcggtcatcgcctttggcggcacggtgtttctgtcggtggaaaatacggtcgtcgggtcgctttttttcacgatcggccttttcgtcgtctgcacgcgcgggctgcatctgttcaccggcaaggtctgctatgtgtttgacaacgacgcagcctacgccaaaacgctgccggtcatctggctggggaatctcgccggcacatcgctcatcgcgcttgccgagaagtgcacgcggcttgtatccctcagcgcccgcgcgcagggcatctgtgaattgaagctctccgagccgctgttcggcgcgttcatcctcgccgttttctgcaacgtgatgatctacatcggcgtggagggctatcgctccaacccgcacgagctcggcaagtatctcgcgctttttttcggcgtgtgcgtgttcatcctctgcggctttgagcactgcgtggcgaatatgtactatttcacgatgggcggcgcgtggagcggccgcgcggttttatatctgcttgtgatgacgattggcaacgccgccggcggcgtaatcgggcctttggcaagaaaggtcttgtcccgctgagggacgggaattccctgcgtgcgggagtgcgcagtaagggggccattctctcacgtgagagaatggcccccttgaacccccaagagaacgcgaggggagggcccctcgacccccgacattggcagtctcaagctcgaagaactgctcagcctgcggaatcaggtgcggtgtacatggcttcgccatggatcttctgcgagtcggcaccgattgcaaccgcgccttactatcgtgaggcgcgagtgacgtttgtctggtgacagactgcctaccgaatgcggcattgctgcgctcgccgcattgtgaaaatcagagttcgatcttgccgtgtttttcctcgtaggcttcgatcgcgtcgcggattaagatcagaatttcgttgtttgcgctgcggccctcgtagtcggcaacgacgtgaagtttatggagcatcgtttcatcaatgcgaatagataagctcttaatagccatagaaaaacctcaaaatacagttattgtgtatttacaataagctcgttttgaagtattatgcgcttagtagatatataatatatctaaaatatgttcggaggttttgctatgacagactatcagaaaatgtacttgatcctgttcaacgccatcaccgacgcacttgctcagatcgaaaagcaaaattacggcgacgcaaaatccacactcatcgtcgcccagcaaaaagcagaagaaatgtatattacagcacagaactgaaatagaagcagccctgagcggcgagcgcagcaatgccgcgccgtcagaagagcggggaggataatccaaaaaggaggggctgcgcccctcccttttggtcgttagggggtgcagggggcgaaatcgaaacgccccctgcctttctcttgggggattcaaagggggaggttctcttttgaaagagaacctccccctttgcctgcgcatctccccgtgggagataaaattcaaaaaacacttgtacgatttttctctccgtgataaaatacaatattaagacaaaaataggagaggactgccgcgttttgcggcaaaaacgccccggaaaggagagcacacatgccggtacacgaaggacatcgctcgcgtaaaaaagagcagttccgcgcccacgggctcgatgcgttcgccgaccacgaggtgcttgagcttctcctttactacgccgtgccgcggcaggatacgaaccccatcgcgcaccggctgatggaaaaattcggctcgctcgacgcggtgtttgccgccgatcgcgcggcgcttgaggaggtcgagggcatcggcgagaacgcctcgacgctcatctctctcatgttcccgctgatgcgccgcatccgcgcgtcctccggcgcgcacgaggcgatcctcagcgataccgagcaggcgggcgcgtactttttagacctctttctcggcgagcgggaggaaaagctctacgaagcgtgccttgacgccaagggccgcctcctcgcttgccatttggtcgccgagggcgacactgagagcgtccagctcaatatgcgcaaaattgtggaaaacgcgctcaagtgcggcgcgagcagcgtgctgctcgcccacaaccacccgagcggcgtggcgctcccctcccccgcggataacgcgacgacgctgtcggtcttcgacgcgctgcgcaccgtgggcgttgagctcgccgaccacatcatcgtcgcggacgacgactttgtctccctgcggcacaacggacttctgcccgaaagaaagggaaacggatatggaatttaagctgcacgcgcccttcaagcccacgggcgaccagcctgaggccatcgaaaagctggcgcagggcgtgaagatgggcctcgacgagcaggtgctgctcggcgtcacgggctcgggcaagacgttcacgatggcgagcgtcatcgaaaaggtccagcggccgacgctcgtgctggcgcacaacaagaccctcgccgcgcagctgtgcgcggagttcaaagagttttttcccgaaaacgcggtggaatacttcgtttcgtactacgactattaccagcccgaggcctatatcccccacaccgacacctatatcgccaaggacgcctcgacgaacgaggagatcgaccgcctgcggcttagcgccacctgcgcgctgcttgagcggcgcgacgtgatcgtcgtctcgtccgtctcgtgcatttacggcctcggcgagccggaggactttgaaaagctgatgatctcgctccgccccggcatgacgatggagcgcgacttcctcttaaagcggctcatcgaaattcgctacgagcgcaacgacgtcgcctttgagcgcaaccgcttccgcgtgcgcggcgacacggtggagctctaccctgcgtactaccgcgacaaggccgtgcgcgtcgaattcttcggcgacgagattgaccggatcagcgaattcaaccccgtcaacggtcaggtgacgcgcacgctccagcacatcgccatctatcccgcgtcgcactatgtcacgacgaaggacaagctcgagcgcgccattgtcgagatcgacaaggagctcgacgagcgcgaggcacagtttttggctgagggcaaggccgtcgaggcccagcgcatccgccagcgcacgcgctacgatatcgagatgctgcgcgagctgggctactgcacgggcatcgagaactattcccgcgtcatcagcgggcggcccgtcggctcgccgccgctgacgctcatcgactacttccccaaggatttcctgctttttgtggatgaatcgcacgtcacgctgccgcaggtgcgcgcgatgtacaacggcgaccgcgcgcgcaaagagagccttgtcgagtacggcttccgcctgccctgcgcgtttgacaaccgcccgctcaaattcgacgaatttgagcagcgcgtccaccagcgtatctacgtttcggccacgcccggcgactatgaaaaggaccgtgcgggccagatcgtcgagcaggtcatccgcccgacgggcttactcgacccgaaggtcgaggtgcgccctgtcgaaaaccagatcgatgatctcgtcggcgagatcaacgcaagatcggcgcgcaatgagcgcgtgctcgtcaccacgctgacgaaaaagatggccgaggatctgacgcagtatttaacgggcgtcggcatccgcgtgcgctacatgcacgcggacgtcgagaccatcgagcgcatggagctcatccgcggcctgcgcctcggcgagttcgacgtgctcgtcggcatcaacctcctgcgcgagggccttgacatccccgaggtctcgatggtcgcgattttggatgcggataaggaaggcttcctccgcagcgaaacgagcctcatccagaccatcggccgcgccgcgcgaaacgccgacggccttgtcgtgctctacgccgacaccatcaccacctcgatgcaccgcgccatggacgaaacggagcgccgccgccagattcaggacgactacaacaaggcgcacggcatcattccgcagaccatccgaaaggacgtgcgcgagatcatcgaaatttccaagaaggacgaggaatccgcccgccgccgcggcaagcgcaagctctccgagcgcgagcgggacgaagagatcagaaagctcgaaaagcagatgcaggaggcaagccgtatgctcgaattcgagtacgccgccatcctgcgcgaccgtatcatcgagctgcgcaaggaaaatacgaaataacaagaaagagacaaagcctgtgaaaaaatacgcttcctacgcctgcattttagcggccgccgcctgctggggctgcatcggcctattcaaccgcccgctgctcaatgccggcatcgcgccggaaaaccttgtcgtcatccgtaatctgggcggtcttgcggtgctcgcgttcttcttcctctgcaccgaccgcagcgtcttcaaaatgaagacaaagcacctgccgatctttattgcgacgggcatcatcagcgtcgtgctcttcacgctctgctacttcaacgcgcagaagctttgctcgctctcggtcagcgcgattttgctctacaccgcgcctgcgatggtggttctgatgagcgcgctcgtcttcaaagagaagatcacgggcaaaaagctccttgccctcgcgctggcgctgctcggctgcgcgctcgtgacgggcattttcacgggcggactgttgctgacgacgaaggggatgctcttcggcctcggtgcggcatttttctacgcgctctattcgatcttcgcgcccttcggcctgcggcattacagcccgctcgccgtcgtgttctggacgttcgtgttcgccgcgctcggcgcgctgttcgtcgccgactggggcaaccttatgacggttctgagcgtgccgcaaaacgccctcctcgctgcgggacttgtgctgctctccaccgtcgcgccctacatcctctacaccaagggccttgccaacgtcgagagcggcaaggccagcatcatggcgagcatcgagccggtcgtcggcacgctcgtcggcaccctcgtcttcggcgagcccatcagcgcgggcgtattcttgggcctcgcctgcattttagcctgcgtgtacattctgcggtgattttatccccgttttccacataggaggtcccttatggcaaagaataaagaagaaaaaaccaacgtcatgcgcgtgctcgagcagaagaagatcgcctacacgccgcattcctatccccatgaagagggcatggcggtcgacggcgtcacggtggcgaagtccatgggctttgaccccgccatcgtcttcaagacccttgtcgcgcgcggcgcgagcaaacagtattacgtcttcgacgtgccggtcgcggagaatcttgacctcaaaaaggccgcgaaggctgtgggcgaaaagtccatcgaaatgatccaccagaaagagctgctgccgctcacgggctacgtccacggcggctgctcgcccgtcgggatgaagaagctcttccccacggtgttccacagttcggcagaaaaccttgcagcgatgatcgtctcggcgggcaagatcggctatcaggtcgagcttgcgccccacgacctcgccgcgctcgtgcgcgcaaaatttgcggatatcattgttgaatgaggttgacataaaaaattcagaagaggacgctggtctcgcagctgcgaatccagcaacaggagttatcgattcatgccaagtaagatttttgtcaaaggcgcaagagaaaataatctcaagaacatcgacgttgagatcccacgcgacgcgctgaccgtcatcacgggcctgtccggcagcggaaagtcgtcgctcgcgttcgacaccatctatgccgagggccagcgccgctatgtggagagcctgtcgtcctacgcccgtatgttccttgggcagaaggaaaagcccgacgtcgactatatcgagggcctttcccccgccatttccatcgaccagaagaccacctcgcagaacccacgatccaccgtcggcacggtgacggaggtgtacgactatctgcgcctgctctgggcgcgcgtcggcacgccgcactgtccgaactgcggcaaggagatccgccagcagtccatcgaccagatcatcgaccagctcatggcgctgggcgaggggacgcgcgtgcagatcatggcgccggtcatccgcggcaaaaaaggcgagcacgtcaagattttcgaggacgcgcgccgctcgggctatgtccgcgtccgcgccgacggggacatgtatgacctcagcgaggaaatttccctcgaaaagaacaaaaagcacaatatcgaggtcgtcgtcgaccgcctgatcctccgccccgacgtcgtccaccgcctgacggactcgtgcgagaccgcggcggcgctctcgggcggtctcattctggccaatatcctgccagacgaccgcgatatcctcttctcgcagaactatgcgtgcgaggactgcggcgtttccatcgaagagctgacgccgcgcatgttctcgttcaacaacccgttcggcgcatgcccgacgtgcacaggcctcggcacgcagctcaaggtcgaccccgagctcgtcatcccgaataagagcgtttccctgctcgacggcgcgatctgcgcctcgggctggaacaatgtgcgcggcgacggcatctcgcgcatgtactttgaagcgctgtcgaaaaagtatcatttctcgctccgcgaccctgtggaaaagctctccaaagaggtcatggacgtcattctctacggcacaaagggcgaaaagctggagctccagtacgaccagccgcgcggcaagggcgttttatatcaggcgttcgagggtatcatccccaacttagagcgccgctacaaggagacgcagagcgacggcgtgcgcgaggagttagagtcctgcatgagcgagtgcccctgccccgcctgcggcggcaagcggctccgccgcgaatccctcgccgtcacggtcggcggacttagtatcagcgactactgcgaaaaatccgtcgtcgacgcgctcgactttgtggatcagctgacgctgaccgagcagcaaatgcgcatcggcgagcgcattttgaaggagatcaaaaaccgcctcggcttcctgcgctcggtaggactcgaatatctgacgctctcgcgcgcgagcgcaacgctctccggcggcgaagcgcagcgtatccgtttggcgacgcagatcggctcgagcctgatgggcgtgctctatatcctcgacgagccgtccatcggcctgcaccagcgcgacaacgacaagctgctcgccacgctcaagagactgcgcgacctcggcaatacgctcatcgttgtcgagcacgatgaggacacgatgcgcgcggcggactacctcatcgacatcggccccggcgcgggcgcgcacggcggccaggttgtggcctgcggcacgccggcagaggtcatggcgaacccgaattccctgaccggccagtatttgagcggaaagaaaaagatcaaagtgccgaaagagcgccgaaaaggcaacggcaatttcctcaccgtgcgcggcgcgcaggaaaataacctcaaaaacctcgacgtctcgatcccgctcggcacgttcacgtgcgtcacgggcgtgtccggcagcggcaaatcgtcgctcgtcaacgagatcatctataaaaagctcggcgcggacttaaaccgcatgaaggtccaccccggccgctgtaaggctatcgagggcgaggaattcctcgacaaggtcatctgcatcgaccagagccccatcggccgcacgccgcgctccaaccccgcaacgtatacaaatctcttcaacgatatccgcgacctcttcgcctcgacgcccgatgcaaaagcgcgcggctatgccgcgggccgcttcagcttcaatgtccgcggcggccggtgcgaggcctgctcgggcgacggtcagctcaagatcgagatgcacttcctgcccgatatctacgtgccctgcgaggtctgcaagggcaaacgctacaaccgcgaaacgctcgaggtccactacaagggcaagagcatcgcggacgtgctggaaatgaccgtggaggaggcgctcgaattcttccgcgaccttccaaagctcgaagcgaagctccgcacgctcagcgaggtcggcctcggctatatccgcctcggccagtcgtctacgacgctctccggcggcgaagcccagcgcgtcaagctcgcgaccgagctttctaagcgctccacggggcgcaccatctatatcctcgacgagccgaccacgggtctccacacggacgatgtgaaaaagctccttgaggttttgcagcgccttgtcgacgcgggcaacaccgtgctcgtcatcgagcacaatctggacgtcatcaagtgcgcggattatctgctcgacctcggccccgagggcggcagcggcggtggaacgctcgtcacctgcggcacgcccgaggaggttgccgcgtgcgagcagtcctacacgggccagtatctcaggaaaatgctgcgttaagattcacccatcgcccgtccgcgccgtagaatggcgcgaggtgatgatatgcggcttttacaggacggcgttgtcgcggcgctcgctgccatcggcctgacggcggtgatctttctgctcgtttcggccatcgtgcacccgcggcggcgcggcaccatccccgccacggcggtcatcgagacgtgcggcgaggcaaagacgctcgaatacacggtgcgcgcgctgctgaggtcgcgctatgaagagggcggcttttcgcgcgtcgtcatcgtggactgcggccttgccgacgagccgcgccgcgtggcggagctcttgtgccgcagcgaatacgaggtctacctctgccaaagggaagaactgaccgattttttcacttaggagacagttatgggagaagaaacgaccatcatgggcacggtcctgtccgtcgttttccagaatgaggaaaacggctatgccgtgctgcgccttgtgacggacgacggcgagcttttaacgctcgtcggctgcgtcccctgcgcggcgcccggcgaaaacctgacggcgaccggctcgttttcctcccacccgcagtacggcgagcagttttccgcgagcgaggtcgagcggtacctgccgtcgaacgagacggagattttaaactatctcgcttccggcgtcgtgcgcggcgtcggccccgcgacggcggaaaagcttgtcgccagatttggcatcgagacgctgcaggtgctcgaatccgagccggaaaagctcacggccatcaagggcatgaccgcccgccgcgcgcaggagatctccgcggccttcaacgagcagatgggccttcgccgcgtgatggaatttctggcgcattacgatctgcccgccgcgctcagcgtgccgctctaccggcgcttcggcgcaaacgccatggccgcgctcgagcgcaacccgtacttactgtccgacagcgcgttcggcgtggacttttccctctgcgacgagatcgcgctctcgatgggctttggcggcgacgcgtcgctccgcaccgaggcgggacttctcttcgagctttcccacaaccgcgaggcgggcgggcatgtcttcctcccgcgcgaaaagctcctcgccgcgacggcccagcttttggactgcgacattgacgccgcggaaaaaagcctcgacgatctcatcgccatccaccgcatcgtgcaggagggcgtcgcgaatgtgacggcctgctatttgcgtcagtcgtgggaggacgagacctatgttgtcacgcgcatcgaggcgatgctcgcggacaagcccgacgccctgcgcggcgtagagcgtacgatctccgagatcgagcgcgagcagggcgtgcagtacgcgccgctccagcgtcaggctgtcgagctcgcggcaaaggaagaattgctgctgctgaccggcggtcccggcacgggcaagacgacgagcgtgcgcgccatcgtcgcgctcttcgagcgcatgggcctgaatgtcctgctcgccgcccccacgggccgcgccgccaagcgcatgggcgagctctgcgaccgcgacgcgcagaccatccaccgcatgctcggcatgaccttcaacgaccagaccggcgaggtgacgttcaccaaaggcgaaaaggaaccgctcgaggccgatgcgctcattgtggacgagacctcgatggtcgacctctcgctgatgcacgcgctgctcgcggcgctgcgtccgggctgccgccttgtgctcgtcggcgaccccgatcagctgccgagcgtcggcgcggggaacgtattttccgacctcatccgcagcgggcgcatcgcgaccgtcgccctgcgcgacattttccgtcaggccgagcagtcgatgatcgtgcgcaacgcgcacctcgtcaacaccggtatgccgcccaagctcaaaaacgcggcggcgaacgactttttcttcctcccccgccgcgacagcgtgcgattggtcgaaaccgtggtcgagctgtgcaaaacaaggctgcccgacaagatgggcatccccgcggacgaattgcaggtgctcaccccgacgcgccgcggcgacgcggggacgcggtcgctcaatttcgccctgcaagccgcgctgaacccgccgaaacccggcaaacaggagcgccgcttcggcgagctcatcttccgcgagggcgaccgcgtcatgcagacgcgcaacgactacgacgtcgtctggcagaaggcggacggcaccgccggcacgggcatcttcaacggcgacgtcggcaagatcgcaaagatcgacccgagcggcgagcttttggagatcgtcttcgacgaccgcaccgcgacctacacgtccgacatgctcgcagagctcgacatggcctacgccatgaccgtacataaggcgcagggcagcgaataccgcggcgttgtgttcgtcggcgcgccgtgtgcgccgtcgctgatggtgcgcggcgttttatataccgccatcacccgcgcgcgcgagctgctcgtcatcgtcggcgacgattccgctgtcaacaaaatggcggagaacgaccgccgcagccgccgctacagcggcctcaaatggcggcttcggaaaggtggtgaggaaaaatgagctttttggaatcgctcgcgaccttactttttccaccgagctgcgcgttctgtggaaaacccggcgttcacggcgtgtgttctgagtgcgaaaaggcgctcccctactgcaaaacgccgctccatgagagagcggagatcggcgcgtgcctcgccccgctcaaatacgagggcatcgtgcgcgaggcgctgctaagctacaaattccacgcgggacagagccgctgcacgggctttggcgatgttttagcgcaggccgccgccgagcatttcggcggagagttcgatttggttacctatgtccccgtgtcgaaaaagcgcaaacaagagcgcggctacgaccagtcgtatctcttggcgcgcgagacctgccgccactggagcgtcgcgccggaaacgctgctgcaaaagacgaaggacaacgtcgcgcagtcgtcgctttcctcccgagaggagcggcagaaaaacgtcgtcggcgcatacgttgccgtcaatgaggacaagatcaagggtcagcgcattctgctcatcgacgatatcctcaccaccggcgccacgctccgcgaagccgcgagagttttacgggaagctggcgcggaaaaagtcatctgcgccaccctcgccgcggcggacgaagactaaagtcttcaaaaaagaggcgacgcctcttttttgagaaagtttcgctgcgcttcgtgcctcacaggttcgacacgcgctccgcgcaaagtgtttttacccacgtacacgccgcgggtaaaaacgattcaaatgtttcgcgtctgcggacgcgaaaatcagcggcgcaggggtatgtttttccttattttcccctgataccgtgcggaaaatcgcgcacaatgctattgcaaactcaatttcgagccgttataataaaaacatcatgggaaagtatgagcatcgctcatttcagttttcagaaaaataagaggtaacacgctatgttttcttttaccaaagacatcggcatggatctgggcaccgcgtcggtgctgatctacattaaggataaaggcatcgtgctcaacgagccctcggtcgtggcgctcgacaagaacaccggcaagctcttgaaggtcggcgcggatgcgcaggccatgctgggccgcacgccgggcaacatcatcgccatccgtcccctgcgcgagggcgtcatctccgactacgaggtcaccgagcgcatgatcaaggaattcctgcataaagtcatgggcttccagctcttcaagccgcgcatcatcatctgcgttccctccggcatcaccgaggtcgaggagcgcgcggtcatcgacgcgggcattcaggccggcgcgcgccgcgtctacctcattgaagagcctgtcgccgccgccatcggtgcgggcatcgacatcacccagcccgagggccacatgatcatcgacatcggcggcggtacgtccgatatcgcggtcatttcgctctccggcgtcgtcgaatcgtcctccatcaagatcgcgggcgaccagttcaacgaggccgtcgtcaagtatatgcgccgcaagcacaacctgctcgtcggcgagcgcacggccgagcagatgaagatgcagatcggctgcgtcttcccgccggaagaggaaatgaccatggaggtcaagggcagaagccttatcacgggccttcccgagctcatctccgtctcgtctgcggaaatgctcgaggcctttgaagagcccgtcgagcgcatcatggaggaggtccacctcgtgcttgaaaagaccccgcccgagctcgtggccgatatctcgaacaacggcatcgtcatgaccggcggcggcagcttagtccgcggctttgataagctcgtcaccgcccgcaccggcatccacgccatggtggccgagaacgccatccagtgcgtggccgagggcacgggcaagagcctcgacagcattcaggacatgcaggacggcacgatgaacctgagccgccgcaagcagatcaactaagaaaattcgggaggatatcatggcggtcttatcaaatctccagccggaaaaggtattctactattttgaaaagctctgctccgttccccacggcagcggaaatacgaagcaaatcagcgacctgtgcgtcggctttgcgaaggaattgggccttaaataccgtcaggaggcgtgcaacaacgtcattatctggaagaacggctcttgcggctatgaaaacgccgcgcccatcattttgcaaggccatatcgacatggtctgcgccaagaccgaggactgcaccaaggacatgacgcgcgacggactcgacgtccgtaccgacggcgaatgggtctgggcagacaagacgtcgcttggcggcgacaacggcatcgccgttgcgatgatcctcgcgattttatccgacgaaacgctcccccatccccccatcgaggcggtcttcaccgtcgacgaggaggtcggcatggacggcgcgttcgcgctggactgctcggacttgaagggcaaaaagcttttgaacctcgactctgaggaagagggcgttttcaccgtgtcctgcgcgggcggcgtgcgccttgactgcgcgctcgaactcaagcaggagcgcgcggacggcatgaccggctaccgcgtgacgatctcgggtctcaagggcggccactccggcatgaacatcaatcagggccgcggcaacgccaactgcctgatggcgcgcacgctgtatagcgcgatggagcgctgcccctcgctgcgcgtgcatgagctgacgggcggcgagttcgacaatgtcatctgcctgcgcgccgacgcgcttgccgcagtctccgcggctgatgcgcccgcgttcgaggcgttcatcaaggaattcgacgcaacgctcaaaaatgagtacgccgttaccgacggcggcatttccctcgtgtgcgaaaaggctgacgttccggccgcattctccgcagcggacacgtcgagactgctgcatgtgctccttgccctgccgcagggcgtgcaggagatgagcgccgacttccccggtcttgtgcagacgtcgctgaacctcggtgtcatgcgcacggacaaagagggcgtcaagttctcctactccgtccgctcctgcatcgcctcgcagaaggatatgctcattcagcgcgtgaaggccatcgtcgaattcggcggcggcaccgtgggcgagcgcagcaactatcccggctggcaatacgaccgcgattctgccctccgcaaggagatcgaagcggtctaccgcgacctcaccggccacgatgggaagatcgaagccacccacggcggccttgagtgcggactcttcatcgaaaagatccccggcctcgacgcgctgtccatgggaccggagctgcacgatgtgcattcggtggaggagaggctgaacgtcgcctcgacggagagggtttacaaactcgtttgtgaagttctcaggagaagtaaataagttcccgctacgcgggagctgatggtttcccctgcacaggggaacgaaacaaaggggccattctctttcgcgaaagagaatggcccctttggaaccccaagagaaaggcttttgattggcagtctcagggttgaataacctttatgcctccggagtgggaatgcctgcgcgcggcgttgccgcgttagcgttgctatacgacttggcctacttctattattcgctgttgcgcagccgttggcggctctgctgccttacggatgcggcacaccccttgcgggtgccgctctgctgatcttgtaggagtgcggactaatttccgcctaccggagtactcatcaatgcggcgagcgcagcaatgccgcattcggtaagcagtctgccgccggacaaacgtcacacgcgcctcacgacagtaaggcgcgattgcgagacgtagcgactcgcagaagattcatggcgaagccatgtacaccgcacccgattccgcaggctgagcagttcttcaagccccagactggcaatgtcgggggtcgagggggacgcccctcgtctttctctggggaattcaaagggggtattctcttcgaaaagagaataccccctttggtgccgcggcgcgcacgccgctccccctcccgcgctagcgcgggaaaaaggatgcagcgctgccgcgctgcgattgaatcccctgcgccctatgggcgcaaaaaaggagcctctttcgaggctcctttttcagtggcatcagccattatatccaaagaaattattgaagaaatcccagggattggagtagtagccgttgccgccattgccgtacccgccgttaccattgtagctgttgtcggtgctctggtcggaattgttcgtttccgccgattcgggaacagcgtcgaaggtgagctctacctcgatcgtcttaccctcgcggtagacggtcagcgtcacggtgtcgcccgcgctgtagctcttcttggccgcgacgaggtcttcataggatgcaatatccttgtcgtccatcttcgtgatgacgtcgccgagcttgagccccgccttgtcggcggcgctgtccgggtcaacggagcagacaaagacgccctcggtcacgtcgtagcggtactgctgcgccatctgcgcggtcatcgtctgcggcgtgatgcccatgtaggccttgttggtcacatagccgttggtcatgatgtccttgacgagcgacacgacgtcgttgatgggaatggcaaagccgatgccctccacggtggtgttggagtagctcgaatacttggccgacacgataccgatgacctcaccgtagctgttgaagagcgggccgccggagttgccggggttgatggagcagtcgacctggatcatgttaaagggcgtgccgtcaacattgatggcgcggttgacgcaggagacgatgccctcgctcatcgagaacgtcagttcgccgagcgggttgccgacagcggcgacggattcgccgatggcgaccttgctcgaatcgcccagcaccacgggcgtcgcgcccgtcacgtcgatcttgagaacggcgatgtcgtagtcctcatcgctgccgatgaccttggcgtcgtaggtctcaccgttgtagagcgttaccttcacgctgctcgcatcagagatgacgtggtggttcgtgagaatgtagccgtcctccgtgatgaaaaagcccgtgccgctcgcggcggtctgcacggtctggccgaagtagttggtcgtggcggaaacgttgatggacaccacgctgttgacgttcgaggcgtagacctccgacatcgacatctgcgtcttgccgtcgaccttgacggtctgcacctgcgcgacctcgcggtcgctgacctgaacgctcgtcttgttgaccttggccgtcgcgccgctcacgcctgcgccgatgaagccgccgacgagcgcgcacaccagcgccagcgccacgatcttgccggaaagaccgctgccgccctttttcttcgggctgccgccgggattcttatcccacgggtcctcggcgtagttcttcgtgtcgatcggggcgttggggttctgctcgtcgcccttgcgatagctgtagtgatacaggttgttttcgtcttcgtacatgatgatgacctcctatggactgagacccttgcttgcagcctctttgctttcgatggtgttatcatagggcatatttatgtatatttcttgaacgctatttgacgatttcttaaattcccgatgacttttttaagaatctgtgataatcgcgcgattccccttgcgctttcctttccgtcataataaaatgaaacgcgactgaagaaaaaggaggcggcgcacatgcttcgcatcgacaatctgaagctccctgtgggggtaaaggaagacaagctgcgcgcggcctgcgcgcacgcgctgcgcgtgagcgaggaggcgcttgtttccgttcatctcctgcgccgctccatcgacgcgcgcgagggcgtgaagctcgtctgctcctgcgcggtcgaggtcaaaaacgaatccggcgttttacggcgctgcaagaataagaatgtgcagccctacgcgccgaagaaatatacgccgcccgcgcctgtttcagcgccggaggcctcccctgtcgttatcggcgcggggcccgcgggccttttctgcgcgctgctgctggcccgctgcggcgcaagacctatcttattagagcgcgggcgcgcggtcgagcagcgaaagcgcgatgtcgagcacttctggcgcacgggcgagcttgatctgacctcgaacgtgcaatttggcgaaggcggcgcgggcgcattttccgacggcaagctcaacaccggcacaaaggacctgcgccacggctatattttagaggagttcgtccgcttcggcgcgagcgaggatattttagtcgacgccaagcctcatgtcggcaccgacaaattatatgtggtgctgcaaaatctccgccgcgagatcatcgaccgcggcggcgaagttcgtttttcccacaaggttgtggatatcgagcagaacagcggcagcgtcacggcgctgcgcgtgagcgcccccgagggggagtacacgctgcccacaaagcacgtcgtgctcgcgcccggccacagcgcgcgcgatacgttcgaaatgctgcaaaagcgcggcgtgccgatggagcccaagccctttgccgtcggcgtgcgcatcgagcaccgccagcgcgacatggacttagcgcaatataaggaggcggcgggcacgcccggcctcccacccacgtcgtacaagctctcctgccacacggaaaaggggcgcggcgtgttctcgttctgcgtctgccccggcggcgaggtcgtcgccgccgcgtcggaggaaaagcgcgtcgtgacaaacggcatgagcgaatttgcgcgcgacggcgagaacatcaacggcggacttttggtctccgttacgccggaggatttcccgtccggcgataccctcgcgggcgtccagttccagcgcgagctggaggacgcggcctatcgcctcggcggcggaaattacgccgcccccgcccagcgggtcgaagattttctcaagcatcgcccgtcaacgggagcgggaaaggtcgtgccgacctatcttccctccgtccgctggtgcgacctgcacggctgtctcccgccctttgtgtgcgaggcgctcgaggagggccttccgatgctggggcagaaattaaggggcttcgatgcgcccgacgccgttttgacggcggtggagacgcgctcttcgtcgcctgtgcgcatcgtgcgcgacaacttgagttttcgatccgccctgcgcggtctatatccctgcggcgagggcgcgggctacgccggcggcatcatgagtgccgcggccgacggcctgcgcgtcgcagaaatgattttggaggaattgaaccatgaatgaaaaaatcggcgtcatcatcgacttcctgactccggcatacgaaaagacgctgcgcgacaccgccgcacgctgcggctacgacatcgtcttcttcccctcgtccagggcggcggagggcaatgtggacgactgcacgatcctctacggccatccgtcccagcgcgttatcgcgggcgcacgcaatctcaagtggtacgcgagctgctgggcgggcgtggaccgcttctgccgcgacgacctgtatcagaatcccgactgcctgctgacgaacgcctcgggcgcttacggcacgacgatcgccgagcattctgtcatggtctcgctgatgctgctgcgccgccagatggaatacaccgagatcatccgcgagggcggctggcgcgtgctcccgggcggcattcactcgctccacggcgcgcgcgtcacgtgcctcggcacgggcgacatcggcacggaatttgcccgccgcgtgcgcgcattccatcccgcgagcctgaccggcgtcagccgcagcggccgcgcgaacgcggactttgacgccgttcatcccgtcacggagctcgatcagctcctgcccgagactgaccttctcttcatgtctctcccctcggtgagcgacacggtgaacatcctgaacgcagaccgcatggcgctgctcccgaagggcgcttatgttgtcaacgtcggccgcggcacggccatcgatcaggacgcgctgatcaaagcgctggattccgggcacctcgccggtgcggcgctcgatgtcgtcgtgcccgaaccgctgcctgcggatcatccgctgcgcaaggccaagaacctcctgctcacgccgcacgtcgcgggcaacatgacgctcggctacacctgcgagcgcaacgtgcagctcttctgcgaaaatctggaaaattacgccgcgggccgcccgatgcatcacctcgtcgaccgcagaaagggctattgaatcgcatcgcgttccgccgctttgcggcgggcgcagcacataaaaaggcagcaatatgaaaaattcccgcatcaaaaacggtatcatgcgcattgtgcagggtatcatcatcggcgcgggcgcgattttgccgggcatctccggcggcgtgctcgcagtcgtattcggcatctaccgccccgcgatggagctgctcacgcaccccaggcgcgcgcttcaacgctactggcggatgctgctcgccgtcggcatcggctgggcgattggctttttgggcggcggcagcgtgatccttgcgctgtttcaccagtcggaaaccgtcgccacgtgcctcttcatcgggctcatcctcggcacgctgcccgacctctggcacgaggcgggcacgcaggggcgcggcaacggttcgtacatctcgctgatcgtcagcttcctcgccctgttcagcgcgctgatggccgtcaagttcagttcatttgccgagatgcccgcaaacttctggggctttctcttctgcggcgtgctgtggggcttcagcttcatcatcccggggatgacgtcgtcgtccatcctgatggcggtcggccttctcacgccgctgatcgacggcatcgcgcagcttgatcttgccgtgctcatcccctgggggcttggcatggtcggcgtgatggcgctgtttgcccgcattgtgagcaggcttttcgacacgcactactccatcgcttatcacgccgtcatcggcatcgtgcttgcctccacgctcatcatcattccgacggactttgcctcgacagcggagatggtctggggcatcgcgtgcgccattctcggcgcggtgctcgcgtattttggcagcaagctccagtcgcaggaggacgcggagattgaggcgaaataaaagcagatacaaaaagctgacggtcaaaagatcgtcagctttttacggtatcatcatttgtgagcgcttcgcttttgcgcttgcgcttgtagtgctacatcatccggtcggcgcgtttgatcgcatcctctacgctgccgagcaccggattgaagcacgcatagccgaccgacacgtgcggcaggtgctcgtttttcactcgccgtgccgtcagctcgcgcaggaattccgaaagatacttttccgccgccgtgtcggagatttgcgcgatgacgcagaattcgtcgccgccgatgcggtagcagtagccgacctcggcaagcaccgcgtcgcccacgccatggccaaaggtgtcgttgacggatttgaactcgtccacgtcgaaatagtagatgactgcgtgcccgcgcaacgaggcgggacggctctcatagctgcggcggttcagaagatgagtcagcgtgtcgattttctgcgtgagctcggaatacaggatgtaaaccatcagaacatcgaccgctgagcacgcccacatgatgcgcactccggcaccgtactggaggaacagcccacagaagaaaaaaccggcaggacgataacgagcgcccgatacaggccataatggtgcgaactctcgctcggcagctgaccaatgaacagcagaacgccgctggcataggccagcacgtagacccagtaaaacgtttcgtgatgataaacgttttgtgcgtcgaccgagaagatgaagccgaagaaagccgacagcacctcgagccccgcgtggacgctgatgagggtataaatgagctttttatgcttgagcggccatcaggtcgctgcaaagcacagtgatgatcggcgctgtggataactcgatggtcttaacgaggatgtgcagcgtccgcagcgacgggtcggctccgtccatccaaacgccgaaccattccgataccatgcttgcgatcaccagtacggagatcgtgtaaaccgtctgctttttgtcatgctccatcagatcattgccgctcacgagcatgtccatgataatcataataaagaccgaaaggaagatgatcgccgagtagaaatccgacatggcgcgaaccttcctttctgatagttatattcttactatatcaccgttgagaaagactgcaacgaaaactaaaaaaacgtcgaatcctgtcgttttcccaaaattcacacagaatctgacagcaattcgctgtactgcgcaaggctctgcgtggcgagttgctgcatcgtcgaccagtccgccgcgcccgcacttccctgcaccgccacggtgcgaaaacccgcgtccttcgcgttttggatggcggaaagcgagccggagaagacgatcgtatcgtccttttgcgagtgcaggcgcttcatcgcgcgctcgaacatcgtgccgctgtccgccttgcagagcgcgacggattctgtcagcacgaagcggaaatacgagttaagccccgccttttcgagcgctttttgcgcgtcctccgcgctgagcgccgtcaccgcgccgagccacacgccctccatcttaaaaagtgaaagcgccttgtcgagtccctcgcgcgccgcgccgtcgggggtgaagagggtatcgcccagtgtaaagattgcgctttgcagccgcatattcggttcctcctgtgtttgaatgatgattgcctcttattataatgcgccccgccgtcatttgcaatcgcggcgaagaagaatatcctatgcagtgcgattctgtataaatttacggatgcattcacaaaaggatctgaaagacgggggcttgacgcactgctttgtgaaaaatgatgaacaaaaatacagattcaacgctgaaatttggcgggattaggtatgaatattcccttgactatgtatttttattgagttacactaaactcatcaactttccgccgctgtgtgtggcggcataagaccactctggaggacgaaaaccatgaaacattatccaaactctgtcagcaaagcgctagcgctgctgatggccctggtaatgacgctctcgctcgcggtcacgtccgcgttcgccgtcagctaccaggacatgaaccccaaggacgatgcgctgctgggaacgaaattcccggtcgacgcgaccatcacccttgtcaccgatgaaaacggcaaggacgtgtctctctccatccccgtgtccggcatgacgaaggatgcgctcgccgcggccgtcagcaccggtaccgtttcgctctcgctcgagcgcgacgattcccgcccctacgtcaacgaggagctgttcccctacgcttacgcgggcggctctctgaatgactggctgaccgagggcgacgggcaccagttcacggacatcaagctctccgcaagcgagaaaaacggcaagactgtcctcgacgtgagcttccacgtgaataactacttctactccaccaaccgcagaaccggcgtgaccagcgtcgactacagcgtgccccacaccaacggcggctactacatcgacctgtgcggctactttgatctcgtcgccaaaaacagcggcaaggatctcggctccgtgagcgtcaaagttgcgccgtatgaaaacttcaacaccatgtgggagatctacaaggagctcgatacgatcgtggcaaacggcacgaaaaacggtctctacgtggaagaattctccatgggccagtccaccgcgggccgtgatatgccctatctcatcgtggccgactccaaggcgagcgtgagcaagtggctcgccctgaccgagcaggccgagaccgatcccgatgccgtgctcgcccagatcaagtccggcgcgctcgacgagatccgcgtgcccgtgatgtattccaacatccactccaacgaggtcgccgccaccgatggcgtgctcgatttcgccaagatgatcacgagcgaaaagaccatcgactacaagacgctcaccggcttcaccgccgcgggcgaaaaagagctcaaggaagagatgggccctgtgggcgcggagggcagcgtcgccatccccgacctcgtcaaggacaaggccagctacttaggttacctgacggtcgataacaacggcaagtccggcaaggtcgaccttgaagagtattacaccgtcgaaaataagagcgtgaacgtcaaggacgagcttttgtccgacgtgttcttcatcctcgtccccgaggagaatgtcgacggacgtacttacctgacgagacattccaccaatggctatgacctcaaccgcgacaactccttccagaccacgagcgagacggccaacatgcagcagctcatcggcacgttcaaccccatgtcgcttgccgagttccacggccgcgtgcaggccttccagtgcgagccctgcgatcccccgcacgagccgaactttgagtacgacctgctcgccgagcacctcatcaccggcggcgaggcgctgggcatcgcggcggtcgccaacaacgatggctacaacagctatgtcatcccccagcgcgattacctgagctacaccggcaacggcaccgagacctactgggaagacccgtgggacgatatgtccacgagctacactccccagtttgccatgctgcagggcaccgttgcctacaccgttgagctgcccgcctacaacgatgataccgctcaggcggcgcagtacggtatcctcggcaacgccgcctatgtggctgccgaaaagctttcctacctcacctctcaggtcaagatcttcgagcgcggtgtgaagaatctaaactccgacgcgtatgagctcgtcggccagtggttgtgcgaccagaacgacgtcgagggcgcggagatggacgtcttccgtcccgagtacaacggcacgggccagaacggcaacttctatcccgagtgctacatcatcccgcttgacggcaagaaccagaccaacctccaggccgcctccgacatgatggagtggctcacgagaaacgacgtcaaggtcaacgtgaccgaaaaggaattcacctatgacggcgttacctaccccgccggtacgatgatcgtctcgatgtatcaggccaagcgttctgtcgccaacggcgcgctgtatgacggcacgctcatcaacggctggacgatcctctactccgagggaatcacctccttcaatgaaacgcgcggcttcgacatggtcaccgtggccgagcccgccgcctacaagagcatctccgccgtctgcggcgacgcgatggatcacgacgacgccctcgcttacaccaaggcgctgacctcctgcttcaccggcgacaagaataaggacgtcatcctctccaacgcctctgaaggctccaccgccgccgtcaacgaacttctcaaggccggcaagaccgtcggcatggtcacgagcggcgaccacatgggcgatttcatctgctcctacgccgactatcagaccgtcgcgggcaagtatctgctctctgccgcgggcgtcgacaagacgagcgtgaaggcgaagatcatcaccaagtccccgaccgtctacgtccccggcacgcccagcgagagcagcaagggctttgtctacaccccgcaggtgagccagagcgccggctggaactatgataccgccgcgatgaacctcatgggcttcaccacgacctccgacgtgaccaaggcggacgccgccgcaggtgcgacgaagctcgacgccgccgcaaagaccgccgtgaaaaacggcctgccgtacatcggttacagctattccgcagcgtcctccgcctctgacctcatcgccggcgtggaatacaccgagctggacggcgcgatggactgcctgacccccgttgtctatcccaacaagacccttgtgaacgcgagctacattgctgacggcgacgatatcctctacgcctacggcctcggatacttctccaaggtccccgcctccgcgacggtcctcgtcaagagcgataagaccaagacgcccaccgagggcttcatccccacgaacactgccgagcgcgccgcgggcttcaaggcctacctaaacggcggcgtgcagggctttgcctacaaggaaaacggcatgaatgtcgtcctctttgccaactccctcacccataaggtccaccagagagacgaatatgcctacctcagcaacttcctcttctcctctgtcctgagcgacaagaactatgacggctccgcgtcgcttccctttaccgatgtcgccgacgacgcctactatgccgacgccgttgtctgggccgttgcgaagaacatcacctccggcgcgaccgccacgacctttgcgccgaacgcgggctgcacgcgcggccagatggtcaccttcctgtggagagccaacggcagccccgagccgaagtccatgaccacgtccttcaccgacgtgaagagcggcgcgtactacgaaaaggccgttgcgtgggcggtggaaaacaacgtgaccaccggcacgagcagcacgaccttctccccggatgcttccgtcacgcgcgcacaggctgtcaccttccagtggagagcggccggcgcaccggcggctgagggcacgaacgcctttgccgatgtgagcgcgagcgccttctacgcccccgccgtgcagtgggccgtcaacgcgggcgtgaccaccggcacgagcgacaccaccttctccccgaacagcaactgcctgcgtgcgcagatcgtttccttcctctaccgcgccgccaagtaagcggccacacaaaaaatacgctgcggagcaatccgcagcgtattttttgttccgcagcttccacagggcgatcggttcctgtggaaaaggagcgaaaatttttccgtcccgcctgttgacataggggacatcgcagaccataatgcttcaaaaatgaacagttcaaaaaagaaagaaggaagggcatgaaccgaagcatatcgatcttgcgaaagatcgctctggcctacagcgaagtgtgcaagccgctctgcaaggagctgggcctgccgcagacggccttcgacatcctgatgttcctggggaacaacccggactataaaacggccagcgagatcgtggagatccgccgcctcaaggcaaatctcgtgtcggtcaatgtggaaaagctcgtgcaggagggttatctcacgcgctgcgcggtggcgggcgaccggcggaagacggaacttctctgcaccgaaaaggcagcgcccatcctcgcgcgcgggcggcagctccagaaggatttttccgagagcctctttgcaggcatggacgaagcgcggcgggaagccttcgccgcggcgctcgcggagattgaaagcaatcttgatgcaattctggaggcaaacgaaccatgagtatcctgacaaccgttctggtcacattttttgcgggcatgggcgcggggctcggcaccggctttgccgggatgagcgccgccgcagtctttgccaaccgtgcgcagcccaagaccctcaaccgcgccacgggtgtggtgctcgtggtgctgggcattgccgtgatgggctttcagctgcttgcgtgaaaatgcgcccctttgacgggcacttcgattttcttcgccatcacaagacctcctgcgtcccttcgtttccgataggaaggcaggaggtctttccttttgccgaaaacaagaaaaaacccttgaaatcatagcgattccaagggttttggtggagactgctggactcgaaccagtgacctcctgcgtgtgaagcaggcgctctaaccagctgagctaagcctccaactgtggtgacccgtacgggattcgaacccatgttacagccgtgaaagggccgtgtcttaaccacttgaccaacgggccatatgagacacgggatgctttcgcatcccgtgcatctggtagcggcacctggatttgaaccggggacactgcgggtatgaaccgcatgctctagccagctgagctatgccgccaaatattcctgctcgacaggacagaagctactataccaaataagatagccttttgtcaatagcttgtccaaaaatttttgcgattttccgaaatcggggagaggaccgcgccctctcccctgcttttcatcagcaaacgacgtttttcccctctgaccagacggagacgatgttgtgccggtgcatcatgtagatcgcgcgctcgaagcgctcgcgcaccgagagcggatgcgcggcctcggtaaagtcggagtcgtcgacgacaatggcgtggatatagtcgccggggacaaatccgccgtgcccgccgaaatactcgtgtcctgcgctggagccgaggtagtagccctcctcgacggtcagaaattcgtcctttccgtcgctctgcatgtggcggaacttcgacgcgcggatggacatggtgatgaccttgttcatcgccagcagcgcgccgcctgcgatatccgacccgagcgtgacgaggttgccctcgcgcagcagcgtccgcacgggcgcgacgcccgagcagatgttgatattcgaccccgcgcagtgcgccgtgacgacgccatgctcgcgcatggcctcgcgctcgcgctcgtcggagtggacgcagtgcgccatgacggtatggtccttccacagccccgcgcggtcgtagctctcccaatattgcgcgcagtcggggcagagctctttgacccacgcgatctcacccttattttcagacaggtgcgattggacgtacagcccgcgctccgcggcgagcttgccgagccagcgcatcagctcgtcggtgcacgatggggtgaagcgcggcgtcaggatgggcttgacggtctggaagcgcccgcacgcatccagccagcgcagcgtttcgcgcttggactgctcggtcgtctcctgaagctcggggctgccgttgcggtccatgttgaccttgccgacatagcccgtgacgcccgccttttcgagctcttccatcaaaatgagcgtcgcgtccgtgtggagggaggaaaacatgcaaacgcgcgtcgtgccgctcgtgatgaggtcgctcgcgagctttttgtaaatgcggcgggcgtagtcgctgtcttcaaagcgcgcctcggtcttgaacgtgtaggtgttgagccagtcgatcagcggcaggtccatgcccatgccgagcatggggtactgcggcgcgtgcaggtgcatgtcgacaaaagacggcatgatgaggctatcaccgtagtcgatgacctccgcgtcggcgctttgcggcacggccttttcaacgctttggatgctgccgtcgtcatgcaggacgaggcagccgtgctcgatgatctcgagcttgccgagcgccggtgcggaaacgagattgcccttgaggatcttcatatcagtcactcctgttttagctttgtgcaaaagaaaaagcgccccgcccggggacttctcccccggctgagcacccatagcagagcctttcggcggctccgtagaaactttcgcgccatgtaagcgaaactatatgagtttttctccgctgccattaccataccacgcgaaagcgaaaattgcaagcgaaaagcggcgggcgcgctatgtcatatcggcgcaagtgcgcacataggattgtcccaagaggtgaatcacgatgcaaaagaaacggacaggacggatgctgtgttcgctcgcgctctcggcggtgacgctctggggcgtgagcgtcacggcgccggcgaagaacgcgcgcgatgcgctccgctcgctcaaggacgagacgctgggcgtgatgctgctgagatatgagcgcggcgacggcggggaggactttctcagcctgcgaacgtcgctcgcgctgcacgcgacgccgcttctgcgcgagggcgaggagaacatcgcgcaggcatggtcggcagagcttgagcaaaagcccgatgacagcgcggacgaaacgggcgacgcgcaggacagcgagggcacggtgctcacgcaggaggagacgccggacgagatcgccgtgacggaaaacggctcgcccgcccgcacgctcaaggcgtccgacccctcgggctatacggtattcggcaatgtgtacatcaacaacggctcggatgccgcgctcgacgccccgatgctctcgggcgattatgcagcaaagctcggtgcggaggggccgcaggtgctcatcatccacacccacggctcggagagctacaccatgccgccggggcaggaatacgacgtgtccgacacgttccgcacgctggacacgaactgcaacatgatccgcatcggcgacgagatggcgcaggtgctgaccgacgcgggcattagcgtcgtgcacgaccgctcgctctacgactatccgagctattcgggcgcttacaaccgctcgctcgcgtcgatcgagagctatctgcaaaagtacccctcgatctcgttcgtgctcgatgtgcaccgcgacgcggtgcaggacgcgaacggccagcagttcaagctgctgtgcggcgaagataaaaacgccgcacagctcgaatttgtcatcgggtcgaacggcggaggcctgagtcacgatctctggcgcgagaacttaaagctcgcctgcgccgtgcaggaaaccctgtacaaagactatccgaccctcatgcgccccgtcaccgtgcgcaactcccgctacaaccagcacatgacgacgggctcgcttctcgtcgaggtcggtacggcgggcaattcgctcgaagaagccgtcaacgccgcgcggctttttgccgcgggctttgccaaaacgatacaaaacgggacgtaacggcgctcccgccgccaaaatagacggaaagaggcaaaaaaagcacaaattcttgtcaaagttgccgtgttgcattctgcacaaaaatcctgttaaatggaagttaccatttcaatcgaaaaatttcgtcagaaattattttttcaggaggggtaattccatggagcttcttcaggagcgcatccgccgcgagggcagagtcctgcccggcaacatcgtcaaggtcgacggtttcctcaaccaccgcgtcgacacccgtctgctcgagaacattgcggacgagttcgccaagtatttcgacaccagcaagatcactgtcgttctgacggcggaggccagcggcatcgcgcttgcgaccatctgcgcgcagaagtacggcgtccccatgctcttcgccaagaaggccaagagcgacaacatcgaaagcggcctgtaccagagcgaggtgttctcctacacctacaagaagagagtcacgctgctcgtctctcaggagtggctgaacgcggacgaccacgtgctcatcatcgacgacttcatggccaacggcttcgccgtgcagggccttgtcgatatcgtcaacgaggcgggcgcgaagctcgaaggcatcggcatcgccgtggaaaagggcttccagggcggcggtgaccgcttccgcgcgagcggtatcccctacaaggcgctcgccgtcatcgaaaaggcggacgagaacggatttgtcttccgcgaggaataagttcttcaaaaaagagaggctggccatttggccagcctctcttttttgatgggggggctgagaagtgtaaattccaacgcacac

SEQ ID NO: 10117 - DNA, 26899 bp, Unknown
  gut microbiota DNA sequence
cgctcagagcgtgatctactacaacgccaagcagcacaacgtcgagggcactgtctatgacgatgctgccaagttctacttcgacaacgcggtggccagcaccaacaagttcacctggttcttcgatcagtacaacaacctcatcggtaacgttgagatcgctgccgctaccagctacggcgtcatcaactccatctggtgggctggcaatgctacggacggttccggcgttgctaaggcgaacgtcacctacatggacggcaccaccgccgttctcgacatcagcaccctcatctacaatggtgctgccgccgagaaccgcaacactacgtatatcgctaagggcggcaaactgtcccacaacaccgctgcccttaaggtcatgtccggcgatacctacagcaccgcgcccacgagctacttctacatcgacgactatatcgatcagaacgcccgtgccgacaagaccggcgctcagatcctgaacgacgatatgttccagttcaccactcagcccaacggcactgttgccgctgtcgaggtctccggtaatggcacaggcgcaaccgccactgtcaatggctccacagtcaccactaccgccaagaaggctcttcgcagcctggatgccgcggttggtactgatgctctgtacaatggcaggctgctcaccaacagcgccaccatcttcccggttcgctccggcaatggcaataccgttcccttcacctataagtctgtcatcggtatcaacgccatcggcaactatgtccggggtgaagtcgactatgttgacctgaacgatgacggtgttgcagattacgtctacatcatcgctgcttccgacaccgctaaggctgagggtctgttctactatgccggcaacaacagctactcctataacaccaccactggttactggaccatcaacggcttcatggacggtgttgatgctacgttgactgtcgctaacgacaacttcttcgatggcatctccggctatgacactgctcatgccggttgggtcagcaagatcgttgctacttccaaccgcctgtatctggtgaagaccgaggacggcctgctctccgctgagcccgttgcttacaacaccaacgatactcaggtcactcttgacgatgattactccgacgcttacacgggcaagaccccgtacgtcaatgttgtcgccggtgaaactggcagcaagttcgataacaacctgctgagcatggccgctggtcagaacttcaccaccaatgagtctaccaagttcgttgttgatggcaagactgctgctctgccctactccctcaccgactacaatgtcatcattgtccgggatcgcgccaagagcaccgctctccaggtctacgcttacagcaaggacaccactaagaccaacacggacatcgtttactccgttgttgctcgtgacaaccaggtcatcactgccgccgttaacaatggcactctgaccatcgaccaggccaagctcgtttcctccaccaacggtgctgccaacgtggacgctgcgttcaccaccgccaccgctgccgtgaagttctacgatctggccggtaacgaagttgctaccagacaggctgctgtgacccccaccgtgaacggcggtggcacggcctgcgtcatcagcatcagcgttcccaccactctcacgcctgcgaactacaaggtcgttgtgaccctggacaacgtgaaggtcggttctgatgttgttgctacttccccctccgtcttcgaaaacgtgattggcttctaaacaacattcgttagacgtctcgttctgctacgcgactgacaacaaaaacagccccgagcctttcggctcggggctgttttttgctttatccagtccgcgtcataaccgaggacaagatagcaatattctttcccgctgctgttgaactgcgaggatgccatatatccgccggagtcgctttgcagcgtctccgacacccagctcacgccgccgtcaccccatgtatagtaattgttcatggagccgatgccggacgagcaggcggtcacgccgcgtatgaccgtcgttttctgtccgccgtccgcgcggaacagcaccagcaccgcggggcaaaagccgcattcgacgctgttcgggtgattttggcccgatagaccggtgccggtgtatgtgccgaacttcgcgcggcgaatcctgctgctggcaatcgtctgcgcgatcgcggtcacggcctccgcctccgccttggccgccaccgcgtcggcgttggccttgagcgtttcgtcgatcttgccaaacgccgcattgacgtcatccatcttgataaagtccgacttttcccacttgggcaggccgtaattggctgtttttcccatcgcatcctcccctttcaccacgcgcggcgcacgacgctcagcacgccgatggcctcgtcgatgcttgaaaagcggtagacgcgctcgtcgcgctcgcgctgcgccctttcgatcgggttttcgaatttcatccgcgctaagtgctcgcatttttcgatctgggttctgggtcgttcataggtgttgttgtacatgtttttcctcctcattttgtgcagcccgcgcatttgcgcggaccgtttacagctataaagctgtaaagcggttttttgggacgaaccggtgcaacagagggaaaatttttcgccttgacaactcggggaagcggggtataatggaggtagaaaagggcgctgcgacaagcggttagtccggttcgtaagtagtttcaatcatagaaaccgtcacttgccggagtggcggtttctgctttttacgataatcgtcacagtaaactgcttgatatgaaacgtaattcgcatttcgtcaccccctttcggggtacgtgactaaccgcctgccgttgtgcagcgcctgatgtaattttacaaaattttacacgctttgtcaatctttgccgcccgttgggcggtttttttgcattttttagagggtttcgagcgtcagcagcgcgtcgagcagcggccacgcctgcgcgagctcccgccccgcctgccagaagccgatgccctgcaagcccttttccgccgcgaggacgatcttcgcgcgcagcgagcgcgcgtcctcgaaccagacgacgtgttcgcgccgcattttgtcgaagtagtggtagcagggcgagcgcgcggtttcgtcaaactcaatttccgccctcaccagccgcgcccgcgcgacggccgcttgcgacgagaacgtctcggcccgcgtacggcctttttcgtagggcagcggccagtcgtaagcgtacagcggcgcgccgaggaagatgttctcccccgccgtgaccgagagcgcgtaatcgagcaccgcgcgcacctgcggcagcggcgcgatggcctgcggctcgctgtaggcatagccccattcataggtcatcaggaacacggcgttcgcggcttttgatagcagcgcgtagtcgtgcgcctcgtagagcagtccgcgctgctgcgcgctcgtcttcggcgcgagtgcggcgacaacgggctttccctcggcgttcagcgcctcgcgcagacggcagacgaacgcggcgtagtcctcgcgcagctccggcgggacgtactcgaagtcgacgtcgaggccgtagtatccctttttcgccatcgtctgcaaaatctcggcaaggagcgcgctctgcgcgcggtcgttttgcaggagcgccgcggcgttttcgctcgaaaaattcccctccggcgtcagcgtcgagaggtgcatgagcgattttgcgccatagtgcgccgctcgttcgagcaggcgcgcgtcgtcgagcggcacaaggactcccgcgggcgtgatgccgtaggtgaacggcgtcagatacgtcaggtacggcaggaccgagtcgagcagctcgccgccgatgtaggggtaggcgtaggcgttcacgccgagcgtaccgagcggcgcttcgtctgcgtagtcgatggcaagcacgtcgccctcgcgcagaagctcgcgtccgtggaggaaaaagttccgccgcaggagcgtcctgacgctcaaatcatagtcccgcgcgatggacgaaagcgtctcccccacgcgcacggtgtgcagtgtcttcggcgtccgcacgacgagcgcctggccgatcacaagcggcgtactcagcgtaaggccgttgtccgccgcgacgaacgcgggcagggcgccgtgcatcgcggcgatggaagaaagcgtgtcgccgcgctttacaacatgaatgtgcatggtcgatcacctcgcgccattctatgccggatttttcgcgcttaccccagcgcgacgtccagtatcatcatcaggaggaagcccacgaggaagccgcacgtcccccgccgtccgcccgcgcgcggcagcagctcctccgccacgacgtagagcatcgcccccgctgcaaagctcagaagccacggcatcagcgcgtggattcccgccgccgcgagcacgacgagcgcgccgaacagcggctccaccgcgccggagagcacgccggtccagaaagcgtgccgtttcgacttgcccgattggtacaccggcagcgccaccgccgcgccctcgggaaagttctgcacgccgatgccaagcgccagcgcgaacgcgccggcaaggctctccccgtccgccgcgagcgcgaacgcgaggccgacggccatgccctcggggatgttgtgcagcgtgatggccgagaggatcaaaaaatcgctgtgcacctctcccccgccgcgccgccgcacgagctcgtcgagcaggaagagcgtcagcgcgccgagcacgatgcccgccgcggcgggcagaaacggcggcagacggccctctgcctccgtctgttcgatggcaggcaggatgaggctccacacgctcgccgccatcatcacgcccgcggcaaagcccagcagcgcgccctgcgcgcgctcgcacaccttgcgggcaaaaaagaacaccgtcgcggcgcccagcgccgtcatcagaaacgtgaaagacgtgccgagcagagccagcatcagtggtcgaagcatatccgttcatcgcctttacggtttgtcaggcggaaaagcgcctgtatgccagtataggcggcaggaatgaaaaacgtgaaaaagggcgcggagaattcctccgcgcccttttggagcaatattgacttactgcatcagctgcgcgaccatgtcggtgtacgcgctgggatcttcgagcggcaggcccgcgatgaggtttgcctgatcgtagaggatcttggcatacagcgccgccttgtcgcggtccgttgccagcgcggcggccatcgccttgaccgccggatgatcgacattcagctcgaggatgcgctcggccttgatgggctcgggcatctggaagttcttgaagtacttctccatctcgaagctgaagccctcgcccgccgtcaggcagacgggatgggtcttcaagcggtgcgagaccttggcctccttgatcttgtcgccgagcgtctccttgacgaactgcatgagctcggcgctctcgctgtcgtccttttgctcatcctcgccgccaagctcgaggtcgccgtccacgatggagcggaacggcttttcgtcgtaattcatcagcgcctgcaaaacaaactcgtccgtctcgccggtcaggtacaggacctcgtagtccttgtccttcaaaagctcggtctgcggcagcttgtccacggcggcgatgctctcgcccgcggcgtagtagatgcacttctggccttccttcatgcgctcgacgtactctttgagcgtcgtgagcttcttctgcgtggaggagtagaacatcatcaggtccttgagcgagtccttgcggctctcgccgccgtcgctcacgatgccgtagccgatctggcggccgaagttctcgtagaatttctcatagccctcgcggtcttccttgaggaatttttcaaggtcggcgcggaccttcttttcgaggttctggccgatgaccttgagctggcggtcgtgctgtaaaagctcgcgggagatgttcaagctcaggtccggcgagtcgaccacgccgcacacaaagcgcagatagtcaggcagcagcgagtcgcacttgtccataatgagaacgcccgcagagtagagctgcaatcccttttcatatccttccgtgtagaagttgaacgggcgcgaagacggcacgaacagcagtgccttataggtcacgctgccctcggccgagacggtgatcgtgcgctggggcttgtcgaattcatgcgtcagctcggagtagaacttgttgtactcttcgtccgtgacgtcactcttcttgcgctgccagagcggcaccatggagttgacggtcttcatctcctcgacggtctcgtactcgggcttctccgggtcgctgccctctttgaccttctgctcgggcagcagcatgcggatggggtagcggatgtagtcggagtacttcttcacgagcgcgtgcaggcggtaggattccaagtactcgctgtacttctcctcgtccgtgtcgggcttgatgtgcatgatgacgtcggtgccgacggcctccttgtcgcattcggtgatcgtgtagccgtccgcgccggaggactgccactcataggcctgctccgaaccgtacttcttcgtgcggacggtgatgctgtcggcgaccatgaacgcggagtagaagcccacgccgaactggccgatgatgtcgatatcggcgtccttcttgtccttttcctcggtctcctggcggaacttgtaggaacccgacgacgcgatgacgccgaggttgttttcaagctcttcgcggctcatgccgatgccgttatccgagaccgtcaacgtgcggttctccttgtcgaccgacaccgtgatggcaaaatcgctgcggttcatgccgaccttgtcgtccgtcagcgcgacgtaacagagcttatcgatagcgtcgctggcgttggaaatgatctcgcgcaggaagatctccttgtgcgtgtaaatcgagttgatcatcagatcgagcaaacgcttcgattctgctttaaactgttttttagccataaaagcatccctctctgaattgtatttgaacctaagtatagcaggaaattcctgatatttgttactaaactcttaatttttagcactcgtcggcagcaagtgctaaaacaggatagttaccttttgttatatataaaggaagctatcggtttcgcaccggtgcgaaggatatgccgcctgcgggcggcaggggcaaaggggatattctctttcgcaaaagagaatatcccctttggaaccccaagagaaaggcttagattggcagtttcgggcttgaacgacttttatgcctccggaatgggaatgcctgcgcgcggcgttgccgcgttagaactgcaagacgatttgcctctgcttctattatccgctgccgctctgctgatcttgtagaagtgcagactaatttccgtctaccgcggcactcctcaatgcggcgagcgcagcaatgccgctatttcgcacgcagtctgccgccgagcaaacgtcactcgcgcctcacgatagtaaggcgcggttgcaagacgtaacgatttgcagaagattcatggcgaagccatgtacaccgcacccacactgcgcagcgcgtgcagttattcgagctacaaactggcaatgccggaggtcgaggggtcctcccctcgttctttctcttgggggtgtaagggggatattctctttctgagaaagagaatatccccctttgccgcgtccccacacgctgtggggccagaagcagcgctgccgcgctgcaccctccctgcgccctacgggcgcaaaaagaaacagccctcgcgggctgctttcctcccgcgcccgaggcgcgaaagttgtccaaattgtcaatatgggatacttatccccatttcccctcttttttctttggataatatgctgtattgacttctggcgttttagaggctaaaataagcccatcaaacatgagggatacatgaaaggatttaatgttatgttccgttttgcttatgcaaatcagaataacgccgccgcttctgccatgtgcgcagaggctgcttcctcctgcacctctcagtcctcccgcttcaactgcatcgctctgggcgccatgattatggcgtccattattatttcccgcctgattagcattatcggcatttccctgctggtactggtacttctggtcgtcctgatgggcgttcccgggatgaaacgcgattgctgagcgagtaaaaaacgcgatacagcaaagcggttccgccgggaatggcggaaccgcttttttgtatgataaatctgttcattatttaatcaaaggagatttgaaacgatgaaaaagaagtttatgtgcatgctcatggctgcggccatgacgctctcgatggccgcctgcggctccaagggcgacgatgcgaacaacgacgccaacaccgacgcggacggcgtccagacctttacggtcggcacctccggcccgctgaccggcgacaacgcgatctacggtatggccgtcaagcaaggcgtggagctcgccgtcaacgagatcaacgcgagcgacagcaagatcaagtttgagttcctctctcaggacgatgagggcgacggtgaaaaggccgtcaacgcctacaacaccatgatggacaacggcatgcaggtcctcgtcggccccacgaccaccggcgcttccatcgcggttgccgatgtctgctacaatgaccgcacctttatgctgaccccgtccgcttcctccaccgacgtcaccgcaggcaaggacaatgtcttccaggtctgcttcaccgaccccaaccagggcgttggcgctgccgactacatggctgagaacttcgctggtgccaaagtcgccatcatctaccgtaacgacgacgcctactctcagggcatccgcgatgctttcgtgaaggaagcgggcgacaagggcctctccatcgtctatcagggcacctttacactcgatacctcctctgacttctccgtccagctcgccgccgcgcagactgccggcgccgacctcgtcttcctccccatctactatcagcccgcttccgtgatcttcgcgcaggccaaggccatgggctatgcccccaccttcttcggtgtggacggcatggacggcatcctcgatatgcccggctttgacaccactctcgccgagggcctcgtgctgatgaccccgttctgcgccaccgttgaatccagcaagagcttcgtcgacgcttacgttgccgcttacggcaccacgcccaaccagttcgccgccgacgcctatgacggtgtgtacatcgtcaaggccgcgctcgaacaggccggctgcaccgccgatatgagcaatgaagagatctgcgacgcgctcgtttccgccatcacctccctcaagttcaccggcctcaccggtaccgacatgtcctggaacgccgagggtcaggtctccaaggccccgaccgcctacgtcgtcaaggacggccagtacgtcgagggctaaatcccagcacaggaaagaccgacattcgcctttctcagcggcgggtcgccggaagcaaaagcttccggcggcctatgccctgtttctatggcggaaacgaaggcaggtgttttcccgcctctgcccttgtttctgccacagacgaaccataattccgaaagagaaaagagaggtgccatcctaatggaatttttatcctatctcatcagcggcatcagcctcggcagtgtgtacgccatcatcgccctcggctatacgatggtttacggcattgccaagatgctgaactttgcccacggcgacgtcatcatgatcggcggctacgtttccttctgcgcgatgttctatctgggactgcccaacatcgtggcggtgctgctggccgtcatcgtctgcacggtgcttggcgtcgtcattgagcggctcgcctataagcccctgcgctcggcgcccagcctcgcggtcctgatcaccgccatcggcgtgagctattttctccagaactccgcgcttctcatctggaaggcagccgcgcgtgtctatcccccggtggttgagggttcgatgcagctgttcggcggcaagctgaccgtctcctatgtgtcgcttctcacgatcgcggcctgcgtcgtcatcatgatcggcctcaccacgttcgtcaacaagagcaagatgggcaaggccatgcgtgcctgctcggaggataaggcggcggcccagctcatgggcatcaacgtcaacgccaccatttccgcaacgttcgccatcggctcggcgctcgccgccatcgccggcgtgctgctctgctcgttcaatacgtcgctcatgccgacgaccggctccatgcccggcatcaaggccttcaccgcggcggtgttcggcggcatcggctccatccccggcgcgttcctcggcggcctgctcctcggcatcatcgaggccatggccaaggcgtacatctcgacgaaccttgccaactccatcgtgttcgccgtgctgatcgtcgtgctgctcgtcaaacccgcgggccttctcggcaagtccgcgacggagaaagtgtgaggtggccggaatgacacagaaaatgaacaaattcaactcgctcaagaagaccacaaaggtcgactttgcgacctatctcggcgtgatcgtcgtctttatcatcacgacgatcctgcagaacaacggttcgctcaagcgctccgccatcggtctgctcgtccccatctgctgctacatgtccatggccgtgtcgctgaacctgacggtcggtatcctcggtgagctgagcctcggccacgcgggctttatgagtgtcggcgcattttccggcatcgtcgtctcgcagagcctgatgggcgcgatcccgaacgctcccgtgcgtctcgccatctcgatggtcgtcggcgcgatcttcgccgccatcgtcggccttctcatcggcacgccggtgctccgcttgcagggcgactacctcgccatcgtcacgctggccttcggcgagatcatcaaagagctcatcaactgcctcatcatcggctacgatgaaaacggcctgcacttcatcttcaaccccgccggcaacaagacggtcgacgacctcggcctgagtgcctcgggcaccgctatcatcaagggcgcgcagggcgcgaccggcaccgccacgatcgcaacgttcaccgcaggcttcatcctcgtgatgatcacgctcatcgtcgtgctgaacctgactcgttcgcgtgcgggccgcgcgatcatggccatccgcgacaaccgcatcgccgcgcaggccatcggcctgaacctgacgaagtacaagctcatggcgttcgtcacctccgccgcccttgcgggcgcggcaggcgcgctcttcggcctgaactattcttctctccaggccacgaagttcaacttcaacctctccatcctcgtgctggtgttcgtggtgctcggcgggctcggcaacatctggggctcgctcgtcgccgccgccgcgctcaccatcctgcctgaggcactgcgcccgctccacgactaccgtatgctcatctacgcgatcgtgctgatcttcgtcatgctcgcgaccaacaatccgcaggccaaggcgttcttccagagacttctgccccatcaccgcgccagtgctgaaaaggaggattgaccatgccacagaaagaaaaagccaagctcgttcccgtctcccgtgaaccggcgctgctcaccgagcgcgacgcggacaagtcccccgtgctcgagtgcatcgacctcggcatcacgttcggcggtctgaaagcggtcgacaacttcaatgtgaccatcggccgcaccgagatcaccggcctcatcggcccgaacggtgccggtaagacgacggtcttcaacctgctcaccaaggtctatcagcccacccacggcacgattctcttaaacggcaaagacatccatgacctcaacaccgcgcaggtcaaccgcgcgggcatcgcgcgcacattccagaatatccgccttttcggcgagctgagcgtggaagaaaacatcaccgtcgcgatggacacgcagatgcactacacgatgcccgagggcattttccgcctgccccgcttctggaaggaagagcgcgtcatgcatgagcgcgcgatggagcttctgtccatcttccacatggaagaccttgcaaacgccaaggcgaactccctgccttacggcgcgcagcgcagactggaaattctccgtgcgctggccacgaacccgagtctgctgcttcttgacgagcccgccgccggcatgaacccgagcgagacggctgagctgatggaaaacatccgctccatccgcgatacgttcaagatcgcggtgctgctcatcgagcacgacatgaacctcgtcatgaacatctgcgagggcattgccgttttgaacttcggccatgtcatcgccaagggcacacccgaagacattcagaacaatcccgaggtcattgaagcctacctcggcaagcagaaggaggcctaacgatgggacagatcttacaggtgaacgatcttcacgtttactacggcagcatccacgccgtcaagggcgtttccttcgaggtcaacgagggtgaggtcgtcacgctgatcggtgcgaacggcgcgggtaagtcgaccgttctgaacacggtctccggccttttgcaccccaagcacggcagcgtcgttttcgaaggcaaggacttaaagggcgtccccgcgcacaagatcgtcgagcacggtcttgcgcaggttccggaaggccgccacgtctttttgcagatgacagtcgaggataacctcgaaatgggcgcttacacccagccgaactccaccattgaagcgggcattgcggacgtctacgagcgcttcccgcgcctcaaagagcgccgcaagcagatcgccggtacgctctccggcggtgagcagcagatgctcgccatgggcagagcgctcatgtcgaagccgaagcttctgatgctcgacgagccgtctatgggcctcgctccgatcctcgttgagcagatctttggcatcatccgcgagctgcacgctgcgggcacgacgatcctgctcgtcgagcagaacgcgcaggccgcgctctccgtcgccgaccgcgcgtacgtgcttgaaacgggccgcatcacgctctccggcaccggtaaggagcttatggcgagcgacgccgtccgcaaggcctacctcggcggttaaatctccctcaaatgcaaagagccatccgaaaggatggctctttttttgtgcagttttgccgccgtgcaaaatttccgcccaacctgctgcacatttgcaaaagatatggtatactgacgggacaagcgccgcgaaaccgcggcgcgccgacacaggatcggagggatcggattgttcaaaattctcattgcggaggacgaccgcgagctgcgccagctcttcgcccacgtgctcaccaaaaacggttacactgtcctcggcgtctccaacggtgaagaggcgcttgccgcgctcgagcagagctattacgatctcatcatctccgacatcatgatgccgaagatggacggctacgagcttgtgcgctcgatccgcgagagcggttcgtccatccccattatgatgatcaccgccaaggacgcctttgatgacatgcgcctcggcttcctctccggcagcgacgactatatggtcaagcccatcaacatcggggaaatggtactgcgcgtgagcgcgctgctgcgccgcgcccagatggcgagcgagcgccgtcaggtcatcggcggcacggtgatggagtgcgactcgctcagcgtcaccgtcgacggcgagagcatggtgctgccgcagaaggaattcatgctgctctacaagatggcgtcgttccccggccgcatcttcacgcgccagcagctcatggacgacatctggggctatgattccagcaccgacacccacaccgtcgatgtccacatcgcgcgcctgcgcgagcgcttccgcgacaatcccgacttcaagatcgtcacgatgcgcggcgtgggatataaggtggtgcgcacatgaaaaagcggcgcaacaaattcttcgatatccgcgtgcagtttttcttcatctgcatggcgggctttatcggcgtggcgctgcttgccgcgctcgcggcctgggggcttgagcatctcggcgtcaacgtgccgatgttcgtgtggctgctcatcttcacactgctgctcggcagcgcgacggcggcgggcttttccatcgcgttcttcgcgcccatctcgcgcctgtcgcgcgcgatgaaggaggtcgcgggcggcaacttccgcgtgcatgtggagacgaagagcgtctttcgcgatatccgcgacagctttgacagcttcaacctcatggtcagcgagctgaacgcgaccgagaccttgcagaccgacttcatctcgaacgtctcgcacgagttcaaaacgcccatcagcgcgatcgagggctacgcctcgcttttgcaggagcaccagcaatcccccgaggagcaggcggagtacatcgacaagattctcttcaatacgcgcaggctttccgccctcgcgggcaacattctgctgctttctaagctcgacagccagtccatccacccccagcgctcgcgcttccgcctcgacgagcaggtaaggcagtgcattctggcccttgagcgcaagtggacggaaaaggacgtcgacttcgacgtcgacctcgactccgtcgatttcacaggctacgaaggactactccagcacgtgtggacgaatctcatcgacaacgccgtcaagttcggcccgcgcggcggcctgatccgcatgcgactcatcgaggaagacggcagtgtgctcttcaccatcgacaacgagggcaaaagcatctccgacgaggataagtcccgcatttttaacaaattctatcagggggacagctcgcacgaatccgagggcaacggcctcggccttgcgcttgtgcgcaagatcgtcgccatccacggcggcgaggtctgggtcgaagacccggtgaacggcggctgccgcttcgccgtgcgcctgccggtagagaagtgaccaccatttttcaacaaaaattgagattctcttcatcatttgttcgaaactctatgctatattaaatcttagtagccgcagaggcggcttttccccggcgcagcgtccctgcgtcgggcttttatcacgggataaggagaggtgacgatgggctttctgcgctgctgcgtttattacggaattttagccgtcgtgtcgtttttcatcgggcggctgctgccaaaatcctggttccacggcgacaaattcccctaccgctgcgcgagctgggaagcaaagctcttccgctttctgcgcgtgcacgagtggcaggacaaggtgcccgacatgagcaagatcgtccccaagctcatccccgccaaaaaactgggcacggactttcgcgcgcagcttccgcgcatgatcgaagagacctgcgtcgctgagttcacgcactttgcgctcatcctgctcggcttttacgcgctgcgcctctggcccggaacgggcggcgcggtcgtcaccgccatctatattctattcggcaacctgccgtttctcatcattcagcgctacaaccggccgcggctgcaaaagcttctcgccgcgcagcagcgccggagcagacgcaaccaagaagaacaacagtaaaggatcggatcttttcatgaaagttttgattttaagctgcaacaccggcgaggggcacaactcctgcgccgcggcgctcgaggaggagtgccgcaaccagagcattccctgcgacaccgaggacgcgctgcgcttcatctcgcccgaggtctcgcgctttatctccaactggcacgtgcgcatctaccgccacgcgccgggtcttttccgcgtgggctaccgcgcggcggaggatcatcccgcccagttccacgagggctccgcgctctaccgctatctgacgcagggtgcggaaaagctctgcggcttcatcgccggcggcgggtacgacacggtcatctgcacccacacgttcgcggcgctgatggtcagcgaggtcgtgaagacgcacctgccgaacctcaagacctgcttcatcgccacggactacacctgttcgcccagcgtgaaggacagctcgctcgaccgctactttatccctgcctcatcgctctcgggcgattttctcggcggcggcgtgacgagcgagcgcctgcgtgcctgcggcatccccgtgcgccagatgttccgctccagcgtgcgcaaggaggacgccaaacgcgcgttcggcatccccgctgaccacaaacatcttgtgatgatgtgcggcagcatgggctgcggccccatcatgagcatcgcgcgccgcatcgggcgcgacctgccggacgaccaggacctgaccatcgtctgcggcacaaacaagcagctctaccgccggcttcagcgccgcttctatgatgcgaaaaacgtccacgtccgttcgtatgtgaaggacatggcgcttttgatggactccgctgacctctacctcacaaagcccggcggcattagcgtgaccgaggcggcctcgatgcgcctgccgatggtctttatcgacgcggtcgcgggctgcgaggagtacaacaaagacttcttcctgcgcacgggcggcgcggtcacaggacagacgcccaaggagatcgcgcgcacgagcctgcgcctgctcagcgacaaggacgcgcttgaaaagatgggcgacgcgctcgacgccgccgtgccgcacaacgccgcggccaacatcctctccgagatgagcgaagccgaggaggagaaggaggaagacctcgcatgatcaaacccagcgttgactaccgccagttccgcttcagcagactgaacacgccggagttctcccacgtgtggctgctgctctactggccgcttttcggcctcggcttttcgtatgtcgagcgcttctaccccgtggcgcactacatcaacatgcactgcgcgctcgacgatctgattccttttaatgaatggtttctgatcccctacctgttctggttcgtctacctcatcggcgcggtggcctacacgttctttttcgacgtgccgggctttcgccgcatgatgcgcttcgtgatgatcacctactcggtgacgctcattatctatttcctctttcccacctgtcagatgctccggcctgaggtcttcccacgcgacaatgccctcacgcgcttcatcgcggggttctacgtgttcgacacgaacacgaacgtctgcccgtcgctgcatgtcatcggctcaatggcggcatttttcgctttctggtatgcgcccatcttctccaagcgcggctggcgcattgcatcgaccgttgcagcattttttatcagcatttccaccgtctttatgaagcagcactccattctggatgtcgccgcagccatcccgctgtgcgcgatcggctattattttgcctacgtcagaacgccgaaaaaatcccgcagcgccgtgccggatgtcacccgataagaaacttcatccgcagaagctccgatcgcttctgcggatgcttcttttatacggctcttttccccttttcttttgcatatattcgcgcataattgcatacttttgtgaatttttggcttttcgcatgcatatttgtgcatcttgcatagaaaggcgtcgaaagttctggcattttttgagtttttaatcgttgacaatgaataagtaaacatttatactaacgctatcgtttctgaagcgtatgaaaattcgttcaacgatcaaacattatacaagatggaaaaaattgaaaaaggagctatcaaccatgaaaaagtttactgcactgatgctggctctgatgatgagcctttcgctggtcgcctgcggcaataagaccgacgacggcaacaacgccgatgatgccaacaccgacaacaacaccgagcagaccggcggcacgctggtgctcggcacctccgctgactacgccccgtacgaattcatgtatgccgatgacagcggtacgatgcagtacgccggtatcgacatttccgccggccagtacatcgccgatgagctgggcaaggagcttcaggtcgagaacatgagcttcgactacctgctcacctcccttgccaagggcgattttgatatcgtcatggcagccatcgaggtcacgcccgagcgtctccagtccgctgacttctccgatccctactacaccgacctgccggccatgatccttgtcaaggctgacgccgccgatcagtacaacaccctcgccgacttcgccggcaagagcgtcggcgcacagaccgccaccaccaaggaagccatcgtcaccgaccagatggaaggcgcgaacctcgtctccctctcccttgtgactgacctcgtcaacgagcttgtctacggcaaggtcgacgcgatcgtcgtcgacggcgctgtcgctgagcagtatgcagagtccaaccccgatctggccatcgctgccgcctcctccgagctcggtgaagcgcagccctactgcatcgctgttgccaagggcgaccccaagggcctgctgcccggcatcaacgaggccatcgccaagatgacttccgagaacaagatggaagagttcatcgccgctgccgatgagctgagcggcaaggccgtcgaggtcaccgcggacgctcctgcggcctaagttctcccctttaactacgctctcttctcactatctctcatagccaatgagcaaagccccaaatggctttgctcattggcgtctcttaatgaaaagaggcgagcctcttttcattaaattctcactccactctgtgcctcgcccccgcaagcgggtgcttcgacactcgctccgcgcaaagtgttttttgccacgcgcatgtcgtggcaaaaaacgagcaagattttttcgcgctggcagcgcgaaactctgcgaggcttatcccaactaaatcacacatcggaaaggagatctctcccatggatcttgccacgcggtggagcaacctctttgtcggcatgtcgccggcgtcgttctttaacttttcctttttgccgaaatacggcgtctactttttgcaggcgctcggctacacgctgctgctggccgtcatctcggtcctgctggcggtcattccggcgctgctgctcgcgttcatgcgcctgagcaagaataagtttgtgcgcggcatttccggcgcgtacatcgcgatcttccgctctacgccgctgctcgtgcagctctcgatcatttactttggcttttttggcgcgatctccatcccgcgcctgtacatcttcggctttatcgacatttcccgcttcatccccggcgttgtggccctcgcgctcaacagctcggcctacgttgccgagatcttccgtgcgggcatccttgccgtcgacgcgggccagactgaggccgcgcgctcgctgggtctttccgccacgcaggcgatgaagctcgtcgtgctgccgcaggccatcaagaatgtcctgcccgcgctcggcaacgaggtcgtcaccatggtcaaggaatcgtccatctgctccacgctcggcatggtcgagctgatgttcgccgcgaagaccgtggcgacctctacctacatttccctcgcgccttacgtgctggcggcgctgatgtatttctgcatcacctaccccgccggcaaggcgatcgaagcgctcgaaaggaggatgcgtcgtggcgacaagcactaattctctcatccgcgtgacggacgtctgcaaggagtacaacggcggcagcgtccacgcgctctcccactgcaatttaagcgtgaaaaagggcgaggtcgtggccatcatcggcccctccggcagcggcaaatcgacgctgctgcgctgcctgaacctcctggagcagccgacctccggcaccatttacttcaaggacgtcgccctcaacggcaagaaggtcaacttggacctccaccgccgcgagatgggcatggtgttccagcacttcaacctcttcccgcatatgacggtcaagaagaacatcaccctcgcacccgtcaagctgggcctcaaatctcaggcggaggccgacgagcaggccatggcgctgcttgagcgcatcggccttgccgacaaggcaaacgagtatcccgcgatgctctccggcgggcagaagcagcgtatcgccatcgtgcgcgcgctcgccatggcgcccgaggtcatgctcttcgacgagccgacctccgcgctcgaccccgagatggtcggcgaggtgctcgacctcatgcgcgaccttgcgaaagacggcatgacgatggtcgtcgtcacgcacgagatgggcttcgcccgcgaggtcgccgaccgcgtcgtcttcatgtccgagggcgcgatcatcgaagagggctcccccgccgatctcttcgaccacccgcagagcgaaagactgcaatcgttcctcgcaaaggtcctgtaaattatataagaaaaggcgtccggccagtggccggacgcctttttgttgtcggtatactgttttacatcttctccggtgcggagcagccgatgaccttgaggccgttggcgagcacctgacgggtcgcgctcgcgagcttgaggcgcgcgtcgatgacggcctcgtcctcgcccttgatgcggcaggcgttgtagaacttgtggaacgccgcggcaaggcgcatgagatagcggttgatgtagctcgggtcgtagtcgcgcgctgccatgcgaatttcctcggcaaaggaggagagttccttgatgagcgcgtgctcagcatcgctcgaaaggatggacaggtcgaccgcgccgggcttgacgctgtggccctcttcctccagcgctttgagcaggctgcaaattcgcgcgtgcgcgtactggatgtagtagatggggttctcgctgtcctcgcgcacggcgaggccgaggtcgaattccatctgcgtgtcaggcttggcattgaagaagtaacggcaggcgtcgacaggaatttcatcgagcaggtcagagagcgaaatggtcttacccgtgcgcttggacatacgcacgacctcgccgtcgcgcacgagcttaacgagctgcatcagcacgatgtcgagacggttcgtgccgtcgaggcccagcgcgtccatcgcgcccttcatgcgggccacgtgaccgtggtggtcagcgccccagacgttgatgaccttgtcgaaatgacgcacggcgaacttgttgcggtgataggcaatgtcgccggcaaagtaggtgtagaagccgttggcgcggcgcagaacgtcgtccttcaagtcgagcttgtcgatgtcctcgtccttcttgccctgcttgcggtactgctcgcgcatgatgtcggcggtcttgagccagagcgcgccttccttttcatacgtccagccgagcttatgaagctcctcgacggtgtctttgacatagccgctgttgtgcagcgaggactcgaagaaccactcgtcgaacttgatgccgtagcgctcgaggtcgctcttcatcttcggaatgttgcgctccaggccgaagcgcgccatatcggcgtggcgctcctcgacggacttttccagatagctgtcgccgtggatatcgtagaaggccttggcgagctcgcggatgtcgtcgccgtggtagccgtcctcggggaactcgatcgcatcctcgcccttgatgagctgaatgtagcgcgcctcgatgctcttggcgaacttttcgatctggttgccaaagtcgttgacgtagaactcgcgccacacgtccgcgcccgaccagtcgagcacctcggcgagcgtatcgcccagcacgccgccgcgggcgttgcccatatgcatggggcccgtggggttcgcagagacgaactcgaccatgtacttcttgccgcccagccagttgtcgcggccgtagtcgcccttctcctcctcaacggcggtcagaacgtcggcgtaccacttgtcgccgaggcggaagttcagaaagccggggcccgcgatctcgacgctcgtaaagtacgtgtcgctcaggtccatgtgctcggtcagaattttcgcgacctcgcggggattcttgcgcatggccttggatgcggccaggcagaacgtcgtcgtatagtcgccgttggcggtatccttggggatctccacggcggggatggtctgcacgccctcgggcagcaacccctcctgcacagccgcgcgataagccgccgccgtcagctcggcgatctggttctttgcgctgcggatcatattcatagcaatttctcctctatcctttgcggttttacccaaacggcgcggcacattcgcccgaaatcgccccatgggggtacttttttgcaattatactatatttaatggcagaaaacaagggaatccggtaagaaatctgccgcggcgcgcttgccgttaaacgcaggcgcggcaaggcctttcccgcgataaaaatcgctggtccagaaagagaatattttcgtgtccagttgggcgcggcagaggcgttttgacggcgcggcgcgcccgtcttgcacggccactgtgccgcctgtcagcgttttatcgcagatcagtatgcatttctctccgtgtgccagtgaacgccgcaaaatcgcgcctctcttgcttttttaaccaaaaataatataataacgatagcattatttagatgcttttgagagattttgagagtaaaacgataaaaggaggactatcccatgcccgttaatctgaaaggccgttcgttcctgacgctgaaagacttcacccccgacgagatccgctatatgctcaatctcgccgctgacctcaaggccaaaaagcgcgccggcatccgcggcaacctgctcgccggcaagaacatcgtgctgctgttcgaaaagacctctacccgcacccgctgcgcgttcgaagtcgccgcttacgacgagggcgcgaacgtcaccttcctcgattccaagtcctcccagatgggcaagaaggaaacgatggtcgacaccgccaaggtcctgggccgcttctacgacggcatcgagtaccgcggctacgaccagaaggtcgtcgaggggcttgccgccaacgcgggcgtgcccgtgtggaacggcctgaccgacgtcgaccacccgacacaggcgcttgccgacatcctcacgctgatggagaacaccaaaaagcctctgagcaagtgcaagctcgtcttctgcggcgacacgcgcaacaatgtcgcctactgcctgatgtacatctgcgccaagctcggcatccactatgtcggctggggtccgaaggagctcgcgcccgccgctgacatcgtcgagtactgccgcgaggtcggcaaggagactggcgccgtcgtcgagtacggtgaggacagagaactcatcaagggcgcggacgcgctctacaccgacatctgggcctccatgggcgaagaggacaagatccccgagcgcgtcaagctgctcaccccctacaaggtcacgggcgaggtgctcaaggccaccgagaatcccgactgcattttcctgcactgcctgccctccttccacgacttcgacaccaccatggccgcttcccagaaggagctcggctacgacatccgcgaggtcacggacgaggtcttcctctccccgaactccaaggtcttcgacgaggccgagaaccgtatgcacacgatcaaggccgtcatggtcgcgacgatcggcaacgtctgatctgttcaggccgctttcaaaaaagcataaaagaacgggagcacttcgtgctcccgttcttttttccgctttgtttgctgttccagcgccttccagtcgcgcgtttcgcgcagcgccgtccactgctcgtcggcagcggcccacttggcattgcgctcgtagtcatggctgttggtcgcctcctgcatcgcaagatagaaccagtcgcccgggttcagaccgagggcatcgtcatcaggaatctaaacggtgggcgtggagggagtgggacggtaaatgcgtttccactgcgcggtataagttacgtcagcagtcacggtttcagtaaccgctggaggccagcccataaacgtgtaaccgctgcgagtggggttgccgtcaaaagcaggtgtggcgctgtcctgttcgacgacgcagaccttgtcggcaaagatttcttcgttctccacgccgtcagtgtaggtgacggtgcacatcaggccgtgcgcagccttgagcgcatagttggcagtacccgtttcagcgtcatacttatcatagtaagcaacgccatctttctcctccgaccaacgagttgtccgaccattttccttatagccatcatagtaccagccggtgatctccttgccgtcaccggtcagtttcctatcgccgaaagcaaagagatcatcgccgccgtaagctgccttattgttgtacagagcacttcccttggcaacggcagcaccggacgcattcatataaatgccgccgatagacttattggcagacccgtgtctttgcggcaccggctttcaccggctgtgcctttgtctgtacgctttgccccactttcgcgagccgcacagatcattcgattgatcaatttatgataacactcaaaaaataatcttcaaacggaatcccgtcgaattttgtcggcagtaaaacttttaatacctgttgagttttgtcacatttcagaaataccttgcagtttaatcggttttatgacagaacaggaggggcggatggctccgccccctgtcctctctcaatctcgtctctctcgttcacttgcagtactggcgcagatcatagcacaggcgctcggcctcctgctcgccgcgggcgacgatcgccacggcgtcgttgccggagatgcagccgagcatatcgggcagcttcatcgcgtcgatggccgcgcccgccgcgtcggcgagccccggcagcgtcttgagcagcacgacgatccccgcatagtccacgcccacgctgcactcgttcaaaatgagcttcaggcgcttcgtgttgtcgatgtggccggccttgccggacacggcgtagcggctgcggccgccgccgatcggctccttataaaggtacagctccttgatatcgcgcgagacggtcgtctgcttgctctcgatgccgcactcggcgagacgcgcgatgagctcctcctgcgtctcgatattgtacttttcgatcagctccaggatcttctcttgtcgcttgctcttcatggctctctcccattttcctccgcccggccagctgccgacgcggatgagctcttctctcttctctcgttctgcggtggaattttttacaggtcgtcgcggttgacggggcaggacatgcagcgcgggccgccgcggccgcgcgacagctcggcagacggcacggtcagcacgtcgaggccgtgctttgcgagcaagtcgttcgtcacatagttgcgctcataggtgatgacgcggcccggcgcgatacacagcgtgttcgagccgtcgttccactgctcgcgctgcgcggccatcaggtcgccgccgccgcagcggatcaggtcgaccgcgggcagcttgagctcgagggccagaatgtccttgagctcttccttgatcgcgccgaagcggagctcgccgtgctcgtcgagcgtcatctcataaacgctcagcgggccctcgatctcgggatggatggtgaacttgtcgtagtcgaccatcgtgaaaaccgtgtcgaggtgcatgaacgcgcgcgtctcgggaatgtcgaaggcgagcaccttcttaaagtcggaattttgcagaagattgcgcgcaaacgtctccgcgccggagaccgtcgtgcgctcggacaggccgacggccacgatgtccttcgacagcacgagcacgtcgccgccctcgatggaatagctgtcggacaggtcgtaccacatcttgttgtcctgcgtggcaaagtcgcggttgtagaggaacatgtactttaagagcagactctcgcgtttgcgcgcaggggtatgcatgcggtggatgttgatgccctcgcccacgcaggcgccggggtcgcgggtgaagtacaggttcggcatcgggtcagagacgaacggatagtcgtcgtcgactaagtccatcagcgacgtcggctgcttggtggcaacctcgcagcgcttgatgcccgcgatcatcttcgtcaccatctgcttgggcggcatgtcgagaagtaagctcgtcatgctcgcgcgcaggcccttggcgtggatcttactgatgttcaaaaagtcgttgacgagctggatctggcgcgcggggtcggcgatggccttggcgacctcgtcgacatagtagatgacctcgatgccgttttcgcgcaggacctcggcaaagcggtcgtgctcctcctgggcgacctttaagtacgggatgtcgtcaaacagcaggcgctcgagcgtcgcgggcgtcagcgattccagctcctcgccggggcggtgcagcagcaccttgttgagctttccgatctcggaaaagttatggatgcctgaatacataagtcgtgctccctttcccgggatgccggcggctctctcatcgaccgcccgtacaccccgacctgttttccctgtccgtgccgccggagctccccgacggtccgcggatcgttttaccgttattacgcagtaaagtatacactttcaaaaggcgcttgtgatgtatcagtgcttttgccatttcgtgtgccagtcattcctccagctcttcttccagcgctttgcgcaatacctccatgccgcgctccagccgctcgcgcggctcgtaggagtagtt

SEQ ID NO: 10118 - DNA, 56966 bp, Unknown
  gut microbiota DNA sequence
aaaagcctcctctccggtactctttaagtctttctacgcatttcgttgtacccatggggcatgagctggcagtaggcggcaaagccgctgactgccagccgatgtgggtcacggtgtgggtcaggcagttgacccacattttgacccacaccttttttagcgtttttgcagcaaaaaagcaccgaaaaccgaagttttcgatgcttttggagctggtggtgtgactcgaacacatgacctgctgattacgaatcagctgctctaccgactgagctacaccagcgcatttgttcaaatgcaaatggaagtatagcacaaagattttttcgcgtcaagcgatttttcaaactttttgaaagcggcggctttgccgccgctttttcattctttccgccgtctgcggcggatgcggttgatgtggcgctcgaagtcgccgctgccgatgagctcggcaagcacatactgctcaaagaccggcacggtgcaggaatagaatcccacctcgcgctgaaactgctcggagagcgcgggcggcagcaccatgtagcccacgcgcatcgacggcgcgatggtcttggagaacgtattcatgtagatgaccgagcgctcgggttcgagggcgaagagcgtatcctcgctcttgctcgacacgctgaattccgaatcgaagtcgtcctcgacgatgtagccgccgcgctcctccgcccagcggagatattcgcggcgtttgcccgcgctggcggtcacctggctcgggaagctgtggaacggcgtgacatgcagcaccgtcgcgctcgcgcggttgagctcatcggagcggatgccgtcgctgccgaggcgcagcatctcgcacgtgacgccgtgcgcctgatacaccctgcggatcttgtcgtaagacgggtcttcgagcgcaaacacgcgctcgcgccccaaaagctgcacgatgagtccgtagaggtattccgcgcccgagccgatcacgatctgtcccggctggacgctgatgccgcgcgagcgggagagatacgccgcaatggtgccgcgcagctcggcgcagccgttgtttggcgacttgacgagaatactctcgccgtactcgctgagtacacgccgcatcgtcttggcgagcgacgggaacggaaattcatcctccgtcccgtgagaaacggtcgtgcggcgctcggtctccgtctcggagaccgggaagcagtccgccgcggcgaagctcacgaaaaagccgctgcgctcgcgggattccaaatacccctcgtcgcataggatcgccagcgcgtgctcgaccgtgatgacactcacgcctgtctctgttgcgatcaggcgcttgctgggcatcttcgtccccagcgggtaaacaccgctgacgatgtcgcgccgcagctggtgatagagctgtaaatacgcgctctgcgcggcggttttgtcgatgtgatagtgcatagagcttactgcttctcgtccggcgcggtaggctcagcggcggcttcttccgcctccgttgtctgctgcacacgcttgacaaacagattcgacccgtcggcctttttgaccttgaactgatagacgaggatccctgcgcacacgagcaccatcacgagcgacaacgcctgcgacacgcggatgcgctgaccaaacagcgtccagtggaaaagatacagactgtcggtgcgcagcccctcgatccagaaacggccgagaccataccagatgaagtaaaagcaggtgttctccccgtcgaagcggcgggcgcgggacacgacaaaataaagcagcagcagaccgatcacattccacaggctctcataaagaaacgtagggtgtacatccatatacgtcgtggccgacgtccagagccgcatgcgccaggggagctccgtcgccgcgccgaaggcttcccggttcataaagttgccccagcggccaatagcctgcccaatgaaaagtccctgcacgcagcagtccgccagcgcccagaaggagatcttgcggcggcggctgaaaagatacgccgtcaaaaagcccgcaatgacgccgccgtagatggcaaggccgccgtcccagatgcggtaggtcgacgaccagttgatcgagccgtcgctcccgcgaaacaggtcgaggtagaaaagcacatagtaaatcctcgcaccgatgatggaaaacgggatgacccagagcaccgtgtcgatgatattatcctcgctcaggccgtatttgtgcgcctgcttcatgcagaaatagagtcccagcagcatgcccgcggcaatgatgatgccgtaccagtagatgccgttgccgatgttcaatgccttggacggcacggtgaactgccagtcgccgaaaaggccgggaaagctgatgggcgcgtcggaaaagctcatgggatcgttatccttctttcttgggttcgatgatggagatggcgcggcggctgtccgtcaggttttcgcgcaggaagcgctcgacatccgctttttcgatgctcgcgtacgcctcggggaaccggagcgcatcgaagccgcggaagtagccgtccgccatggagatggcgatattttcaaacgagttgagcgcgcgcagcgtcgcgccgaagctcgcgcggcggatctgctcgaaaaagtcagggtcgatgccctcgcgcgcgaggcgctgcgcctcttccaagatcgcgtcgctcacttcctgcggctgcccgctctcgccgccggcgcacagaaccgcgacgcccggcagctggtcaaagccgccgccaaagctcgaattgatgagtccctcgtcgtaaaggcgctggtagagcggcgacgaatcgccgagcagcacgtcgctcgccatctcgccgatgagcgactggcgcaggaggtcgccctcgttcgtctcgcacttaaagccgactaaaaactgcggcagcgcgacctccatctgcgtgacggtctccttctgcgcggcagcgtcgtcctcttcttcgccatagcagcgtgcgatctcctcgccgcgctcgcggggcaagacctcctcggccagcgcgatcaccgtgtggggatcgacgttgccaacaacgcacagcgccatattggacggacagtagaacgcgtggtggcagtggtacagcgtttccgccgtgatgcccgcgatgctctcgaccgtgccggcgatgggcacgcgcgcaggcgacgagcggtacaggcaggcaaggagcctttcgtagacctgccagtcgggcgaatcctcgaccatgcggatctcctgaccgatgatgccgcgttccttttccacgctttcgtccgtaaagtacggaacggagacaaacgagagcaggatgcgcaggttttcttcaaaatgctcggtgcagtcaaagtaatagcccgtcatcgcgttggaggtaaaggcgttcggctctgcgccgttttgcgagagtacctgtagggcgttgccgtccttcgtgtcgaacatcttgtgctctaaatagtgcgcgatgcccgcgggcgtgtcgcacttttcgccgtttcggatgaactgcatgtccatcccaccgtagcgcgtggcgaaaaaggcgtattttttgcggtgctggggcttggggacgatgaatatcttcaagccgttcggcagcgtcttttccaggaccgtttccccgatgcgggggtagcttttctcattcatccttgctgtcctcccctgtcaggaaatacaccgtgtcaagcgtcatgctctgcgcggcctcggcgatgcgctcgttcgtcacggcgcgcagcgccgcgatgagctcatccgctgtctcgcggatgcccgtggccgcctgaccgagggcattttcctccatgcggcccgcgctgtcgccgcgcgattcgagcgacgcgatcaggcacgctctcgcgccctcgacctcccatttctcaaattcgccgcgctgcacgcttgcaagctgggcaagaatttcacgcttgacggtctccacatccctgcactcaatgccggacgagaccgtcacgatgcccttggagcggtgataggcggaagaagcataatagcagagggacagcttttcacgcacgttcaaaaagagcttggaattgctgtacccgccgaaaatcaaatttgccagcatcatcgcaggcgcgtcgttcgtcgacgcgcgccagcccatcgagagccttccctgcgtcacgtccatgcgctcggtgatctcgcgcggcgtctccggcgcgtttttcttctccgcgatgaccggcggcacgacacgcccgcgctgaagcggcgcaaacgcgcgggagatggcctcctccacgcgctcgcgctcggcgctgccgcagtagaagagctccaagtgcgcggtggagagtaactcctgatagtagcggaagagcgtctggttcgtgatcttctcaacgcgcgcgatggagccgaacttgtccaccccgtagcgctcgccgcggcacatctcctgaagtaagcgcaggtctgcgtagtcgcgcttgtcgttgatgatgccgcggatggcgtcgatgaggttctgcttctcgctttcgacatagtcgttcaggaagcggccgttgcgcgtcacggggtcgagcagcagctcgcccaaaaggtcgcacatcggctcgagcagcttttctcctcccgggacaaattcctcgtcgatgaagctcgcggcaaagccgatgcactggttctcgccctttttgcgtaccgtgcagccgatggacgagccatagagcaggtcgagcgcggtggaaagtgagcgcatatcggggtgcggcatcgtgccgcggcgcagcacgctcggcagcagcgcgccaaagctcgccgttctttcgttgatcggcgtgatgagctgcacgctcagcgtccccgttttgaatttatccgagcgcacatagtcgaggttcacctcgggtgcgatctcaagtctgaccggttccatcacggattcctcctgtggtcatttttcagaatttgcccttaggataccacgaaactgtgaacaattccactcttttctgcttacaccgcactttccggcgcaaaaacggaagaattttctgctcgcatgacgtttttcttgcgatttttccttgacaattttgataaaatcatgtaaactgattcatgttgtaaaggtataaaactttacataagaatctgcacaaggaggaacttcccgtgaaaaaccagacctttcgtatgacgatgctcttcgacttttatggggagcttctcaccgaccgccagaaggaattctatgatctctactataacgaggacctgtcgctctccgaaattgccgagaactacggcatctcccgccagggcgtgcgcgacgtcatcgtgcgcgcggagaactacatgaccgagatcgaagacaagacggggctcatcaagcgcttcatgcagcttcagccccacgtggaaaagatcacggacgcggccgagcagatcaagcagctcaacttccgccggtatgaggaccgccagctcgaagagcttgccggcgtgatcgaggccgaggcggcggcactcaaggagtaatacatccatggcatttgaaggactgagcgaaaagctcaacgccacattcaaacacctgcgcggcaagggccgcctgagcgaagaggacatcaagctcgcaatgcgtgaggtgcgcctggcgctcctcgaagcagacgtgagctacaaggtcgtcaaggactttgtcaaaaccgtctctgagcgcgccgtcggcgccgaggtgctcgacagcctgacccctgcccagcaggtcatcaagatcgtcagcgaagagctcaccgcgctcatgggcggtgccaatgcgaagctgaccttcgcctccaagccgccgacggtcgtcatgatggtcggcttacagggcgccggtaagacgacgaacgtcgccaagctcgcgggctacttccgcaagcagggccaccgtccgctgctcaccgcgtgcgacgtgtaccgtcccgcggccatcacgcagttacaggtcgtcggcaagcaattgaatattcccgttttcgaaatgggtcagatcgaccccgttcagatcgcgcaggaggccgtcaagtacgccggtgaccacggcaacgacatggtcttcctcgataccgcaggccgcctgcacatcgacgaagcgctgatggacgagctcaagcgcatcaaggccgccgtcaagccgaccgagatcctgctcgtcgtcgacgcgatgaccggtcaggacgccgtgaacgccgccaccgcctttgatgaggcactcggcatcgacggcgtcgtgctcacgaagctcgacggcgacgcccgcggcggcgcagccctctcgatccgcgcggcgaccggcaaacccatcaagttcatgggcacgggcgaaaagctcgacatgatcgagcccttccaccccgaccgcatggcgcagcgcatcctcggcatgggcgacgtgctgtcgttcatcgagcgcgccgagcagagcatcgacgaggaaaaggcgaaaaagctcgaagaaaagctcaaaaagaaccgcttcactctctccgactattacgaccagctcgtccagctcaagagcatgggcagctttgaacagctcgcgggcatgatgcccggccagctcggcaagcagatggcaaacgccgagcttgaccccaagatgatggcacacaccgaggcgatcatcctctcgatgacaccctacgagcgcgagaatcccgcggtgctcggcgccagccgcaaaaagcgcatcgccgccggctgcggactcgaggttgtggacgtcaaccgcctgctcaagcagtttgagatgatgcagagcatgatcaagcaggtcacgcgcggcggcaagatgccaaagggcatgggcggcttcggcggcggccggatgcgcggtttcgggcgcaagaaacgcttcaagtaatttccgttgataagtgcacaagcatttcatcataatacaaaatcatttacattatttttggaggtagtaaccatggttaaaattcgtctgcgcagaatgggcgccaagaaggctcctttctatcgtgttgtcgtcgctgattcccgttatccccgcgacggccgcttcatcgaagagatcggcacctacaatccctgcgtctcccccgccgagatcaagatcgacgctgagcgcgctcaggagtggatcaagaccggcgctcagcccaccgacacggtccgtgcgctgctgaagaaagtcaatgcgctgtaagacccggggtgcaagaaatgaaagacttgctgctctacatcgcccgcagccttgttgagcatcccgatgacgtcaccgtcacggagaagcagggcgcggacgagcttacgttggagctgcgcgtcgcacctgacgatatgggcaaggtcatcggccgtcagggccgcattgccaaggagatccgcacggtcgtccgttcctatgctcagcgcaccggcgtaaaggtgtctgtcgacatcgtagactgaactgcaaaaacgttcccgagaagctctcgggaacgttttttattcttgccatcccccgccgattccgctatactggatggatagaacaaaataaaggagcatgacaatgggtctcttttccaaaaagagcgcgccgcagccgagcgcgcgcccggaatatatcgaagtcggccagatcgtgaacacgcacggcgtgcgcggcgaggtcaaggtacagccctgggacgtgagcccagatcttctgtgcgggttcaaaacgttctacatggacggtgcgcccttccgcccgacgagcaagcgcgtgcagggcgacatggtgctcatgaagctgcccgaggtcgacgacatggatgctgccgccgcgctcaagcgcaaggtgctctccatccgccgcaacgatgtccagctcaagccaggtgagcacttcgacgccgagatcatcggcatgaacgtctataactacttcccccacacgtatatcggcacggtggtggacgtgctctcctaccccgcccacaagctctacaaggtcaaaggcgaggagaagacctatctcatccccgcggtgaaggatatcttcatcacggacatcgacgaggaatcgcgcgagatcagcgtgcacatgatcgaggggttagagaccgatgaggattgatattttaacactcttccccgcttcggtcgacgcgatgatgaacgtcagcatccttggccgcgcgcaggagcgcggctacatcacgatcaagacacatcagatccgcgactacacgacgaacaagcagatgcaggtcgacgactacccctacggcggcgggcgcggcgcggtgatgcaggcagaccccctgtaccgctgctgggcgcatgtgtgcgaggaggctggcagccgcgggcatacgatctacctctccccctgcgggcgcacgttcacacagagcgtggcgcgcgagctgaaggataagtatgaccacctcattttagtctgcggccactacgagggcatcgaccagcgctttatcgacgagtgcgtggacgaagagctctcgatgggcgacttcgtcgtcacgggcggcgaaattcccgccatggccgtgacggacgccatctgccgcatggtcccgggcgtgctgcccgaggaggaatgcttcaccgaggagtcccactgggctgggcttctggagtatccgcagtattcccgccccgatgaatggcacggccgccgcgtgccggacgtgctgctctccggccaccacgaaaacgtggccaaatggcgcaaaaaagagagctacaagcgcacgatgctgcgccgccccgacctctgggcgcagttcgacgaaaagcagctcaaaacaaagagcgagaaaaaagtcctcgctgaagccaaggccgaagcagaagccatccgcgccgcggaggtgaagaaggccaaggaaagcgacaccgaaacaactgttgagtaacagctcgcactatctgcgcaaggcaaggcgaacggtcaatcgacttcatttgccgcctgcaggcggcaagtattttgatccgtcgcggaggacgacacgcgcgtccgcagcgacactttgcaggaaatggcgcggtgagcaccatttcctgaagctctctcatcaagaagcagcttcgctgctttttgatgaagtaaaaaagcggaacagcctaagctgttccgctttttttatgtacttttacgcgatgcgcttcgcgccgacgtagcgggaagcatagtagctcgcggacaggctgtcgatcgtgatcttgccgacgctgtagcgcgcgtggatgatctgaccgttgccgatgtagatgccgacgtggccgatggcgtgtgaggaatccgagaagaacaccagatcaccgggctgcaagtcggatttggcgacggcgtagccgcagttcttatactgggcggtcgccgagtgcggcagggagtagccgagctgcgcgtagagatacatcgtgaagcccgagcagtcaaagccgttgggggacgcgccgccggagcggtagcgcgtgccgaggaagggcatcgccatggagacgacctttgcgcccactgtgccgtcgaggtcggcaggatcgcgcagatattcaccgagcagccagccggtcgtggagtcgaacgtgacctgataccagccgttcgattcaccgacgacggtgacctgcttgccgctgaccacctgcgtgatcttgtcgtaatttgtgccggggcccgtgcgcacgttgatcgtgccgcccgtgacgaccatggagacggtctcggtctcgctcacgtcttccttggcgtcagccttgtcttcaagctctgcctgcatttcatcgagcttggcgagctcttcttcgttcgcgctctcggtctgaacggattccgtcagcaccgtcacgcggtcaacgagattgcggatcgaaccgtcgtaagcggcctgcgccgaagagagcggcgcgagcaggctgacggagagaatgcccgaaagcaggaacgataagcatcgtgaatggtttctcatagctgagtcatcctttcgtgaataaaatcaggggactgcgcggcggctatttacatcttgccgctcagcgcgcgctcaagccagatggaggcaaattccatcgcctcgccaaggcttcctttttccgtcgagcggaccacacggtcgcgcgaacggaggcttgcgtccgtcatctgcagctgaatggaaacgcgcttggcaagcgtgatatccttgagcggcgtggtatccaacacctgcatcatcacgatatatttatccgccatcgagccgtagtagatgagattatccacacggcgcagcgggtgtccgcggtaaacgagaccttccgtagcttctgccatctgactcactcctgtccttgtaaccaatttgtaactttgtaaccgttttgtaactttttgcagtatagcattttttgccccccttgtcaataaaagtggggcaaaaaatgcaacaaaccctcggaggccgcgttcacggtctccgagggtcgttattctgacgcttttcgcttacttgccgaggtagctgcgcacaagcgtttgcagcagctcgtcgcgatccagcttgcggatcagcgtgcgggcgttgttatggttcgtgatataggtggggtcctccgacaggatgtagcccacgatctggttgatgggattatagcccttatcctccagcgcggcataaacggtggtcagaatatgacggatctcagcgtccttttcctgcgcaacattaaactttcgggtaaattcttccattgggagagcccctcctttccatgcagacagtatagcaacgcaatttcaaaaagtaaagagagcgctgtcaactgtaaccaaatcgtaatgtttccttaaggaattctcagcggagcaccgcgttgtggtcggccttgagcgctgcgaggatggactggacgtcctcatctgcctcttcgccggtcaggctgcggtcatccgcgcgcagaacgaggttgaacgccacgctcttcttgccgatggccacgccggagccgcggtaaatatcgaacagcgacacatccttgagaaggcccttcgcgccgcggcggatgctctcttcgagcgcgccgaccgtgacggcctcgtcgcacacgacggcgatgtcgcgcgtgacggcggggaacttcggaagcggctggtagacagggatgtcgccgcgcttttcatacatcgcatcgaagctcagctctgcggtgtagacctcggtgtccatgccgtagttcgccgcgacgagcggatggatctggccgaacacgccgaggtatgtctcgcccgcatacactttcgcgcagcggccggggtgataagaatcattgtcggtgcaggcgacgtacttgacatccgtgatgcgcagctcgtgcagcagcgtctcgatgctgcccttgaaggagaagaagtccacgccgtcgccgtaagcgccgagggagaggtacttcggctcgtcagcaaggccatcctcgcgcggcaggtaaattttgccgagctcatagaggcgggcggacttgttgcggtagctgtggttgcgggcaatgatctcgagcatgctcggcaggatcgtcgtgcgcatgatggaggtatcctcgcccagcgggttcaaaatcttcagggagttgcgcagcgaggaatccttcggcatgcggatcttatcgtaataggtcgggctgatgaaggaataggtgatgatctcatcgtagcccagcgcgcgcacagcgccgccgatggcgcggtcgaagcgctgctgctcgctaaagccgccgcgcgtggtctcgccgcgcatgagcgtgcagggaatcttattgtagccgtagaagcgcgcgacctcttcggcaatgtcgctgtaatgctcgacgtcgccgcgccaggacggcacgtagatgtcgtcgccattcaggataaagccgagggagacaagaatttcgcgcatcaggtcttcgctgagttccgtgccgagcagggcgttgatcttgtcgggttcgagcttgacgaccgtgggggccttttccttggcgaccacgtccatcacgccgtcgacgacctcgccgcagccgagcagctccacgagctcgcaggcgcgctcgacggccttgatggtgttcatcatgtcgaggcccttttcatagcgggaggaggcgtcggtgcgcatgccgagggcgctggccgtgcggcgcacggaaacgccgttgaagttagcggactcaaagagcaccatcgccgtgtcgccgacgatctcgctgttcgcaccgcccatcacgcccgcgacgcagacgggcttgtgctcgtcgcagatgcagagcatgttcggcgtcagcttgcgctcgttgccgtcgagcgtctggatgatctcgccctcgcgcgcggtgcgcacgatgatgtggccgccttcgacgcagctgaagtcaaaggcgtgcatcggctggccgtattcgagcatcacatagtttgtgatatcgacgatgttgttgatggggcgcacgccgctcgcgcgcagtctctcgcgcatccagcgcggggacggcgcgatcttgacgtttttcaccatgcgcgcggtgtagcgcgggcagaggtcgccgtcctcaatgtcgatgtcgacgatctccgcgatgctgccgccgcagccgtgcggctcgggcgtgtgcagcttaagggggcgcttgaacgtcgcgctcgcctcgcgggcaaggccgatgacggaaaggcagtcggggcggttcggcgtgatctcaaactcgacgatggaatcgtcgaggccgaggatgtgcgccatgttgaggcccggctcggcgtcctcttcctgtaagacaaagatgccgtcggcgatgcagtgggggaactctttctgctcggcgtgcaggtcttcgagcgtgcagatcgtgtcgctcttggtgttgtaggcgacaaggtcgccttcgtggaggttggagcagcgcgtatcgggcacggcggtcgcattgccgaggtcaaggcaggtgtggaacgtgccgtcgatcagcggggcgcattcaagcacccgggcggcaaccacggggccgtagaccttgtcgccgggcttgatgtccgcggggatggagggcttcgcggggtcgatgggatggtagtcgttcagaagcgccgcgggcgtgatgacggcataggggaagtcatgctccgccgtcatgccaagctccttgagcgagcagagcatgccgttcgactcgacgccgcgcagtttgcccttttcgatcttcacgccgcccggcagatgcgcgccgtgcagcgctgcggggacatagtctcccacatggatgttccacgcgccggtaacgatctgcacgggctcagcctgaccgacgtcgatctggcagacccacatgtggtcggagttttcatggcgcttcatctcgagaattttgccgacgaccacgttcttgaggttctcgtcgggacgctcgatggtctcgaccttcgagccggagagcgtcatctcgtcgttgaactgcttatcggtgatatccttgaggtcaacgaattcgttgagccaattacgggataggatcatatttgtatcctcctaagaagtaacaatcaaatttcgttttttgtgacgacatgcgcgccagaaaaaacaccgctcagggtgcgctcgtgcgagcaaagcgagtgcggtgcagcaccctgcgaaagagatcgcagaaagcggctcgccgctttcgcgaggaatattaaaactgttcgaggaagcggacatcgttctcgaagatcaaacgcaggtcgctgatcttgaagtggccgagcgccagacgctcaaggcccatgccgaacgcccagccggaatagaccgtggagtcgatgccgcagccctcgaggaccttcgggtggatcatgccggcgccgagcacctcaatccagccctcacccttgcaggtggggcagcctgcgccgtggcacttgtggcactgaatgtccatttcgcagctcggctcggtgaacgggaagtgatgggggcggaagcgcgtgaccgtgtgctcgccgtagagctggcgcacgacctcgttgagcgtgcccttgagatccgccatcgtaatgcccttgtcgatggccatgccctcgatctggtggaacatgggcgagtgcgtggcgtcgacctcgtccttgcggtacacgcggccgggggctagaatgcggatgggcagctcgcgcgtctccatcgcgtggatctgcatcggagaggtctgcgtgcgcagaaggatcgagctgtcctcggtgaaatagaacgtgtcgctccactcgcgggcgggatggccctcctcgacgttgagcttcgtgaagttgtactcggcgagttcgacctcgcggtcttcgagaatttcaaagcccatgccgacgaagatgtccttgatctcgtcgagcacctgatacatcgggtgcttcacgccgatcttttcctgcttgccggggatggtcacgtccacggcctcggacttgagcttgagctccatggccttgtcggcgagctctttcgtcttttcctcgatgtccgcttcaagcttggcgcgcacgtcgttggcgagctgcccgatcacggggcgctcttcggcgctgagcttgcccatctgcttcaaaacggcggtcagctccccctttttgccaaggtagcggacgcgcagtgcttcgaggtcctccgccttgccggcgtcggagatcgcatcgagcgccgccttgcggatcgcttccagttgttgtttcatatcatttctccttttcaggtaaaaatttgcagaatttcaaaaatcggcggcaggggcaaaaaaatagcctttcctcccgacactctcgggacgaaagactttcttccgcggtaccaccctgattcgcgcccaaaggcgcgcgctcgttgcccgtaacgggggctgaccggccgcgcatttcctcgcggctgctcgggggcgaaccaagcgacatcccgcagaccggctcccagccgccgaccggtcctctctacgcggaacaaacacgctattttccctttcacagcatttgtctaagtggtacttatatcacagaaaaaaggaacttgcaagggggaatttgccccttgccggcaaaaaagcggcaaaagcgcaaactatcgcgcattttcctctgcgcactccccttttcctgcccaaaacgcggaaaaaccgcgctttacaacgtgcaaaaacgtggtatactataatagttgtttacaaacccaccgtggctgctctcgcagccggataaggagaacgatcatggacgaaagaaagcgtctttacaagtcccgcaacaacaagatgatctgcggcgtctgcgcaggcatcgcagactacttcaacattgacccgtcgatcgtgcgcgtgctctgggcggtcctcgctctggccgccggtaccggcgtgctcgcctatattgcctgcgcgatcatcctgcccgagggcgacaccgaggtctgactgcttgacaatccgcgcaaaaaagatatactaaatcctgtttgccgcgcgaaacggcagaaaaagatgtaaaacgcgaagggagcttccttttatggcgacttatccgatgcatgtcgcgggtcttgaccgcgactttcccatctgcaaggtaacggacgatctttatatcggtgctttcatcatgttcggcgacgcggagctgaccgtgcgctgcgcagaagagctcttgaagctcgccgagggcatcgactacgattacctcttcaccgctgaggccaagtccatccccctcatccacgaaatggcgcgccagagcggcgcgaaaaagtattttatcgcgcgcaagggccccaaggtctacatgcccgaccccatttccgtggaggataagtccatcaccaccgtcgcccagcagaagcttttcctcggctctgacgacgcggatctcatccgcggcaagaaggtgttgctcgttgacgacgtgatctccacgggcggctcgctcaaggcgatggaagcactcgtcgaaaaggcgggcggcaccgttacgggccgcatggccgttctcgccgagggcggcgcagccgaccgcaaggacatcctgttccttgaaaagctgcccgtcttcaacgccgacggcagcgtgaagtaaaaagattcaatcacagaagcgcaaagcgcctttcaaagagctttctttgaaaggcgctttctctgttattcggtgatctcctcgcagaccgtcggcgatgtggaccttgcttcggcctccggcgctgttcttagtccgctcaaaccgcggcggcagagcacgcagcccgccgcgcatacggcggccatgacggcaaggaactgccacttctccgcaaaaccgcccaaaagccccagcgggtcgttcattgcgttgaacgcggcgtgcgcggcgatcgtgggcaggatgctccccgtgcgatagcgaatatagccaaaaagcaggcccatgagaaacgcgtagccgatctgcaccggcgttccgtggatgaatccaaagagtaccgcttgcagtacaattgcgatccacaccggcatggcccgttccagccgcgactggatgacgccgcggaacacgagctcctccgcaaccggcgcgccggccaccacggcaagcgccgggatcagccccgtctctgtgctcaggcgcatggcttttccatattcctccatccagctttccggcagcagggcaagcaccagactgaccagcacatagaggccgaccgcgccgaaggcgcagaagcccaccgtccagcccgagcagtgacgaaggcccgccgcctcggatagcggttttttccgcagcaggaaccacagcagcagtactgcggcgatgatcaggcacgatagcagcgtgagcgccgacaggctgtccagaagccgctccgccaccgcctgcgccccccgtgcaaggtccgctcccctattgatcgccgcatcggcagcgataccgatcccatagacaaagggcagcaaaacctgcaccgccacaaaaaagagcagatacaaagcggatctccccagcgcagccaaaacgccctttgcggaataggaatgctcggttttcatatcttccccctccttgtccggtcctaaaattgccgcagcctccattttgtgtgcgggccacttcaagcaagcccggcgcagtgaatgccagcgcgttttattcgtcttttagttgaaaacattcatttatctctataccgtttgtttaattatactgtattatcagatgcttgtaaacagcattttgtgaaaagcaatctttcggcaacggcctgtatttgtccggtccatcatacagtttatgatacagtgaacttctgcattcttctcacttttcgtcagttttactaaaaatattttagctttttctgctggacaagcgcgaaagaacgtagtatcctataaaaaataaacgaggaagatggatgattcatccgataaactggtcaaacacaacaaaataaggaggaaaacgcatggcataccgggaaagctacgcaggaaagatcaaccgcaagctgaacaagaagctccacgtcgtcgaggtggcctcgggacggcagaaggccgacctcgtgctcaagaacgcgacgtatgtgaacgtcttctgcaatgagctcagtcatggcgacatcgccgtggccgaagggctgatcgcaggcatgggcgagcattacgagggcgcggtcgagatcgacatgggcggcaagctcgtgctgcccggctttgtcgacgcgcacatccacttagagagcgcgctcgtttcccccaaggaatttgccaacgccgtcattccgcacggcaccacgaccgtcatcaccgacccgcacgagatcgccaatgtcatgggcaccgacggcatcgagtatatgctgcaggcgacggaagatctgcccgttgacgtgcgcttcatgctcccctcctgcgtgcccgcaacgccgctcgacgaatccggcgcggtgctcgattaccgcgcgatcgactcgttctacgagcacaaccgcgtcgagggtctggccgaaatgatgaactatgtcggcgtcgcgaacgccgacgagcaggtgctcgaaaagatcgtcgccgcacaggcgcaccacaaaaaaatcgacggccacgcccccggcctttcgggcaacgacctgaacgcctacatcgccgccggcgtctattccgaccacgagtgcagcaccgtggaggatgccatcgccaagctcgagcgcggacagtacatcatgatccgcgagggcacggccgcgcgcaacctcgacgcgctgctcccgctgctcacaccgcagtattacacctactgcatgttctgcacggacgacaagcacccgaacgatcttctcgaaaagggccacatcgactacatcgtgcgccgtgccatcaagtcgggcgtcgacccgatcatcgccgtcaaatgcgcgagccaccacgccgcgcgctacttcctgctcaacaaccgcggcgcaatcgcaccgggctttcttgcggactttgtcgtgatcgacaatttcgacgacttcaacatccttgaggtctacaagaagggcaagctgatgttcgacggcaagaccgttacgccgtttgaagcgcccgagatcgatccgcacctcgtcaagcgctcgcacgagacgttccacgttgcgcaccttgaggccacggactttatcgagtcccgcccgcgcgcggtgctcggcatggtgcccggcgagatcgtcacgaccgatgcgggctacgccgaaaagatcagcgttgaggacgatatcttgaaaattgccgtcatcgagcgccacaagaacacgcaccacatcggcatcggctacatcaagggctacggcctcaagtccggcgcggtggcgacatccatctcgcacgacagccacaacatcatcgtcgtcggcgcgaacgaggaggacatggctgcggcggtcaaccgcgtcgtcgagctcggcggcggcatcgtcgtgatggacgacggcaaggtgctcggcgagctccagctccagattgcaggcatcatgagcgaagcgccgcttatcgaggtcaacgaggcgctcgaaaacgccaaggagcaggccttcaagctcggcgtctcgcgcggggtcgacccgtttatgacgctttcgttcatggcgctgaccgtcattccaacgctgcgcctcacgacgcgcggcgtgttcgacgtcatcaatcagcgctacgtgtgatcttacattgtgaaaggctccggcgcagtgcgtcggagccttttttcgaaaagttttgcttgcaaatgctccctgcatcgcatataataattgttgcacctgccggtgtgatggaattggtagacgtagcggactcaaaatccgccgctggcgacagcgtaccggttcgagtccggtcaccggcaccaagagcagaggatctgcgccgcaggtcctctgctcttttctttgaacgggcaaaagaaaatccggatattaaaattgtggtcgtttggccggggcagtaccggagtgaggctttcctctgcgatcccactgttgcacttgagaagatccgataagcagcattgtattcctcggaaaatctacaatgctgtgcgagcctgtctgtcatcgcctttcaggccgcaatcaaagtaagaaaaagcacgcctgccaagcagacgtgcttttcgttttgtgtcaggggttttggcttttcagcgtcttccgccgaagccgcctccgcggccaccgccaaatccgccgctgcgacctccaccgaagccaccgccgcggctgccgccgccgccgaatccgccgccacggctgctgccgccaaatccaccgaagtttccgctgccaaagctgccgccgcggccgctgctgccaaacccgccaaagctgctacccgaggaaccggaaggccgtctcggctgctggggcgggcggcgattaccgccggaggagccgccgctgcgcggcggtctggggccgccctgtggaggacgagggccgcgcggaggacggcgtccccagaagatggggtgatacatcaccgtcggcacgcccatgccgggcatcatgtagcggcggcgatagcggcgatatcgcatgccgtcaagcatgatccagaggacaaagaatatgatgaggatcatgatgaacatcacaccgttggccgcctcgtccagcgccgcctcgctctgctgatactgctggctcagctccacatggagcgcggcgcaaagcgagcacaccgccgcgtcataatcgtccttctgcacgttatccgccatgcaggaggcaacgaagctcggcgagagcgagctgagcaggtcgtagaattcgccgcttgcgagcaggtagtagtcctgctgcttttttgcgatgagcaaaacggcgtcattctcgccaagctccatctccatggcgcagtcgtacgccgcgttctccatgtcgctttccgattccgtcgtcacgacggccatgatgctgccaaacatcttgtcccagttggcgttgtagaggccgatagcctcctcagtcttgtcggaaagaacaccggcatcatcgcgcacatactgcgtaaaggccgccgcagaaagtgagggatcgagtttttctccgccctccggcgtagagacggcgggcgccttgtgcagtccccacgcactggatgcgacgatcgccagaatcagcacggcgatggcgacgccgcgtttttgaaagaatttcatatgcttctcctatccggagcgtctcagcttctcagctccatgagcttctgcttcagctcaccttcgatacggccgagctcgacctccgcttccttgcgcttctgcgcgccctcgcgctggatgttcacgacctcgtcgagcgtggagacgagctgctcgttcgtgtgctgcagcgtctcgatatcgacgatgctgcgctcggcttcctttgccgtggcgatggtgcccatcttgagcatgtcggcgttcttcttgagaagctcgttcgtcgtctgcgccaccgcgctctgtgcggccgtggcctgacggctgtgctccatgccgagcgcgagcaccatctggctcttccagagggggatggtattgacgagcgaggactggatcttttcgaccatcagcgtgtcgttgttctggagaagtctcgtctgcgggcccatctggagcgacaccatgcgcgtgagctccaggtcatgcagcttcttttcaaagcgctcgcacttctgcgcgtagtcgttgtaggcctgcgcatcctcggcaaggccgctcgcctccgcctttttgcgcagctcctcgagctcgccggagcggacctcggccagacgctttttgcccgcgatgatatacatggtcagttctttgtagtacttgaggttcatctcatacatctggtcgagcatcgcgatgtccttcatcagcgtgacctgatgcttttcaagctcagaaacaatgcggttcacgctcgtctcggccttgccgtactgcgcgcgcatcagctcgagcttatccttctgcttgcggaacaggcctgcgaagcccttcttctcctcctgaccgaagcccttgacctcgacgacgaggttcgagagcgtctcgcccacctcgccaagatccttgttgcgcacggaggacagtgcattttccgagaacgtcgcaacgctcttctgcgcggccacgccgtagttgagcacgacattcgtgtccttgatgtcgatctttttcgcaaaatcgtcgacggctttcttctcctgctcggtgagcatgctctcatcgaccttgacaggctcgacttcctttttctccgcctcgggcgccgtgggcgcttcgggcgtgagcgtcagctcagggacggcctcctgcgccgcttcggtggggttcagggtcagctcgggcatcatgttgtcgctcatatcatttctcctccgtattttggctttgagtttgttctttttcgtactttttgatgcgctggatgcggcgcaggcacagcagcgtggccaacgcccagatcagcgcggaatagtaaagcgtatccctgtgcagatgccgcgcgccgatgatgcttgccacacacatgatggcaaagattgcacagaagatcgggtcgagccacacgcctttcagtcgtttcaagatccacgcattgactttggcgttgaacgccatcactttctttcgcatcgcttactcctttatagctcgagcttgatgtcgttctgcgtggcggtcgccgtgccggactcggcatgcagctcgccagcatcctcgctcaggccctcgcgcttcatcatgttctcaagtaccgtaatatcggcggaaatatccatcgcctcgctgccgaagagcatgtcgagctgcttttcaaaagccgtaacgatcgtgcccatcatactctccacgcgctgcatggtcgcgtcgatgttctcgccgctcacgccctgcgcgcccatacggtcataggcattcaagagcttaagggtcgtgggcaggtagtagtccatgaacttgcggatctgcggcagcttcgacgggtcggatttgacctgcgcgaaaattttcgcgctcaggtcctcgagccggtcgatgtcggcagagatcttcgcgtccttgatggaatcattcagacgcttcatctcggagatggcaagattgccgtccttgatcatcttgtcgagctccggattcccggtggtctcctcctttttcggcgggtcgggcaccgtgacttcgaccgtgccgcacacggcgttcataatgaagaacaccacccccgacacgaccgccacaaagaggaaatgcggtacgcggtagagcgggaacagcagcgcataaatgacccatgttcccgccgcggcgtaatagggtacggtggatctgcgtttgacagttgccaaggcgatcgcctcctgttttgagaaaaattttactgatatatgataccacaacgctgcaccgcggtcaagcaaagcccgcgcaaaaacgaagcggcgtcccaaaggacgccgcttcgtttttatgttcttttttgtctttctttattcgtttcggatggcttcgagcgccgagatcttgaccgccttgttcgcgggctgataaccggacaccaatccgaccatcactgagaacaccagtgcaaagatgataagctcaggcttgatgacggaaacgcgcgtcacgttctctccgccgatgagcgcctgcttgatgagctcccacgtcactcctccgccgccgaacgcgccgaaagagaagagattgatgccgacagagatgatatagctgaaaaggagtcccagcacgccgccgagaagtccgatgctgcccgcctccatcaaaaacatcgcgcggatatcgcgcacatagcacccaagcgccttcatgatgccgatctccttcgtgcgctcggagacggacatgatcatcgtgttcgtaatgccaatggccgcgacaaaaagcgagatcgcgccgagaccgccgagcatcagctcgatctggcgggtctgcttgttgagctcgtcgcgcatgctctgcatggaatacgtgctgtagcccaagtccttgatggactgctccacatccgatacggcgtcgaggctctcagccttgacgttgatgcttgaatactcgaacttcgtgtcggtcttgccggtcaggtcctgaataagagctttgagcgcattgatgtccatcatcacgccgtcgctcgtctcatagcccttgccttgatcctccttcagcacaccgacgaccttgagctcaacctcatggggggtaggttcagtgcctgtaccgtcgtcatacggtgtgagtaccatggtgatgctcgtcttgagcgggtcgaaaaacgggtcgggaacattttcggtatcaatatttccgttctcatcccagacgtaacggttcacatagtttcgcccgtccggcatcagcgtatcgaagaagttataggcaaaatactggcccacgaccacctcgtcgctgctctccggataccgcccgtccatcagctcaaagcccatgtcctcaagggcgctcgagtcaatgccggcaaaattgacccagttggccgtgtagcggccgttgacgccagccttgaagcttacattatattcgtcgagacttgccttgggcatgacggccttgacgcccgcgatctcgtggaagctctcgaccgccttgtcgtcaagcttgctctccgtctgcgtgccggtgctctggttgtagccgcggtagacctcgatgatggagaggtcgcccatatttttgagcatctggtcgtacgactcctgcatgcccgcgccaatggagaccatcacgatgatggacgtgcagccgatgaacacgcccagcaccgtcaggatcgtgcgtcctttgcgccgtgacaggctgtcaaagcacattttcaggatgtctgcgaatctcattttttctgctcctcagcacccgtggccgcagtctctttgctttcagccgccgcggcttccgctgcctcctgcttctcctcggcgagctcctcttcgtcccacttgtcccagagcgcctgctcggccttctgcttggccttcttcttgcgggcgcggagcacgatcaaaaggacgatgagcgcagcaaccaccgcgatgatgacgtacttccacgggaaggtgttcgccggctcggggtcgatcatgccgggatcgtccatgccggggtcggtcggctcataggccatggcttcgaccgtcgcttcaaatacgcgctctttcgtgttgccgttggagtcctcgtaggtgatgacgatcttgacctgattctcgccctccagctgcggggtcacggcaaaggcgatggtgccgttcttgccgccgtcgatcgtgccgacgcgctgataaggcgtcggcgtgtcgatatcgccggagatggtcgcctcaacgttgttgatggcgctctttcccttgttgacatagtcgatcgtcaggctcgtttcctcgccgacatagccggtgtaggagcttgtaggctcgctcatttcaaagcggtcgggctggtaaagaggaacgctcagcgacagcgtggcgttgcccgactttcttgcgttctggtcaacatattcataggtcacgtcgatcttgacgtcctgcgcgctggcgctgatgagctgcgcggccttcatcggcacggtgacggtcttgctgccgctcgcggcgacagattcaaagtagaacgtgttcgtcgagccgttgagcatcaggtcctgaccgccggtgacggtgaccatgacgttttcgatcttgatggtcttgctggtgttcgtgaacgagaagctcaggttcgtgcttgagcctgccgcaacggacgaaccgccgtagttgtacttcgagagaatgacgatgggtgtggggctcgcaatggtctcctcgtccttcgtatccttggtaacggtggagagaacgttcacgctgccgctggcgctgccgccggtgagctgcgtgccgttgtcatagtagaacgacaggctcgcgtcgatcgtctgcatctgggactcgatcttgtcgggcgccttgaccgtcacagtgacggccgtgtcgcggcccgcgcggatatcgtcgagcatgtagtcctggctgcccatgatgagaagcgatccggaggatttgagcgtcaggatagggtcgcgcatggcggtcgtgccggcgttctggatgtaaacggtgatggtcttcgtctcgcccgcggcaatagacgtgctcgtgccgtcggagttgaagacggcgcgcggctcgggaatcgtttccggcgtcggctcgggggcgggcgtcggctcggtgtagggcacgcactcgcgcaccggaacggtgttgccgtcctgatagccgccgccgttgccttcataataaattgtaaaggcaagctgcttgccgctgtcgccggtgtaggtcaggccggtgaacgtaacggtatattcgccgttctgtccgcttgcaacagcgctcgccgtgccgtcctgaaagctgtcaaggccgcgcacgacgcggatcgaatcgttgctgccgtccgtgcgggataagtagaccgtgatatccaccgtatcgccggtgtaaatgctgcttctgctggcccggtagccggtgatcagaaagctggttcccgtccgtgccgtcgtgccttcgcccgtcgctttggcgacattcacaggcagcagcgctgcgcacagcacaaaggcaaggcagagcgagagcagggatcttgagatgcgtttcatgttcgatttcctccgttattcgatgtagggtgcggcgtcgatctccgccttgacctgattttctacgttgctgacgatcctgccgtcgatgagcgtgacgatgcggtcggcatactcggtcatctccggatcgtgggagacgagcacgatcgtctggtggaagcgcttggcaaagccgcggatcatgtgcatgacctctttcgtcgtcttcgagtcgaggttgccggtcggctcgtcggcgaacacgacctcggggcgcgtgacgaacgcgcgtgcgatgcccacgcgctgctgctgtccgccggacatctggtttggaaagtggtccatgcggtccttcagtcccacgcggcagagcattttcttcgcctccagcagccgcacatccgggtcgatgcccttgaacatcagcggcatggccacgttttccgccgccgtcagctccggcagcaggttgtaggactggaagacgaagccgatatgcttctgccggaaggccgcgagctgattttcgttcagccgcgagatcggcacgccgccgatgcgcaccacgccgcgcgtgggcttttcgagtcccgccagctggttgagcagcgtcgatttgccgctgccggacgtgccgaagatgcagcacacctcgccccgcgggatgtcgaggtcaatattgtgcagtgcgaccacgtgctcctgccccatcatgtacacctttcggagctttcgcaccgaaatgacgggcttctggtcatttgccatcgcagtttctcctcaattttaatcttgggtccattataatctcatcttatgaggaagtcgttacaatcaggcgcgatttggttacaaattatttaagagttccttaattctcgcaccgagccttttcctgtattatttagacgaaatttatcgaaaaatgtttcatcctttttgaaaaaaagcggcggattttttgatccgccgcttttcgcgcttttacgctcagttcatcggcgcatcgggcacaacgtagaccgtcatgctctcgccgctcgtgtcgatgggcagcgtgtcgtcaaggggctgcgtcagcgccgcatccgcatagagcgtgcaaccgctgcggcaacagatgttgacatacgtccccctcgccacatggtattcattcacccaccagtcttcgcccccttcttccgcagggaggcagaccgtcagcaggcaggcgggtctcgtgtcgtccgtcgcgtacacgacatcgttcagaaggtagcggcctgacttgtagggttctgttttgtagggttcatcgtagctccagttgtagagtgtcgtgcccatctccgtcgcgccgccctcgccgtcctcgatgtagtcggtcacggacatggcaagcagctcgcccgtctcgggatcggcgtagtagagggtggtatagtagtagccgccggcgtctttaaagcgcgtggtggtcgagagcagcaccgcgccgtcctgctcgctgcgctcgtcaagcgtttcctcggcattcttggcggcggggtcagtgcactgcggcagcatttcacggagatactccgtcccctcgcccggaatgggatagatgttcaggcttgcgttatcgtcgctcgtcatgcgcgtggcgtacagtctgccacgcccctcgctccacagttcttcctcgcccgggccgctgttggcggtatagttgtagtgcgaggacatgaggatcgtgctgtcgcccccgtccgtgtactgcaatcttgcgttgtaggtcacctcgccgtcccggtcggtgccctgaatgttcacggtcacggcgtcgtacttttcgagcagtacgcacggatcgttgacctcgcgcagcgtttcgagcgtcacgtccatcggcgtgtcgtccttgccgccgttcccatcgtccttgccgccctgcgtgccgcagccggcaagaagtgccgcgacgcaaagcgcggcaatgcctgctttcttccagtttttcaccttggtttcctccttatttgggtgcggactcacgcccgcgtttcaaattcttttaacggttttcttccagcggcacgatatagaccgttgcactctcgccgctcgtgtcgatgcccgcctgatagtcgatctcctgactcaacgctgcatcataatagatattgctgccggtacggcaggcaaacatggcatagctgccgcgcgtcacgcggtactgctgtgtttcctcgtccgctgtgccggggtcgtagatgagcgtcagcaggcaggtgtcagcactgtcggtctcgtgcagtgcttcgcccgcaaggtcacgctcaggcgcgtagggctcatcgtagctccaagtgtagcgcatcttgccgtcaaaggcctcatcatccgcagcatgatcagtcactgtcatggcgtgaagctcgccggatccaggttcaacttcgtagagcgtcttgctgtgataaccgccaaggttcggatatgtcacactcccggagagcaggtacacaccattctgtaatccgatcgtttcctcgctctcctcggtgcccatctcaaattccgcaattgcgggcagatcagcaagaacatacatctcgtaatctattttggtgaagcaggtcatcatcgttctctcttcgttcgatgatcgatccagatacacttttccgtttgcctgcgtccagcgctcttttgcactgaccggataattctcgctcggatcatacccataatgcccccaggacacgacatttccatccgcattacgggtgtactgcactctggcggtataagtcacatcgccatttttatcggtgtactgtacattcaccgtcacgacctcatgtctttcgagcagtgcaaggggtatattgatccctcgaagatcctcgacggtataatcctcgccatctttcagcccacagtcgcctccgcagcccacaagtaagctcgcagcgcataaagcaacggtgacggctctcttccagcttttcatggtgtgctctcctctctcatctcccgtcagtcttgatcgccgcttttcacatagacggtcgtgctgccgccgtccggccactcgatctcaggggtttgatactcctgcgtcatggcggcgtcgtagtaaagcatgacgcccttaccactctctggggaaaagtacgctgcgctcggcacggtaaagtgctgctcgtgctcctgcgcggtgcccgggtcccacacgagcgtgatttcatgcttgggaacatcgtccgacagcatcagcgcgtagaggtcttcctccggttcataagggcgatcatagctgaacgtatagcttcccgtggcaaagcaggtgtcttttccctgcaagtcttttctgtgccgctccgacttgatcgatatcaggtcatcggaggttggatcgacatagagccatcgcagcgagtagtcagtgtcatcgtcggtgatataatgtttgattggaaacacgagctggccgtcctgctcatacggctctttgacctccaccgtgataccgtcaccggcctcgggcaaaaacggttcccgcgcggtactttcttcgtaccactcatccgttccgcaggcgatcacactggcaattcgagcgctgccgtcatcatttgttccagcgataatgcacataccgtccggcacttcatccaggcagacattcaggctataaatatcgtctgcgccgtactcatcataataccagccgtggctccagctttgcagccggccttcttcgtcgcgcgtgtactggtcagtgctcttgacgtcctgaccgccgttgctgctgtctgtgctctcccgtacaatagtcaccaccttgtgccgttcaagcagcgcagagatcttattcctctcacagatgtcttcgtaggtgatctgcagctcgtcggcgctgtcgtcatcgtcaagcccgcagtcgcctccgcagcccgcgagcagcagcgcggcggcaagtgcgagggcactcattagtccccagcggttcattttgtttctcctctcatcgtcttctttccatcttgattatgcggagcttttttcgttccgtacattctcttagacgagaaatctctcaaaaagtttcacccttatgatttttttaagaaacttttttctttcccgtgcgagctcttgcattttccgccgacgcggcatacaatgaggacatatttcacccgggaggggcgtttttatgaactatatcggcatcgacctcggcggcacgaacatcaagggcgcactcgtgagcgtgaagggcgagatcttaaaggagcattctatcccgacgcgcgtcgatctcggccccgaggcggtcgcgggacgcatcggtcaggtcatcgcgcagctctctatcggcgaggacaccgtcggcggcgtgggcgtcggctgccccggcacggtggacgacgcgagcggcatcgtgcgctttgcggcgaacctgaattttgtgaacttcgacctgcgaagcgcgctgcgcgcgcacactgcgcttcccgtccacctcggcaacgacgcaaacgccgcggcgctgggcgaggcgctgttcggctgtggccgcggcgcggagagcaccatcgtcgtcacgctcggcacgggcgtcggcggcggcgtggtgctcggcggcaagctcctgacaggctacacgggcgcggcgagcgagatcggccacatggtcatcgcggaaaacggcgaagagtgcacctgcggcagccgcggatgcttcgaggcctactcctccgccacggcgctgatccgcgacacgaagcgcaccatggccgcgcaccccgagagcctgctgcacgcgattgccgcggagcagggcggtgtcgacggccgcacagcgtttctcgccaaggagcgcggcgacgaggcgggcgcgcaggtcgtggaggactacatcgagcatctggcctgcgggctcacaaatcttgtcaacattttcttccccgaagtgctggccctctcgggcggcgtagcaaatcagggcgacgcgctgctcctgccgctgcgcgaaagggtgcgcgagcgttcgttcggctcgcgctatgccgtctcgcacacgcgcatcgagctctgcacgctcggctaccgcgcgggcgtgatcggcgcggcgatgctcgcgcgcgagtgagcgtaaaatagcgcaagatatgataaggccctccgcatttctgcggagggccttttttaccggtagccgtcgggctcggccgagccttcgatcaaaaactgcacctcgtccacgccgccgagcgacaaaatggactgctcgagcgcgctcagcatcaaatcgcgctccgcctcgttctccggcagtgagccgcccgcagggagattcagatagcacacgccgttttcgatgcgagaggagatgaccgcaaagtcctccggcaggagcgagacgagcgaatcgtcctccggcccctgcgcgagcgcttcgagcagcgcgttcacgcgcgtctggccctcgtagagcgcgagcgtctgctgctcggcgcgcagctcgcctgtcttgctgtcgaggaaataaagcgacacggtgatcggccgcaggccactctcacgcgaggaaagcagcgtatccgccgagagcagcacttgcgtctcgcggtacggcagctcgcgcccgtccgccgtgatgctcacagcgttcacattcggcagctgcgtcagcgtcagcgtgatgcagtagtcagcgagcgacaggtcgatgcccgtcaggcgcgcatactgtgcgctcaagtcaatctgcgcgcggcggcccgacaccttgagcgacttgagcgccgttccctccgggatgggcgacgagagcgacggctcgtcgggccctgcgagcagcgcctccatcagcgcgcggacacagtcttcggtctccatcgcgccgtcgagcgtcagacgcttttcctgcgtgcggatggcgtcgccgccgcccgcggagtcgggatcgctgagaaaatagagctcgtagccgttttcgtccatctcctgcgcgtgctgggccgcgcaggcgcagagaagcgaaagcaggaggactaatgccgcagtcagggaaagacgtcttctcatgtctcatcccctccctcttcgcagcgcggcaggcgcacggtaaacaccgtgccgccgccctcgcgggcgcggacctcgatgctgccgccgcggcggcgcgccgtgtcggcggcgatggaaaggccaaggcctgtaccgcctgcggcgcgcgagcgcatcttgtccacgcggtagaagcggtcgaaaatgcggggcatgtccccctccggaatgccgatgccattgtcgctgacagtgagaaggcagtccttttcatcccccgcgagcagcagcttcacaaagccgccggggcggttatacttgatggcgttttccgtcaggttgtagatgatttcgtgaatttcatcctcgctcgcaagggtctgtccctcgcggcgaatttcatatgagaggtcgacctgcttttcctcggccacaaggcgcagcatgcgcaccacgcgcgccatcacggacgagaggtcgacgcgctgcgcctcgggcagcatgccgctgtccaggcgcgtcaggcgcagcagattttccgtgatgcgcgccaggcgctcggactcctgctcgatatcaccgacaaattcgcgcacggtctgcgcgtccatgttctccgtctgcaaaatggagtcggagagaagcctgatgcccgccagcggcgttttgagctcgtggctcgcgtccgacacgaagcggcggcgagcgtcctccgtcgtttgcaaccggtcagccatgtcgttgaactcggcggcgagctcgctgatctcgtcgtgcccgccgacctcggcgcggtggctgtacgagccctcgcgcatcttgcggatggcgtcggtcagtacgccgaagcgccgcgtcagcacacgggataagagtacgctgatcccgccggcgaacaccagcacgaccgccgaaatcgtcaggagattgcgctgcagggacagcagcagctccgcttgctcggtgtcgtattcgtaggcatacaccgcgccgatggtctggctgtggtagatgaccggcgaggccgcgcggcttttgaacgccttgtccgaaaattcggtgtaaaagacgtcttctccgcgaagcgcctgcacaagctctgtataaaaggcgtagcggccgatcgcgccgtcggtttcgcgcgtgtcgtacagcacgcggcccgaggcgtccgtcacaagcacgcgggagatccctgtctcctccacgagcgtcatcgcacccgcgacgttttcctcgctcagctcctcaaggccggagagcgccgtcaccatcactgagacgctgccctgcagcgagctctgcttagagcggaacgtcaggttttccgacgtaatgagcggatacgtgttcagcaggatcagcaccgccagaatgatggcgatatagctgaagctgaattttcgctgcaggctcgcatgcatctgcacggcgctgccccccttctctttcttttagtgggaaatcagtccttcaagtagtaccccacgccccatttggtcaggatgtgctgcggcgcggcggggttttcctcgagcttttcgcgaagccgccggatgtgcacatccactgtgcggtagtcgcctgcgtaggtgtagccccagacgaggtccatcagattttcgcgcgagtaaacgcggcgcggattcttgacaagaagctcgatgaggtcgtattccttggccgtgagctcgacgatctcgccgtttttgacggcgacgcgctgctcggggtcgagcgtgatgccgcccgcggtcaacaggagcgtttcaggctgcttttgctgcggtgcggcgttcgcgcggcgcagcagcgcgcggatgcgcgctttgagctctaagatgttgaacggctttgtgatatagtcgtccgcgccggactcaaggccgatgatcttgtcggcgtcctcgctgcgggcggtcagcatgatgatgggcacattggaaaattcgcggatgcgcatgcaggccgtcagcccgtccacctgcggcatcatcagatcgaggatgatgaggtcaaacccgccgcttttcgccatgtcgatggcggtcgcgccgtcgtaggcggtctcgaccgtgtagccctcgttttccagattgaatttcatgcccttgacgagaagctgctcgtcgtcaaccaccagaattttcattgccatcctcctccgtgaatgtgatctccgcgcggaatccctcgagcttcgcctctccgatgcccttgacgttcaaaaggtcctccgccgccgtaaaatcgccgtgctctgcgcggtagtcgatgatcgcctgcgcgagcgacgggccgatgcccgtcagcgtttcaagctcctccgccgtcgcggtattgacgttcacaagcgtcacaacgcgcgtgggcgcggtgatctcgtcggtcttgtcctgcgtcgtcacggtgtaattcccgtgcgaggcaccctcgtaggccgttttgtgcagaaaaacgagtgaaacggcgaacagcaccgtcagcgcggcgagcacaaggtagacgccgctgactttggttttcttttcttgcttttccacggttgcgctcgcctgccttttttgctatactgatgtcgaagcgtgccgaacggcgcgctcctcttcactgtattctatttgattgtatcatacaacgaggtatatttccatgaaaaaacgccgctggttttcactttttttatcttttgcgctcctgctcccgctcttttcgctcacgagcgccgacgcctatgaggacttcacactcgacgcgaaggccggccttctcattgaggccgacacgggcgaaattctctatgagaaaaacgcccatcaggagaacttccccgcgtcgctcacaaaggtgatggtcgcgctgctggtgtttgaagccatcgacgagggcaagatcgcgctgaccgactccgtcactgcgacggaatcggcgttcgaggggctgtcgagcgacggcagcacggcgaacatcgtccccggcgaaacgatgacggtcgagcagctgctcaactgcatgctcatcgtctcggcgaacgaggcgtgcaacattttgggcgaaacgctctacggctcggtcgacgcctttgtcgcgcgcatgaacgagcgcgcggcggagcttggctgcgagcacacgcactttgccaacgccacgggtcttcacaactcccagcactacacgaccgcgtgggacctctacctcatcacgcgcgaggcgctgaagcatgacaaattcatggagatctgcaactccaagagctacaccgtgcccgccacgaacatgaccgacaagccgcgtgagctgcattcgacgaactttctcatctccaactggcgcgcccgcggttatgtgtaccgcgacgcgcagggcatcaagaccggctcgacacccgaggcgggctactgcctcatttcgtccgccctgcgcggcagccgccacatgatcagcgtggtgctgggcgcagagcgcgtgacgctcgaggacggtgtgaccatccagacgcgcagcttctccgaaacgtcgcgcatgttcgactggggctttgacaactttgtcctccgcgacattctctcctcctccgaccttgtgcaggaggtgcccgtcgcgctttcgagcgaggcgagctacgtttcgacccacgcggcggaggatatcgcctgcctgctgcccgacaatgtcgagcccgacatgcttgagcgcaccgtgacgctcacgaacgacacggtcgacgcgcccgtttccgcgggcgacgtgctcggcaagctgacgctctcctacaatggtaaggtctacgccgagacggacctcttagcgctgaacgatgtatcggcctcgtggttcctgacggcgcagcgcagggtgtctgactttttcgcaaagccgctcgtccgcattctgttgatcgtggtcgtactgctgatcgtcgcgctcgtcgtctatgtgacgatgttctcccgccgtcgtcgctacggccaccgccgccgcggcagagccggcagcggctaccgcggccggagaagaagattctaagtacttcaaaaaagcggtaaagccgcttttttgagaaaggccacactccgctttgtgccttgccgccgctggcggctgcgacacgcgcggagcgagaggtgtcgatcgccacgcgctggtcgcggcgatcgacgatcaaaattctttgcgtctgcgaacgcaaaagcaaaaatgaagggacgcgaaagcgtccctttttagttgagtgtgatcacgttgttcccctgcgggaactccacgaagcggatggagtagatgtcggcggtgatgtaggcgctgcggccggggtgaaacagcgtgatatagtcgtttccgacctcctgtagcgtgccgaccgccacgaccgtgttctgcgaaccgacgaggaagctcacgatgactgcgcggccgatgttgcgcgcgagcatccccttccacgaattgtaggccatcttgtcgaccgtccgagactcttcgatctcgtcgggcgtgggctggaactgcccgctcgcgccgccctgcggcacgagcgacatgcctcccgcccccgacgatcctccaagcatttcctcatagctctggctcacgttgttgttactgttgttattactgctattattgctgctattattgctgttgccgctctgctgcgcgctcgccatggcgggcacggcagccatctgctcataaaggcacggcatgctttttcccatctggatcataaaaacgtcctctccctttcccgttgctgctgatttgcttttctcaggtgtcgtaatacgcggcggtggggttataaaaacagtggtcgccgatacgcatgacgaacgtccccacatttgaaggaaaattcgcgcggcaggacggcgaaaacgggttaaagaaccacagcgccgttccaaggccgtgcaatcggttgcccgcgatggcccagtccgcgatctcgtaatggatatcggtcgggcgcatgttgtagatgttctgcgggttgtagctgccgcgctcggtctcgctcgcgcagacgaactgccccggctgaaagatgattttgcggatgctgccctgccccacgcgcgcgtattcgccgcccgtcgagcgcacacggttcatcacgacgctcgccacggctttcatcccattctcgccctcgccgcccgcttcgcactcgatgaggcgcgcgagcagctccctgtcggaataggccatgtcgatctcctcccccatttcttcttccccgacagtctatgcgcttcccgtgcgcatggaaaccgagacgcgcaaaaaaagcaccgaaagccgttttgctttcggtgctttcgctttgttcagttttcctcgtccggcggcggaagctcttccgcttccggcggcactgctccgtaggcgcccttcatcttgagctcctgccactgctctttcgtgataagcagctggcggggctttgagccttcgaacgggcccacgatgccgcgcgtctccatctcgtcgacgatgcgcgccgcgcgcgaatagccgagcttcaagcggcgctggagcatcgagacggacgcctgacccgtctccatgaccacgtcgatcgcggcggggagcagctcatccacatcgtcggcggcgttctgatcaggcgcggcattgccgcctcccttggcgctgcccttctccttttcggcgacggcggcgttgatcttgtcgatgacggattcgtcgtagtccgtctcgccgttttccttgacgaagttgaccacgcgctcgatctcctcgctcgagatgaagcagccctgcacgcgcttgggcttgccttcgcccagcggggcatagagcatatcgccgcggcccacgagcttttccgcgcccgcggtgtcgaggataatgcgcgattccatcgcggaggcgaccgcgaacgcgatgcggctcgggatgttggccttcatcaggcccgtgatgacgtccgcggacggacgctgcgtcgcgatgacgaggtgcatgcccgcggcgcggcccatctgcgctacgcggcagatcgactcttcgacctccttcgccgcgacgagcatcaagtcggccagctcgtcgatgacgacaacgacgctcggcagctttttgagcgtttcgtccgtctccgccaccttattataggaggcaaggtccttgacgttgtgctcggagaacatcttgtagcgcttcatcatctcgtacacggcccattgcagcgcgcccgcagcctttttcgggtcggtgacgacggggatgagcaggtgcgggatgccgttgtagggcgcaagctcgaccatcttcgggtcgaccatgataaagcgcacctcttcgggcgttgacttatagagcatcgagacgatcagtgagttcgtgcacacggacttaccggagcctgtcgtaccggcgatgagcacgtgcggaagcttcgagatattcccgacgatgttcttgccgctgatgtccttgccgacggcgaaggccgtggtggaaggatgggtggtgaactccgtggattcgagcaccgtgcggatgctgacgggcgaaacgagcttgttcggcacctcgacacccacgacggagatcttgtcggggatgggcgcgatgcgcacgccgctcgcgcccagcgcaagggcgatatcgtcctgcaaatttgtgatcttcgagagcttcacgccctgactgagcgtgaactcatagcgcgtgaccgacgggccgcgcaccacatcgcccggctgggcgtccacgccgaagctcgtgagcgtctgcgccaagcggctggagttgttgcgcagctccgcgcccgcctcagcggcgttcgtcacgctgccctcttttaagagcgtgatgggcggatactgatatgcaggcggctggggctgcgcgtcgctgccctcgatctcgcgcgtgacctcctcgcgcgcggcatcgacctcggcgcggcggagcttgtcctcctgcttgtcggtcagcacggcgggaaccgtcgttgctgctgcggctgcggcgacgggtgcgctctgcacgctcggcgtgggcgcggcaaacggtgtgtgcatcacaggtgcgggtgccgggacgaccggcgtgggcgcgctcggcgctgtatcaaacggcggcaggtcgaagtcgtcggcctccaccgtcacaggcttaacgggtgcggacggcgcggcggcaggcgaaacgggtgcagcgatctttgtctccgcggcatttccgcccgctaacagctcgtcggggctcttgatattatcggacttcttgcggaagaagccgcccgtgggatttttcttgatgacgcgctcctcgccgtcgagcggaatgtcgatggcggcgtccggcgtatggaccggcgcactgcggcgcggcacatgggtgtgctgcggcggaaggtcttcttcctccactggctcatagggcacgcgctcgtgcgagcgcacggcctcgatcacggcggcaggcgtcaagcggaacgccatcatcaaaaacgcgacgaacagcacgacgagcaggaccatcgccagcacctttttcaccagcagcaccagcatgatcgcaagcgatgcagacaccgcgccgccggactcgagcgcgttgccgctcgtccacagaagcttcaagatgccatccatgttgacatactcctccttgcagagggcgatgtgcatgatcgcgccgaacacgaccggcagcagcgccgtgccgacaaggcaggacacgacgttccgcccgcggtggaagagcagaatgtagctccccagcagcagtgcgggcgcgacgaggtaatagccccagccaaagagcgaccggcacagcttcgccggctgatcgagcagccacgcgcccgactggaaatagctgaagcccaggcacagcgccagcaccagcaggatcgcgcccgcgacctcgcggcggatggggcgcttttgattcttcttcgccgtgcgcttgccggaagacgaggagcgggacgaacccgtcgttttctttttcgttgtggtggtttttttcttctgttgtgccatgattcacctcagaatcaaaaattagtgcaggatcgtgagcaccagcgtcagcacgccggcggcccagcagtaataggcaaacgcgccgaaacggcccttgtcggcaacatagcgcagcaggcggatgctcgcatagcccgacaccgccgcgacgacgacaccgacgaggtacacgggcacgctggagaagtcgatgcccgcgtcgatcgcgtccttgagcgtcaggatgttcgcccccaacaccgcggggatggagagcaggaatgcaaagcgcacggcaaacttgcgctcaaagcccgtgaagcagcccgccgtgatcgtcatgccggagcgggagatgcccgggcacagcgcgatggcctgaccgataccgacaagcagcgcgtcgagcattgtggcggtcttttcggtcttgcgtccatggcgcacgcggtcgctcgcaaagagcaggatgcccgtgacgatcagtgcgccgccgataaagtacatattatcactcagctccgtgaaaaaacggcgaaacggcaccatgacgaaaagcggcagcgtgcccacaatgatgagcagaataaggcggcgcgcaggcggcacggggttcggcgtgcgatgatgggcaaggtcgccgatgccggtgaaaaactccacgatcatatcgcggatatcatcccagtaagcggcaaacaccgccacgagcgtgccgaggtggagcagcacgtcgaaaaagtcgggcacgttgctcgcgccctggatgcttagtaaatgctccgcgatggcgagatggccggaggatgagatcggtaaaaattccgcgatcccctgcacaaggccgagaacaacggcggtcaaaactgacataaaaaacaactccttttgcgttttgttctgtaatggcaatattctaacaggataattatagcacgcttgttcgcggaataccaccccgaattgccgcatcttctttttctttcctttttcggtgcatcccttgcgaacgcagggcgaatgtgctatgattgacgcggactatcagaaaaggagagatagaaatgacttataactaccgcaccaagggcgtttgctccaaggaaatgcacattgagctgaacgacgaccacaccatcaagagcgtagaggtcatcggcggctgcaacggcaaccttcagggcatttcgcgcctggtcgaaggcatgaaggccgaggatgccatcgcgcgcatgcgcggcatccgctgcggcttcaagaatacctcctgccccgatcagctcgccatcgcgctgggcgaggcgctggcgcaggacaagcagtaagtcgtcattttttgcccgcgcggtgcatcgcacgggcaaaaaatgcataaaatcctgcaaaatgccgtttccctctctggacaaacggcgctaaactgtgtatactgttaaaaaataagcattcaacgcactatcaacgcaaaacattttgcttttgccggtctgacgggggaacttcatggacattgatatggatatcaaagagctcgaagcgttcgtctacgtggtggaaaactgcagcttttcccgcgccgcggagctgctgcacctgacgcagccgaccatcagctcgcacgtctccgcactggagagaaaactgaatatcaagctcatcgtccgcaccacgaaggagacctacccctccgacgcaggcaagctcctctacaaatacgccaaagagatcctgcaggtgcgcgagaacgcggccatcgcgctgcgcaacttctcgcaggagatgaagggtacgatctccatcgcggcctccacggtgcccagccagtattatctgccgcaccttttgcaggacttccgcgcccgctatccggacatcaccttcaatatccagatggaggacagtcccaaggtcgtggagctcgtcgccacgcgcagcgtagagattggcttctgcggcacgatggtggcgagccacaaatgcgtctatcaggattttgccaacgacccgatggtgctcatcgcgccgaacaccgaaaagtatcaggcctttgcgggcaagcccttccccatcgagcagctcaaggaagagacgttcatcagccgtgaaaagggcagcggcacgtatcaggcgggcaaggaactcttaaatgagctcggcgtcgacatcgcccagctgcgcaccgcggtcgagatccgctcgaccgagagcgtcaagcagatggtcagcgagggtctcggcgtcggtctcatcgcgcagagcgccgcgcaggactatgttcagttcggaaagcttctcgccttccccttccccgactcgcgcttccgccgccagctctatatcgtcaagcacaaaaacagcattttatcgcccatcgcgcaggtgttttacgactatgcgcgcaaaaccaaggacaaagcatccgccaaataaggcggatgcttttttacagggatcgcacgcttttttgtccgattttttcgcgaaatcgtcatttactttttttcctctctggtatatgataatgcaataggtcaacagctgcgctgcaccggtaaagcagcaagccttacgggagggagagcgatggattgccgcgattccgcgctgtttacaggcgtggacgaagtatcgtgcgaaaatatgctgcgctgcttcagcgcttacgagcagcgcttcagcgcaggacagaccatcctcacctgcgggcagcagcaggatatgatcggcgtgctgctctcgggcagcgcggcgcttctgcgcctgcacgccgacggcaaccgcaccgtgcttgaaagcatggacgagggcagcgtctttggcgaggagctggcgttcaccggctttcgcgacggcagcgcactcatcgagtgccgcgaggactgccgcgtcatcttcatgcgctatgaccagatcacaaagcgctgcgaaaacgcctgcgcctgccacagtcaggtcgtaacgaacctcttccaactgctctcgaaaaagtccctgcatctgagccgccggatcgaggtgctcgcctgccgctccatccgcgaaaagctgctgtgctttttcgagcagctctccgacgagcacggcagccggacgttccccctgccgttttccctcagcatgcttgccgactacatcagcgccgaccgcagcgccatgatgcgcgagatgcgtaaaatgcgcgaggaggacctcatcagcaccgagggccgcagcgtgacgctgctttagttttttgcaagtatttttcgtaaatgcaagttttcctgcatcgtcagaattttggtattcattgacgcaagaaaactttcatgatataaatatagcatcattccatattcccggcgctgcgtccaggaatcccgcctgccgttctccccggacggcacggcgctgaatctcaacaaaaaggagaatcattcatgtatcgcatcgtgaagaaagaagcgctcaagcccaccgtgaccctctacgagatcgaggcgccgatggtggcaaagaaggccgagcccggccagttcatcatcctgcgcgtcgatgaaaacggtgaacgcatccccatcaccatccacgacttcgaccgtgagaagggcaccgtcaccatcatcgtgcagacgatcggcgccaccaccgaaaagctcagacataaagccgagggcgagtacattcaggactttgtcggcccgctgggccgcccgaccgagaccgaaggcaagaagaaggtctgcgtcgtgggtggcggcgtcggctgcgccatcgcttaccccgttttgaagaagttccacgactgcggcgcggaagtccacgcggtcgtcggcttcaagaataaggacctcgtcattcttgaggacaagttccgcgcggcgtccagcgttttgaagctgatgacggacgacggctcttacggcgagaagggtcttgtcaccgatgcgctcaaggagctcatcgacgcgggcaaccagtatgacgagatcttcgccatcggccctgccatcatgatgaaattcgtgtccaagaccaccgagccctacggcatccccaccaccgtttccatgagcccgatcatggtcgacggcaccggcatgtgcggcggctgccgcctcaccgtcggcggcgagacgaagttcgcctgcgtcgacggcccggacttcgacggtcacaaggtcgactgggacgagagtctcaagcgcggcaagatgtacttcgactgggagcgccacaaatacgaagagacctgcaacctgttcagcaaggaggttcagtaatatgcctaacatgagtctgaagaagaacgaaatgccctcgcaggagcccaacgtccgcaacaagaactttctggaggttgccctcggctataccgaggagcaggcgctcgacgaagcagcccgctgcttaaactgcaagaaccatccctgcgtctccggctgcccggtgcaggtcaagatccccgaattcatcaagaagatcaccgaaaaggactacgagggcgcctatcaggtcattcacgagacctcttccctccccgccgtctgcggccgcgtctgcccgcaggagacgcagtgcgaatcgaagtgcgtgcgcggcatcaagggcgagcctgtcggcatcggccgcctcgagcgctttgtcgccgactggcacaatgcaaacgttcaggaagcgcccgccaagcctgcgcccaacggccacaaggtcgcggtcatcggctccggccccagcggcctcacctgcgcgggcgaccttgccaagaagggctacgatgtcaccgtttttgaagcgctccaccttgccggcggcgtgctggtctacggcatccccgagttcagacttcccaaggccatcgtgcagaaggaagtcgacggcctgaaggccctcggtgtcaaggtcgagacgaacatggtcatcggccgcgtcgtgtccatcgacgagttgatgagcgagtacggcttcgaggccgtgttcatcggctccggcgcgggtctcccgatgttcatgcacatccccggcgagaacctctgcggcgtttactccgccaacgagttcctgacccgtatcaacctgatgaaggcttataaggacggctccgacacgcccatcatgccgcttcagggcaagaaagtcgccgtcgtcggcggcggcaacgtcgccatggacgctgcgcgctgctccaagcgtctgggcgctgacgtgtacgtcgtctaccgccgcggcatggaagagctccccgcccgtcacgaagaggtcgagcatgccatcgaagagggcatcgtcttcaagacgctcaataaccccgtcaagatcaacggcgatgagaaaggctatgtctcctccatgacctgcgtggagatggagctgggcgagcctgacgcctccggccgccgccgcccgatcgaaaaggtcggcagcgaacacgatctgccggtcgactgcgtcatcatgtcgctcggcaccacgccgaacccgctcatcaagaacaccacccctggtcttgaggtcaaccgcaagggcggcatcgtcgtcaacgaggccggtcttacctctcaccagaacgtttacgccggcggcgacgccgtcacgggcgctgccaccgtcatcctcgccatgggcgccggcaagctcggcgcgaagagcatcgacgaggcactgagcaaataattttcgtcagcgaaagcgcgcagaagcgtacttctgcgcgttttctcaataccatttctcacgaagggagaactattatgaatctttggcatgatattgcaccggcgcgcgtgcgccctgaggactttttcgcggtcattgagatcgagaagggctcgaaaaacaagtacgagatggataaagagaccggcgcgctgcgtctcgaccgaattctctacacctcgactcactatcccgccaactacggcttcatcccccgcacctgggcggacgacggcgacccgctggacgttctggttctctgctctgaatgcatccgcccgctgagcctcgtggagtgctaccccatcggcgttatttcgatggaggacagcggcagtctcgatgaaaagatcattgccattcccttccaggatccgacctacaacacctatcaggacatctcggagctgccgaaccatgtggcaagcgaaatccgccacttcttccgcgtctacaagggcctggagggcaaggagaccgtcgtcagcgacgtcctcggccgcgaggaagccatcaagatcatcatcaagtgccagaacgcttatattgaaaaatattgccgttaaagcaaaaaaagggaaaggctgacggcctttccctttctattttggcataaagaaggacgcattcgaaagaatgcgtctttctttatgctgcatcttcgatttacgaaatactctcctagtaacctcattagtaacctgaaagcaactcggcaacctcaaaaacctctaagtaaccccaaacctttacggccttcagcggcaaaaagaggcatatcctcacaaagaaaaaatccccgagaccctgagtctcggggattttcagcaaattagcgcttggagaactgaggtgcgcgacgggcggccttgaggccgtacttcttgcgctccttcatacgaggatcgcgcgtgaggaagccggccttcttcaggacggtgcggtactcggggttgaccagcagcagggcgcgggccacgccgtgacgcagagcgccggcctgaccggacacgccgccgccctcgacggtggcaacgatgtcgaccttgccgagctcctcggtcgcggcgaggggctgacggacgaccatcttcagggtctcgagaccgaaatactcgtcgatgtcgcggccgttgatggtgatagcgccggtgccgttctggaagaggcgaacgcgggcgacggaggactttctacggccggtgccgtacagataaggcttcttggactgatacattcttctcttcctccttagacttcgtaggcttcgggcttctgggcctgctgctcgtgggtgtcaccagcgtagatgtgcaggcgcttcagggagtccttggtcacggtgttgcggggcatcatgccgcgcacagccacgcgcatcgcaagctcgggcttctcctgcatgaggatgcgatacttggtctccttcagaccgccgacccagccggagtgcgtacgatagtacttctgctccatcttgttgccggtgaggatggccttggaagcgttgatgatgatgacgttgtcgccgcagtcggcgtgcggggtgtaggtgactttgcgcttgccgcggagcagatcagccgcagcaacggcggtcttgcccatgggcttgccggcagcatcgatgacgtaccacttacgctcgatgttgcccttgttcgccataaaagtggacatggtgtgtttcctccatattgatctatgaatgaaagcttgtgctttacatttttgttgtcccttggtaaaatcggaacgagtttatttatagcatttgggcgcgagaatgtcaacaccattttaatttagcgcaagcaatgctcgtaaatcctcttgttttctttgattatctctcaatttctcaaatcgcaaaatcgaaattcttttatttttcgcaaggagctgtacctatgcaggaaatcttgagcctcgtgcgccgctgcgttacggactacgacatgatccaggagggcgagacggtcgccgtcggcgtctccggcggcaaggactcgctcgtcacgctcaccgcgctcgcgcgcctttccaaattctaccagaagccgttcaaggtcgcggccatcacggtcgaaacgggtgtgccgggcatgagctttgatgccgtggccgactattgcgcggcgctcggtgtcgagtacatccgcgcgaacgtgccgatctacgagatcgtgtttttggagcgtaaggagaaaaatccctgctcgctgtgcgccaagctccgccgcggtgcgctttcgaccgcgatgaacgagcacggcatcaaaacgatcgcgctcggccaccactacgacgacgcggtcgaaacacttttgatgaatctcctctttgagggccgcatcggctgcttccagcccgtgacatacctgagccgctcggacgtgacgcagatccgcccgctgctctatgtgaaggagcagcaggtgcgcaatgtcgcggcaaagctcgatcttcccatcgtgcacaatccctgccctgccaacggtgaaacgcgccgtcaggaggtcaaagagctcatcgagtcgctctccgagcgctacccagacctcaagcagaagctctttggcgcgatgcagcggtatccgctgtacggctgggatacaaaaaattcggaaaagtgacgttgtcacttttccgagaatatttcactgcgctttgtgcctcggttggccgctgaaagaggccaattcgacacacgcttcgcgcaaagtgttttctgccacgcgcatgtcgcggcagaaaacgattaaaatcttttcgtgcctatgggcacctgggcagccgttagcagctttgctgctctacggatgccgcgtacccctcgcgggtaaaaactctacgaggcttttgtcctatgtacattaaataaacaccagcctcagcaagatcagcagcgcgaggcccggcacgccgaggacggcgatgacgagagcgttgaaaagattcagccccagcgaaagcttggcgagcacgccgagcgcgcttagaatgccgagcagcgcaaagccgagcagcgtgttgacgagcagcttgcccgcgagcttcaacggcgcggcgaacagcctgagcaccgcgagcagcgcaaacacggcaaacaggacaagcagtattttttccgttatccccattttgcgaccccctcgctgcacgttttgtacacggcttcgccgctgcgctccttgatctggcgcagcaggtagtcatagcgtgagagctcggcgttgatctcatacacgcaggcgtcgacgagctccggcgcgcagaccgcgttgaagcgcgcgtacgcctgcgacagcgcgacacgcgtgtcgcgcagctcgctgaacaagtcctgcatggatgcatcgcgcgcgacgtcacagcgcagcaaattgacctttcgcatgttttcgccctcccatacctctgcaatgtcagtgtatggaaagtgtggacaaatattcctcttttcaaacaaggagccaagtatggagcatgaagagtatatgcgcgaggcgctgtctctcgcgcgcgaggccgcacaggagggcgaggtgcccgtcggctgtgtcatcgtcaaagacggcgagatcatcggccgaggccgcaaccggcgcgaggaactgcagcgcacctcctcgcacgcagagatggacgccatcgcacaggcaaatgaacgtctgcgctcctggcggctcgatggctgcacgctctacgtgacgctcgagccctgcccgatgtgcgcgggcgcgatcgtcaacgcgcgcatcccgcgcgtctactatggtgcgcgcgacgaggcgatgggcgcctgcggcggcgtgctgaacctctttatggagcgctttcccttccgccccgcgctcgtgggcggcattctgaaagacgaatgccgcgccgtgctggccgattttttccgcacgctgcgttcgtaaagtgatttcgctttcgtgcgtcatttgaccgccggtcaggaattgctgctgcgtcattactgcgtccgagatatcgacagtttggcacagtcttgcacagtcccgtgcaagctgcaaacgactgtggcgcaaggattttccttgatttgcaagggtttccggattttctttctatttaacacttttgtaacactttccctcgaactttgttaacatgcgtcctttatcttaattcttgcaagagacaatagcttcttttcatccaatcttccatcttataagaaaagggacgccgtgaggcgtcctttttcgttatattctgatgtaggatggcgtcacggatcgaagtccgccgccgcgccgataccgagcgcgatgcacacgccgccggcgtagaagaggatctcggcaagcgtcgggcacgcggccaaggccgccgcgcaaaggatgacgctcatcgtgctcgcgggcatcagcagccgcggcgcgccgccgcggaaagcaaaggcagcaaattcgagcagcaacaccgtcagcgccgcgagcgccagcgtttcgacatagtaatgacgcagaatcgggtccgtcgcgtgctcgcggtagaagaggatcagcgcaagcaccatcgcgcacacaggcacgagcagcgcaacgcctgagaactccgccttgcggcgcagcgcggtcgtagcgtacagcaggcatgccgcgccgactgccagaaaaacggacaggatcatcgtaagcgtcgtgcggagcgagaacaccaacgagcacaccgccgagccgatcagggcaaagctgccgagcaccatcaacaagaccgcaagcgtcgagcggtcaaaggcgaagtagaggtccatgctgccgcacagctcgcgctgagcgggatagcgccgcgccataatgaccgcgatgaccgctgcgacgacgagcaccgcaggcagcaccatcgtgtttaagtccatcgggacaggaagtccgtccgcgtcaaagccgactgccagcaggcggaggcgtgccagcgccgctgccgcagaaaaaagcaccagcaaaagccaatgaagaattttcacaaaaccgaaccctttctttttccggaatacggcgcgcacagcgccggaaaacatctatttattgatgatagcacactcatccccgtttgtccatgaatcattttgcggacaagtcggtcatacactgataaaaacactgtcacttaagcatcgcggccgtgggccgcagggaggaacacgccttgaaacagcttcttcgcatcacgatattattgatcggcctcatctggatcctcgcctgggcggcggcaggccgctttgacgacacgccgaacacacaggacggctcggaatctcccctgccgagcggtgagatcgccgcccccggcgagcgcgacagcgcaaaaacgctgcgcgtccaaattcagggcgaggtccagaagatggacatgggcacataccttctcggcgtgctgcgcgcggaaatgcccgcctcgttcgaggaggaggcgctcaaggcacaggccatcgccgcgcgcacttacacgctctatcgcatccgcggcggcggcagcgcgaaccaccctgacgccgacgcctgcgacgatcacacctgctgcaaggcgtacataaatgccgaacaggccgcggccaactggggcagcatggccgtctactatgaggaaaagctcgcccgtgccgtgagcgagacggacggcgaggtcatcttgtatgacggcgcgcccatcctcgctgtgttcttctcgtctgccgacggcagcacgcagggcgcaggcgacgtgtggatgaacgatctgccgtatctccaaaaggtcgatagccccgagacggaagagctcgtaccgaactactactcggtcgcaacgttcacggcagcggaattcaagtctctcatcctcgctgccaagccggacgccgacctctccggcagcccagagggatggatccgcgatatcgtgcgaaacgactcggactatgtcgcctccgtcacggtcggcggcgtcaagctgcgcggcaatgacctgcgcacgattctctcgctgcgctcgccgtcgttcaccgtggaatacaaggacaatgcctttaccttccacgtcacaggctacggccacggtgtcggcatgagccagtacggcgcaaatatcctcgccaagcagggcctttccgccgaggaaatcgtgcagcactatttttcgaacaccaccgtcggctattatgacggctgaggcatcgcggatattgcaaagcggcggaaaaattgctataatattaagataaaatacgcaaggaggcgggagaaatgaagagcaagcgttttttgtgtctgctgcttgtattgctgatggtcttctccctcacccccagcgaaacgagggccgagacgactgtctatttcaccgccgtcaacgaccaacttttgcccgatctgagcgatgaaacgatgccgttctggtcgggtgggcggctgtatgtcccctccacggtcatcaccggcacggacttgggccttttctactcccgcagccgcgacaagagcaccgccgtcgtctaccggcagggcagcgcactgacgttcaacttcgccgtcggcaccgtcgctgaccagaacgaccgccagtacagcggtcctgccatcgtgcgcagcgacgttgtgttcctgccgctcgaccttttgacgcagtttttctcgctcgattatagctacacgcgcgtgacctatggttacctggtccgcgtcaaaagtgatacggtcgtgctttccgacgcgaagttcatcgacgccgcggctatgtccatggagcagcgctacaacgaatatatgaagacgcacagcgagtcgaacgatcccggcaacacaccgaatcagaacaccgacggcgaccgcgaccttgtctgtctcgcgctgcgtgtgacggacgaagagagcgcaaacgccctgctcgacacgctcgcaagcaacaacgcgacggcgacgtttctcttctcggaagagcagctttcctcgctcggcgatctgctgcgccgtgtcgtcatcagcggcaacgccgccgcgctgcgcatcgacgcttccggcggcagctcacgcacggtcagcgcgatcgagcgcgcaaacaacgcgctatgggccgcgtgcaacgaaaaagcgcggctcgtcgcgctctacggcgcgtcggacaagacgctgcgcgccgtgcgcgccgcgggctactgccccattgactttgacctggattacagcggcggtcttcccaccgcggcgcaggccgccagcagcatcgcgcgtcaggcccgctccggcgggtgcatcgcctatctcggcgctgacaccgccgtacaggcagattggagcatgctgctctctcgcctccgctcgtcctcgcgtctcatcacggcgctcaacgagctcgcggtcacaaaggacgcgtgacggttttacaaattgttcaggaaacgcgcacagttttgcgtataataaacaataacacagaagaaagacacacgcttgtgtgaaggaggaaaccagcatggcacgcaatattcttgtcgtggaggacgacaataatatttccaacctcattaagatgtatctcgacaaagagggctttgacgtccgcatcgccgccgacggcggcaaggccgtggaggaattcaaggaaaaagagcccgacctcgtgctgctcgacgtgatgctccccgtgctcgacggctggggcgtatgcgccaagatccgcgagacgtctaagtgcccgatcatcatgctcaccgccaagggcgaggtcaacgaccgcatccacggccttgagatgggcgcggacgactatgttgtcaagccctttgaaatgaaggagctgcttgcgcgcatcaacgccgtgctgcgccgcagcgagatccccgaggacacgcacaagcgcctcacgttcgacaagctcatcatcgacctcgactcctatgagctcatcgtcgacggcaagaagatcgacacgccgcccaaagagctggagcttctctaccaccttgccgccacgccgaaccgtgtctacacgcgcaaccagctgcttgacgaggtgtggggcttcgactactttggcgactcgcgcacggtggatgtgcatgtcaagaggctccgtgaaaaggtcgaaaacgtcagcgaccagtgggcgctcaagactgtctggggcgtcgggtataaattcgaagtgaagtaattcagtatgccggaagaaaacaaagagaaaacacagaaaaagcgctggacgctcaaaaaggtcaagacccgctgccgcacgatctactggcagaattttctgcttacggcaagcgttgtcatgctgacgctggcgctgctcggcagcgcgttcttcgcgctgacgtattcctacgccatcgatgagcgcagcgagcagatgcagagcaaggcgacggtcgtgtcgcacatggtgtcgtcctacatggaaaatggctcgctcacagggctgcgtgagctggcagacttcgcttcgaacgtgacggatgcagaatttctcatctgcaactcggacggcaacctgctgctgacgaccgatacaactctcgtcaaccgcgtgctgaccgtgccgcaggacgtggccgagggcgcgatgagcgataacacctacgccgtgcgcaccacgctcggcgacatctatgaggacacgcacttcgtcgtcggcgtgccgatcgtgagcgagggcgcaaccgtcggctttgtgctggcggtgaccggcgcgcgggcgctgacgacgatgtggcgcacattcatcggattgtttttcatgacggcggtgacagtactgctgctctcgttcgtcgtgagcgcgtgggtcagcatgcgccagtcgcgccccatccacgagatggcggaggcgacacgacgctttgccgagggcaatttcgacgtgcgcatgcacaactacgagggtgtgacggagatctccgagctcgccgagtcgttcaacaacatggcggactccttacaggagaccgaacgccagcgccgcgagttcatcgcgaacgtctcccatgagttaaagaccccgatgacgaccatcgcaggctacaccgacggcatcttagacggcacgatcccgcccgagcaggaacagcagtatctgcgcatcatctcggatgaggcgcggcgcctgtcccgcctcgtgcgccgcatgctcgaggtctcgcagctccagtcgcgcgacctgacgcgcacgaaggcgccgttcgacgtgtgcgagagcatgcgccgcgtgctcatttcgatggagaagaagatcaccgaccgcgggctcgatgtcgacgccgacattcccgacagcggtatcatggtgctcggcgacaacgatctcatcacgcaggtcatctacaacctgctcgaaaatgcggcaaaattcgcccgcaagggctctgcgctctacctcggcgtgacgacgctcaacggcaaggcgctgatctcggttcgcaacgagggcggcaccatccccgccgaggagatcccgctgctgttcgagcgcttccacaagagcgacaaatcccgctccgaggataaggacggcgtgggcctcgggctctacgtggtcaaaaccattctggaccagcacaaggagcacatcgccgtcacaagcgaaaacggcctgacgacgttcaccttcagcgtgacgctcgccggcgggcagaccgcgcagtaagtctcaacaggagaaacacgctatggatcacgagaatcaggagttatccccgacggtcagccagagcggcgagccgcaggaggtcgtgctgcgctatgaagcgcccgtcacgcccatcgtggagcgctacgtgcagccgacaccgctgcccggacagccgaagaagcatacatcaccgcgcaaaaagcggaaagggcttaagatcttccttttctgcatgctcgggctgctcatcgtcagcggcgtcgtcacggcgctgtggctcggcggcgcattcgacgatcaccgttcctatcacgacgatgattttgagcagcgccatgacgaggattattacgacaacagcgagcatggcgaaacgaccatcaagcgcctgcccaacaccgatcaggtcaagctccgctacaacgaaagccacggcgaggcgctgacgatccaggagatctaccagaaagtcaatccctccaccgtcacagtgctcaccggcaaccgcgacggcagcgccatggtcggcaccggcgtcatcttcaccgaggatggctatatcctcacgaacgcccacgtcatcgcgggcggctcggagtgctacgtcgtgctcgacacgggtgaggattaccgtgcgtgccttttggggctcgacgaagaaaaggacctcgccgtcatcaagatcgcggccagcggccttcccgccgcggaattcggcgactctgacgcgctgacggtcggcgatccggtgttcgccatcggcaacccgctcggcgtggagctgcgcggcacgctgaccgacggcatcgtctccgccatcaaccgcgacgtgtacgtcggcggcgtgacgatgacgctcattcagacgaatgccgcgctcaacaacggcaactccggcggcccgctcatcaacgtgtacggacaggtcgtcggtatcaacacgatgaagatgggctcgtcctccaccacgagcgtggagggcctcggctttgccattcccatcgcctcgaccgcctatatgatcaatgacctgatcgcctacggcgaggtgcacggcgaggtgatgatcggcatttcggtgcagcccgttcccgtcacagcagagaatggcgagagcgcgcttctcgtcatggaggtcacgcccggcggccccggtgaggaggccggcatccaggagggtgatcttatcgtagcggccgacggcgaagcgttgacaaagtccaccgaccttctgcgtgtccgccgccgccatgaagcaggcgaaacgctcaagctcttagtcgagcgcgacggcaagcgcttcaccgcagacgttgttttacgcgaaagcgacacatgagga

SEQ ID NO: 10119 - DNA, 61183 bp, Unknown
  gut microbiota DNA sequence
ctggatgggagcaccatccagtggggaccccacgacgcaaggcatggcccgttggtcaagtggttaagacagcggcctctcacgccgttaacatcggttcgaatccggtacgggtcaccatcccaaaaaagcaatgctttttcgggaacccttgaggacaaaaaatcctcgggcgaaatgaattcgccctgcggcaaggttttgctgtgcaaaacgcttgaacgtgccactcggcacgacttgacaattggataaaggtttgttactgtataagacagttgcaatacagcagttggtgctgattagggcgagggtccacccgttcccatcccgaacacggaagttaagctcgcttctgccgacaatacttggctggagacggcccggaaagataggtagcgccaacatggagagaagccactcaagagagtggcttctttttttatattcatactgcgggagagaaagtccatcgccattccgcggttcgtttttacttatgatgtaaatgcggaactcttttgcggaacactctcaaaatactgccaaaggtgaagtgcgtagatagactgaaaactgcagaagatgatatttctaactgtgccgttttccgtgcttttcttcaccaagaccttacctgatttgttcaacttttgccttgacaagggggaaaagggagactataatctgccagtcaaaaaatgatggagattttagttatgaagaaaaaaagtttatctgccctgttccagccggtggagctcacgcagggcgaatgctggaagacgattttggcgttttctttcccaatcattgtttcgtacttgctgcagcaggtctacacgatcagcgacgcggccatcgtcggccaaacgctgacagcgcaggaggtcgcgggcgtcaacgatacgacgtcgctcatctttattttcctgcaatttgccttcggcgtcagcgcgggtttttgcgtggtcacgtcgtgcaatgtcggcgcgcacaatcctgcgggggtgcggcgctcgctgacgacgcagatcgttttatccgccgcgctgacggtcatcctgacggtgcttgcgctgcttctgctcgatccgatgcttgcgtggatcaatgtgacgccggacaacggcgaggtctaccgcgcggcctatacctattgcgcgatcatttttgcaggcatcggtgcgcagctgttctataacttcatctgctcgttcctgcgcagcatgggtgacagtgtgacgccgctggcgttcctgctgttctccacggtactgaacgtgggactcgacctgctgtttatcattgtgttccgctggggtgtcgccggggcggccatcgccacggtgagcgcgcagctcatcagcacgctgggctgctttgcctatgctttctccaaatatcccgagctgcgcctgcatcaggaggactggcagatcacgcgccatgatgtgacgcgccatctgatccagggcatcccgctcggcctccagttctccgtgctggcgatcggcatcatcgtggtgcagagcatcgttgttcagtttgatatgctgggtggagcgatggtctccaatgcggcgcagaacggtttcggtgcggcaaacaaggtcaataacctgttgatgacgccgctcaacggtctcggctccgcgatgacgagcttcacggcgcagaacctcggcgcgggcgacacaaagcgcatcaagaagggcacgatccagtcgattatcatcatgctcatcatggcggcgtgctccatcctgatcggactgctgctgacgatcaacggcacctatcttcacatcttcctcagcgcggataaggtgacggcggagacgctccgctttggcaattcctacctctatatcgacctgtcgctctatgcgttcttggggtttatctttgttgcgcgaaactgtgtacagggcatcggcaagccgcagttcgtgctgggcgcgggagcggccgagcttgtcgcgcgcattgccgtctgtctgctgctgcctgcggcgctcgcgggcggcatggtcagcgcggaggcaccgcaggcggcggtctacggcctgtgcgtggctgacccgtttgcgtggatgtcagccgacgcggtgctgtgcattccgttcttccgcaacattatgaaagaggactaccgttacctttacagcggcagcggtcagggcctcgtcaacggacagtaataaaaaagctctcgtcgaaagacgagagcttttttatattgtgtcaatcagtcctcgaaccatgccacggcacggatgggcgaaccatcgcagttttcgagcttgagcgggaagcagctgaacgaaaacaaccccttgccgcatttgtcgagatccttgaggttttcgatgttgacgatgtccttattttggaagagctttttgtggcgtgtcaggttttcgtctgcgatggggtcgaggccgatgacgtcgaagccgatgcccttgtagttgcccgcgatgatgtagtcgagcgccgcgtcgtcgaggcagggataatcgccaaagtaggcatccgtcccccagcgcttgtcccagccgaggtggaagagcagaaaatcggcattttccgcgtctttgccgtattgcaggatgcgctcgagcgtgatggccttgtcctcgttcaggtcgctgcactcgataacgagcgccttgccgatgaactgcaaggcggggaacgcgtcgagcgtcgtgcggccggcgaacagatgcgcgggcgggtccatgtgtgtgcccgtgtgggtgtacatggtcagcttcgtctccttgaagccgtccttttcataggtgttcgcgccggcgaaaatgggtgtctccgtgccgggatagaccggcatattttcagcgatggtgtgggtcaggtcaagcacgcgcatgggaacatcttcctttctgttgaaatcaaaatcagaacacgaactgcaccagcagcatatagcacaccgtgccgcctgcgatggagagcagcatttgtctcttccacaggtgcaggctgatcgtcacggcgatggcgatgagctcgggcaggccgtaggcaaagtgcagcacgtcaacattgcgcaggcagtagacgacgagcatgccgaagatcgcgcccggcagtgctgagccgaggtattggatgtacttgggcgtcggctttttcgggttgaagaccagaaacggcaggaagcgcgtgagcatcgtgccgagcgcgcagaggatgatggtgatggcctgttgtaagatcgtcattttaccgcctcctgcgtcttggcttcgacgggctttctcagcgcggtcagcgcgacgaggatgcagatcatcgtgggaatgaggaagttgtccgcaccaaaaatgagcagacacgcaacacttgcgataagaccgatccacgcgctgaaatggtgcttttccttgagccactggtccatgaagatgaccacaaacatcgccgtcatcacaaagtcgagcccctcggtattgaagcgcagaagcccgccgaggatgccgccgagcgtcgcgcccaggaaccagtaaaattcatcgagcagcgagacgaagaagtagaaccagccgcggtccacgccctcggggatctccgccgtatagttgacgctgaacgtctcgtcgcacatcgcgtagatgaggtagggctttttccagcccgtgcccttgtacttgtcgagcatcgaaataccgtaaaacaggtggcgcgcctggatcattaccgccgtcaggaagacctgtaccggcgcaaacggcgcgagcagcatgctcgtcgcgacaaattcaaggctgccgccgaagatgacgacgctcatgatcatcggataccagaagctaaagcccgacgtgcgcatatagacgccataggtcatgccgagaaataaaaagcctgcgaagatcgggatggtgtgcggaaacgcggccttcagtgccgcaactgcgggtgatttgctgtgcatgggaacgggaaacctccttgtggtgaggaaacgaagcagaaatgcgccggttatttttgcgcccagtgcataaactgacctgaggtgatacgatgtcctgtcaggacgcgctgcccgccgccgtcagcgccgccgcggcggccatggcgcagggaaagagcgatgaagaggtcgcgctgctcgccgccatctttacgcagctgggcgacagccttgcgatgatcgtcgctctgcgcgcgtgcgaaaaaagcggcggcagcgaggcggaataagggaatcagtccttggccgcctcttctttgtcttcgtcctttttgccgcccagggtgatgaacacgcccgcgaccagcgtgatggccgagccgagcaggatgcgcggcgtgagcgtttcatttaagaagagaatgccgacaaaaatgctcgtgatcggctcaaacgtactcaaaatcgctgcgcgctgtgcgccgatgaggaacgtgcccttctggaagagcatgaccgcaccgatgcagatcatcagcgaaaaggcgagcgccgcgagccatccggcgagggtctgcggcaggcagagctggtgcgagaagagacagagaaagaacatgcagaccgcactgatgagcgccatgtagaaggtcatacgaaagcccatgacctcgcggtggcggaaatgcgctaaaagcagaatgtagacggcgtaggtcacgccggacgtcagcgccagcgcgacaccgagcggatcgactgcaccgcttgggtcgatgagaagcagaatgccgagggagcacaggaccgcgcagaaaagcgcttttttctgcacccgttcgcgcagcaccaggccgccgagcaccacgatgacgggataggcgaagtggaataccgtcgccatgccggaggcaagatagcgatacgagctgaacagcaggatcggcgtgatacagcagccgaaaaagccggtcaggctggtctcgagcagcgcgccgcggctgatgcgcagcccgccctgcttttggcacagcagcgcgaggaccgggagcgagagaagattgcgcagaaacaccagcgacatcggcgtcacgccctgcgcgtagagaaaattcgcgcccagcggcatacagccgaagatgacggcgctcaggatcacgcagagatagccgagccacggcgttcgacgttccatgattctcccctcctttatatgaataaagtgaatgcatttatcatacgcgcgcttttccatccggtcaagtgggaaaaagaaaaaacaccgcgttgacaaatattctcgcggctgatatgctgtgatatcattagaaaaaagagaggaaagctatcatgtttctcttttatgtaaacccgatattgatcgctgcggcagtcattccggccattgtcctgctgcgctttgtctacaaggaggaccggctcgacaaagagtcgccggggctgctgctctcgctcgtgattttcggcattctatcgacatttgccgccatcgtgaccgagcagatcggcgaggcgatcttgggcattctcctgccgcagagttcgaccgcctacaacgtgctgctctacttcgttgtggtcgcgctgtcggaagagggctttaagtacctgctgctcaagaagcgcacgtggtattcaagcgaattcaactgccagttcgacggcgtggtctacgccgtgttcgtcgcgctcggctttgccctgtgggagaatatcagctatgtgctgatgtacggtctcggcacggcggctgtccgcgcggtcacggccgtgccggggcacgcgtgcttcggtgtgttcatgggcgctttctacggccttgccaagcgctacgacaactttggcgacgagtaccgcagccgccgctgccgccgccttgccgtgctcgtgccggtgctgctgcacggcacgtacgatttcatcgcaacgtatgagtacgacggctatgcatggatcttcgttgtgttcgttgtgctgctcttcgccgcggcgtaccgcaggatcaaaaagctctcgcgcgacgaccgctttatcgacgacagcgactactaccactatgacggccccgagttctgaagaatgaaaaaagcgcccgctcaccgagcgggcgctttttctatttgaaagttataattccatttcgtacagctcgtcgccggccttgtggaatccggcgcgcttgaacatccgctgcgactgcgcattgaacgagtagatctccgcgtgcagtttggggaggtgctgttcccttgcgagcttttgaatttcgccgatgacgcgcctgccgatgtgcttgctctggaagctcttcgccacgacgatgttgatctcgccgtccggatgcaggcagatgtcgccgcacaggcggccgcagtacttgatgtaaaaaagactgccgcgcgcgttgagatagcggtacatcgccttgagcagtttcaggtcgtacacactgtcgcggttgtcgacctgcttgcacacatccgcatcctgataccacggaagcgacgctttgtagttgggatcatacgggacgagagtgatctcgccgtcgacaattctgcgttccatgacagacctcgcttacatgatgactttcggcggaaacgggctcagatgtgcgcgatgcagtcgtacgcgatgcgctctccgccgtcgaaggcaccgtgaatgacgccgcagcgccggaagccatacgcttccaaaagccgctgcatcgggcgattatccgcgtgcgtgtcggcgcgcagatagccgatctgcgcggtgcagaagtcgaagcaggccttcgacacgccacgcgctttcccgttggaggcgagacggtggatcgtgccgtagggttgatcgagatgccacgcgccgtcttcgatgacgcggtagctctcgtcctcgccgagaaagagggcgaatgtgccgacgatctcgccattttcaagcatcacatagctgctgccgcatgcgatatcataggtgacgatgctgcggtctgggtactcgtcgccccattgcgaggcattgccgtttgcgcgcatgtagcgctttgcggcggcgaagacgtccagcaccgtgtcgacgtcctgcaaggtggttttgcgaatttccattttagcccttgtgctgctcgaaccagccggtgatctcgtttaagcggcggatgcgatgcttgggcttgccgctgcgggagagctcgtggttctcgccgcggaagagcacgaggcggctctcgacgccgtgcgcgatcagcgcagagtacatctgatagccctgatcgacggggcagcggtagtcctcgagcgagtggagaaagagcgtcggcgttttgaccttgtcggcgtacttcatggggctgtgccaccagaatttttcgacatccggccagatggtcgagccgcactggtcttcggagaagtcggggccgatgtcggacacgccgtaaaagctcgtccagtttgagatcgagcgctggctgacgcaggcgcggaagcggtcggtgtggccgatgatccagttggtcataaagccgccgtaggagccgccggtttcgaagaggttatctgcgtccatctcgggatactttgcgagcgcctcgtcgcagaacgccatcagatcatcgaagtcgaccgtgccgtacttgccgcggatatccatgaacgcgccgcggccgtcggagccggtgggattgcagaagatgacgaaatagccacggctcgcccagtactgcatctcgtgatagaacacgggaccgtagacggtcttgggaccgccgtgaatatcgaagatgacggggtactttttgcccgcttcgaagtccatcggctttaggataaagccgtgcacctcgtggtcgcccgcggtgaggttgagggggtcaggctgggcaacgtatttgccgcgcagcattgcgtcgttgaagtgcgtgacgcggcggcccgtctcgtcgtagagctcctgcggcttcatatcccagagcgcgcagagaagcattttgccgtttttgcggtcaaagcagtcgacgctgccgtcgcgcacgaggacgggggagacggtgccgtcttcgagcttgtagagccccgcgccgtcgaagcgcgtcgagataaagtacagcacgtcgccgttcatcttgaacgcctgaccgccgccgtggcggacgtcgcagccgacggaagaaccgatggcctcgccgtagacggcgtagggcgtgacggcaagcgtctcgtagtcgagcttgtaaaagtcgcagtccgtgttcatgccgaacttgccgtccgcggccatgacgagcaggaaggacttgccgagcgcgtatgtcgcgatgacgaagtcggggcgactcttgacgacgagcttctgacggcgcgaggcaaggtcgatgcggtaaaggtcctgaccgccgaagtgcgcggggcgggggacggagacgtcgagaagactgaaatagacggtcttctgatcctccgcgagctggacatcggagacgttgaagcccgcatccgtcaggcgggtgagggactttttcttcgcatcatagtagaagagactttcatacgcgccgcgcgtgtatgtgccgccgttccaccaccagggtagctgagagatgacctcgtaatcctcgttttcctttttgtcgtcaaagtaggccttcacgagcttcttgtcgcctttatagaggtcctcaaagccgggaaaggtcgagccgacgacaagcaggtcgccgtttttgagagggaagacctgcgagacggggatgggaaacgtgtaggcaagatcggcctcgccgccgtcgagtgcgatcttgtagaagcggctcgtgagcgatggttccttttccccttcacggtcgcccgcgaaaagaaccgtgttttcatccaagtagcagaacgaggattccttgccgccgccggtcagcgcgcggacgcggccgccttttaaaagatagaggcgggattcgtagcaatttttttcttttttcgcctgactcacggtgaagcaggcgcttgtcccctcgggggagaatgtcacgttcgcaagtgagcggacggcgcagaaatcgtcaatggcgatgggcttcatgggaaaactcctttcatcgtctgcgcgcagagcggcgcaaaatcacgcaagcatcataccacagcgacaaatatattgcaatccgcgacaaaatccgtcgaagcgcacaaaaaaaacatctgcggaaaccgcagatgttcacaaaaaatgccttgacttttctgtacccatttggtaaaataaagcgcttataaacgggaaagggcgaggaaaattccccacccattaccgagagaatagcataccgcggcaaaaaaagcaagatgcagttcgctttgttttacaacaaagccgggtgtgtcgaactgaatagagccgccgcaatacattccttcaagcggacagggcttgaagaaaagaaaggcgtgaagagcaaaatggccaaagacaagatgtatggcaaaacccttcgcaagaatttcgcccgacacgaggagatcgtggagatgccgaacctgctggcgcttcagaagaagtcctaccagtggttcctcgatacgggtctgcgcgaagtcttttccgacgtcgcctcgatctcgaactacgcgggcaacctggagctgagcttcatcgactacaagatggacgaagcgcccaagtacgacgtgctcgagtgcaaggcgcgcgacgcgacgtatgccgcccccctgaaggtgagtgtgcgcctctacaacaaggagaccggcgagatcaaggagcaggagatcttcatgggcgacttcccgctcatgaccgagtccggcacgttcgtcatcaacggcgccgagcgcgtggtggtttcccagctcgtccgttcccccggcatttactacggcaaggagatcgacctcaagaccgacctcccgctgctgacgtccaccgtcatcccgtaccgcggcgcatggctcgaatacgagaccgacgccaatgagatgttctgggtgcgcatcgacaaaaaccgcaagatccccatcaccgagctggtgcgcgccatcggcttcaagaccgacgccgagatcctcgagctgttcggcgatgacgaccgcgtggccgtcacgctcgaaaaagatgcctgcaagacctatgaagaggcgatgctcgagatctaccgcaagctgcgcccgggcgagccgcccacggtcgaggcctgcgagaccctcatcaacaacctcttcttcgacccgcgccgctatgacctgtccatggtcggccgctacaagtacaacaagaagctctccctgtgggcgcgcatccgcgggcagaagctcgtctatcccgttgccgacccgcgcacgggcgagatcatgtttgacgccggccacatcgtcaccgacgaggaagcgcgcgagatggatgccatcggcgtcaacgatgtgaccatcgaggtcgatggccgtacgatgcgcgtgttctccaaccacatggtcgatcttgaccgctttgtcgactttgaccccgtggccgagtgcggcatcaaagagcgcgtgcgcgagagcgtgctcaaggagctgctcgagcagtacagcggcgaggagctcaaggaagctatccgcgacaacgccgaccgcctcgtccccaagcacattctggtcgacgatatcctcgcctccatcaactacatgaacgcgctggcgcacggcatcgtctataaggacgatatcgaccacctcggcaaccgccgtctgcgctgcgtgggcgagctgctgcagaatcagttccgcatcggtttttcccgtatggagcgcgtcattcgcgagcgcatgacgatccaggatctcgacatcgtcaccccgcagagcctcatcaacatccgccccgtcaccgcggcgatcaaggagttcttcggatcgagccctctgtcccagttcatggaccagacgaacccgctcgccgagctgacgcacaagcgccgtctgtccgctctgggccccggcggcctttcccgcgagcgcgcgaacatggaagtgcgagacgtgcactacagccactatggccgtatgtgcccgatcgagacgccggaaggtccgaacatcggcctgatctcctacctcgcgacctacgcccgcatcaatgagtacggctttatcgaagcgccgttccgcaaggtcgaccacgagacctgccgcgtgaccgacgagatcgaatatatgaccgcagacgtcgaggaccagtacatcgtcggtcaggctgccgagcctgtcgatgaaaacggctgtctcgtcaaccagcgtatcacctgccgccaccgcgacgagatcgtcgaggtcgaccgtgaccgcgtcgactatatcgatatctccccgcgtatgatggtctccatcgcgacggcgatgatcccgttcctgccgaacgacgacgcgaaccgcgccctgatgggcgcgaacatgcagcgccaggccgttcctctgctccgccccgaggcgccgatcgtcggcaccggtatggagcataagatctgcatggactccgaggtcgtcattctcgccgagggcgacggcatcgtcaccaagatggacgcgcgcgccatcactgtcgcctacgacaacggtgagacgaaggaatacaaactcacgaagttcctgcgctccaaccacggcacgtgcatcaaccagcatccgatcgtcgacgtcggcgagcgcgtgcatggccgccgcctgaacgagaacggcgtgtgggaagatcccaccgtccttgccgacggccccgcgaccgatcagggcgagatcgctctgggccgcaacatcctcgtcggcttcatgacctgggaaggctacaactacgaagacgccgttcttctgaacgagcgccttgtccgcgaggactattacacctccatccacctcgaagagtacgagcttgacgcacgcgataccaagctcggccccgaagagatcacccgcgacatccccaacgtcggcgaagacgcgctcaaggaccttgacgagcgcggcatcatccgcatcggcgcggaggtccacgccggcgacatcctcgtcggtaaggtcacgcccaagggcgagaccgacctgaccgcggaagagcgcctgctgcgcgccatcttcggcgaaaaggcgcgcgaagtgcgcgacacctcccttaaggtgccccacggcgagagtggtatcgtcgtcgatgccaaggtcttctcccgcgaggcgggcgacgagctcggccccggcgtgaacatggtcgtgcgcgtttacatcgcgcagcgccgcaagatccagccgggcgacaagatggccggtcgtcacggcaacaagggcgttgtctcccgcatcctgccgcaggaggacatgcccttcatgcccgacggtacgccgcttgatatcgtgctgaacccgctgggcgttccgtcccgtatgaacatcggtcaggtgctcgaagtccatttgggctacgcggccaagacccttggctacaaggtcgcaacgccgatcttcgacggcgcgagctatgaggatatccgcgaggagctcatcaaggccggtctcgaccccgagggcaagagctggctgtacgacggccgcaccggcgagcgcttcgacaacaaggtcaccgtcggttacgtgtacttcctcaagctgcaccacctggtcgacgataagatccacgcccgttccaccggtccttactcccttgtcacgcagcagccgctcggcggcaaggcgcagttcggcggccagcgcttcggcgaaatggaagtctgggctctcgaggcttatggcgcggcttacaccctgcaggagatcctgacggtcaagtccgacgacgtgaccggccgtgtgcgcacctacgagtccatcgtcaagggacacaacgttccgcagccgggcgtgcccgagtcgttcaaggtccttgtcaaggaattgcaggccctgtgcctcgatgttcaggtcctcgaccgcgacggcaaccagatcgagctcaaggaggacgaggatgcgatggatacgttcaacctcgcgcgtatggacgccgaggatgagcgccaccgcagcaaccccttcgccgatgaagccgagctcgaggacgcaggctttgaatatgtcgctgatgatgaagtcaacgccgactttgccggcgacgatcaggaagactgagaaaaggaggagcatatagaaaatgagttacgcaacgtttgacgccattaaaatcggaatcgcttctccggagatgatccgtgaatggtcttacggcgaggtcaaaaagcccgagaccatcaactaccgcaccctcaagcctgagcgcgacggcctgttctgcgagcgcatctttggccccacgaaggactgggagtgccactgcggcaagtataagaagatccgctacaagggcaagatctgcgaccgctgcggcgtggaagtcacgcgcgccaaggtccgccgcgagcgcatgggccacatcgagctcgccacgcccgtttcccacatctggtatttcaagggcattccgtcccgcatgggcctgctgctcgacatcagcccccgcatcctggaaaaggtgctgtatttcgccgcctatatcgtcaccgatcccggcgagaccccgctgatgcgcaaccagatcctctcggagaaggaataccgcgatatgcgcgagaagtatgaggacgattttgacgccggtatgggcgccgaggccgtcaagaagctcctccagcagatcgacctcgaatccttgtccgagcagctccacgccgaactcaagagcgcgagcggccagaagaaggcccgtatcgtcaagcgccttgaggtcgtggatgcgttccgcatctccggcaacaagcccgagtggatgatcatcgacgtgctgcccgtcatcccgcccgagattcgcccgatggtccagctcgacggcggccgcttcgcgacctccgacttaaacgacctctaccgccgcgtcatcaaccgcaacaaccgcttaaagcgcctcattcagctcaacgcgcccgacatcatcgtgcgcaacgagaagcgcatgctgcaggaagcggtcgacgcgctgatcgacaacggccgccgcggccgcgccgtcaccggtgcgaacaaccgcgcactcaagtccctttccgacatgctcaagggtaagcagggccgcttccgtcagaacctgctcggcaagcgtgtcgactactccggccgcagcgttatctgcgtcggccctgagctgaagatctaccagtgcggtgtgccgaaggaaatggcactcgagctgttccgccccttcattatgaagaagctcgtcgaggacggcgccgccaacaacatcaagtccgccaagaagatggtcgataagggccgcaccgaggtctgggacgcgctcgacgtcgtcatcaaggatcaccccgtcatgctcaaccgcgcgccgacgctccaccgtctcggtattcaggcgttcgagccggtgctggtcgagggccgcgccctcaagctccacccgctgaactgcacggcattcaacgcggacttcgacggcgaccagatggctattcacgtgcccctgtctgccgaggcgcaggccgaggcccgtatcctgatgctctctgccaacaacctgctgcgtcctcaggacggcggccctgtcacggtgccgacgcaggatatggttttgggttcctactacctcacgttcgagcgctttgaaaacggcgtttcccagatggataacgacgagttctggccgcaggacattgactttgcccttgccggcaagcgctacgacgagctgaccgacgaagagaagaccagcgtgaatctgcacgtttaccgcgacgaggacgaggccatgctcgcctacaacgaccacctcatcggtatccaccagcccatccttgtccgcacggtcaagcagatgccggacggcaccatgggcagcaaggtcgtgcgcgttaccatcggccgcatcatcttcaaccgcaacatcccgcaggaccttggctttgtggggcgcgtggatgaaaacggcgatccgaccgaaaactacttcgactacgagatcaccgaggtctgcggcaagaagctgctcggcaagatcgtcgaccgcacgatcaagctgcacaacttcaccattgcggccgaagtgctcgataacatcaaggccacgggctacaagttctccacccgtgcggccatcagtatctccgttgcggatatgaccattccgccggcaaagtacaccctcattgccgagaccgagcagcgcgtcgtcgacattgaagaccagttcaagatgggctttatgaccgaggatgagcgctaccgcgccgtcgtcaaggagtgggaaaagaccaccgcggacgtcaccgacgccctgcagaagaacatggaccgctacaaccccatcttcatgatggcggactccggcgcccgtggttcgatgaagcagatccgtcagctgaccggtatgcgcggcctgatggccaacaccgccggtaagacgatcgagatcccggtcaaggcaaacttccgcgaaggtctgtccgtccttgaatacttcacctcctcccgaggcgcccgtaagggccttgccgatacggctcttcgtacggcagactccggttacctgacccgccgaatggtcgacgtctgccaggatgtcatcatccgctccgacgactgcggcgcgacccgcggcatcacgatcagcgagatcagcgagaacggccaggtcatcgaaaagttctccgagcgcgtcaacggccgctatccggtccacgacgtgatgaagcccggcacggacgaggtcctcatttccaaggatcacatgatgacccccgaggatgccgacctcatggagaagttcgatatccactccgtcgagatccgcacggtgcttacgtgcaaggcccacagcggcgtttgcgcgaagtgctacggcatgaaccttgccacgagcaagcccgttggccccggcgaggcggtcggtatcatcgcggcccagtccatcggcgagcccggtacgcagctgacgatgcgaaccttccacaccggcggcgtcgcgggcggcgatatcacccagggtcttccgcgagtcgaggaactgtttgaggcgcgccgtcccaagaagatggcgaccctcgccgagatcggtggtaaggtccgcttcgaagaggcgaccaagggcagcctgctcaacatcatcgtcaccgcggacgacggcgacaaccgcatttactcggtgccgcacaccggccttcgcgtgaaggatggcgacgtcatcgccaagggcacgcagctgcaggacggcgcgctgtccccgcacgatatcctgcgtatccgcggcacgtccgccgttcatgactacctcattcaggaagttttgaaggtttaccgtcagcagggcgttgacatcaacgataagcatatcgaggtcatcgtccgccagatgatgcgcaaggtgcgcgtcgaggagtccggcgatacgaacctgctctccggctccatggtcgatctgcttgagtatgaggatgccaacgaggagatccgcgcgcgcaatgccgcgggcgaggtcaacgccgagaccggcgagccgctgcaggaagccattgccacgcagctgctcatgggtatcacgaaggcctctcttgcgaccgacagctggatgtccgccgcgtccttccaggagaccacaaaggtcctgactgaagccgccatcaagggtaaggtcgaccaccttgttggtctgaaggagaacgtcatcatcggtaagctcatccccgccggtgcaggcctgaacgcctaccgtgactttgccgaggagatcgttcccgagcccgaaaagcccgaggaagagccgcacgagccgcgcatcatcacgaatgccgtcgaagtgtgagttaagacctcacgtattgaataggtaaaaagagacgcggaaaattccgcgtctcttttttgccattttggcggaaaaagggagagtttgacagcctcttttcaaaagtttgacgcgccggcgcggaacgcacaaaaaaattcgggaaaagcccgtcgtttcagcgattattttgtgtagacagccataaaaaacgcttgacggcttgtgtgcctcatggtataatttcaacttgcgtgggtatgtcccacggaatttgtcataccgtcaggagggacctgccgtgacgccggatctgtccacttgccgcaaggtagcgggcatcaagcagacgatgcgtgcactgcgggaacaccgcgcggaaaagctgtatatcgcctgcgatgcagacccagccgtgcttgcgccgatcgaagcgctcgcacgcgaagagaacatcgagatcgacgatcgcgccacgatggcgcagcttggccacagcgcgggcatcgccgttggtgcggcggtgatcgccgttctgagaaattaaggttttttcgggatattttaccgatatcctgtaaaaaatatatatcacatcatttcaggaaaggagaaacaagaatgcctacttttaaccagttggttcgcaagggcagacagcagtcgacttataagtccaactccccggctctgcagtatggtcttaacacgctgaagaacaaggagaccgacctcgcctctccccagaagcgtggcgtttgcaccgcagttcgtactgcgaccccgaagaagccgaactccgctcttcgtaagatcgcccgtgtccgcctcaccaatggctatgaggtcaccgcttacatccccggcgttggtcattccctgcaggagcactctgtggtcatgatccgcggcggccgtgtgaaggacctccctggtgtgcgttaccacatcatccgcggcactctggacgctcagggcgtgcagggccgtatgcagtcccgttccaagtacggcgccaagcgcccgaagcagaagtaaggctgcgaccttgaaatgagctttgccgaaaaggtttgatatatatttttgtgtcattcacctctttggcaggccggaacacgatgggggagagccccattcgcgagtacctatgatttctaaattataagaaggagggaagcaaagtgcccagaagaggtaatgttcccaagagagaagttctgcccgatcctatgtacaacagcgtcctggtgaccaagctcgtcaacagcgtgatgctcgacggcaagaagggcgtcgcccagaaggtcgtctacagcgcgttcgacatgatcaaggacaagaccggcaacgagcctctcgatgttttcaaccaggccatggagaatatcatgcccagcctggagaccaagtcccgccgcgtcggcggtgccacctatcaggtgccgatggaggtccgtcccgcccgtcgtcagaccctcggtctgcgttggctgacggcctatgcccgtgcccgtggtgagcgcaccatggccgagcgcctggctggcgagatcatggatgctgccaacaacagcggcagcgccgtgaagaaacgcgaagatacccacaagatggccgaatccaacaaggcattcgcccacttccgctggtaacggaggaacgagagaattatggcaagaaaagtctctctggaaaacaccagaaatatcggcatcatggcccatatcgacgctggcaagaccacgactaccgagcgtattctgtactacaccggcgtcaactacaagatcggcgagacccacgacggtaccgccacgatggactggatggctcaggaacaggagcgtggtatcaccatcacctccgctgccaccacctgctactggaagggcagcaagaatcagttcccgcagacccgcttgaacatcatcgacaccccgggccacgtcgacttcaccgttgaggtcgagcgctccctgcgcgttctggacggctctgtgaccgttctctgcgccaagggcggcgttgagccccagtctgagactgtgtggcgtcaggccgataactacaaggtcccccgcatgatctacgtcaacaagatggatatcatgggcgcggacttctacaacgttctgcacatgatccacgaccgtctcaagtgcaacgctgtccccatccagctgccgatcggctctgaagataccttcaagggcatcatcgacctggtggagatggacgctgatatctactacgacgagctcggcaaggacatgcgcgtcgaggagatccccgaggacatgctcgagctcgctcaggagtatcgcaccaagctcgttgacgcctgcgccgacctgaacgacgagatcatggagttggcgctcgaagagaagcccgttcctcaggacctcatccgcaagaccatccgtcaggccaccatcgacaataagatggttcctgtcacctgcggtacctcttacaagaacaagggcgttcagaagctgctggacgcgatcgtcgactacatgccgtcccccgtggatatccccgcgatcgacggtgtgaaccccgataccggtgaggaagatgtccgtcacgcggacgataacgctccgttctccggtcttgcgttcaagatcgcgaccgacccgttcgtcggccgactgtccttcgttcgcgtgtactccggtattctgaataccggtaccgccgttctcaactccaccaagcatcagagagagcgcatcggccgcatcctgcagatgcacgccaaccaccgcgaggatatcgagtgctgctacgccggcgacatctgcgccgtcatcggcctcaagaacaccaccaccggtgatacgctctgcgatgaaaaggctccgatcatcctggagtccatggaattccccgagcccgtgatccgcgtcgccatcgagcccaagaccaaggccggtcaggagaagatgggcgttgcgctgatgaagctggccgaggaagaccccacgttccgcacctacaccgacgaagagacgggtcagaccatcatcgccggtatgggcgagctccatctggagatcattgtcgaccgcctgctccgtgagtacaaggtcgaggcgaacgtcggcgctccccaggtcgcctacaaggagaccatcaccaaggctgtcgatcaggataccaagtacgcccgtcagagcggtggtaagggtcagtacggtcacgtcaagatccatgtcgagcccaacgagtccggcaagggttacgagtttgtcaacgccctcgtcggcggcgcgatccccaaggaatacgttcccgcgatcgatgccggtattcagggcgccatgctctccggtgttctcgccggttacccggtcgtcgatgtcaaggtcacgctgtacgacggttcttatcacgaggtcgactcctctgaaatggcgttcaagatcgccggctccatggccttcaaggaggcctgccagaaggccggcccgacgctgctcgagccgatcatgaaggtctgcgtcatcgtccccgacgagtacatgggcgacgtgatcggcgacctcaactcccgccgtggtcagatccagggcttcgaggcccgcagcggcgcgcagcagatcgacgctttcgttcctctggctgagatgttcggctacgcgactgacctccgctcctgcacgcagggccgtggccagtacacgatggagcccgcgcattatatcgagatcccgaagaacattcaggagaagatcatcaaccagcgcacgaaccgcgcctgataaaaaggtattgcaaaataccgcgttttacggtaaaatactggtgtatgtaaacgacaccggtaaacaacgaaatttattcataggaggatcactctaatggctaagcagaaattcgagcgtaccaagccccacgtaaacattggtaccatcggtcatatcgaccatggtaagaccaccctgaccgctgcgatcaccaagttcctcgccctccagggcggtgctgactacaccgattacagctccatcgataaggctccggaagagcgcgagcgtggtatcaccatcaacaccgctcacgttgagtaccagaccttcgaccgtcagggccacaactacaagaccggcgaggatggtgagatccagggtcgtcactatgcccacgtcgactgcccgggccacgccgactatatcaagaacatgatcaccggcgctgctcagatggacggtgctatcctggtcatcgccgcttccgacggccccatggcccagactcgtgagcacctgctgctcgcccgtcaggtcaacgtgccttccgttctcgttttcctgaacaagtgcgaccaggtcgacgatgaagagctgctcgagctcgtcgagatggaagtccgcgagatgctcgacttctacagcttccccggcgacgagaccccgatcatccgcggcagcgctctgaacgccctgatctccgagtccaaggacctcgacgctcccgagtacaagtgcatgcacgagctcatggacgctgtcgatacctggatccccacgcccgaccgtaaggccgaccagccgttcctgatgcccgttgaggacgtcttcacgatctccggtcgtggtaccgtcgctaccggccgtgttgagcgtggccagctgaagctcggcgaggaagtcgagatcatcggtctgaccgacgagcgtcgcaagaccgtcgtcaccggtatcgaaatgttccacaagctgctcgactacgccgaggctggtgataacatcggtaccctgctccgtggtgttgccaagaacgagatcgagcgcggccaggttctgtccaagcccggttccattcaccccctcaccaagtttgttggtcaggtttacgtcctgaacaaggacgagggcggccgtcacaccccgttcttcaacaactatcgtcctcagttctacttccgtaccaccgacgtcaccggcgtcatcaccctgcccgagggcaccgagatgtgcatgcccggcgataacgtcgacatgaaggtcgagctgattaccccgatcgctatcgagaagggtcttcgcttcgctatccgtgaaggcggccgtaccgttggttccggcgtcgtcatcgagaccgaggcctaattgatccactgagggtcatccaaagacttcaaaaagcagcaggccgcaaaggcctgctgcttttctattatcgaaagtgcaaaggaagtgcgaagccagcggcttcgcacttcctttattcatatttggcccagacccagcggtcgaagtcatccgagcggaaggcggcgagctttgatgcatagtccgcattgactgtggtgaagcgccgaaggccgtcgctcgtctgcaccagcgggtcgatgctgcgctttttggcggcgatcttgacggcgtaagtaccctccggcttttgcgcgctggaccgcgtaccgattatgcggcgataatcctgccagcgcgcggcgaggaccggatcagagaggagcagggcgatgacatgaggttcgtcgaggtagagatcatccaccgtcaacacattgcgctgccgtgcctcgcgcaggagatcggccaatgcctgcatgctgaagcggtcctcatcggagacgaaccactccgactgccgcagcgagagctgggtaaagatgtcggcaatctccgcgtgcgcaaaacagagctcatcgacgttttcctcgtttttgccgacaaagatgtcgtcaaaaatgcgtttcagctctgcttttggacagtggaagacaagatgcgcgttgccgagcgtatattcgagtcggtcggcggagaggcggggcgaatcgttgtcggcaatgggatagcggtggtagtcgtccacatcgtcgagcgtcaggccgcttttatcgagcagcgccatgagttccggcgacgaggcgatcatcatgcgtgtgcggctttcggtcgattcctgccgcatgtggtcaccgttcagaaagtcgaccacgtgggcgaacgcgggcgtcgcaatgtcatgcagtagtcccgcgacagattgcttcaagtcatgcgtgaagtgccagacgatggccgctgtgccgagcgaatgcgtatagcgcgaatacggcgcaacggcgtcgcggtagatgggataggccgtgtattcgcagccgcagtgcatgccgacgcgcaaaagccgctgcatcacgggcgtttcggccatggcgaggagctccggcggcagggaagcggtgtagatatcggtatacataatatcctttccaaaagaaaagcgccttgccgcggcaaggcgcttttttgattgaatcagccgatctggcgggtctcaacggtctcgtcgcactcgacgctgtcgatctgcgcgccgaggttgcggagcttgccgatgatattctcatagccgcgctcgatatagtggacgttcgagacctcgcttgtgccctcagcggccagcgcggcgatgaccatggcggcgcccgcgcggagatcgtaggcctgcacgctcgcagcggtcaggtggtcgacgccttcgatgacggcgctgcggccctcgacgcggatctgcgcgcccatgcgcgtcagttcgccgacgtagcggtaacggttgtcccacacgccctcggtgaccatgctcgtcccctcggcaaggcagagggcaacggtgatctgtggctgcatatcggtcgggaagccgggatagggcagcgtcttgacgttggtgcggcgaagcttgcccgagcggcgcacgagcagcgtgtcgtcctgctcctcgacctgcacgcccatctcctggagcttggcggtgatgcagtccatgtgcttggggatgatgccgcgcacgaggacttgtccgccgcaggcggcgacagccgccatgtaggtgcccgcctcgatctggtcggggataatggcatacgtgccgccgtggagtttgtccacgccgaaaatgcggatggtgtcggtgccggcgcccttgatgttcgcgcccatggagtttaagaagttggcaaggtcgacgatatgcggctccttggcagcgttttcgatgacggtggtgccgtcggcaagcgccgcggccatcataatgttcatcgtcgcaccgacggagaccacgtcgaggtagacgttcgcgcccttcatgcggtcgccgcttgccttggcgcagatgaagtcgccctcgcgcacctcggcgcccatggcggcgaagcccttgacgtgctggtcgatgggacgcacgccgccgaagttgcagccgccgggcatcgagacctcggcctcgccgaagcggccgagcagcgcgccgatgaggtagtaggaggcacggatcttgtgcgcgagctcctgcgagacctgcgtagtggcaatatggcggcagtcgatctcaacatcgctgcggttgaggaaacggacattcgcgccgagctgctctaaaattttgagcagcgcggtcacgtcggagatctggggaatattttcgatgcggcagacgccgtcgaccagaagggcggcgggaatgatggcgaccgcggcgttctttgcgccgctgatgcgcacttcaccaaagagcggatgaccgccctgcacgatgtatttcgtcatagtaactccttaataagagacggtgagacttcttttcgttatcgtaaaacagcaggggaaaaccgcctgctcatggtattcacataatacatcaacagtataccaaaaaaaacagaaaaagcaatgctgcacagtaagaaattagaaatgctgcaagaaaaatttcattctcgtgtgatctcgccggtcttgcagttcacataataactgctgacgtccgtggagatgcgccacacgccttgcagccgaagcggcgaggcagacgacgtctggagaagatacccttcgtccagcgctcggacctcggtacatacgacgcccgaagcgctgcaatagtccagaaaatgcacaagcgcgtcgaccgcgtcgaggccgtctgtgcggcggccctcgtcgagcgcgggcagaaaggtaccggaaacgccggtgagcgagctgtcagaaaacgtgagcgtcagcgaggcgttaaagatgagccggcctttttcactgcgtatgcccgtgacgctgccgctgccatccgtgagctgggaggtgagaaaagtgtagccaaacgttttgaaaagctgtttgctaaagctctctggatcgtcgaccggtcgggagagaagcgcgtcggccgtgccgccggagcggatggaacacgagccgtattcgccggtgaagcggctcacaccgccgccggaatcgctgctctcggcagtgccgagcagggcggaggcgaaagcctcttcgcgtgcggcgtcgcgctcaagcgagagggagaggtgcgtttcctcatcgggcagcagcgcgcggtcaaaggcgacgccgtttttttcaaaaagcgtgcagagctgctcgacgcggcgctcgttcgagtcgcgctccccggcgcggcggctgagcagcaggaagagcagaaacgcgttgacaagcagcaaaatgacgatgacgatatttttgagccgcgaggttttcatgttcgggcgtcctttccggaaagatcagtcggcaaaccagccgacgccgacggtgtccgcgccgtgctcgtcgtagcagacgtgcagctcggcgctcaaatattggctgtccgcgatggccgcggcctgccggatgggcagcagcagtgcgggcgaatcgctgagcgtatagctgcggcagtggagggaaaattccgtgatggtctggtcttcgatcgtgaccgtggcggcgtggctgccgtcggaaaagcgcagcggcgtaccgccgaccgcatagtcgaagctcacggtgaagcgcttgttgctgctgtcgatctcgctgagatagagctcggcgtcgccgcttacgtcgcgaagcagcgtgaaggcgaggcgctgcgcgcccgcgacggtttcgagcatcgtgggctttccggtcgaggcggcggagacatagtagatcgagcccgcctcggcctcgtccgcgccctgatagaagacgctgccgtcgggctcaaggcgcagcgtgccgtagacctctttgataatggtgctgccggaggagtcggtgtagccgctttccgtgtgggggttgaactccgcaaggcgcagaaatgtcgcctgatcggtgagggcattgctcgccgagagcgtgtagcgctgcggcggttcgctgaaaatgagcgtgtagggcgagagctgagagaactcgccggagagcgagaacgcaaaatctgtgccgttgccatcgagcgaggcgagcgcttcgcgcagtgtcgcgctgcttatctccgtccggctgacaaaaaagccctgattggcgtcctgtaagtagagcgttgcgccgttttccgcggggcagagcacaagccgcgtgacgcgcaggagcgaggactccggcgcgtcgttgacgccgagaatgcggctgagcacttcgagcggcgtgggggcctccagatcgaggtagatgctgctcgcgtgcagtgcggtgagcagcttttcaccgctgcacgcttcataagtggtagcagagccaagcgcctcgccgaaaaacgtgccggcgagctcaaaatctgtgtcaagcgtcgtgatggcgctgagcccgtagcgggcgtattcgttcgtgaacaccacgcgcacggggagcgcgagctcggtcagatcggtggtgacggcggtatcggtcgaggtgtcgcccgcgagccagtcctgcgcgagctcgtagggcgtcttgcccgcaaggtcgccgacaagcggcgtctggatcagaagcagcacggcggtaacggtcaaaacggcgatcgcggcgttttgcagatggctcatgagcgtggcgttcttattcatgggaatcctccccgccgatgggctgggtgatgggcagctctaagcggacggtcgtgccggggccggggcggtcaacgagcgtgagcgagccgtggtgacgctggacgatctccgtcgcgatggaaaggccgaggcctgtgccgccggattcgcgcgatcttgctttgtcgacgcggtagaagcgctcgaaaatgcggctgcggtcggcctcgggaatgccgatgccgtcgtccgcgacctccatccagacagtttcgccctcgctgcccgcggtgacacggatgtggccgccgtcgggcgtgtacttgacggcattgctgaggacgttgagcatgacctgctcgatgcggccgcgatcgcccatgatgagcgggagattttcggtatagtcgtgcgtgagctcgtgcttgtggcggcgggcctcaagctccgtcgagcggagcacggagtcgatggcggcggagaacgggaagcgcaccatattcatctcgctgcggccggagtcaaggcgcgagagcgtcagaaggtcctgcacgatgtgggtcatgcggtctgtttcgctgatgacgacatcgaggaagtcgttttccgtctcgcggctcaagtcgtcgcccgcctcgcggatggtctcggcataggagcggacattcgtgagcggcgtgcgcagctcgtgggagacattggcgacaaattccttgcggcgctcctcagtcttgcggtgctcggtcacatcgtgcagcacgatgagaacgccgccgctctcctcatcggagaagggagcgaagtagagctccacgctgcgctcgccgacagtgagctcgccctcaacatagtcgctgcgctgcatggtgatgacatgggaaaacgggcagatggattcaaacagctcgctgtacacgcactcgtccgccgtgcggcctaagagctcgcacgcggcggggttgcagtggatgagcttgccgctgccgtcgtaggcgacgacgccatcgctcatgtggagaaacagcgtgtcgagcttgttgcgctcgttctccacggcttcgagcgtggagtggagcacggacgccatgtcgttgaatgtggtggtcagaacgccgatctcgtccgtcgattcgacagcaagcgtttcgtcgaagtcgccggtcgcgatgcgctcggcgccctcggtcagtttttcaatggggtcgatcatggtcttggcgagcaggaacgacaaaagcaccgagacgagaagaccgacgagcagtgcttgcagaatgatgaacagcagctcagagttcagcgacgagaccgtggtgcgactgtcgcggatgtagatgatgaagctgttgtcgccgccggagatcgggatggcgacatccatatagcttgcggcaaggtcgctgtggtcgccgacctcgccgttgcgcgcggtgaggatattttccgtctgctcaagcagctggccgtcctcgttgctcgaagcaagcacttcgccgctgcggccgtcgagaacatagtagttgcggttgcgcgagtcaatgctcagtgtgccggagtaggcctcgagcatcgtttgcaggcgcgcggcgccgtcctcctgcgcggcctcttcgtgcagtgagctcacgaacgcggcgttggactcgccgaacacttcgctcatctgctcgtaaaaatcgtcaatatagaagttcgtgatgctggtcatcaaaaacgcgcccaccaccgccatcagcgaggtgacgagcagcagcatgatcatcacgagcttcatatgcaggctgcggaacatagcaggagactcctttcccggaaaagtgcgcgcaacttacgcctgcgcggagaaataatagcccacgccgcggcgcgtgaggatgtaggccggcgcggcggggttgtcctcgatcttttcgcgcaggcggcggacggtgacgtccaccgtgcgcgcgtcgtcgccgacgtagccatagttccagacctgctccatcaggtcaacgcgggagaagaccttgccggggtggctggcgaggaacgtcaaaagctcatactcgcgctgtgtgaggtcgatgggcacgccgtttttgcgcacctggaagctgtcggtgttgatggtgatgccgccgccggcgctcatggcgttgtcctccgccgcgggagcggagagcatcgttgtgcggcggatgttcgctttgacgcgcgcgagcagctcgcgcatggaaaagggcttggtgatgtagtcgtccgcgccgatctcaaggcccaagatcttgtcctcctcctcttcgcgcgcggtcaggatgatgacgggcacgttgtcgccctcggcgcgcagcgcgcggcagacgtcaaagcccatcattttgggcatcatcacgtcgagaagaatgaggtcgggctttttctcgcgcgccatggcaaggcccgcctcaccgtcgtaggcctcgagcgtgttatagcccgtacgctggaggttgaagcggatgatatcgacgatgtttttctcatcctcgacaatgaggacggtcttcttctgttccatcagttttctttctcctgtctctctttttgcgctgtgcgcagggcgtggaccttgaggataccgcagacggtcttcgcatcttcgatctcgccgcgcatcacgcgtgcgagcatgtcggaaaacggcgtgcggtaaagctctaaaaactcgtcctcgtcaggattttgctcaccgaaggtcagaccctcggcaagataaaggtgcagcacctcgctgtagcagccgggggagacgaggagcttgccgagattcgtcatgcgcttcggcgttgcacccgtttcctccttcagctcacgcagcgcggcctcatcggggtcctcgccacgctccagtttccctgcgggaatttcctcaagcacacgggagaagacgtagcggtactgcttcacggtgagcacattgtcgttttcgtcaagagcgacgatggcgacaccgccgggatgctcggcgacttcgcgtacgctcgttctgccgtttggcaggagcacgtcgtcgcggtagatatgcagaatttttccctcgtagatcgtctcgcgggaaagctggcgttcggtcagatccatgataaaactgcctcctgagtgcggcggatcgccgccaaagcatgggatagatactaaaattatagcacggcggcgggcggaattctactataaattaaagtggatgggcagaatagagcggaatgcggcgttttttcgaattgttacgtttttgtgacagcccttgtgctgggcgaaaaagtatgctacactatcatggaagcgcaaaggaggcgatgtgccgtggcggagaaaaaggggataaaaatcgcggcgcagaaccgcaaggcgttccacgactattttgtcgaagaccgctacgaggcgggcatcgagctcaagggcacggaggtcaagtccatccgcgccggcacgcttaacctgaaagacagctatgtcatcgtcaaaaacggcgaggcgaacgtgctgtcgatgcacatttcgccctacgacaagggcaatatcttcaaccatgaccccgaccggcccaaaaagctccttctgcacaagcgcgagataggcaagctctattcgctcatcaagcaggacggctacgcgctgatcccgctgagcgtttacttcaaggacgcgcgcgtgaaggtcgaagtcggtgtgtgcaagggtaagaaaaactacgacaagcgcgaggacgccgccaagcgtgacgccaagcgcgagatcgaccgcgcgatgaaagcgcggagataaggagagaaattatggcaaatccgatcgtgaccatcgaaatggaaagcggcgcggtgatgagcggcgaactctatccagagatcgcgcccaacaccgtcaacaacttcatcgcgctggcaaactccggtttttacgacggcgtggtgttccaccgcgtcatccccggctttatgatccagggcggcgacccggacggcaacggcacaggcggccccggctacgagatcaagggtgaattttccgccaacggcttcaagaacgatcttaagcacacgctgggcgttctctcgatggcgcgcacgatgatccccgacagcgcgggcagccagtttttcatcatggtggccgacgcgccgcaccttgacggtcagtatgcggcgtttggtaagattaccgagaatgcgcaggccgctgtggacatctcccgagtgaaccgcaacatgtacaacgacatgccgaaaaagccacaggtcatcaagaccatccgcgtggatacgcagggcgttgactatcccgagccggagaagatgtaatttcatttccttttgctttcgcatacctgacgggtttcccgtattcgcggcgtacttgtcgtgcgccgctcacacgggggcgtaccggtttcgacgggggtgtggaggcaggataagcgggcagaggcgcctggcctctataaaacgggtaacttataaattaaagaacaacaacgaagttgctctcgctgcctaagtaggcggccgtctgaaccggagaggccacgggccggggaaggcgtcgtaaacgtggcgtccgtgaggcgggaaagagttgacctgcccacgcattatgactctaccaaagcgtaaggtccgtcaggtgtccttgcgcggagggaatgtttaaatcctgactgcgcccggagaaagtcctgttaaagtgctttcggacgcgggttcgactcccgccgcctccaccataagtctcgccgtgattttagtcaaattgcggcgggctttttgcgttgacacattgatgtttgaattggacagggaagtgtattgtatgaaaaaagttctatcggtatcaataaagacgatcatcttttttgtgggttgggccatatgcgtatcggttatcccgataccggataccgcaagtgcggtaatctggagattttgggcagaactgatcccgcttttgtccgttattgcgatcacacttattttctggctggcagatcagaaaaagatacgattacatctgaccgggaagcctgtttataacatcatattgggcggcgtaacagggacgatttggctgggggcatctgtggggatattatctatcctcggagttgtacagatagagggcaaaaatcaaatcgctatgctgtggttgtggctgcttgcggcttttctcaataccgttatgcaggaaatgctggttcgcagctatttataccagatgataaaaagtaacggtagcatcgccgccgcgattatcgtatctacgggcttatttacatttgcgcacggcggcgcgtttgaggcaggaatccttcctgtgctcaatgtcatcacaatgagcctttttatgacggcggttttggaatacacgggttccttgatcgcgccgatcgtgatccattttttgtggaacggtgtgggcgcgatcattctgggaggagtctctctggcggaagattatcctcacttgtttgatatgacgattcacggcaatccgattctgtccggcggcagctgtaaaatcgaaggtagcatcattgtgctttttatgaatctggcgttcttgattgggtttgtagccgcaaaaaagagaaaggatcggaatagatagtatccgatttgctgtaatgaactgttccttactttgacgatgagatgggggaataacaacgtcccgctttgcaatgtccgctacaacatcatctatgaaaggatcccgaaagttcaactttcgggatcctttttgtcagctgctgagttcgcggatctcgtcctgaatgagccgacccgccgcggcggcgagctggtcgatgcggcgaatgcgcgcaaggtcgcggccatagatggcgttcgcggcgggaacgctcgcgttttcacccatgaagacggcggcgacgcggatgccctgcgcgcgtagggcgcgcacctcctccgccgtgtcatcgacgccgatctgcccgtcgtagtcgcggctgagcgggactttgccgctcggcaggattttgtggctgtcgtcgggtgaggcgtcggtcagcaggatgagcagatgcttttccgcgggtgcggacttgatgagctcgcccgcgccgcgcagcgcgagcccatcgcggttccagcccgcggcgaagtaattgaaaacgtttcgttcgccgtttttgtcgccaaaatccttcaaaatgcgcagcaccgtgtagccgcgcaggctgcaaaagctcgtcacgcacacggggatgccgcaggaggcgaggcttttggctaagatatatccctgaatggcgatggcctcctgacagtgcaggcgcgaggccgaggcgtcgagcatcagatcgacggcaaagccgggacggctctcctcgtcgctgcgcaaaaatacgcggtcgtcgtgcagcaccggttcgcgccagaccttggtcccgtccagccagccctgacgggcggggatgcgctcgggctgctggtggacgagcaggcagtttcgaatttgctcgctcaggcgcgcgagcgcgctctggtgcagatcgaggtcgcgcgcaaaggcggcgcggttcagcctggcctgatcctcagcctgctcgtaaaggcgctgcgtgtccgcgctgatgagctggtccgacgcgctcgcgccctttgtgaaccacaggtggcagcccaggtggttgccggtgcagagctgctgctcgatgcgcgcgagcttgtcgggggaatagatgctgcggccgaagcagcgctcgatgtagccgcggtcctccgtttcgtgctcattggagcgcagacgcgagcgcagcgcgttcgagaccttgaccatgccgttttccccgggcatggcggaacggccgatggtcagatcgtccgtgcggacgatctcggtcggcaggagctttgtgagaagcggcgcccacttgtcgtcaaagtgcagctggaacccgccttttttatgcaccgtgccatcgaattgcaggtacttttcaaatgccgtgcgcacggcgatctcaagctcggcggcgttcatcgtgccggggcaggcgagcgcttgcgcgagccctttttcccacggggcgagaatgggcggcttttgcccgaggatcctcttccagcgatcggactgcacggcgtagacaagttggtttttctccatccactcctgccgcgagagctggtattccgacgcgaaaaactcctccgcgtgcttgcggcggagatcggcgagcacagggcgctcgggcagttccttttcatacgccgcgttctcgagcgccagccagcacagctcgtcgaaaacgttctgccgcgcgtcgcccgcccagtaggcaaagagacgctttggcatcttgtcgccgaaccacttgtgcacaaggccgatgacgcagttcatgtaaaagtccggctcaccgtttgatttgagcgctaagaactgcggctcgaactgatagtccccgctcgccgtccagacgaggttgatggcgcggcgctgctgggcggaatagcttgacgtttccatgtcagtcggtgaacagacggctgcggtcaagctttgcggggatgcgcgcggcgatgacgtcgcggatcaggctctgctcataggagtcaaacgccttgttcgtgatgcccatgtcaagcgcgcggctcgcgcccacgccgcggcggatcagacgcagcgcgtcgagaagaccgcgcaggtcgagcgccttttcggagatctccgcgttttcgcactttttctgcaggtcgaggaacagctgggcgaactgctccttatacttcttttcaagcgtcgggaactcatcgctaagcaaccgcacaagaccgtcctggtcgatggacggcatctggatgacgacaaagcgcgacgtgagcgcttcgttcagctcgcgtgtgccggcatagccgtagttcatcgtgccgatgaagcgcgcggcgggatcgacctccacgcgctcgtagccgggaacatcgatggcgcggcggaagtcgagcgtcgcgtgcagtacagcaagcgcctcattttttgccatgttgatctcgtcgagcacgccgaagccaccatgctttgcgcaaaggtacacggggccggggcggaagcggacctcgccgccctcgaacgtgtccatgccgatgaggctcgcggcgtccatgttcacgtggaacgacacgtcccatgcgggacgggcgaagacctgggcgaggttttccgccagtacgtttttgcccgtggccttgctgcccgcgagcagcaggttctccccgcacaaaatggcggcgaccgccgcctcccacacgtccttgccataataatgataccgcggctgcgggatgcggttttgcagctccggcggcgtcggatactgcgcgttaaattcacgaatgccatccaaaaggtcgggactcagcccctcctgtttcaaaaaatccaacaaatcgatcactctttcttgccatgtgcactgcacgttctttttttcggtcatcatcataacacggaaaagggagtttgcaagtggtttttgaaattttttgcaaaacctctacggggttgtgtccctgcgccgcgcaggggagcggttaagggggatattctctcacgtgagagaatatcccccttacacccccaagagaacgcaagggtctctgccccttgaccccgccattgcaagcgagcagctcgcagaggtgcgatgcttgccgattgcactgcccatagcgcggcgttgccgcgtttagagctgcaagacgacttgcctctgcttctactatccgctgccgctctgcctgtctcgtagtagtgcagactaatttccgtctaccggagcactcatcaatgcggcgagcgcagtaatgccgcattcggcaggcagtctgccgccgaggtagcgtcactcgcgcctcacgatagtaaggcgcggttgcaatcggtaacgactcgcagaagattcatggcgaagccatgtacactgcacccgattgcgcagcgtgtgcagttcttcaagatcgagactgccaatgtcgggggttgagggggactcccctcgcgttctcttgggggatctaaagggggccattctctcacgtgagagaatggccccctttgtccgcaccctgcgggtacgcagggaataggaaaacggcccttgcgccgcattgcaaaatgcgtattgacaaaatatgacgttatccatataatgtcataagttgaaaaaagggaggacgtctgctatgctgctgaaaaaacgcaacaaatgtcatttcgttttcctttttgtttttcatatttagaatatggaccatctgtcgattcctcgacaggtggtctttttttaggaggagagagcgatgatcgaaaattggaaggacgttcagatcgtgccggagttctgcgatcagggcgtggactgctaccgtttggagggagggcacttcctcaacgagtattacattgtctcggaggccgagacgcgaaagctgatgaaccatccggaggtggtgggctacgaggtgtacgcctcgctcgtgacggcgacctcgcagatgatgtactacctgaaggagaaaaagaagatcacgtcggcgaatatcctctcgatcctgcggggagccttgaactacccgctggaggagagctgctacaaagagcacatccgcgtccacgacatcagctttatgtcgagcgagcgcgtttttgaaaacggcgagatgacgggccttgagatcaaatactgcaagcttgccaccgtgccgaacagcacgctgctgatcggcgacatcatcgcctccggcgagacgcttgtgaactgcctgcgctatgtgatcgactattaccgcaagcagggggccaagctgcgcaacatcgtcctcttcacgatcggcggcacgcagggcgttgagatcctggaaaagctgacgcaggagatccgtgtgtactggccgggctttgagggatttgtcacggtgtattacgagggcattttcagctgctatgaagagggaaacaagggcgtttccggcatcaaccgcgcgctgatcgacttctactggaaaggcggcatcattgcccctgccttccgtcgcgcgacactctcgatgcagaatcccctttttgaaaagtgcacgatctacgacggcggtgcccgccgctacgagatccacgagcatattgaagaggtgctcgaattctggaacggcatcttagagcgcgccgacagcatcgacaagcaagcgctgctcgaggaaaagctcgggcatttgctgccgatctcctacgaggactggctgaaggactgtcactatgaaaaactggacaaaaagacgacgcgctggctctatcagcaggagcgcggctttgtggagggcctgcgcgatgtttcgctgaaggagatcgcgcgccagcggatcgacgagttcaccacgaccctgagaaagtatatcctttaaaaaatttatagatcagagaggacagaacgcatgaagaatgaaaagacggtagtggatattgactacgcagaggcgatcgtgccgaaaagcgcccgacgcggcatcgtgaccatgtttatgatcatgctgggcttcacctttttctccgcgagcatgtgggtgggccagcagttggcggacggcctggattttcagggcttcgtcgtgtcgatgatcgtcggcggcgtgatcctgagcctgtacacgggacttttgggctacgtgggcgcggagacgggcatgagcctcgaccttctggcccgcaaggcgtttggcgtcaagggttcgtatctgccctcggccatgatctcgttcacgcagatcggctggttcggcgtgggcatcgccatgtttgccatcccggtcgcgaatgagctgctgggcggcagcaagacggcggagtgggcgctggtgatcgttgccggtatctgcatgacggcctcggcctactttggcatcaagtcgctcacgatcgtcagctatatcgccgtcccgatggtggcggtgctgggtacggtcgcgatgatcctcgccgtcatgcgcggcgacggcacgatcgtcgatcagtttgccaagtccagcggcacgctgacggtgatcggcggcgcgggactggtcgttggctcgttcgtctccggcggcacggcgacgccgaacttctcccgctttgccaaaagcggcaaggtgggcgccatcacaacggtgatcgcgttcttcatcggcaactctctgatgttcttcttcggcggtgtctcgtcggtctatgtgggcggcaacgacatcttcgaggtgatgatcaaccttgggctgttctatctcgccatcctggtcctgggcctgaacatctggacgacgaacgacaacgcgctctattccgcgggcctcggccttgccaacatcttcggccagaaaaagaagcccatggtgcttgtctccggcatcatcggcacggtgctcgccgtctggctgtactggaacttctgcggctggctgaacatcctgaactgcacgctgccgccggtgggtatcattctggtgctgggctatttcctgaacaaggaaaagtatcaggacgtggaggtcagcgagaatgtcaactggttcgcagtgctcggcgtggtgctcggcgcggtggtagcgaatctggtgcattggggcatcgccttgatcaatggcatggtggtcgccgcggtgtgctacctgatcggccgcgcggtagagaagaagtaaaaaggtgtaacttccgccaagaaaattgcagaacaaaaacccatcagctcgtcgagctgatgggctttttcctttgcatgaagtgcagaagatcacttcgtgctcgccgcgtagagcatgatcgccgtcagcgcgatatagaccgcgcaggccgcggcgatcacggcgcagagtgcgatgcaggcgacgcgaagcgttctcttttgccggagctttcgcgccgagagcacgatgcacgcgatggacagaaaaaacagcagtatcgcgacccaaagctgcatgagacgctcctttcttcactccgccgcagggcggaagacgtcgatcatgtcggtgcaccacttgagctcacgggtgaagcggcggcgcagcgcgtcgggcggctccttgcccttgccgacatcgaaaaagccgcggccgctgtgtacggcgaggtacaatgccccatcagaatgcaggctgacggaaaaatcgccgaaggcgctgttggtgagcgcaagaatgcgctccatgcggcttggactcaaaaagcgcagcgcccagtcggcatcatcgcagctcaggttgaagtgcttgttgaaatcttcatagtccgtcttgatcgttttggcgcggaagagcttgtcgagcttaccgcgcggccagaacatgaggtttgcggggtacgttttgccgagctcacaggccatccactgaccattgtagaccacgcgctcggcggactccagcatgtcgttgttttcattgcggtattcgtccacatccgtcagcgtgacggtgcagagctcggacgtaaggccgcggtaggtgaagtcgatgcggccgctggcgctgtcgtagacgtatgacggcagcggaatgtttgaacccttgatatccacaaggttttgctttccgatgggctgcacgtcttcaaaattcgcgttcatgatctccggcacgagggactcaaagaccgcttttccggcggccttccggtgcttgttcagaacgccctgccccagcagcgcgacgacgatgccgatgaccgtcagcggcgtgaccgaggtgaaaataccgatcgccgtcgcggcgcagccaatcaccgtgaggagcttgccgcggccaccgccgcgcttgccgttttgcagctcgcgcgcgagctgttcgtctgtcattgtttgatttttttccatcgtatcatcctttctcagtcccgcgccgcaaaaagagcggtgtttttcagcagaagatccagcgtttcctccattgcgtgcagcgacgtgcaatagctgcggtgcagggcgtcaaggtcgcgcaggtctacattactggcaacggcggcaaagccatagtctgtttccaccgccagcgagagcacccggccttcccagcggaagcccaaaagctgtccttcgacgcgctgcctgaactcgttcatcagctccataaactgcggggcaagaagggagagggcatcctgctccggctctgctgtgacgcagaagcatcggtcaaacagcgcatcgcccgtcgctgcgccgcgcggactgtcctccgtccttgcgttgacgaggacgggggagggggcgggcgtctgcgtttcgcagcgcagcacgaggcctttgaataccatctcgtggcaggtctcatagccttcgtgaccgcaccctcgctcatacacatggtccagccgcacattggcggcggaaaaatgcacgccgcgataatcgccctcatggaaattctcaaccgtacattcctcccactgaccgtccagcaggtggaacgtccggagaaacggctcgtcaacgcacatttccggtgtgtgcatatccgggccgaaggccttttcccattccgcacggaaaaagtctccaaactgctcctgtatcagggcctggagcttcttttgcgcgctgccgcccaaaaagaccgcgcagcagacgccgcagaagaacagcacccccgtcaggatggccttgagcgcggtgtcctgcacggcaaagtacgagaccgtgccgctcaacgcgccaaaaaggcccaccaggatccagatgcgcgacattttctgatagtgcccgagctttttcgaaagctcggcgtcgctgagttttcctcttcccgtcatttcacatccgtcctttatcatggcgttttcaaatatcccagttgtccatccagttttcgccccagtcgtcagcgggatcatacggcgcttcggggatccagcccgcgggatagacgagaccgtcttcgtcgtggtaggcaaggccgtcgtcgccgatggtataatcgttgcccagaaggtaacggttcacaccgtcgtagtaccagatatagaaggtggagtattcgtcttcgtaaaactccgcgttttccatgtccgtgtaggtgtagaagtcggcgttgcggtagaagacaccgtcaaagtgctgatcgtccccgtagcggccaaagcgttcggcggagagggtgaagctattgccgtcgtcgctggggcagaggtaggcgcgcgttccgttgtcgtagaggtagaggcccatgccctcgccctcgtcgttcatcgtgccgctcatggaatagtccggtgagcaggcgatgtactgcatgagggacgagtcgatgacgatggtctcgcccagggcgttctgccacatgccgtcccagttgcttttatcccactcgacgatctccgcctcgtcgtcgcggaggaaggtgtggcggtggatggtgagcccgctgccctcgccgttctggttcggtagcagcacgccgtcgtcgcgcaggagaaaattgtagagaaagccgttgaaaaagatcatcggccggccgctcgcctcggacaattcaaattctccgcgcccgccgagaccccagccggtgcggtaggcatagaagccctcctcactgtcaaagtacagcctcgaggtgccgtcgatgctccacatcccgtcgagaaattccatgtccatgacggtctcatagccgctttgcggatcatcagagctgctgtcgccgcaggcggtcaggctcagcaggagcagcagcgcgagcatgagcggaagaagatacgttcggtgcgtcatgctgttcaccgcctttttagtagcaaatgctgaaaaacagcgtgttgtaggggtcgacaaggtcaatgtccatgatgctcgcctcgggcgcgatgctatcgagctgcatccgtctggcgcagtccttatagttgtcgagctgtggcatggcggcgaagaccagcccgtcgtaatcgtcgggcaggtagaccatgtagctcttggtcagcaccatcgcccaatcgctgacgttgtactgccagtcggtcgagtaggcgaattcaatgaggtattcgttgccgttataattgacggtatgaacatagtagttgtcgccgcgctggctgttgccgtaggcggtggcggcggtgaaccacatgccggtgtagtagtcgtagagctcgctgtcggtgttggtgatgtactgctcggtgaagtacgggatggagctctcgggaatgtagcaggtggcgtcgaactgaatctcgcggatgccgtcgtgcgactggtcgctgtgcttgatgacctcccagtagcagtcgtttctctcatagccgtcgccaaggccagagtagcaggcaacaccgttttccagaaaataagtgcccgtgttgaccgcagcgttgatctgtaagccgttgtcagagaaatagggcgtgtcggtcaggtcggtctgcacgccgttttcgtggaagtaggagtgatccggctcgaagacatagcgctcgtcggcatcccagaaccagaccatctgcgtcgtgctcatgtcggcgtgctggaacgtcacgacgacgtcgctctcgccatcgccggtgatgtcgtcgaacgaaatgtcaaagcccgtgccgtcgtcgttcgcgtcctcgaccgtcacggggaaggacacgctgtcgaagagctcctgctctggctcgtcgcggtagaaggccgcgctctcaggccccacggtgacgaggaccttgacgctgccctcgccctcgtgtgtgatggtgccctcggcggcgaccacgccgctcgtgcgccagtcgtcgcccgtgacgtcatcgctgctgtcgccgcaggcggtcaggctcaggcagagcagaaccgcaagcagcaccgcaaggaaatgatgggaagttttcatcttcttttctcccttcttcacgtttcaaaacggcttactcaagacgctcgtagtagtcgttctcgccgccccacatgatggaatcggtgtcaaaaagtgtgaattcataggtgacgtcctgatacgtcgtggaaacggcatagtacacgtcgtccacatcggtcggggccgagataaagccgccgtcgacctcggtcgtctccacgccgggcgcgcgctcgtagagaccccagagaccgccgctgctgtcgatgtagatgtagctgtcggcgtcgagatcaccgtccagataccagatgcccgcaaggtaagagagatcgaccgaactgtcgctgctgttgtagtcttcggcctgcgcgtcgaactcgtcgaggctcatttcataggtgaacgagccgagcgaatagatgttcacgctgctgccgtcgaaagagaactgataggcgacgccgtcgtgctcgttgtaggcgtagatgcagtcatagtccgcgtcgtactgcaaatagccgctggcggcgaggtcgtcgttgttgccgatgcgccagcgcgaaccgttggtgtcgatgatgagatagtcgaagtccgtgccgctgtcgggcagatagtaaccttcgaaagcgctgtaatcatagctgtcgtagctttccttgacaaagccgtcgatcgtcgacggcacagtggagtcgttgccgtagtccgcggagtcgccggagttgtcgctgccgcaggcggcgagggcgaggcaaaggatcagtgtcagagtgcaaagggcaaagtgtttacaagcgtttttcatgttgttctcctctcaattttcaaaaatcggcgcgctcagtgcgcccgttccgccatggacagaatttcgtcatggctcagctccacgttgtcgaagcggacaaagatgccgttcgtcatggcgctgttccacaccgcgggatcggcaagcgggcggaagcggagcttgtcgagatgcggcttcatatcgagcagcaggcggctgccggagatgaagtccacccggagaatgtagtccgggagcggtgtgacggctgagatgtattttcggtacaaaggcattcctcccctccggaaaataaaagatccaccgtacagccattgtacggtggatcggaaaaagttggtattaaccaaaggttagataatttcttgggaatatcaatgcaaaataggcgtgctgcgtccttgctgtgccttagctcttcggcgcggcgagctcggcgagccgcttgcgtttggtgcgcacgtcgcccgtgatgaggagcttggagtagatctggttgatgtactgcttcacgcttccctcggacaaaaagagctgctcggcgatctcgcggttgctcaggcgcttggcgacgagcgcggcgatggcgctttcgcgctcggtgaggcccacgagggcggcgggacgggagccttccgcacgcttttcgccgcagcggcgcacaaagtcctcgccaagcggtgtgaccgtccggataaacgcggcaaatttcgcacccgcgccgcgcgtgagcgccgtcttgagatagcggtaattttcgacaaacggcagatagagcgcgtccggctccgctgcggcgagggcagagatcaaaagttcgtctgccgtctcgcgcttgccgagcatttcgtaggccgcggcggtctgaaggcggatgtgcagcgcgacgagcgcatagtgcatcgcctcgcacataccgagcagcgcttcgctgtggccaatgaccttggcatattcgccttgggcgaggtagacctgattttcgataagctccatcatcggctttccgggcgcgaggaagtggatggaggcgagttgatgctcgcggaagaccgcgggaattttttcgggcagtcccagcagcgcatagtaataggcgcaggagctttgcagaatgttgagccatgcaacgttgtgctgctgcagcagcgcctcgcgccgctgctcaaaggactcgcgcggcgtgaaagaagtgcagagcgagagccgccaggcgagaaagtcgcagcacaaggccatgttttcctgcccgttgccgtcaatctgcgcataggcgcgctcgagcatgatctgcgcgtcggcaaagcaggcgcgcatgaagtcggcctccgcgcgcatgatggtctcagcgccctgcccgtggccgtttgtgatcttatagtagtgcggcatgcactcgtccatctcttggagctcgctttgcagctcaccaggcgcacggtagaacatcatcagcaccgacggcgagccgaacgtccagcccccgcttttctggatgctgatggcggggcgcgacatctgcgcgctcgcgctgcggtgcaggcggctcatcgcggagatgtcgttgtacatcaaaaagctcatgatgaggtcgcactcgccgagaaggtcgccgcgctcgctctccggccagtcggggtgttcggtgatcgcggcgagcagcagctccttgagctcgagcatctttgggatctgccgccaggtgaacatgctgcgcatcagaacgaggagcgaaagcgggtgctccttgagcgtttcgaccgggcagtgggcgatgaagtcgagcacctgctgcgcgccaagcgacgtgagcaggatgcccgcgtcgcgctggatgacgcgcagcgccgcgtcgtagtttttggcaagacagtagaatttgagcgcatgcagatattgcccatgcgttttgtaccactcgccatatctattatggtaaactgcctgccgccgcggctccatcgtgtggaacgtgcgctcggcgcagtccttcatcatgtggtggaagcggaacgttacgccgtccggcaggcgcttgacaaaggcgttctgctcggtcaacgtctgtaagatcgcagcggtgtttttgctgccggtgacggtttcggccatctcgacggtgaattcgtccgcaagacccatgacggccaaaaattcgcgccgctttgacggcagcgggtcgatcatcgcggcggagaacatcgcgtagatatccgagctgcggctcggcagctcgccgcgctcgtgcagcgtgcggagatttaagtaaatggccgagaaccacccctcgctcgaatagagcagcgattcgatctgcgcgtccgagagctccgtgccgcagcggtgggcgtagatcgagagctccgtgtggttgaggcgcagctgctcggtgcccacggtgtagagcctgccgccaaggcgcaggatctcctccgcgggcaggaagcggtcgcggcttgcgacgatcaggtgaacgttttcgggcaggcggttcgtcagcgtgcagagaaaggcgggcacgcggttgtcggtcaagaggtgaaagtcgtcgatgaaaatatagcagggccgcttgcctgcgagcgcgtggcagagatcgtccgtcaggaggcttccgcccgcggcgtcgtcggggcaggggtaggcgcgcagaaagtcgaaccccgcgtgggaaaaggcctcctgcacgctcttccagaagatggccagattgtccgaatacacgctgatacgcacaacggcggcttcgtcgagcttggcgcgctctaaaagataccagttcaccgccgtcgtcttgccgtagcccatcggcgcgaccacggtggtgagcgcgcagcgcgagatcgggcgcaggcactcctgcaggcgctcggatatgtagacggtgttcaaattccagcttcgcttcggcatggcgtacctccaagacagttttgaccgggggcttttctttcaagatatcatacgccgcgttttttggcaactatgagaaaaaagcggctgaatgaatgcggcatctgataaaaaagtgccctgaacggttcgttcagggcacttttattgaaataagctcttattttccgacgcagaagcgctcgaagatgcgcgcgaccatgtcctcacgcgcggtgtggcccgtgagctcgccgagggcgttttccgcctgctctacttccgtgagtacaacgtcgggcgtcatgccgctttggagcgcgtcctttgccgcacggacgctatcaagcgcgcggcggatggcgtcggcctgacgggcgtttgtcacgagggacgtatcgcctttcggcgcggggtaaagcgtgcggatcgccgcttccagcgcttcgaacccctcacgcgtcacgcttgagagcgaaataatcgcctccggcgcgcgccagtcctcatcggggacaatgcctgccccgccgccgaggtcggattttgtcagcagcagcagccacggcttgccgcttttcgcggcaagttccagcggagcaagcatttctgctgcccgcgcctcggatgccggcagtcccgtgctgccatccaacagcgcgaggatcagatcagcgtcctcgaccgcttttttcgaccgctcgacgccgagctgttcgacgagatcgtccgtctcgtgtaggcccgccgtgtcgatgaggcgcagcagcacgccgccgaccgtcgccttttcctccaccgtgtcgcgcgtcgtgcccgcgatgtctgtgacgatggcacggtcaaagccgacgagcgcgttcaaaagtgagctcttgcctgcattcggcgcgccgatgatggcggtcgcgacgccgtttttgagcactttcccgcgtgcgaacgtgccgagaagatcagaaagcgtctcttcacagcataaaagcgtgcgctcggtctcctcgcgcgagaggtcttcaatgtcctcgtctgggtagtcgacgacggcgtagaaacggctcgaaacgtcgagcagcttgtcataaacactttcgatcgggcggcgcagcgcgccggagagctgggccgcggcattgcgcgcgctctccgccgtctcggcgtcgatgaggtcgatgactgcctcagcctcggtgaggtcgagctttccgttcaggaacgcccgctgcgtgaattcaccgggccgcgcctgccgtgcgcccgcggcaaatgccgcttgcagcacctcgctcagtacgaccggcgagccatggcagtggagctcggcgctctcctcgcccgtgtagctgtgggcggcggaaaaacagaccgccatgccgcggtcgagcagcgtgccgtccgccgagcggatgtcgccataggtcatgcggcggtacggaagcgcttcgaccgccatgccgcttgcgggcgtgaacagcgcggcgagcacgcgccgcgtctcctctccgctcaggcgcacgatgccgatggccgacgggctttgcgccgtggcgatggctgcaatggtttccatgaccgattcctcgctttttccttgattttgcccaaagtataccacaaagacgaaaaaatgaaaaggggcgcggctgcgccccctcactgatttgaaattacatcaagtcaaaagaaaataaagctggctgagcagcacgacacgctcgcatacgcagatgatcttaaaattgcgcgtgctcatgctgccctttttatactcatcaaggctgaaatatatcgtaagtgcggccgctatcatcgttatgacataaatgtacgtcgtttgtccctcctcaaaatcaagatctgatttcctcaaagccgagcttcgccaaaaccttggcgaccctgcgcgcaaaatcctgattggcgcccagactgatgttcataaggccctcgccgcctccggtgccgatgatcgtcgcctgctggacttctccagagtcgatgatctgcactgtgctgacggccatgctgccatttctcatatagtaccgctccagaatgagcagcagcactttgacgccgttcacctccgacatctgctccatagacagctcggcaacatcgcccttgaaatcatcgagaatgcttttggatacctccgccaagtcggtctccgacccgcgcttcattttgatgatcgcagaactcatgctgtttcctcgctttctcattttatctctcgtttggttttcgccgcccgcgtccgcgatgcgctcaacagcgccgcagcctgccggcgcaaaaaagagaccatcacaaacagaacgacagatcttttcactgcttggcgttcgtttcctccaccgtccacggcaggaagatcggctcaatctcgatcacaaagtgcggctcctgaatatcgtcgcccgggtgggactgcgcgaggcggatctcgacgtcgttgacgtctctcaccgtcgcggcggcaaagcccgcttctgcgccgaagacgaggtactgcggcccgatgtacggcatccggccatcttcatccagttcgagcggcatcgtttcaaacggcttcgcgatgtcgacgccgagcgtttgaagatacgccgtcacagcgggataggccttcgcggcctcgtttacataattgcggcaataggcacaatcgcacagattagatcgtttaagatcgcgataaaaccgctttgtccgctcaatatccatcggcgttccacccctttcaccggtttgctttcgtattataccatacggagattttgaaccgcaagcgcaaaaaagcagcgccgaaaggcgctgcttttttgatgcgggggggtggacttacagtgggagggattcagttgaccgtcagcaatttgtgccggtccagcaggcggttcccatagcggaagaccagctcgccgatgacgacgccgagcaccgccgcggcggggacatcgctcgggaagtggacgtacatggtctcacctcgcttacgtccaccagccgatgttggcggcaattagaacggcattgaagaagtcaatgaacatgccgccgaccatcgggatggcaaagtacgccaccggcgcaggaccgtatttcttcgtcacgacctgcatgttggccatggcgttcgaggttgcgcccatggcgaagccgatgaagcccgcggtcatgaccgccgcgtcgtaattgcggcccatgacgttgaagaccacgaagtaggagaagaggaacatcacaacacactggagcacaaggcagatgaccatcggcattgcaaggtcgatgagctcccagagcttgaggcccgcgagcgccatagcgaggaagatcgagaggaacatattgcccatggtgtcgatctcttcggcagggtaggagacatgtacgccgtccatcacgttgcggacgaccacggcgacgagcatcgcgccgatgtaagcggggaaggtgaggccggtgagcgccgtgagccatacgctgacctgattgccgatgccgacggcgagaagcagcagcatgaagcctttgacaaagcgcgggctgtcggagatgaagcgctcgtcctcgctggcaacgtcggtcgcaagggcagcagacggggtggtgccgccggcggtcaccggagcgggacgcagatcgtgcttttcgatgagacgcttggccgtcgggccgcccatcagcgaaccggccacgagaccgaacgttgccgccgcgatggaaacgacgctgccgccgaccacgcccgcggcttcaaggtcggggccgaacgccgccgccgtgccagggccgccgaccagagcgatggagccgcagccgataccgagcagcggatcgcgcccgaagagcgccatcacgccgccgccaaggaagttttgcagcgggatcatcacaatggagatggcaaggcacaggatgacagctttgccgcccttgagcagcgcggggatactgaccgtgaagccgacggtggtgaagaacatgatcataaaaacggtttgcagcgtcgcgtcgaagttgatggacgcgatgcccatggaatagagaatgcagttgaggatggaaaagcacagtccgccgaccagcggggcggggatgcagtagcggctcagcagcgagaccttgtcggtgatgacgccgcccagccagaacaggaaagcgcccagagcaacagcgtggtacatgttgagttcgatcgtcagcataatgattcctccttttatgtgtccggttcggcgcgcggcagccacataccactctgccgagtaccctttcaatcagcagtctaatccggaatcgcgaaaaggagttgttaaattcagtcaaatgagataatttccacatttcaaccgataaaaatgttatgaaaatggatgatttgaccgtgtaaaatacataaatatcaataaaaagtttagaaaacgctcaaaatgcgtgaaagaggaaaataaaaccaaacgggaaattgatgcaatgtaccggcatgaaacgcatctgcgtttatacgaatgaggttcacggcaacaaaaaggaaataaggagcacggctgcacagccgttggaagcggctcgggcggaattgaccgccgtttttgagattcgatagaatttgcacgtgccgttttcgaatctttatacagtccgccatgaaatcgcgcttgcagaaccgcggggaacgctgtagaataatagacaatatcggtcaattatcgacaaggagtattcattatgcagcaaaatgcaaaattcatccgtaaactccccatcccgatggacattaaaaaagagttccctgtcacggaagaggttgccaaggtgcgtgaggcgcgcgtggaagagatgcgcgcgatcctcgacgggcgtgacagccgcctgatgctcatcatcggcccctgctctgccgaccgcgaggacagcgtgatggactatgtctgccgcctcgtccccctgcaggaaaaggtcaaggataagatcctgatcgtcccgcgcatctacacgaacaagccgcgcaccaacggctcgggctacaagggcatgctccaccagcccgacccgagcaaaaagcccgacatgctcgagggcatcatcgccatccgccgcctccacacccgcgcggtgcaggagaccggctttgcctgcgccgacgagatgctctatcccgaaaactaccgctatctctccgacattctgggctatgtcgctgtcggcgcgcgctcggtcgagaatcagcagcaccgcctcgtcgcgagcggtattgatgtgcccgtcggcatgaagaaccccacgggcggcgacttgagcgtgatgatgaactccatctatgcggcgatgggcgaccacacgttcctctaccgcggctgggaggtcgagaccgcgggcaacccctatgcccacgccatcatgcgcggctatgtgaacgaaaagggcgacagccgccccaactaccactatgaagacctggtgcagctgcacgagctgtacgcggaaaagggcatcaagaaccccgcctgcatcgtcgactgcaaccacgccaactccggcaagcagtatttggagcagatccgcatcgcgaaggaggtcctgcactccaagcgccactcgaatgacatcaacgcgctcgtcaagggcatgatgatcgagagctacatcgaggacggcaaccagaagatcagcgagggcacctacggcaagagcatcaccgacgcctgcctcggctgggaaaagagcgaaaagctcgtgctggagctggctgatttgctgtaaatcagtatacgataaaatgaaaaactcccacggttccggaaccgtgggagtttttatgtcaactgcaggacgaaacttatttcgcctgcttcatggagaggctgatgcgctttttcttctcgtcgacttccagcacgacgaccttgacaacgtcgccgacggacacgacctcggacgggtgcttgatgaacttgttcgacacctgcgagatgtggacaagtccatcctgatgcacgccgatgtccacgaacacgccgaagtcgatgacattgcgcaccgtgccggtcagcaccatgccgggctttaggtctttcatttcaagaacgtccgtgcgcaaaatgggctttggcagctcgtcgcgcacgtcgcggccgggctttaagagctccgagacgatatcgcgcagcgtgggaacgccgacgccgatctcacccgcggccttgtcctcgccgtaggccttgacgcgatcgggcagatcggcgagcctgccgcccttcacgtcggcgagcgtgtggccggtcaggtcgagcagcgccttcgcggcgtcatagctctcggggtggacggcggtgttgtcgagaacgctcctgctctccggcacgcgcaggaagcctgcgcactgctggaaggccttggggccgagctttggcactttcttgatctgcgcgcgtgaggtgaacgcgccgttctcctcgcggtacgagacgacatttttcgccgttgtgccgttcaggcccgcgacgcgctgcaaaagtgacggcgacgccgtgttgatatccacgccgacggcgttgacgcagtcctcgaccacgccgctgagcgcctcgtcgagctgcttttgcggcatgtcgtgctgatactgccccacgccgatggccttggggtcgatcttcacgagctcggcaagcgggtcctgtaatctccgcgcgatggatacggcggagcggaggttcacgtcgtactgcgggaattcctcggcggcgagcttgctcgccgagtacacggacgcgcccgcctcagagacgatcatgtagctcacgtgcgcactgccctcgttcacctgacggatgagctcgacggccatctgttcggtctcgcggctggccgtgccgttgccgatggcgatgtgctccacaccgtgctttttgatgagcgttgccagcgcggcgatggcttcatttttctgccgctcgccgtaggtcgggtagaccacggcggtatcgagcaccttacctgtgccgtccacgacggcgaccttgcagcccatgcggtaaccgggatcaaggcccatcgtgaccttgcccttgaccggcggctgcatcaaaagcggctttaagttgagcgcaaactggccgatggccccctcgtctgcctgctcagtgagctgatttcgcacctcgcgctcgagcgaggggaagatgagacggtcgtaggcgtcctcggcggcggacttgacgaattccatggcggcggagccgggcttcacgactgtacggcgcagcagcggcagtgcctgctcgcggtcgagcgtgatggagaccttcaaaatgccttctttttcaccgcggttgatggcgagcacctgatgcccctgcaagcgggcgacagactgcgtaaaatcgtagtataggcgatagacgctgtcgtcctcggtcgcggccctgctcacaagctggccctgacgggaaatgagcgcgcgaaggctcttgcggatggcggcgtcgtcagagatctgctcagcgatgatgtcgctcgcgccctgcagggcgtcctcgaccgtctcgacgcccttttcggggtcgacaaagtcgcgcgcggcctcctcgggccgcgggcagtctcgctcctgcgcgaagagcagcgcggcgagtggttcaaggcccttttccttcgccatcgtggcgcgggtgcggcgcttttgcttgtaggggcggtagaggtcttcgacctcggcgagcgttttggcgctgtcgatggcggcagcgagctcatcggtcagcttgccctgctcgtcgatggactttttcaccgcttcgcggcgctcttcaagaccgcggaggtattggagccgctcttcgagcgtgcgcagagaggtgtcgtccattgcaccgtggagctccttgcggtagcgggcgataaaggggatggtgttgccctcgtcgagcagatgcacgacgttttcaacgtgccgggggtctttgccgagctcggcagcaagggcctgaatgagattcataaaatgttcctttcgtatatcgggcgccgaagcggcgcggtcaagtgaatcagcaatgtccgcccgaaagcgggcggaacgcaaaatttattataccgcatcgcgcggcgatgcgcaaagccttttgcgcagaaaaaaggcggaggatcggcgcgacggctgggactttacattttgccgctttggcggtaaaatacgacgcagcgttcaaaggcatcgaatgcttcgctttgccgctcaaaggcggcatttttcagcaagagaaggagaaagcaaaatgcagaagaaaaacaacaaaggcgtcatcgccctcatcatcgtgcttgtgctggcggctgccgcgctcgtcatttggcagacaaacaagccggagacgcagcagggcggtaaggagatcaccatcaacgtcgaccacctgaacggcgatgacacgaccttcaccatccacaccgacgaagagtacctgcgcggcgcgctcgagcaggaagacctcatcgagggcacagagagcgagtacggcctctatgtgctgactgtggacggcgagaccgccgacgagagtgagcagcagtggtggggctacagcgtgaacggcacgtttgccgagctcggcgtggacagccagcccgtcgcggacggcgatgtgtacgactttgtgctgaatgtcggctggtaagtccgcaagactcagcatccgcgagatcgcggagctgtcgcttttctgcgcgctgatggtcgcgggcaaggagagcctgcgccttatcccgaacgtgcatcccgtcacgctgctgctgcttttggccacggcggtgtacggggcgaaggcgctctatccggcgttcggctttgccctgctcgagatcgcgctctacggcgcggggctttggaacctgatgtatctttacgtctggccgatcgtcgtgctcgctgcgctgccgtttcgcagaagcgagagccgcgcattctgggcggccatcgcggggctgcacgggctgtgcttcggcgcgctgtgcgccatttcgtatttttttatcggcggatggcagatggcgttttcgtggtgggtctcgggcatcccgtatgacgtcatccactgcgtgtcaaatacggtcctcgtcttcgtgctcttcccgccgctgcggcgcgcactggagcgcgcgaagaaaacgtcgggcggaagagaatagggaaaagcacctgccttcggctgtgtgctcgtaagacagtaattctaaaaaattgctattttacggcatctgtcgaacaggattgggaaacaaacgaacatacggcattcagcttcggctgagtgccgttgtttgtttttggggcgaaatactctatttttgcgctctgtatggcagggatagtgaaacggtgaaatagttgacattttcgtagtaaaacccttatgaaacagcgaatcacgccataatgaaccctgtttaccgctgagtacggttatttgcgattatgtggaaaacccacaaaacagaagagtcaatagtggtgtattttgatgcaaagtacgttgaaccccgaaaaatcgcccaatcgactttggctcatagaagagttacactttaatgcgataaatttttgaaaaatgacacatcttcgtgttataatgcgtgtacacaataagcgtgaatggaggtaaggcagatgaaaaagttattgtcttgtgcgttcaatatggatagcggttgcgtggagctgaagtttaacgatggcagtatgattgctattaactgcaccgccgtcgaaaacgaagttgccgacaatatgtatcagcggtcagagcttgactatcttatctacaatgacccgttggcgtatgccaacctcgttttgaatggtaacacagaggcgtatctcaaatctgttactgagtacaagcctttggactaaagctcggtataccaaacaccggattaagaatggactttgagagaaagtgaggtataacaatataaaacagattattactattcagcacacgcaatcaattcaccacacaaatggtatggtgggttcttggacagattgggatctttctgaattaggcattgaacaggctgaaagaatagggcagaaattagcgaagcagttatccggtcacaaaattgttatgtatgcttccgatcttctgcgagcaaagcacaccgctgaaattgtcgcaaagcatatgggaatcacacctaatattagaacggaacttcgagagcgcaatttaggtaaatgcgttggcaaatctgttcagtggcttcgtgagaacattgaggttcaagagaaaaccatcgatgacaggatgttttctgatgctgagagtagacgagacgaatggaatcgcttaaaacctctttttgacgagataatggcaagtaatgatgagtgtatcattgtagtatcacatggcgatttgctgagcgtttggaatacgatgttcctcggaatggatgtggaaacgctgaatcagtttgaactttttggtatggcaggcggcgtttctttcatgcttcaaaacgatgagggtaagcgatttatcaagaaaatgagcgatttgtcttatatggcaaatcaattcatatgagaaaagcgtgaggtataaataaaatggactttgaacaacttgcaaaaatagaaaatgagagtgaacgtgtaaacagaacctacgatatattcaacgaggatgcaaggctcaatcattccaaagccgcacgagttgaatttttgactaccgttcactacatagaaaaatatttgaaagatggcgacaagatactcgacattggcgcaggtgcaggtgaatacagcctctactttgctcgtaagggttatgaagtctcggctcttgaacttgccgatgccaatattgccgcattcaaaaagaaactgacacccgaagataaaatcgatcttgttcaaggcaatgcccttgacctctctcgatatgcagataagtcgtttgatattgtccttctgttcggcccgctttatcatttgaaaaatgatgcggacaaacagaaatgtatcagcgaagcaaagcgtgtctgcaaggacggcggcaagatcttcttcgcttttatttccaacgattttgttttccttaccgagttcggatacgatgtgaattatttcagcaacggtgattacgataaggaaacattcaagctcaacgactttccgtttgtgttccatacggttggtgctgcgagaaaacttcttgcagatggcggtataaatatcttacacgaggttgcatccgacggagcaagcgagcttttggcggcaaggatcaacgaaatgagcgacgaggactatacgcagtatcttcgctatcacttctacatctgcgaaaagccggaactgcttggtatgaccaatcacttgctgttcatgggagaaaagaaatgaccaaaatccaatatgaaaacttaaccatccgtcaagccgaggttgcggatgcaaagcagcttgccgcttggtggaatgatggtgctgtgatggcacacgcaggctttcctaacggcttgggaacaaccgagggagcgttcctgcaccgctgcacgtttgaaaactgggagatcggcgcttacggcggcctcggcagctgggtcaacgccacgggctgcacatttcgcggcaacgacgtggggctgtggctcgataaccgcggcggcgcaacgtgctcgggcagctactatggcgacagcgtgtacgaagacaacggcaccgccgtgcgcatcgccgcaatgccgggcacggagacgctggatttcaataactgcgtgttccgaggcaacggggtaaatgtcgaaaacgcggcaggatacgccgtcgatctctcgcagatcgtaacggcggacaattaaagagaaaaaggaggaaacgcggcgtttcctcctttcttgtgttcattcagatgttcagcacaaagtgctctttatgatagtccagcaggccttcctttttcatttttccgagctcgagcgacaatccgctgcgctcaacggcgagaaagtccgcgagctgctggcgggagaacgggatgtcaaacccgaccgcgccgcgccgctgcgcctcggcggagagataggacatgagcttggcgcgcgtcgtgcgctgggcgatgtgcgtgagcttttcattgagcagcaggtttttgcctgcaaggtcgctcaaaaggtttcggatgatgcggctatggtgcgcacaggcggagggacagaccgtcaaaaggcgcttgacgtttaaaaacagcaccgttgtcggcgtttcggtcacgacgctcacattggagacactgctcggcgcgcaggcgaaggccgcggcgtaggtctgccccggtgcggtgcgggagagaatgttgcggttgccccagatatcctcctgcacgacgagcgcgcagccggagagcaccatgccgatctcctcgaccgtgtcgccgggatgaaggagaaacacgtccttggggaattgctcggtcttcgccgcaaggcaggtgagcatcgcgacaagttcgtcctccgtgacgccggaaaagagcggcgaggcggcgagaatgggaaaaaattctttcatgaaaaatcgcctttcgttgaaaattcaaccgacttgctggccgcattctactataatacgcttgaaaacgcaaggaggtattgcaatgaaacggagaatcattgagatcgatcaaaataaatgcaacggctgcggcgcctgcgccgcggcgtgccacgagggcgctatcgccatggtaaacggcaaggcgcagctgatgcgcgacgactactgcgacggcctgggcgactgtctgccgacctgcccgaccggcgcgatttcctttgtcgagcgcgaggccgcggcctacgacgagcaggcggtgcttgaaaacaagcagaagagaatgcagaaggaggggatgacactgcaccacagctgtcccggcatgcagctcaagacctttgcgcacaaggcggcatctgaaacggcggctcctgctgcgcaggagagccagctctcccagtggccggtgcagatcaagctcgtgcccgtgaacgcgccgtatttctccggcgcaaagctgctcatcgcggcggactgcacggcgtacgcctacgcggccttccacgagaaattcatcaagggccacattacgctcgtcggctgcccgaaactcgacagcgtggattacagcgaaaagctgaccgagatcatcgcaaaaaatgacatcaagagcgtgacggtcgtgcgaatggaggtcccgtgctgcggcgggctcgagcacgcggcaaagaccgcgctgcaaaatagcggtaaattcatcccctggcaggtcgtgacgatctcgacggacgggagaatactggatacgatttgagtcatcctatgatcgataagaccacagaatgaggaggattttttcggtggacaacaagatgttttgttttcagtgcgagcaggcggcgcactgcacgggctgcaccggcagcgcgggtgtgtgcggaaagagcgccgagacggcaaatttgcaggacgaactgaccggcgcgctcatcggccttgcccgcgctgcggacggcagccccggcgtgaacgagggcacatggagcctcatcatcgaggcacttttcactacgctcacgaatgtgaactttgacgcggcggccatccgcgatgtgactgcacgcgtgaaggcggagaagagccgtcttgtgccggactgtgcgtcctgcatgtcgccctgcgggcacaacaatgactacgatgtctcgcggctctggacggcggacgaggacatccgcagtctcaagtcgctcatcctgttcggtatccgcggcatggcggcgtacgcctaccacgcgatggtgctgggctatacggacggcgaggtcaaccgcttttttgccaaggcattgtttgccatcggcgaggactggggcatggatgacctgctcccccttgtgctggaggtcggcgagaaaaactaccgctgcatggcgctgctcgacaaggccaacacggagacctacggcacgccagagccgaccaccgtgccgctgacggtggaaaagggaccgttcatcgtggtttccggccacgacctgcacgacttgaagcgcctgctcgagcagacggagggcaagggcatcaacatctatacgcacagcgagatgctgcccgcgcacggctacccgggccttaaaaagtatgcccatctcaagggcaatttcggcacggcgtggcagaaccagcaaaaggaatttgccgacatccctgcgcccgtactattcaccacgaattgtctgatgccgccgaaagcgagctatgccgaccgcgtgttcactacggcggcggtctcatatccggaacttaagcatatcggcgcggacaaggacttcacgccggtcatcgagaaagcgctggcgctgggcggctatgccgaggacaaggcgttcaccggcatcaacggtggcagcacggtcacgacgggctttgcccgcggcgcggtgctgggtgtggccgacaaggtggtcgaggccgtcaactccggccggatccgtcactttttcttagttggcggctgcgacggcgcgcgccccggcagaaactactacacggaattcgtcaagcagacgccgcccgacaccatggtgctgacgctggcctgcggcaagttccgcttcaatgacttagatcttggcacggtggcggggctgccgcgcatcctggacatcggccagtgcaacgacgcttacagcgccatccagatcgcgctggcgctcgccgacgcctttggctgcggtgtgaacgagctgccgctttcgatggtgctctcgtggtacgagcagaaggcggtgtgcatcctgctgacgctgctgtatctcgg

SEQ ID NO: 10120 - DNA, 37129 bp, Unknown
  gut microbiota DNA sequence
tccgtcacgagcgcgccggaaagcagcgcgccgaagagtcgaaagctcatcgagatcggcagcgagaaatccttgagcgcgtgcagaaatccgcccacgcccgcggcgatcagtccgccgaagaggatcacgccgtagctcatcacgcccagcgcgatcgccccgttgatatcggacagcggcgcgggcaggctgacggcgtggcctgatgtggtcaccacctgaatgccgagcagctcaaagagcgtgctgacaaagatgtaaacaccggcggtgaagatgtacgcccgcaggaatttattgcggtgcgggctgccgccctcggccaggccgtcgaacatgccgacgatctgctctaaaacgagctggaacctgccgggcacatatttgaattttgggatcacaaaaagccggcacacaagggcgaatactattagaatacccgtcacgatgtaggcggagatgagccccgggttcacctcgatcaggccaaacaggctcaccttgttctgctcgtgcagcaccgcgtcacgcatgacctcctggatcggttcgctctcgccgcctgacggcgtgagcaaacatccggccagcagcgccagcacgatcacggcgaacacgatgatctctcgcgttcgctttttcttatccacgcgccctacccccttttgtctctctcgtccatttttccgcttggaatacagcacttatttataccacctgcacgcaggaaatgcaagtcttccttcatgattaaccgccgctttacagcatcttttcgtcttcttaacagagccctgacccctcccctttttttcaataaatagagcagcggaaggagacagtgctgcccccttccgccgctctattccacttttctcgttatcgtcacaatacgaagatgatcaggatggccacgatcagcgcatagatgatgaccgtctcgataaacacaagacccatcatcatcgacgtgcggatctgccccgccgcctcgggttgttcggccatgttgttcgccgcctttgcaacggaatgcgccatgcccagcgcgccgccaaagcacgccacaccgataagcgccgccaccgcccagatcttgcgcagcttgacggtattttcgttcgctcccgcttcggcagactcttccacctcactcagcgtttccagggtctccacgtttcgctccccgcccgcggcggccagcgccggaatcgtcagcgcgcacagcagcgccagcacggcaaacagcgaccaaattcgtttcatcattcggctccttaacgcaaaaatgcagtttctttgcgaaatctttataaagactatatagcacccgtgcgccgatggcaagtctttttataaaaagcacaaaaagtaggatcctctcccttaatttttcgttttttctttctcttgagagtagcattttccgcgcgtttttgctatcgtgtagaaaaacaaatcacgttgagaggaaaatactcatgttctgggacaacgtcgcgggggtctatgacctcttcgccgacatctttaataaagaaacgcacaaggcgctcattgccgccgtcagttcccgtatcacaccagacgacgcggtgctcgaatgcgcctgcggcacgggactgctcaccggcgccatcgccgagcgctgccggacgcttctcgcgacggacttctccgccaacatgctcaagcgggcgaagaagaaatacggcgcgctgccgaacgtcacgttccgccaggccgacatcctgcatttagacgagccggacgggcagttcgacgcggtcgtcgccgcgaatgtcatccacctgctcgacgagccgtacaaggcccttgccgagctcgaccgcgtctgccgcagcggcggcacgatcatcgtcccgacctatatgaaccgcagcgagcagggcaaaacgagcggctttgcctcgaccgtcggcaaggcgggcgcggacttcaagcgtcagttcacgttcgacacgtataagcagtttatcgccgcggcgggctacgacgatgtcgactacgcctactgtcccggccgcgtgccctgcgccgtcgccgtgattcacaagccgtaaaaagcaagaaaaaaggctccgcagagtattctgcggagccttttttacattttgtattcactttctcttctgccggcggatgtcttcgccgaaaaagagcagcatttgatactctccctgcaatcttgacagcaccggcgcgccgtagcgccgcccgagctcgtcggggctcaggtttgtggagatgacggtcttcttccccgtgatgaggcgcgtgttgacgatctgatacatcgcgctgtggacaaagctcgtcatcagctcggtgccgaggtcgtctaaaatcagcaggtcgcagccgagcgcgcggctcacggcggtgtcggcgttctcgccgtcgtcgcggccgaacttctgcgcctcgaagcgggcgaagatgtgccccgccgtgtcgtagaccacgctgtggccgctcgcgctcacgacgcgcgcgatggacgcggagaggaacgttttccccagtcccgtgccgccggtcagcagcaggttgccgctcttgggcgaaaactcgtgcgcgtagtcctggcagatgtcgtacacgcgctccatgttcgtgcgcggcgacacgccgaggtcctcgtccggcacggacgaatagtagtcgaagttgaaattttcgaagcactgcgagccgaggtccaaaaggcccgagagctccttgttctgctccttggcgtaatagctgcgcaggcacgagcagacctcgctgccgagaaagcccgtgtcgttgcagcgcgagcacttgggcttttcctcgagatagtcgcccggcagtcccaggcgcgtcaggagaaggcgcttttcctgctgcaagttgaggttttcctcccgcagcgcctcaatggccgggcgcgggtccgtcccgcggcgcaggccggaggcaatgatcttcgccatcgtgtgcgacagctcgcggtcgatctcctcgatgcgcgggcacttggtatacaccgcgcgctcacgcgcgcggaaattctccgcgcggcgctgcttgtcctcgtcgaagcgcgccagcgcttggcgcatcagccgcccatcgtaagacatccttctcccccgctttcgttactgattcaaatattccttcatccaggcgttgccgccggtggtgttcttcttcggcttgctctgctccctggcgttctcggccctgacctcggcgagcgtgtgcaggcccttttcgtgccagcgcttcaaaatgccgttgcagtacggccagcggaattcgtggcagtgcaggatcgtccggtcgtaagcctcgctgaccgtatcggcgggaaagcccatctccgcccacgcggagaggtacttttcctcgctcggcgcgctcgcgcggccctgcatttgcagcgccgccatgtactcggggtacctgccgcgcagggcttgctcgcgcttcatgtactcgctggccttttcgatggaaaagagctccttgcgcgcccagacgtagccctctttttcgatctcgcgcatgttgggcagccgcccctcgccgaactgctgctcctttttcgcgatgcagtagttgacgagcgtgtaaacgacgtccgcgggcaagccgaggttttcgtacagccctaacagcttcttgaccgacggggtcgagagcgggccgagcttgtgctccacctcgcgcagaaggcaggcgaagcgcccgtcgccctccaatttgcgcgcgatgtcctcgcgcgtgtactcgggcggctcgctgagctgctggggcggcggaaggggcgcttcctccttcttctccggcgcgccgacgagcttcatctcgtagagcgcctgctccgccgcgcgaagacgcgtttcgtcccacttgagctcgcgcgcgagcttgccggagtccgccgcgccgcgcgcatgcaggatggcgaggtacagcagcgccgcgtcgccgctgccacccgcgatcaatcgcttgaccgtcgccgatgagagcgtgatgttctcctcggtgctcaaatgcagcacatagcctgccatgttccccgcctcctttcgtccattttcgattccattattctacatgaaattttcccgttcgtaaacatgaaattttttgcttcccccttttcacattttcactcccgtgttatactgttagagattatatgggtggaatttgcccttttttgtgcaacgccgaaatagaaaggagcacacaaatcatggaaaaccgcatcacgatctccatctgcgacgaggaatacacctttgtcgccgaggaagccccctcctatatgcagaaggtcggctcctacgtcaacgacaaaatgagcgagctgctcgacgctgccaaggtcggccgcacggacgccgccgtgctgaccgccgtgaacatcaccgacgagctcttcaaagagcgcgaggccggcgacgcgctgcgccgtcaggtcaagcagtaccttgacgaggcgagccaggccaaaaacgaggtcagcgaactcaagcgcgagatcttcaagctccagcagcagaaaaagtaaacccttgacgacagagctgttagcgcccgcgggcgggcaggaggcgcttgtcgccgccgtacagagcggtgcggacgccgtgtatatgggctttggcgcgttcaacgcgcgccgcagcgcgaggaacttctctgacgaggaattccgcgcggcggtcttttattgccatttgcggggcgcgaaggtctatctgacgctcaacacgctcgtcaccgaccgcgagctccccgcgcttgccgcggaggcgcgcaccgcgtcggagtgcggcgtggacgcgatcctggtgcaggattggggcgttctggcgacgctgcaaaaaattattcccgacgtgccgctgcacgcctcgacgcagatgagcctgcacacgctctcgggcgttcaggaagcggcaaggctcggcatgacgcgcgcggtgctcgcgcgcgagctttcgcgcggggagattgccgaaatctgccaaaaaagccccatcgagatcgaaacgttcgtccacggcgcgctgtgcatgtgctacagcggccagtgcgggatgtctgccgtcatcgggcggcgcagcggcaaccgtggcgcctgcgcccagccctgccgtctgccctacggcttttccggcagggcggacggccatccgctgagcttgaaggacgcgtgtcttgccccctttgtgccggagatgatggatatgggtgtcgcctgcctcaagatcgaagggcgcatgaagcgcccggaatatgtcgccgccgtgacggaaatatacgcgcgccttctgcgcgagcatcgcacgccgacgaaggacgagcagaaaaagctcgccctcgccttctcgcgcgacggctttaccgaggggtactaccgcggtgtgcgcggacgcgagatgttcggcacgcggcccgaaaatgcaagatggcccgaggactggttcagcgagattcgcgcgcgctatgaaaaggaaaatctgcgtctcgtgccgctcgcattaaattgcaccatccgcgccggtcagccgatggccctgacggcggaggacttaggcggccaccgcgtgaccgtcaccggcgcagtgcccgaggcggcgcgcagccgcgccgtcaccgcggaagaggtcgaaacgcgcctcaggaaaaccggcggcacggcattttcggtgacgcagtgcaccgtcgcacttgacggcggtctcgccgtcagcgcaggtgcgctcaacgccctgcgccgcgaagcgcttgcgcagatggaagcgcagcgcaccgctgtgccgaaacgccgcgtattcgactttgttccgccaacaatcgtcaaaaacggcgcggacaagccgcttttgaccgtctccctccacagggccgagcagctgagtgaggaactgatcgcactcgcccccgcgcgggtgtatgtgcccgtcgaactactcccgcagcttgacctttcgtcacatctcggcagaaccgaatttttcgcggtgctgccgcgcatctaccgcacacaggacgagcctattttgcgcgcgctgctcgaggacgccgccaaaaaaggcgtcacgggcgtgtcgctcgccaacctcggccacctgccgctcgcgcgtggacttgattgcaagctgcacggcggctggccgctgaacctctacaactccgccgcgctcgctttctggaaagaacagggactttcgagcgcgtgcgtctcgttcgagctgcgcgacgcgcagattcgggacctcagcaagtgcctcccgtgcgaggccatcgtctatggccgccttcccctgatgctcacggaaaactgcctgaatgcgaacgcgttcggctgtcgatactttaccgagcgccccgcctccgttccctgcgacggcgcgtgtgcaagcgcgccggagctcaccgaccggcgcggcgagcacttccccgtgctgcgcgcatggggctgccgcagcgagatcgagaacggaaagattctttatctcgcggacaaatcgaaggactggcagacgctcggtctgcgctttgcgcagctccgtttcacgaccgagagcgcctctgaatgcgtccgcgtgctgcgcgcgtatcagggcgaaacggtcgaagcgccggagaacatcacccgcggtctcttctaccgcggcgcagaatgaattccaaattatcattttttatcttgattatactctttattatcaaatagtgaggcaatatcatggcaatcgttttggcttctcaatccccgcgccgtcaggagctgctcgcccgcatcggcgtggaggacttcaaaacgctctcgctcgacattgacgagagctatccggaaggtctttctcccgaggacacagtgcgctacattgcaaagaagaagtgtgacgctgccgccgcgctctgcgcgcccgacgatctcatcatcacggcggacacgatggtctttttgggcaatgaccgcctcggaaaaccgcgcgatgaggaggacgcgctgcgcatgctgcgcgcgctttccggccgcgctcacacggtctgcacgggcgtgagcgttcgccgcggcgcgcaggaagagcgcttcgccgtgtccacgcgcgtctttttccgtccgatgacggacgacgagatccgcgcctacatcaaaaccggcgagccgatggacaaagccggcgcctacggcgtgcagagccgcggcgcgctcttcgtcgagcgcatcgacggcgactttttcaacgtcatgggacttcccgtcgagcagcttggcttagtgctcgcgcgctttggcgtcaagctcctctaacctctcccctgccctacgatgaaaggagggtaagccttgaaagaatttttccgtcagcacgggctgcgcattctggccgtcgccgcggcggtcgccgtggcattgagccttttgacctacttttcctcgacgtcctcggtgcttgaaaacatcgcgggcgtgctgacgtacccgttccgcgccgccgccaccgccgtgagcgactgggcggccgacaagcgccagtattacgaggacacgaccacactcaaggaggaaaacgcggcgctcaaaaaagagatcgcggaccttcgcgcccagcagcgtcaggcgcaggccgacagcgaggaaaataagctcctgcgcgagcttttgaagctccagcagcagcggcgcgacttcacgttcgtctccaccgccgtgctcgcccacagcgagagcagctggacgtcgtcgctgtctctcaaccacggcaccgatcaggacatcgccgtgggcgactgcgtcgtcagcgccgaaggctatctcgtcggcgtcatttccgaggtcggcctcaactggtcgacggtgctgaccgtcatcgacacggacaccgagctcggcgcgcgcatcttccgcaccggcgaggtcgccgtggcggagggcgacttctccctgatgggtcagggcaaactgaagctctcgtaccttacgtcggacgacgaggtgctcatcggcgatcagatcgtcacgtcgggccttggcggatattacccgagcggccttgtcatcggttcggtcgaatcgctccagaccggcgacgacggccttgcccgctacgcggtcctcgcgcccatgatggactttgccgccctgaccgaggtgttcgtcatcacggactacgacattgtcgactgagggaggcgcgcatgaatctcacccaaaccaccgcgctcaagtggacattctacgcgcttgccgcggcggcgctgctctttctgcggcggctttttctcgggtcgatgacgtttttcggcgtcatcccctttctgccgcctgtgatccttgcagtcatggcgtcgtttgagctgccgcgctcagccgtcatcgcgggcattgtcttcggcgcgctgtgcgaccttgtgctccccgcgccattcgcgtgtctctataccattgcattcacgcttgcggcgctgctcatctcaacagttgtcagcaatttattgcagcagggctttgcccgtgcgctgctctcgaccgtgctggcgtttctgcttgtcgatcttttgcaggcattcgctctgctgccgcgcagcggctcgaccgccgttttgccgatgctgcacctgttcgcgcgcgaaacggcgctctcgtgtctgctgctcgtgccggtgtatccggcgctgcgcgccatccgccgcatcttccccgactgattttccccatttcccccaagcctcaaggaaaggaggccgctatggattccaaacgctttacccgccgcctgattgcgctcggcgcggcgatgtttttctgcgcactcgtgttcgtcgtcacgctgttcgacgcgcagatcgtcaacggcgacgattatctcgcccagtccatccgcacgaatgccaagtccgagactgtcaaggcttcacgcggcgtcatcaccgaccgcaacggcaaggtactcgtgtcgaaccgcgcggtctacacgctgaattttgattcctcgctcgtctcttccgacgagctcaacgacgcgctgctgcgcgtcatcgatctgatgaacgcgcagggcgttgaaattaaggacacgcttccgctcgccaggacctcgccctacgcctacgacaccgcgaacggcagcgcgaaaacgctcgtcaaatacctcgtctcgctcaagtggatcaatgaaaagaacgtcggcgacgacggcctccccactacgctgacaggctctgcgctgtatctgaagctgcgcagcgagtacgggatcgacgaaacgctcccgaattccacggtgcgcacgctcatcgggctgcgctactccctcgcctccgccaagatgaacggctccacgaccttcgaatttgcgagcgacgtggatgtttcgctcatttccctcatcaaggatggcaactatgccggcgtgcaggtggatacctcgtccgtgcgcgtttacgagaccgactacgccgcccacgtcctcggctacaccggcagcattcaggactgggacgattataaggataaggacggctacacgcttgcgagcaccgtcggcatctccggcgtggaaaatgcgtttgaagactatctccacggcagcgacggcaagcgccttgtcacgctcaacgaatccggcaagatcaccggcgagctctactctgtcgagccgaagcccggctccaccgtggcgctgacgatcgacatcgactttcaggcacaggtggaggaggcgctcaaaaataccgtctcttccatgacaaaatccgacggcatcgaccgcggcgcggccgtggccgtcgtgcaggtcggcacgggcgatgtgctggcgctcgcatcctatccgacctatttcctctcgacgttccgtcaggaccttgcagagctctccaccgaccccttgcagccgatgtggaatcgcgccacgcagggcaaatacgcccccggctcgaccttgaagccgctgacggccatcgccgcgctcgaatccggcgcgacgaccgtgcgcgaaaagatctacgactccggcaagtggacgtaccccggctactccgcgagctacacctactgctggaagcgcagcggccacggctcgctcaacgtccgcggcgcgatcatgaattcctgcaactatttcttcgccgaaatgggctaccgcatgggcatggacacgctgcgcgagtattatgcgaaattcggcctcggcgcgccgaccggcattgagatcggcgacaccgcgggccgcctcccctcgcagaacgagggcgagaaccttgccccgtgggcggcgttcggtcaggcgaatcaggaatactcccccctccagctcgcaaactacatcgcgacgctctgcggcgggggtgaccgctacgccacgcaccttttgaaaaacgtccgctccagcggctccggcgcgctcgaatccgtttacgacgccgagccggtcgagacgatcgccatgagcagcgaaaatctctccgccgtcctcgccggtatgcacgacctcgcgactgacggcgcggtgtcgcagtatttcaaggactgtatcgtcgacgccgcggccaagaccggtacgatccagaccggcgacacgaagaacaacaacggcgcgttcgtctgcttcgccccctacgacgatccgcagatcgccgtcgccatcgtcatcgaaaagggcggctccggcgcagcgttggcctccaccgccgtgcaggtgctcaacgcttacttctccaacacgtccgcgtcctctgcgatcacgggcgaaaatacactgctgggttaagcgcaccgtttcggcgcgcttttgcctgtttcagccgctttatttggcagaaagggatgtgttatgtcaactaaatggtttgatccgcgcgatcttctcttcaaatctccctttggcgcggtgccctgcggcgccgatgtctcgttctgctttcgccacgagcgcggcgcagcggtcacgcgctgtgagctgcttgctcacggcgagtttgccgaccaatggacgacggtggagcttactcccgcgcaggaggacggccgcgtcgtctatcgcggcatcttcaccgcgccggatgacgtggagctcgtctggtaccacttccgcctctcgtgggcggacggcggcacgagctgctacggcaaaaacggtctctgcgcgtgggacgcggtcgaaccctggcagctcacggtctacgacgacacacacaaaacgcccgcgtggttcggccgcggcgtgacgtatcagatcttccccgaccgcttccgccgcgctaaatctcgtgatgctgcaggccttgtcggcccgcgcacgctgcacgaaaattgggacgagcttcccgaataccgcccgaacgccgagggtgagatcacgtgcagcgacttcttcggcggtgacttgcaggggatcacggaaaagctcgactacctcgcctctctcggtgtgacgacactctacctctgcccgatcttcgaggcctcgaccaaccaccgctacgacacggcctgttatgagcgcattgacccgctgctcggcgatgaagcggacttccgcacgctctgcgcggaggcgaaaaagcgcggcatctacgtgatgctcgacggcgtcttcaaccacacggggcgaaagagcgtctatttcaacgccgacggcttttacgacgacctcggcgcggcgcagggcgagcagtcgccctattaccgctggtacaacttccaccccttccccgacgagtacgacgcctggtggggcatcaagaacctgcccgcagtcaacgagctggaaaaaagttatgttgactacattattgagggcaacaactccatcatcaagcgctggctgcgcgcgggcgcatccggctggcggctcgacgtcgccgatgagctccccgacgagttcattgccaaaattcgcgcggcgatgaacgaggagaaccccaacacttatcttctcggcgaggtctgggaggacggcacgacgaagatcgcctactcccagcgccgcaagtaccttttgggccgcgagacgaacggcctgatgaactacccgttccgcacggcgctgatggcgtatttgctcggcggcggcgcggaatacttccgcgacagcatggaggagctgcgcgaaaactatcctgcgcccgcgttctacggcgcgatgaatttcctctcgacccacgacacgccaaggcttttgacgatcttaggcctcacctcccccgcgccgcagacgcgcgacgagcgcgcggtctatcagctcagcggttccgaccttgcgcgcggcatgttgctcctcaagctcgcggctctgatcctctacaccttccccggctcgccgatgctctactacggcgacgaggccggcatgcagggctttgaagacccgttcaaccgcggaacctacccgtggggacgcgagaatgccgaattggtgcaatacttccaacagctcggcgcgctgcgcaaatcgcacaaggcgctgcaaagcggcacgatcgtctaccatgccgcgcagggccgcgcgctggcgttctcgcgccgcacggagcacgaccactgcctcacggcagtcaatgcgggcggcgagcccgtcacgctcacccttccgtgggacggcacgctcgccgaggacgccctgtcccatcaggagttcttctgcggcaacggcctgcttcgcctgacgctcgagccctacggtacgatgctgctgacccagccgcaggagtgatttgtttcacgtgaaacactgatttcaggtcatggtaaaggtcagcgcctttaccatgacctttttctgtcctcagcactgccccagcggtgataccccatcaccggcccaaacaggggcaaatcgagacgtaaaggcctgtgccttgtcatgtttcacgtgaaacaaatttgcaaaatttgagcttccctgttgaaattgagccgttttgtgctatactgaacaagaatgaaaatggatcaatgcttctatgactaaggtgggtgtttttttggctaaaatcgttgcaatcgtcaatcaaaagggcggcgtcggcaaaacgacgacctgtgtcaacctgacctcctccctcaaggagaaaggcaatcgcgtcctgctgtgtgactttgacccgcaggccaactccacctccggcatgggtgtggacaaggcggcctcgcgcggcgtttatgacgtgctcatcaacggtgcggacgtcacggccagcgtggcgcacacgcgctacggcgatgtgctcccttcctcgaaagccttggcgggcgcgggtattgagatgatcgaccgcgaaaaccgcgaattcctgctcaagcaggcgctcgatattctctcgcccaattacgactttatcctcatcgactgcccgccgtcgctcgaactcttaacggtcaacgccctctgcgccgcgaattccctgatcgttcctgtgcagggcgaatatttcgcgctcgaaggcctgtccgacctgatgcacacggtccgcatggtgcgccgcagcctgaatcccggccttgagctcgaaggcgttctgctcacgatgttcgacgggcgcacgaatctcgccctccaagttgcggaagaggtcaagcgctacttccccggcaaggtgtattcgaccgtcatcccccgcaatgtgcgcctttccgaagcgccgagccacggcaagccgatcaactactacgaccgcacctcccgcggcgcggaggcttacagcagcctcgccaacgagtttttgaagcagaaccgctgatacattaaatataagggcgcattccgcccgcttcatcccacagaaaggagaagtttacatggcaaatgcaaaccgcgggctcggcaaggggctcggcgcgctgctgggcgacgccgccctgcgcaccgacacgtccgacaacctctacctccccatctcgcagatcgaaccctacgccaatcagccgcgccgccacttcgatgaagaggctctgcaggatctggccgattccatccgcgagcacggcattatccagccgttgacggtccgccgcctttcttccggctactatcagatcatcgcgggcgagcgccgctggcgcgccgcgcgcatcgccggtcttgccgaagtgcccgccatcgtcatcgaggcggatgaccgcaagatgaccgagctctcgctcatcgaaaacctccagcgtgaagaccttgaccccatcgaagaagccgagggctacaaaacgctgatggacaactaccatctcacgcaggaggaggccgccgagcgcgtcggcaagtcccgctccgccgtggcaaacagtctgagattgttagggctttgccccgaagtgcggcaaatgctgcaaaacggcgacctctccggcggtcatgcccgcgcgctgctgccgctcaaggccgacttgcagctcgacgcggcaaacctgatcgtcaagcagggcctcagcgtccgccagaccgaggcgctcgccaagcgcctgagtaaccctaaggaagagcgcaagcccacgaacgacgagctcatcgccgagagctacggccgtctggccgcgcaggagctcagcgataagatcggccgcacctgccgcatcgtgtccggcaagaaaaaaggccgcattgagctcgactattacggcatcgacgacttaaacgatctgctcgaagcgctcgccgccatcaaacgcagaaagaacggaggcgaataaccatgtccgatttgattcacgagggccccaaggacccgaacaagccgcccgtgcccggtgaagaaaagcccaccaccgagcgcgagcgcatgaaaaaagtatatacttacgttgcgatcctcttcaccgtggcatttttgctgattttatggacatttctcatgaatcagcgcagcatcaacgagatcaaggacggcaacaccgccctgcaaagcaccttgcagcagaacgactcgctcgaagcgcacatcgctgagcttgaagagcagcttgcgaccgcggaagaggacaaaaaggcgctcgacgagaccgtcggcgtgcagtccaaccagctgcgcgcgctcgactggctgcttgagatcgaaaacgcctacaacaccggcgatctcgacgccgcgaaagacaacatccgctcattcgaggagaccggcacggtggaattcctgcccaaggagccgctgcgtaccggtatcaccggcgacgacgccccctcccccgccgcgcgctaccagtccattgtggacaagctgtttccggacggcgtaaaataagaagtcaaatggtcatttactttacaacgataacgaggtaaatcattatgctggatatgaaattcctgcgggaaaatcccgatctggtcaaggaaaacatcaagaagaagttccagaacgaaaagctccccctcgtcgacgaggtcatcgagctcgacgccaagaaccgcgccgccatcaccgaggcgagcgagctgcgcgccagccgcaacgccctctcgaagcagatcggcatgctgatgggtcaggcgaagaaggacccgagcaagctcgaagaagccgaaaagatcaaggcaaccgtcaaggcgaacgccgaccgcctggccgagctcgaaaagctcgaagaggagtatgagcagaagatccacaagatcatgctgctgatcccgaacattatcgaccccagcgtccccatcggcccggacgacagctgcaatgtcgaggtcgagcgtttcggcgagccgaaggtgcccgaattcgatatcccctaccacacacagatcatggagagctttgacggcgtcgacatggacgccgcgggccgcgtctccggcgcgggcttctactacctgctcggcgacatcgcgcgcctgcacgagggcgtgctcgcttacgcgcgcgactttatgatcgacaagggcttcacattctgcatcccgccgttcatgatccacggcaacgtggtcgagggcgtcatgagccagaacgacatggacgccatgatgtacaagatcgagggcgaagacctctacctcatcggcacgagcgagcattcgatggtcggccgcttcatcggcgaaattctgcccgagagcagccttccccagacgctgacgtcctactccccctgcttccgcaaggagaagggctcgcacggcatcgaggagcgcggcgtttaccgcatccaccagtttgaaaagcaggagatgatcgtcgtctgcaagcccgaggacagcatggactggtacaacagaatgtggaagtggagcgtcgagctgttccgctcgatggacatccctgtccgccagctcgaatgctgctccggcgacctcgccgacctgaaggtcaagagctgcgacatcgaggcctggtccccgcgccagaagaagtatttcgaggtctgctcctgctcgaacctcggtgacgcgcaggcccgccgcctgaaaattcgcgtcaagggcgaggacggcaagatgtacctgccgcacacgctgaacaacaccgtcgtcgcacccccgcgtatgctcatcgccttcctcgagaacaatcttcaggccgacggcagcgtgctcatcccgaaggtgctccagccctacatgggcggcaagaccgtgctcacgccgaagaagtaatttccattagtaataattcgtcacttttatacgattagttttcgtattttccgcaaattcccccaaaggagccttctgaatgaagaagttttttgaagagttcaaggcctttgccatgcgcggcaacgtgctcgatatggccgtcggcgtcgtcatcggcggcgcgttcggcaagatcacgaactctgtcgtcaacgatatcatcatgccgctcatctccatgctgaccggcggcgtcgacttctccgcgtggaaatgggtgctcaaggaggccgtcatggagggcagcaaagtcgtcacacccgaggtcgccgtcaactacggcaacctgatcgccgtcatcctcgacttcatcatcatcgcgttcgccgtgttctgcatggtcaaggccatcaacaagatgcacgacaagctctcgaagcccgccgagccggagcccgaaaaggcccccgagctgacgaaggaagagctgctgctcgccgagatccgcgaccttttgaaggagcagagcaaatgaacgagcttctcttgcagggcctcagcgagctggggctggatgtaagccgggcggaaacgctcgagcgcttctcctccctgctgcttgaaaagaacgaggtgatgaacctcacggccatcacagagcccgacgccgtcgcgcagctccacctgctcgacagcgcggcgctgctgccatttgtcgatctgacgggtaaaaccgtcgtcgacgtcggcaccggcgcgggctttcccgggatgccgctgcgcattttaaaagacgacttcgacctcacgctgctcgactcgctcggcaagcgcgtcaactggctgcaagaggtctgcgacgagctgcaattaaagcgcgtcgcctgcgtccacgcgcgagcggaggaattcgccatgcagcaccgcgagcagttcgacatcgccacctcgcgcgccgtcgcgcagctttcgatcttatccgagctgtgcctgccgctcatcaaggtcggcggacagttcgtcgccatgaagagcgtcgacaccgaagacgagattgccgcggcgaagagcgccatcaagacgctcggcggccacatcgtcaaggtcgaggactacaccatcccgacgagcaacgtcgtccaccgccttgtcatcgtcgaaaaggtctcccctaccccgcgcgcctatccgcgtgccttcgccaagatcaaaaaagccccgctgtaacgcatcaaattcacaaaaaggaggtacgagccttgtctcaggtcatcgccgtcgtgtccggcaagggcggcacgggaaaaacttcgttcacgacgctcaccggcatggcgctcgcgcagctcggcaaaaaaacgctgctgctcgactgcgacatcggcctgcgcaatctcgacctctacctcggcgtatcggatcgcgcgctcatggacttcaccgacgtgatcgccggacgcacgacactcgctcaggccgtcgtgcgccacccgctctacccgaacctgtatctgctcaccgcgcccgtcagcttcggcgtgcgcctgccgagcaagcacgagatgcagcggcttatcgacgagatccgccgccatttcgacttctgcctcatcgacgccgccgccggcatcggcgaagccttcgcgcttgccacctgctgcgccgaccgcgccgtggtcgtcaccacgaacgacccctcaagcctgcgcgacgcgcagcgcaccgtgatggagctgcaccgcttcccgagcggatacctgcaccttgtcgtcaaccgcgtgcggcgcaagctcttacagtccctccacaccacgatcgacgacgccatcgacgccgcgggtcttccgctgctcggcgtcattccggaggacgagaatgtccccgccgttttggggcgcggactttcccagcgcctcaagtatcgctccggcgcgctctgcgcctgcgaaaacatcgcacgccgcctgtgcggcgaacgcgtgcgtctgatgcggctgtagcgccggttcacaaaggcaaacacgcttttcccgcaaacatcttttcaaagcctgcttgcccttgtcaaccgatgaaagtgccgctacaatagaaaaattcacatcagaaaggattgtgacactacatgaacatcgctctcatggcacacgacaacaaaaaggaactgatggtccagttctgcacggcttacgccggcattctgtcccgtcacacgctctgcgccaccagcgtgaccggtaagatggtcagcgaagcgagcggccttccgatccacctgttcatggcgcgcatccacggcggcgccgagcagatcggcgcgcgcatctcctacaacgagatcgatatggtcctcttcttctgcgaccccgccaacccgcagtataacgacagcctgacctatatcaccaagctctgcgaccagaacaacatcccctttgccaccaacctcgccaccgctgaaatgctcatcatgggccttgcccgcggcgacctcgactggcgcgatatcgtcaacccgaagacgaagcccttcaccacctgagcacaaaatcaggcgattttcaatacagttagtaattttcaatttataatatacaaacaggagtagattttaccatgatgcaatcccgtacacacaactgcggcgagcttcgcgcgcagcatgccggtgagcacgtcaagctcgtcggctggatggagaacgtccgcgaagtcggcggcagcctcgcctttgtggtgctgcgcgacttctacggcacgacgcagatcgtcgtcgagacgagcgagctgctcgcccagatcaagggctacaacaaagagagcaccatctccgtcgagggcaccgtgcgcgagcgcgcaagcaagaaccccaatcagcccaccggcgacattgaggtcgttcccgagaagatcgagctgctcggccgctgccgctacaactccctgccgttcgagatcaaccgcagccgcgaggccgacgagacccagcgcctcaaataccgctatcttgacctgcgcaatcccgccgtcaagaagaacatcatcctgcgctgcaacgtcatcgccgcgctgcgcaaggccatgatggagcacgacttcctcgagatcaccaccccgatcctgacagcctcctcccccgagggcgcgcgtgactacctcgtccccgcccgcaagcaccccggcaagttctacgccctgccgcaggccccgcagcagttcaagcagctgctgatgacctccggctttgaccgttacttccagatcgcgccgtgcttccgtgatgaggacgcgcgcggcgaccgcagccccggcgagttctatcagctcgatatggagatggcgttcgcctctcaggaagacgtcttcgccgtctgcgaggatgtcctgcccccgatcttcgcgaagttcggcacgtatgacatcgcatctcagcccccgttccgccgcatcaagtacctcgacgcgctcgagatttacggcagtgataagccggacctgcgcatcgacctgaccgcgacgaacgtctcctccctcttcgagggaagcagctttgaggtccttgcggacaagaccgtcaaggccgtcgccatctccaactgctcgctcacgcgcaagcagatcgacaagctcctgaccgactgcgaggtgcaggcaggcgcgaagggctactggttcaaggtcgacgaaaagggcgacctcgccggcggcatcgcgaagtttgtcgacaaggaagctgcttccaagctcctgccgctcgagcctaacacactcgtgctcgtcgcgggcggcgagctggccaccaagctcgtcggcgtgatgatcaagacgttcggccccgcgtgcgagggtcacatggacaaggagcgctacgagttctgctggatcgtcgacttcccgatgtatgagatcggcgacgagagcggcgagctcgagttctgccacaacccgttctccatgcccgccggcggcctcgacgtgctgctcaaggccgagcgcggcgagatcgacccgctcaccatcaccgccgaccagtacgacctcgtctgcaacggcgtggagctctcttccggcgcggtccgtaaccacgaccctgagatcatgatcaaggccttcgagctcgtccgcctcggcgaagaggacgtgaaggccaagttccccgccatgtacaacgccttctgctacggcgcgcccccgcacgccggtatcgccccgggcgtcgaccgcatggtcatgctgctcgccggtgaagattccatccgcgagatcattcccttcccgatgaacaagaacgcccaggatatcatgatgggcgcgcccagcgaggtgacgcagaagcagctcgatgagctgcatattgcggtcacggcgcatgaggaagaataattcagctctcactgcgtgagggtgcaatggttcccctgcgccgcgcaggggaacggcaaaggggggctattctctttcctcggaaagagaatagccccccttacaccccccaagagaaagggacgaggggccttccccctcgaccccgcacattggcagtttgtagcttgaagagctgcacgcgctgcgcaatcaggtgcggtgtacatggcttcgccatgaatccctgcgagtcgttacgtcttgcaaccgcgccttactatcgtgaggcgcgagtgacgtttgctcggcggcggactgcgtgcggaatgcggcattgcttcgctcgccgcattgatgggtgcctcggtagacggaaattaggctgcactactacaagatcggcagagcggcacccgcaaggggtgtgccgcatccgtaaggcgtcagagccgccaacggctgcgcaacagcggataataggagtagaggcaaatcgtatcgcaactccaaacgcggcaacgccgcgcgcaggaagtagcatcggcaagcattgcagctcttcgagctgctcgcttgcaatgtgaaaacctttctcttgggggatttaaagggggatattctcttttgtgaaagagaatatccccctttgcccgctcccctgcgggtacgcagggattctcggtttgtcttgacaaacaatttcagtcatggtatgctgagcgcaataaaggcagcgagaaagaagccttttcttttcacccgctcaagagaggggacggccggtgcaagtccctgcggaacggaaaaggcggcgcttttgagccgcgcggcggaaatgccgcgccggtccctccgttacaagggaacgaagtgccccgcatccagcggggaattcaggtggaaccacggacaatgatttgttcgccctgagcctactttaataggctcagggcgttttttatctcctgagccaagtaccgaaaggagaaattcaccatgaaaaacaccgaaaagacgatggacaagatcgtcgcgctgtgcaaaaaccgcggctttgtcttccccggcagcgagatctacggcggccttgccaacacctgggactacggccccctcggcgccgagctcaagaagaacatcaagaacgcctggtggaagaagttcgtgcaggagaatccctacaacgtcggccttgacgccgcgatcctgatgaacccgcagacctgggtggcgagcggccatctcggcggcttctccgatcctctgatggactgccgcgagtgccacgagcgcttccgcgccgacaaggtcattgaggactggtgcgccgagaccggcttcgagcttcccaagcccatcgacgccttctcccagcaggagatgaaggactttgtcgaagagcacaacatcccctgccccacctgcggcaagcataacttcaccgatatccgtcagtttaacctcatgttcaagacgttccagggcgtgaccgaggacgcaaagaacaccgtctacctccgccccgagaccgcgcagggcatcttcgtcaacttcaataacgtccagcgcaccacgcgtaaaaagctcccgttcggcatcggccagatcggcaagtccttccgcaacgagatcacgccgggcaacttcatcttccgcgtgcgcgagttcgagcagatggagctcgagttcttctgcaagccgggcaccgaccttgagtggttcaactactggcgcacgttctgccacaactggctgctctccatcggcctgaaggacgagaacctccgcctgcgcgaccacgatcccgaggagctgtgcttctactccaaggcaacgacggacttcgagttcctcttcccgttcggctggggcgagctctggggcgttgccgaccgcacggactacgacctcacgcagcatcagaacaccagcggcgtgaagatggtctatcgcgagggcgagggcaaggacatggtcgaatatgtcccctacgtcatcgagccgtcgctcggcgtggagcgcagcgtgctcgcggtcctgtgcgacgcctacgatgaagaggtcgtcggccaggacaagaagggcaacgacgacgtgcgcgtcgtgctgcacctccaccccgcactcgcccccttcaaggccgcgatcctgccgctttccaagaaggacgtgctcgccggtcccgcgatggagctctacaacgagctttccaaggaattcatggtcgactacgacgagaccggctcgatcggcaagcgctaccgccgcgaggacgagatcggcacgccgtactgcatcacgttcgacttcgacaccgtcggcgacgaggccaacggcatcgcggccgaccactgcgtcaccatccgcgagcgcgacagcatggagcaggtccgtatccccatcgatcaggtcaaggacttcctgcgcgaaaagtgcgcgttctgagaaaagttttccacagaatagcaagaaggacagctctctttcgagagctgtcctttgttctttatttttcgatcttccggctcgccaaaaatccggcttcctcctttatgatctcatcttccttagccatcgaattttcagacctgaccacgcagtagtcgcatctgtcagcgttcccgcaggtgccgcggcggatcaaggtgccgtgaagctggctcattccccagtagtcggattgcagaaaagcggcagcacctgcatcagatcgtgctttttcgcaaattccgcatttgggcactgcgtaaaatggtatcgcgcggcacgtttttcttgtcgtacggctcggatacattgcagaagcacaccggatgctgcgcgtacagcttgcggtctcttttccccactccttggaagaccttgtcgatcagccacatatcaaagctgcggttcaagtcaaaaatctttcccagctttacaaatcccgacataaaaagcctcgtgacaagctcctgcaattcctctgccggcggatggtccggcagcagagggtacagggagaagatcacgatgctgccgcagattgcgagggtatggctggtcttttttccaccgtagtcagggagctctttgagatattcgccatactggcggccggcaagaaccccacaaagcgggaaacttgtccggttgcgtttttcctgtcgaaatgatatactttgttattatgctttcagaaaggggacgtccccaacatgcgttttttctcttctctggtgcggcctgacgagtcgacgggcgcggtgatgcgctgggtgcaccgcatctgggtcttcttctggctcacggtgctgggcgctggcattggccttctctcgctctacctcacggcacattcctacgcaagcatcgacgcgacggcgcttttgcagtcgtacttcaaaattccgctgctcgtagcgatgaacctgcttgcgccgatcttactcgtctacctcggctttttcctctttgctcgtccgtgggcggcgtacctgctctcggcgctgccgtttttcacgctcgcgctcgcgagctactacaaggtgcagctgcgcggcgaccccgtgctcgccaccgacctgcggctcatccgcacggcgggcggcatcatgggcaactacacgttcgaaatttccgcgcccgtgatcgtcgttcttgaggggtttgtgctgatgcttgtgctctcgtgcctgatgctccgaaaagagcgcatgagcccgcgctcccgccttgcgggcatcatgctcatgctctctgtcacgctcgcgtgctattttgagttctacaccagttcatctatctacaaagagaccgccaacaacgacctcatttccccgtggtcggcggtcgaggtctacatctctcgcggcacgacgtatccgttcctacacagcgtgcaggacatgttccccgagccgccggagggctaccgcgagagcgaggccaagcagatccttgagcagtatgcggacaccgacattcccgacgatcagaagatcacggtcgtcggcatcatgctcgaggcattctccgacctgtccgacttccctcagttaaatgaaatctccgccgtgcggaatctctacgagccgctgcacgagctcgagagccgcagcgtctcgggcaacctcctcacgaatatcttcgccggcggcacgacaaacaccgaatggggcttcctcacggggtacagccagcacgaggagttccgcggcccgaccaattcctacgtccgctacttcaaggatcagggctacgacgcgctctaccgccatcccggctactcgtggttctacaaccgcagcaacgtcaacgaataccttggctttgacgagtgcgtctttaacgaatcgggctttggcgacctcatctccatcgaggacgcgctcttcaagtccgacaccgtgctcgtcgactacctcttaaacgacatcgactcgtgcacggaggacgatgaccctctcttcctcttctccgtctcgtaccagaaccacgggccgtacagctccgagacctactgggaggagtacgtcacgcccgccaagaccggctggtcgatggaaagctgctgcgtcatcaacaactacctggccggcatccgcagcacgatcgagcagatgcgccgcctcacgcgcgagctggaagcgcgcgatgagcccatcgtgctcgtgctcttcggcgaccacaagccgtggatgggcaacggcagcagcgtctacgccgaaatgggcgttgacctcgacgtgtccacgcaggagggcttctacaactacttctccaccccctacctcatctatgccaacaaggccgccagggaatccctcggtcaggacttccgcggcgacggcggcgacatttccccgtgcttcctgatggacaagctcttcttcgagtgcggctggacgggcgacggcttcatgcagctccagcgcgagacgcgcgccgtcacgccgctgatgcacgaggacggctaccgcatggtcgacggttccatcacgctcgacgtgcccccagacgtcgccgagatctgccgcaggtacctctgcgcgcagtattaccgcgaacagcactttgtttccgaatcgtaaaaaggagaatcgccatgaaatctttcaaaatcaccgcactttccctcgtcctggttctgcttctcgccgcctgcggcgcgaaaaacgacacccccgatgaacccgccgtcgatccgacgccggaacctcctatcgagcagccggtggaaaaaacgcccgatgagcgcatcaacgacatcattgcagatatgagcatcgaggaaaaagtcggccaactcttcttcgtccgctgccccgaaacgggcgcggcggaggacgtcgaaacctatcacctcggcggcctgctgctcttcggcagggactataaggatgcaaacggtgactggctcacggaggacgacttcaccgcggcgctcgcgtcctatcaggccgcggcagccatcccgcttttcatcggcagcgatgaagagggcggcacggtcacgcgcgcgagcaaaaacccgaatctcttctccgaacctctcccctccccgcaggagctctatgccgcgggcggcctcgacgggctgctcgaacgaacgctcagctacaaccagaagctcaaagcgttcggcgtcaacgtgaacttcgcccccgtgtgcgatgtgtcgacgaatcccgacaacttcatctacgcgcgctcgttcgggcaggacgcgcagacgaccgcggactatatctcaagcgtcgtgcccgtctatgcgcagtccggcgtcgcctgcgtcttaaagcacttccccggctacggcaacaacgccgacacgcacacgggcatcgcgctcgacgcgcgcccgtacaccacgtttgaaaagtccgacctcgtcccctttgaatccggcatcgccgcgggcgcgccgttcgtgctcgtgagccacaacatcgtcgagtgcatggacggcgcgtatcccgcgtccctttcggcgaaggtccacacgctgctgcgcgacacgctcggcttcaccggcgtcatcgtgacggacgatctcgcgatggatgccgtcaaagcctacgcgcaggacggcagcgccgccgtgctggccattcaggcgggcaacgacatgatcgtgaccaccgactatcagacgcagatcccgcaggtgatcgccgccgtccagtccggcgagatcgccgaaagcgatattgacgcgcacgttttccgcgtgctgcacgaaaaacaggcgctcggcctgatcgactaaaggagaaccccatggaaacaagaaaactctactatgaagatccctttcagaagggctttgccaccaccgtcgtctcctgcgacgctgtcaagggcggctacgccgttgtcctcgcggagacggccttctaccccgagggcggcggccagccgtatgacaccggcgttttgggcgaggcgaacgtgctcgaggtccacgagaaaaacggcgttatcacgcacctttgtgacaagcccttcgaggtgggaaagagcgtctccggcaagatcgactgggcgcgccgcttcgaccacatgcagcagcattcgggcgagcacatctgctcgggcctcatctgcgagcgcttccactgcgacaacgtcggcttccacatgggcgcggacgtcgtcacgatcgacttcaacgccgacatttcgtgggatgaacttatggagattgaacagctcgccaacctgtacatctatgaggatcaccccatcgatatccagttctatcgcggcgcggagctcgacaaggtcgagtaccgcagcaaaaagccgctcgagggcgacgtgcgcatcgtctccttccccggcgcggactgctgcgcctgctgcggcacgcacgtcgtgcgttccggtcaggtgggactcgtcaagttcctctccgtgcagaagttccgcgacggcgttcgcatcgagcttctttccggcaaacgcgcgcaccgctacctttcggagtgctgggcgcaggacgtgcgcatcgcacaggccctctccgtcaagccgaacgcgagctttgcgggcgtcgagcgcgtgctcgctgagctttccgcgctcaagcagcgctgcgcaaagctcgaagagtccgtcttcgcccagaccgccgcgcagtacgaaggcaagggcgacgtgctgctcttcgaggacgaaatgtccggcgacagcctgcgcaagctctgcgacgcggtcacaaaccgctgcggcggccgctgcgcggtctttgccggcgcggacggcgcgtacaagtacgccatcgggcacatcggcggagaccttcgtgagttcacgaaaaagatgaatgccgagctgaacggccgcggcggcggcaagccgaattttgtgcaaggcagcgtggccgctgcacgcggggcgatcgaagcatttttcgcagaataatttgcaacgattcccgcaccaatgcgggagaagtttcccctgcaccgtgccggggagcgagtcaaaggggccattctctttcgcaaaagagaatggcccctttggaaccccaagagaaagactttgattggccgtctcaggctcgaatggtctttgtgcctccggaaggtgactgcctgcgcgcggcgctgccgcgtttagagctgctatacgatttgcctctgctcctactatccgctgttgcgcagccgttggcggctttgctgccttacggatgcggcacaccccttgcgggtgccgctctgctcatcttgtaggagtgcaaactaatttccgcctaccggagcactcatcaatgcggcgagcacagcaatgccgcattcggcaagcagtctgccgccaagcaatcgtcactcgcgcctcacgatagtaaggcgcggttgctgaatgtttcgaatcgcagtgattcatggcgaagccatgtacaccgcacctgattgcgcagcgcgtgcagctcttcaagctacaaactgccaatgtcgggggtcgaggggaactcccctcgcctttctctgggggatttaaagggggtattctcttcggaaagagaataccccctttattgcccgtttccgcacagtgcggaaacctcccgcccgcgacgcgggctttgtttttgcttgaaaaggaaaaatcagaacccaaacccgctgaggccgagtccgctcgtcagcgcgttcatcttcccgtccatcgcctcttcggcctggcggagcgcttcgttcacggcggaaatgatgagatcctgaagcatctccacatcctcggggtcgactgcctcgggcttgatggtgatgttcgtgacttccttcttgccgttgacctcggcgctgacgacgccgccgccgacgctcgccgagaaggtcttctcctcgacctcctgctgcgccttctgcatgtcctcctgcatcttcatgatctgctgctgcatctgctgctgcttgagcatctggccgctgccgttggaaaagccgcggcgtgcgctgtaaccctttgccatcgttgttgtctccttttattttactgtaaaattgtcgaatttactgcccatgcgcaggaggtcctgcatcttgtctcgctttttcgcgcccgggcgctcgcccacgaggaagcggacgcggatctcccgtccaactgcgcgggacgtgacctcgctcaaaacgtctgtcacgaccttctggtcgagcatggacttctgcacctcggtcgagcagtagacggtgagaaggtcatccttcacatcgccctgcgccatgccgatgaacgcgcgcttgtcgggcgtcagacggtttttatagctctccatgagctggtagaaaatctcatcatccccgctgcctccactcgtcggcgcttcctgcgcaggcgcgggtgctgctgctatcttcggcgctgcggccttcggtgcgggcgcgaccggctcgccgtagggcggcggcgcgtcataatcgtcgggcagcggcggctcgtcccacggaagcggcgcttcctcggcgggctttgcgctctctgtgggcgcttccgcggccttttgcggtgcgggagcgagcttttgcgccgtcgcgggagcaggtgcgctcgccggtgcagatacagggtgctttgccgcaaactgcacacccgcggcgatctgctcttcgagccgcgcgatgcgcgcgccgagcgccgtcaggtcgccggagagtgtttcgtcgcagagcttcagaatgcagagctctgcgtccgtgcggcggtttacgctgaactggagctgcgccgccgtctcctgcaagatcgtacagagctggatgaagcgtgcgctcgtcccctgcgcgcgcaggtttcggagcgttgcggcgtcataagcgccgctgagtaagctctcgccgccctcccccgccgtcgcgctgatgagcagctcgcgcgagagggtcgagagctcgccgagcaccgcgcccacatccttaccgccgtcgtagagcttgccgagaagctcgagtgccccgcgcgcatcgcgcgtcaggatcagcgacataagctgtgcggtctgcacgtttccggccaaacccagcgcgtcgagcacggcattcgcgtcgatcgcgccgcccgcggccgcgcactggtcaagaaggctcagcgcgtctcgcagcgcgccgtccgacagtcgggccagcagtgccgcgccgtcctcctttaagtcgatattctcctgccccgcgatgtagttgagcctgcccacgatgtccttcggctggatgcggcggaatgaaaagcgctggcagcgcgacaaaatcgtcgcgggcaccttgtgcagctccgttgtcgccagaatgaacatcagatgctcgggcggctcctccaagatcttgagcagtgcgttgaacgcgggcgtcgaaagcatgtggacttcgtcgacgatatacacgcgtttttttacctgcgcgggcgaatagatggcctcgtcacgcagcgcgcgcacgctgtccacgccgttgttcgacgccgcgtccagctcgaccacgtcgagcagccgcccgctctcgatgccaaggcagctcgggcagcggttgcaggggttgccgttttccggatgctcgcagttgaccgcgcgcgcaagtattttggcgcaggtcgtcttgcccgtgccgcgcgtgccggtgaaaagataggcgtgcgacagccgcccctccgccacctggcgctgcaaggtctcggtgatgtgctcctgaccgaccacgtcggcaaatgttttgggacgccacttgcggtaaagcgcctgatacatccgcagccctcccttacaatagaaatactcccccgtatacagctgcggaaccggcgtccttgcggcacatggatggtcccgcttaatgctgctcggttccccgcctgacatggttcgcaggtacccattgcgcaagaccggttccgcagctgtatgcggaggagttgttgaacaaatggtattctactatatttcagaaaaaatatcaacagaaaaatgaaaaaggggcttcacaaattcaaaaaagtgtgttatgataatccgcgctgggagaccggcattgctatttgggcctgtagctcagttgggagagcgtacggttcgcatccgtaaggtcgtgggttcgaatcccttcaggtccaccaaaaaataagagacacgcgaaagcgtgtctcttattttttgggttcactcatttcattcgttcaccccaagggtaattaaaatgctcggtggaagtgaattccacctccgccaagattttgctgcgcaaaatgcttgcacggcgcaaatgcgccggttttggtatccgtaggacatttaacagcgcacaaacaaatgaattgcttgtgcaccaaggttttcgcacagcgaaaacacttgtgacgcgccacttggcacgcttttttgtttttccgcagacggcttaaaggttcacttgggccgtttttttgtttacagccccaggctcgcgacccatttctgcacgcttgccatgctctcgcggctgctcaggcgcttgccgggaagccactttgtccccttcgagcaagcggatctcaaaacgtcctcgccgcccatgccgctgccgccggaggtggcaaaggggatgacggtcttgcccgaaaagtcgtagctttcgaggaacgtctcgatgatgcgcggggcctgataccaccagatgggaaagcccacgaacaccgtgtcgtactgcgccatatccgcgaccttgcccgcgatggcggggcggctcttggggtccttcatctcgatggtgctgcggctctttttatccatccagtccaaatcggcagcggtgtaggccgtctcgggcgcgatctcgaagaggtcgccgccggtcacaccggcaagggtcttggcaagcttcgcggtctggccgctggcggaaaaataggcaactaaggttttcattctactgcactcctatctgttgaaatttctcactgtttcgcttccggaaggacctcgttgatgcaggaaagcgcgttgagcgtgcgcgggaagccgatatacggcaggcacaccgtgagcgccgcgagcaggacctccttcccgttgccgacggtggcgttcccgccgacatgggccttgacctgcccttcgcagccgccctgagaagcgaggatcgagaacgtcagcagctcgcgctcgtggatgggcaaaaactttctcgtataaaaatcgccgaagcagtaggcggagagatagtcctgaatgttcttctggttctccggcgcggcggcgcgcatcgcgtcgatgtggtcgccgaagatcgacttctgcgccgcgatgccatctaaaaggcggctctcctccgtcacggtctggccgctcgtgagcggcaggacgatgcccttttcggcgcacaccgcgggggaaccgcgcaaaaaaggagcattctttcgaatgccccttttttacataaggttggcaaaaatcgacgcgccgacgaccgtaagaaggcccgccacgacgatggacaggctgctcatcgcgccctcgacctcgccgatctcgagcgccttggccgtgcccagcgcgtgcgcggccgagccaatgctcacgcccttggcgatggggtcggtgatgcggaaaagcctgcacaccgaaactgcgatcacgttgccgaaaatgccggtgatgatgatcatggcgaccgtcagcgtcacgtagccgccgagctcttcggaaacgcccatgccgatggccgtcgtgatggacttaggcagaagcgtcacgtattcctcgtgtgtaagatgaaagagcctgctcatcacaaacacgctgcaaagcgtcgtgatgacgccggagagaataccggcgaagagggccttccagttgctcttcagaagcgatagcttttcataaagcggcacggcgaggcacacggtcgcgggcgtgagcaggtagctcaaatactgcgcgccctcgtagaacgtgtcgtagctgatgtgcgccgtcaaaagcaccgcaatggtcagcaccaccgagatgagcagcgggttgaagagtgcgaacttgaactttttttgcagcagcacgccgatgccgtaggcagcaagactgacagagacaccgaaaaagacggactgttcaaaaaatgtcatttcttctccgcccccttcttgccctttttgagtaccgcctgcgtcacaaggccggacacggccataacgacgatcgttgtcaccgcggcaatgacgagataggcgacaagattcgcctgaatgacatcccacgaagccatcagccccacggcgggcggaatgaacatgatgggcatgatctcaatgagaaagcaggccgtgtcgtgcacatcactgagcttgatgatgccgagcatcaggcagagaaacatcagcacaaggccgtagatgctcgccggaacgggcagaggcagaaaataattcagcagctccccaacaagcgagacgatgaggatgatgccgaactccttgacatatttcatgattttccctctctttgtgtgttaattttcattgtacggcgcgcactttcccctgtcaatcgacgaacgggcgggattccgccccgctgcgcggctttttcttaacaaggtgtataaaggcggcgcaaacgccgagctttcgccgcccgtgtgcaaaatcccatcttctgcaaaaaatcgtcgtccgctttgcacagaacagcccgcgcggatttagtcgaagcgccgaacttgcagttttttctccaaaaggcgagaaaatgcgcgctttttttacgtctaatgagataaaagccgatgcttcgccgccgctctctgccggggcggcgaagcgccgagtggaaaattcatacagggagaataacaccatgcagatatccgcacagtcgcgcaaaagacttttgttcgccgcgctctgcctcgcaattctcgtccctcttttcttcaccctcgaaatccgcgcgcagctgccgctcctcggtttcgagggcggctcgcccctgatcgactgggtacatcagaatacggctggcagcggtttcttgcggaaagtgaccggggacgccaccttttacagccttgtgctccttgcgaaggactctcgcctcggggcgctgctgtttttccagagcatcgtctgtgcctcgatcgcgctcgttctgctctggctgacgctgtattgcaaaaagagctatctcacaccgtttacgatcgcctatacgattttgtccgcgctcattttcttagccaccatgggcgactacgccatcaattcgcaggcggaggaatactgcgtcctgatgctctggggctcttatctgcgggaggggcgcggcctcggctcggtactcgtctatctgactgtcgtaggctgctattttgtcagcctcgcgcgcagccgcaaggcggcgtgagacgttccccgacttttccacagcaaagaaaaacggcgcggtctcccgcgccgttttttgcttttccgttttcacatcagcgtcatatagctgacgccgtcgagcgcttcaagcgcctggatctcctcgtccagcgtcgttttgccgttcacccagagggtgaacgtgccgcacacggggccgccgctcttctcctgcgtctcgctgaagaggttcaggtcccaaatgtagtgtccgtggccctttacctggcggatgatctggccgaccgtgctctttttctccatctcgaaatacacagtggagacgcgctgcgtcttgcggatgcgaaggtccacgcgccgcagcacttgcatcgcaaggaagatgaacgcatagcagatgatgccgcccgcgtaaaaacccgcgccgaacgccgtgccgatgatggcgaccgcccacaggcccgccgcggtcgtcaggccgcgcacctcctgattgcgcgtcactaagatcgtgcccgcgccgagaaagcccagccccgtgatgaccgaggccgacatgcgcacaaggtccgtctcgccgatgccggcaacaaagatattcgtcatcatcacgagcgccgaagcatcgctcacgatgatatacgtccgaaagcccgccgcctgattgtgccgctcgcgctcaaagccgagcgtgcccgcgcagaacgtggagagcaggatgcgcaccacgatcgagagcaccgtgatatctgcgagttgctgagagatcgctgccataggatctattcctcactttttgcaaaaaactggaaatacccgcacagcaaactatgcctgccgcgcaggaaagatacctttccgccgcagcctcagtcgctcgcctttttgagctcgacgtttttctcgtaggccacggtcacggcgtctaacaccgccgcgcgcatgccgcgctcttcgagcgtgcgcacgccctggatcgtcgagcccgcgggtgagcaaacgctgtccttgagcacgccggggtgccggcccgtctcgagcaccatcttggccgtgccgagcatcatctgcgcggcatactggatcgccgacgcgcgcggcaggccgcacgcgacgccgccgtcggccatcgactctaagaagatcgcggcaaaggccgggccgcagcccgcgaccgccgagcccgcggcatgcagctcctccgccagcgggaagagcttgcccgcgggcgccatgtagcgcaaaaacgcctcctgctgcgccttgccgcagttgccgctgcacgcatagaagatcacgccctcgcccacggcggcgggcatgttcggcatgatgcggatggcgggatagtccccgcccgcaagctcctgaatgcgcgcgatgtccagtcccgtgaccatgctgatgagcaccggcgcgctcttgcgctccttgagcgccggggcgatgcccttgagcacgtccacgatcatctgcggcttcacgccgaggaagatgtggtccgcctcgcgcgcgatgatctcgttactgctcacaacggccccgatgcgctccgcgagcgtctccgcctttgccttcgtgcggttggcgagcagcacctccacctcgccgcttctggccgccgcgctcgccagcgcgccgcccatatttcctgtgccgataaagccgatcttcatcatctgccgtgtcctttctacacccatcaggagcccaagcgcagccctgtaccgcgcaccgcccctgtttttattatcagtaaaggatatatcaaccctcgccgccttgtcaagcaccgcgcccgtcaatcacccgttccgcgaaaattttatgtaatatccattgcactgagtaccgttctttggtatattaaataatccgtgcgtatccatttgcaggcacctaaagcatccaatttttaggttttgaatgatcctgcgtgtccgcttttaaaggatgtgccgacaagaagtgaaaagcccgcaaatccaggctatttcgcccaaaagcagacttgaaaagtgatcaattctttcataacaattagacaggctaagtctgttctttttttctgttctgcctcgccatggcggtggagttgctcccgaacgtggcctttgctgccgctgcgacacgcagcggcacgaaggatgacccttatatgcaaagacccgttccaatccctaccgcatttcctatgaggatgtatgtaaagaggtaatgggtgcaaagcagaaagcgcagctgcggcgaatggtggacttcaagttcacccgtcatccgtccctcaatttgccggagcagcggctgacagccattgaaaagcagct

SEQ ID NO: 10121 - DNA, 21460 bp, Unknown
  gut microbiota DNA sequence
gggggaatctaaaggggggacagcgtccccctctttaagttttcttagatctttgcggtgttcatcttgacgccggggcccatggtggaggcggcgacgcaggacttgatatactggcccttggaagcggcgggcttggccttgatgatagcacccatgagagcgttgaagttctcagcgagcttctcggggccgaaggaaaccttaccgatggggcagtggatgatgttggtcttgtcgagacgatactcgaccttaccggccttggactcctgaacagccttggcgacgtcgggagtgacggtaccggccttcggggacggcatcaggcccttaggaccgagcaccttaccgagacggccgacaacacccatcatgtcaggggaagcgacgacgacgtcgaagtcgaaccagttttccttctggatcttctcgacgaggtccatctcgccgacatagtcagcgccggcagccttggcagcctcagccttgtcgcccttggcgaagacgagaacgcggacgttcttaccggtgccgttggggaggacgatggcgccgcggacctgctggtcagcgtgacgggagtcgacgcccagcttgacgtgcagctcgacggtctcgtcgaactttgcggaagcggtcttgcagatcaggccgaagccctctgcggcgtcatactgagtgttcttttcgatctgctttgcagcatcctgatactttttacctctaaacattgttcacaccctccttattcttcgacgacaacgcccatggagcgtgcggtaccggcgatcatgctcatcgcggactcgagagtgctcgcgttgaggtcacgcatcttcatctcagcgatcttctggacagaggccttggaaatggtagcgaccttggtcttgttggggacgccggagccagactcgatgttgcattccttcttgatgaggacggcagcgggaggagtcttggtgacgaaggagaaggaacggtcggcatacaccgtgatgacaacggggatgatgaggcccatgtcgttcttggtgcgctcgttgaattccttggtgaacgcagcgatgttgacgccgtgctgaccgagcgcggggccaacggggggtgcgggagttgctttgcctgcagggatctgcagcttaacgtaaccggtgatcttctgtgccatgagaggcacctccttaatattgaatgtggtaacgaccggcgattccggccgcccttggcgagactgaacgtctctcccacgtttgccgcatacgcggctcatcgcttttagcggtgattacggttctacgacctcgacctgatcgagctccagctcgaccggcgtttcgcgtccgaacatggacacgaccacgcacaccttgttcttctctgcgtcgatctcttcgaccgtgccgaggaaggacgaaagcgggccgtcggtgatcttgacctgatcgccgacattgtagcgcacgacgatctctcgccgttccatgccgagcgccaagacttcctcttccgtcagaggaatgggttcattgttcgccgtgccgacaaagccggtcacaccgcgaatgttgcggatcagatgccaggtgtcgtccgtcataatcatcttgacgagcacgtagcccgggaagaccttgcgttcgacttccttcatatcgcccgagtcggtcacttccgtgacggtctccagcgggatctggatgtcgaggatcatgtcctccagatgacggttggcgacgaacttctcgatggccgtcttgactgcgttttcatagccggagtaagtatgcgcgacataccacttagcattatcagccatgactgctctcctgtcagcccgcgagaccgatcagcaggtgcactgcggaaacggccacgtagtcgaagatccagatgcaggcgccgacgacgagggagcacagcagcacagtgccggtgttcttcgcagtggtggatgcggtgggccatacgacctttttcagttcgcttctcatttcacggaaccacttgctgcggtcctttttcttcttttcttctgccatgtttcaacagcctttcctaattacttggtttcggtgtggacggtgtgcttcttgcagaaggggcagtacttgttcagctcaagcttgtccggggtgttcttcttgttcttcatcgtgttgtagtttctctgcttgcactcgttgcatctgagcgtgatcttaatgcgcatctaacggcacctccttatttactcagctccgtttgccaaaagcggcatgaagctggcgattgcctccctgctctcaaatttgaggggtgcttttcccttgcatgccgagaagcaaaagcgcgcaaaaagaaagccctctttcacaggtaagtaagatgataccacatgtcatgtccagccgtcaagcactttttgcacgtttttgcagaaaatcgcgcagattttgcgctctttcccctgttttttctctcccgctgcctctcttgacgcgtttttttccgtttccgcacgccacttccctgccccgcgcttgctttttgggtgaaaatcctgtatgctggcagtcaaaagaaacgctcaggaggcaattttatgaagatcatggccatcgactacggcgacgcgcacaccggcgtcgcgatctccgaccgcacgctgacgctcaccggattttcgaccgttatcaccgcgtaccggcccgaagcggtcatcgaaaagctgctgccgctcatctccgagcacgaggtctcagagctcgtgctcggccacccactcaacatggacggcacgcgcggcccccgcgcagaaaaggccgagggctttgccgagatgctgcgcgaggccacgtcgctccccgtcacgctctgggatgagcgccgcacgaccgtcgacgcgcacaatattctgttgaataatggcaagcgcgccaaggagcgcaagaaaaccgtcgacgccgtcgcggcgagcctgatgcttgaaggttacttaaccttcaaaaaacgtcaagggtaacatatcacagcgcggcagcgctgtactttgttcccctgcgccgcgcagggaagcgagtcaaaggggccattctctttcgcaaaagagaatggcccctttggaaccccaagagaaaggcttttgattggcagtctcgggcttgaatgacttttatgcctccggaatgcaactgcctgcgcgcggcgttgccgcgttagcattgctatacgatttgccgctgcttctatcatccgctgccgctctgctgatcttgtaggactacagcctaatttccgtctaccgccagtctcatcaatgcggcgagcgcagcaatgccgcattcggcaggcagtctgccgccgtgctaccgtcactcgcgcctcacgacagtaaggcgcggttgcaagacgtaacgaaacgtagggattcatggcgaagccatgtacaccgcacttacactgcgcagcgcgtgcagttattcaagctgcagactgccaatgtcgggggtcgaggggccctcccctcgcgttctcttgggggtttaagggggccattctctcacgtgagagaatggccccctttgccgcgtccccacacggtgtggggataaatcccaaaaagtatcactttttgaacttcttaatcgtatcagcaatgatattctgcttcaaaatcatgctgaccagcacgtaaataacgcaccccacaacgcccgtcaggccgcacttgacgacgagcatcagcttgctgtcatccgccgcgacaagaagcgaacgcccgccgtagaggacgaccgccatcgctgccgtggcggcaaggcccttgaggagcggcaccaggcgcacgatcttcgtcccgtggaagagctggatcgtcatcgcgatggcaccgatcgtcagcgcaagcgacgttgccagcgcgacgccggtatcggtgtagaacaagcggttcaaaatgagattcagcaccagcacgccgaggttgatgagcagcggcaccagcgtctttttcatcgcgtagtaggccttgttcaaaaggtcgagcacggcgaaggcgctcatgccgagcgcgtagcgggcgaagatgctgcccgtcatcttggtcgactcagcggtgaagctgccgctttcaaagatgacgcggatgatatccgtgccgaacgcgcacatcatcgcgcagactggcaggatgaaaagcagcgtgttttccgtcacgttccagatgtagccgaggtaccccttcgagtcctccttcgtaaactcgcggttaaagcgcgggaacatgaccgcgctgatgctgtagagcacgctggtcgtaagcggggtgaagagcttgtcggcgtagtagaacgcgctgacggcgctgtcgttgagcgccgtggcggtcgccgtgtcgatgagatagcagaacaggaagatcgatgtcgtcagcaccgtgacgagcgcggtcttgaagtacgtgccgacatagtccgccttgcggtcgagcatcggccggtagacataatgttccttcttcgcatacgggatgctcatggcaagctgcaagagccacgcgcacgaactcgcgatgacgacgcccttgatgccccactttgcgcccagcgtcacaaggaagatcgcaaggaatgcgttgtacgggatgctcatgctgccctgcaattcatagtggtcggtcgcctggaagatggcgacgttcagatacgccgccgccacgaccggcagcgcgcaggccatgatgcggatatagctcgcaaggcgcggcagctcggctgcgtcaaggtcccagatcgtgccgacgagcggcgtcgaggcaaagatctgccacaaaacgaccgccgcgagcgagccgagcagcgtgatggtcaacaggttgttggccgctttctcgccgcgcttgcggtcggcagcaaattccttcgtcaaaatcggcaccgccgcgatgcacagcgcgtagcacatcgtcgtgaaaagatagagcgtcgagttatacgacgcggtgtagagatccgcgtcgatgccggtgccgaagatattggcctgcatcatttcgcgcaccacgccgaggagcttggcaaacagcgtcagcagaaagacgaagctgatcgcgcccgccgtgcggacgcccgatttatccttcttttccgtattgttttgagggtcttgcatggtatgtttcctcgatttctccatgatcgcgcagatcattttctcgttcgtgtcgagcttgcgcgaaagcttggccatatgcgcttcgacgcactgcacctgctccttgcccgtttcgagcacacgcccggcctcgggcaggaagagctccgccgtgaagttctccttcgtgctcagcttgtcgagccccacggagtttaaaaacgccgtgcacttggggtcatacgaaatgccgatgagcggcacgcccatgatggcggcatagatgagcgaatgcaggcgcacaccgacgagcaggtccatgttgccgatgatggagagcatatcctcggagaggtacttttcattcaggcacaccgccgtgtcatcgggcagctgcgccgcgatatggcggcagacctcgccgtcctcttcatagtggaacgggatgagcacggactgcgcgttgtacttgtccttcatcatctggatggagcgcaaaagctctttgacaaagcggctgtctgtgtcccgctcacggatggcccagccgacagttagacggccatccagcgagacacctgcctttcgcaggatctccgcgccgacatcgccatcgggctttttcatgcggatgacggggtccgccgtgatgacgaccttgtcgcgcgcgatgccgatttcctccaaaagcgccgcagaccgctcgtcgcgcacgacgataccgtccgcccgcttgagcgccgccgccgcggcgcggcggttgccggggcggtcgatggggccgatgccctgggaatagatgaagacctttttatggaagaattccgcgcagcggatgatggagaggtaatagtgtaagctcttgctgctcgtcacatcctgcaaaaggctgccgccgccggagatcagcatgtcgcactttttcaccgcgcgcaaaatcgccatcggcgacatgcggtccaccgcctcgacgccgtatttttcgcgcgtggaggcgggattgtgcgagagcaccgtgagcgagcagtcgggaatgtgctcgcgcagcgacgagacgagcgtgcgcaggatggactcgtcgccgatgttgtcgaagccgtaatagcccgagatcagaatgttaaccattcgtcaccccgcagatcctgcgcacaaggcggtaaatgagctccgccacaatgaccacggctgtgccgatgagaagtccgaagaggatgccccagccggtgcgcagcaggctcagcaaaaacggcgtgcggatgtgcaggaacgtgttgaccacgctgacaaggccgatggtcatgcccgtgccgaagatcatcggcaggaacttcattctgcggcgcagcgaccagatgaaaagcatcagcatcggccagccgacgatcatttccttcgtgcgcgggcgggcaatgagcgcattttccaggaagttgcggaacgcaagctcccttgccgacgtcgtggtcgagttgccggtgcggtacatatagtaggcgaacaccagcagcatgaacaccgccgccaccgcgatgacgacgatcgcaaggaaccagccgagtttcatcggcgtctgcatcagctcaccgaaataggcgttgaatcgcttgacgcggttcttctccccgcgctgtcccgcgtgggcgaggatggcctcgcgcgcgccggtctcctcataggcgtagaccagaagataggcgagcatgaagagcgcgatggggataagctgcatgagcttgacgccgcggtacaggtcgatctcgagaatatacgagagctgcgagagcgcagacgatgcgagcagcgacccgcagaatgccgtcagaatggtcgcgatggctgtgccaagcgtaaagccaagcagcttgccgaacttgatctgcggctcgctgcgtctcttttcgagcagtacgcggcacagaccgacagcggcaatcgacggcatcacgataccgccggacatcgaaaggatcaggcggaacatcgagggcttcagcaccgcgaggccggcaagaccgagcgcgccgacggcaaacaggatcgtgcgccagcgcttgccgataaagaagaatagatcaagcaggatcacgatgagcgccgccgtgccgatgccctgcagcaccttgagcgccatggacggcgctttcagctccatcgcgggcacggtcgcgtgcgtgtagccgaggggctccaagcgcgcgtcgaggtccgtgagcatctgctcatagtcggcagggtcggtgatgtagacccacttcttctcgtcagcgtcccagctgacatcggtatccggctctaagatcattttgaggaagatgatcttgcaattacgctcggcgatggctctaaagaacgtgttcgtgatctcctcggggccttcgtagccgcagtactgatagcggttctggatgtaggcccactcattgaacacgcgcacgccgcggtagcccgtgttgtcgagcagctcttcaatgccgggccagacaaggttctggctctggtcgttctgctccatcatggcgacgctcgcgccgctctcgttgagatactgcgtcagaagctccaggctctcgtcatcctcatagccgacgagctcgtcgccgttgttcataaagtacggcgcgttgaagtgcttgagcacttcgatataggcctcggcaaatttcgtgccgttcatgttcttttccgtcacagagcgcgggatgatctggtaaccgtggcgctcaaacagctccaccgtgtccggccagatgccgaggcgcaggtcgagcagcttttcgcccttcatgccgtttttctgctgctggatgaagatgaagccgtgctcgccctccagatacgtcttggcctcaaagtcctcaaaacgggcctcgaaagcgttcaggatccactcatagctcgcggcggtctccgtccagatgatcgcgtcgctcacatcggtgctctcacgcagccattgcgcgacctcggcggggtactgatcttcccatccgtagctctccgccgcctttttcacggtcatcgcgtggacggggatggccgcgttatcgtgcaggttgagggcgctcgcctcgctgagcgcgaccttgtcgacgccgagcgacttgaagaggtcgagccactcgtcctctgactgcgaggattggcgcgccatcgagcgcatgctgttgtagtcgaggacgatgtcgtaatacttgttgctcttctccacctgcacacgcgaaataagcggcacgagcgaagcgagcaggccgatcagcgcaatgacggccagaacgcggtttcttttcagtaagcttttcatttgtgttctccttgtgcattctccgcactgtttttctcgttaaagagaggcaagctccaccggtgtgccgaggaccttggaaaaggtgtagaccttggcgacatcttcgatgtattccgcgcgcagatatgcctgcgcaaggtccttccccacggcgagcacgccgtgattggcgagcgtgcagccgccgcggtccttgagcgcggggatggcgttcgtgccgacggcctcagtccccggcgcggcgtagtccgcgcagcggatgtcgccgcccaaaaagatgcacgattcgatcaacaccgcggggatgctcttccgcacgacggcaaacgccgtggcatagggtgagtgcgtgtggaagacggcgttcgtctcgccatacgccttgtagaccgccgcgtgcatgcgccactcgctcgagggctgcaacttcccctccagcaccgtgccgtcgagcttcatgcgcacgatgtcctgcgcgcgcagcatgtcatagcgcacggacgtcggcgtgatgagcatttcatcgggcgcgacgcggcagctcatgttgccgctcgtgccggaaaacaggccctcacggaacgcttcaagcgatttgtccacgatctcctgacgaagaatgtccagattttgttccattcagatcaccagattgtccctgccgatgctgccgtccgtaaaatagcggtgcagatcgtagggagagtagataccaaggtcggtcacaacgcccgagacgagatgcggcggcgtgatatcgaaggcgggatagtagcccttcacaccctccatcgccgtgcgcacgcccatggcttggagcgtgaagttcgggtcgcgcatttcgatgtgaatgctgtccaccgtctcgtgtccctgatcgggcgcgccggtgacaaagtacgggatgcccatgtacttggcgacgatggcgttctggaacgtgccgaccttattgacgacatggccgtcacagcagatggcgtccgccgcggtggtgaaaacgtcgaccttttcgttctgcatgacgaacgccggcatattgtcggagatgaccgtcacgtcaaagcccatgtcgtggcagacggacgccgtcaggcgcgcgccctgaaaatacgggcgcgtttcggggcagaacagccggatgtttttgccgcggctgcggcactcacgaagcatcgtgccgacgatggtctcggcgaagcagtgcgtcatcaccgttccgttgtcggggaacatatcgactaagtacgagccgatcttcgccattctgttatagcgcacgttgttgagctcgatggtcttattcttgatggcctcggccacattctcccccgctgaaagcgcgcgctcggcctctttcaggcagacgtcgcacagaagcgtcatgcgcttttgcgtcgtggggcgcgcgtgggaaatggtgtaagccgctttcttgaggtattccatctgctcgtccgccgatttgccgcggcattcccacgccgcgagcgccatgcccatcggcgccgccgtgtaggggcccgcgctctgcgtcaccatgtcggtgatggcccgcgcgacttcctgatgtgtgcggcagatgacaaattcgacctttgcggggtaaatgcgccggtctaagatgcgcacctcgccgtcttcaaaccacgcgacattctcgtagcgcagcaaaaaggcgaggtctttgtccgctctctccatgtttcttctctctcactttctataaaggcgctcgacggcacgctccatgtcggcgcgcaccttgttctcgtccagcgtcttgaattcaccgttttcgtacaggatcttgccatccaccatcgtcatgcacacgtcgcccgcctgcgccgagcaggtcaggagcgcgggcgtgtcgaaattgggatagaggtggggcttgctcagatcaatggcaatgatgtcagcctttttgccgacagccagcacgccggtgtcgtcgcggccctgcaattttgcgccgttgaccgtcgccatatcgagcacctcctgcgtggagatcagcgtcgggtcgttgtgatagccgtcgtgcatgatctcagcgaggtgcatctcctcgaacatatttaaattgttgttgctggccgtgccgtcggtgccgagcgtcacgttgatgcccttgtccatcatctggcggatgggggcaaagccgctgccgagctttaagttcgacgtcgggttgtggatgacgctgacgccgtgggccttcagaatgtccatgtcgcgctccgtcaccgcgacgcagtgcgccgccgccgtgggcgaatcgaacgtgccgagcgattcgaaccactccgtcggcgttttgccgtagcgctcgatgcactcgcgctgctcgcgcgcggtctcggcgaggtggatgtgcatgcgcccgcccttttcgcggcagaggtcactgtacgccttgacgatatggctcttgcaggtatactccgcgtggatggaaaagtcaatgtgaatgcgcccgtccgccgcgccgtggtacttttcaaaaagcgcgagcgattcggggatctgcgtgttctgctccacggtctggttttcgtcaaagcactgcacacagcggttcaggttcgccttgatccccgcctcttcgaccgcccagacggtctcctcggggaaaaagtacatatcggaaaagctcgtcgtgccgcccgcgatcatctcgatcagggcaaagcggctcgctgcggcgatatcctcgcgcacgagcttgtcctcgatcgggaaaatggccttgaagagccagtcctgcaaaggcagtccgctgccgatgccgcgcatcagcgtcatggcgatatggctgtggcagttgatgagtcccggggcaaggagcctgccgctcatgtccttttcaaggtcataggccttttcgggtttttcctcaccgatatagtcgatcttcgcctcatcgacgccgagataggcgccgtgcagcgtttcatatccgttttccttgcgcagcagaatgtccgcgcctttcaagagtgtgctcacaaaagagcctcctatctgcattttatctcattatgcagtctatcacgcgtgctttcagattgcaacgggcaaaaggattaagtttttccatattgctgaccatgtcgacaaaaatttctcattttgcaagctcaactacttaaaatttcactattgaatttcctaatatgcctgattataattagcgcatactttttttaaggagtgaaaccggtatgagcaaagtctatatcccgcaggactaccacaccccgctgtctgtctatgaaatgcagcgcgccatcgaattcatcaagagcaattttcaggtcaatctgagcaatgccctcaatctccgccgggtttctgctccgctgttcgtggatgaaaattctggtctgaacgacaacctcaacggcgtcgagcgtcccgtctcctttgacattcccgacgtcggcaccaatgcccaggtcgttcattcgctggccaagtggaagcgtcttgcgctcaagcgctacgacttcaaggtcggcaagggcctgttcaccgacatgaatgccatccgccgcgacgaagaggtcgacaacctccactccatctatgtggaccagtgggactgggaaaaggtcatctccgccgaggatcgcaacgtcgcttatctcaagcgcaccgtgcgcgatatcgtctccgccgtcagcgagacgagcagcgcgctgaatgtcgctttcccctccctgcacaccaagctccccagtgaggtcttcttcatcaccacgcaggagctcgaagacctctatcccgatctgacacccaagcagcgcgaggatgagatctgcaagaagaagggcgtcgtcttcctgatgcagatcggcaagatcttaaagtccggcatcaagcacgacggccgcgcccccgactatgacgattgggagctcaacggcgatatcctctactggaacgaagtgctcggccatgcgttcgagatctcttccatgggtatccgcgtcgaccccaagtccctcgactcccagctgacgatcgccggctgcgacgaccgccgcgcgctccccttccacaagatgctgctgaatggcgagttgcccctgaccatgggcggcggcatcggccagagccgcctgtgcatgctgctcatcggcaccgcgcacatcggcgaggtacaggtctccctgtgggacgaagccacgcgcaagacctgcgaggatgcgggcgtcatgctgctgtaaagcatattttaatttgtcaccattcttttttctctttttctcaatgcagcacaaaagccggcaggttctcctccccgccggcttttgtgcgctcttctgccgctttccatccgctatccatcggcgcaaagcaaaacagcagcacaaagagggcgcttcccaagctgggaagcgccctctttcttatttttcacagcgcaggcggtaaacgtcacagctgtccgcgcggccctcatacgaaaagccgtgcctgcgcgcgatgtgcgcgctcgccgtctgttcggggacgcattcgatcacggcattcttcccctcccgccgcgcaagcgcggtcagaaggtccgtcatttcgtccgcatagcccttgtgccaaaaggcaggcttgagcacccagccgagctcccggctgtactcgtcatagtcgtggtagatggcgtagccgagaaattctcccgccatattctccgcggcatagatgagcggcggctcggaaagtcccgcctgctccaaaaagcgctcggcctgcgcgcggttaaacggcggctccagccagcgcatcaccgcttcatccgagagcagggcgtataattcgtccgcgtcctcccgccgcatcatccgcaggcggacgcgcgccccctccgtcaggatcatcccctgtggtgcttgccgcggaacgtcatctccggatttttgacgctcacgaccgtgttgggcgcgaccgacgaggtcagaaacgcgttgccaccgacgacgacattgtcgccgatctccgtcgcaccgccgagcagtgtggagtttgcgtagatgacgacgttgttgccgaccttcgggtggcggcgcacattcgggttcgtcgccatacccgcgggcgagagcgcgccgagcgtcgcgccctgatagagcttgacgttgtcgccgatgatcgtcgtctcgccgacgacgacgcccgtaccgtggtcgatgaagaagtattcgccgatcttcgcgccggggttgatgtcgataccggtctgcgagtgcgcgtattccgacatcatgcgcgggatcatcgcgaccttcttctcatacagctcgtgtgcgatgcggtagatgaagatggcaaacatgccggggtacgagagcaggacctcctccttgctgtaagccgcaggatcgccctcaaagttcgccgacaggtccttgagcagcaactcctgaatggcagggatgcgctcgatgaatgccgtgctgatcgcataggccacttcgcagttctcgtcgcactccggcatcgtcagcgtgatctggcacgtcagcttttcgtggatgtgctccatcaaaagcgcgctgtattgctccggcggcagctttaagaggtcgcggtcgccgtagtaaacagggaaaatgagcttctgacagtcgcggatgatctcgatgaccgcattacggttgggcatgcgcagcgcatcgccgtacatggggatctgagagctcttgtagttcgccgccatgcggtcagccgccgcatggatgacggtgttcttttttgctttgtccatagctaatcctcgcaatctatcagaaacagtcatattacaattagaaaatgattatagtatctccccgcgtcaaaatcaagtatttcctctgcaaacgcctcagaaatatacacctccgcgcgggaattcagccgaaaaacgtgtccattcatttttttcatttgcatcccgcgcacttttgctttatgctgtttttatagggacgcttcgcattagatacgtcccaagcagtaaactatccaccgcaggaggatcaaaatatgaaagcaacggtttatttttccgagcagatcacgccggaaaaggtcgtggagctctacaaggccgtgggtctcgagctgcccggtaaggtcgccgtcaaggttcactccggagaaccgggcaaccagaactttctgacgcccgagttctggcagccgatggtcgaggccgtacacggcaccatcgttgagtgcaacaccgcctatcccggcgagcgcaacacgaccgacgcccaccgccgcacgatgatcaaacacggctggagcaagctcttcgatgtcgacattctcgatgccgagggtcccgatcttgagttccccatcccaaacggcaagcgcatccagaagaatctggtcggcaagaatatcaaaaattatgattccatgctcgttctttcccacttcaagggccacccgatgggcggcttcggcggcgcgctcaaacagctctccatcggatgcgcgtccagcgcaggcaaggcgaacatccacggcgcgggcaagcccgaagcgatgtggacgaccgagcagaacgccttccttgagtccatggccgacgcggcggagtccgtcgtcaagcttttcgacggcaagatcgtctacatcaacgtgatgaagaacatgtccgtcgactgtgactgctgcgccgtggcggaggacccgtgtatgaaagatatcggcattctcgcctcccttgaccccatcgccatcgaccaggcgtgcctcgacctcgtctacgcgtccgacgatccgggccgcgaccacctcgttgagcgcatcgagagcctcaacggcgtccacaccgtggaggccgccgccgagctcggcttcggttcgagagagtatgagctgatcgagctctaagaaaaatcgcaacgaaaaaggcgatggccgtacggccatcgccttttctttcgcttctttacttgatgaaccagatgtccatatcgacgttgcccttgatgccgtccacgctgcccttggatgaatactgccacatggcaaaatcgtagtagaacgagggcgcgtccacatcgtagcgcgcgtaccacagcgggtaatccatgacctcgctgaggtcatacttgacataacccgcgtagtcggtgatgtagatcatcgggtcgtagcccgcgtccttgatgatcttgcagaaggcgttcgccgcagcgcagagcacgccggtctcgatgccgtaggtgcgcgcctccctcttgccgatgacctcccagtcgaagacgacggggccggtaatgttgtgtccgcgcagcttgtcgagcacgtgataggcctcctcctgcgcctctgccacgctcacagcctgtgagaagaagtaagcgcccacctgaaggcccgctctcgccgcgccgtcggcatactcgtcaaacttcgtgtcgtcatagatcgcgcccacagtgtagccgcggccgcccacgcgcgcgatgacaaagtccacatcagtgcgcgcgaccgcgttccagtccacatcgccctgatactgcgacacgtcgataccgacgcgcgtgcgcacgctgggatcgttgtaggtcatgatgctgccgttcttgacgaacgcagactgattataggtgttcgtcggcacaccctcgagcacatcaagcgtgtagtccttgtagtagatcttctgcttctggtcgagcgagctgagctgatagatgcggtaaacgatcgtcgccacctccgcgcgcgtgatgctgctgttggggtagaaatacgtcaggtcgccgaccttcgtgccgatgaacacacccgcttcatagagcgccgtcacatagccgtcgttcacgtcggcaaagggagaggtcgtgttggatgcgccatagcccagcgccttggccgcaaagcgcgccacatcgaggcgactgatgccgttgtcaagctgatagtcgctgtaattctgcgcggcaaagcccatggaataggcgtaggtcgcgtagccgcttgcccagtgcgccgtgctgggcttctgctccttgtggccggtcgagagcagcacgagcttgagcatttcgcccgtgctcgtgggacggttgggggcaaacgtgccgtcgccgttgccgccgacgatgccctgctcgctcagctccatgacatagttatagaaccagtcggacttgttgacgtcggtataggtcttgccggtgtagctcgtcgccgtccactgcgccgtgacgaccgcgttgccgttcacgatgctgttttccgtgatggtcttgccgtcgctcgtctggaagccggcaaagccgtagccgagcttttccgctttggggaagctaccgtaggtcttgccgatctcgtagacggcaaagtccgtctcgtaggacgtaccgctttccatattgatgatgagatacgcaaactcgttctccgccgcgcgggtgctgtcatctaaataaatggcagcctcctgcaggcggcggtcggcaaggcccgcctgggcctgtccgccggaatggcaccattcgccgaacgcatgcgccacttccaggcgcgtcgcgtccttttcgccgcgggcgatcttgaccaagtcgctcgtgccgctcatccaaccggtgccgaaattgtagctgaagcagatcagcgcgtcgaactgcccctgcgtgggcgtgacgtcgtagcggccaaaaaagtcgttaagcttggcctcatacgcctcgaccttgctcatcagaagaagctccgcctcttcgcgcgtgatgccctcgggataatcctcggcaccgcactccgtgccgtagccgatgtaccacttgccgccggaggaatacttctccgcgcggaagccctcttcctcctcgatctgcgcaatggccgcgtcgcccgcgcgcatcagccgattgctcgccatcgcggcgggcacgcagagctgcacagcaaggcacagcaccagaagcacggccagcggcgatctctttctcatgttctgcttcatctcgtttctctccttttgccggaatcgggcgaaaacgcccactctctaaaatgtctttttatgataccataggtttacataagaatcaaccaaaaagcgcaaaaaatgccgtcccgtgtcgaaccgggcggcattttcgttatagcagcgcgtcgaagagcgcgtccatattatcgtcggaatactcgacctccgcgctgtacaatcggcagagctcgatctgatcctccaccgtgaactcgccgtgcagcaaaaggtgcagcgcaccaagcgagaaaagcagccggacagacagcacggcgaacgccgccttgctgctcacgtccccgtcgtcgagcgccgtcggcacgtgacgatagagaaagtagacgagcagctgctcatactccgtctcgcgtcctttcatgtgcgcggcaaaatcgtcgagcggcaactcatctgcgtgctcgcgcagcgcttccaaaatgcccgtccacacctcgtccatacgctcgagcaagagataaaattctgcccactgcgcaggcgggacgtccggcacgtgtgcaccgcaggccgataaaatctgctctattcgctgattgatcggttcctcgcgcttctgtgcgatggcgaaaagatggtcgcgcagcgtgagcagcgccgtctcctcttcatcaagctcgccttcgcccgtcgtgacaagcattgttttctccggcctggtcagaatgagccgcgcggcctcctcgcagcagaggccaacgccgatctccgtgcgctccgaaaaaaagctgcggtagcgcgggtggtcggtgcagatctggcagagcataccctccccgccgtataaaatgagatcgcagaggtttttgccgttcaaaaacgggcagcgctcctgctcgccgaggagaaagtgcggcatctcgccgctgcggtcgatacatttatgcaggcgctcgcccatctcgccgccgatctgatcgtaggcggcgagagaatcctcgtccacgtcgatctcccagccgatgcagcagttgtgtcggcagcggtcggcgatgcaatggaaaagcggataatagtccggataagcgttctgcacggcggagtcctcctatagtcggtgctgcgcggtcataaatcgcgcgctgcttcattataaatctcgcaggcgcgcattgcaatgaattttctccttgccgccgtgaaagagatatgatatagtaaaatatatgcgggcatgatgaaattggcagacatgcgagatttaggttctcgtgccgcaaggcgttggggttcaagtccccatgcccgcaccaagcagcaaagcagcaccgttttttgaccgtcagaagtcaaaagaccgtgctgcttttttgtattctttacgccatcgctcccgccgcgcgcgaaagaagaaaaatcatcgttgaaccctcggggcaaatctgccataatagaagcgatacgaacacacaaaaaaggcagctttttactatgaaacatatttgcatcggcattctcgcccacgtcgactcgggaaaaacgaccctgtccgaggggcttttatacgcctccggcgcactgcggaagctcggccgcgtcgaccacggcgacgccttcctcgacaccgacgcgctcgagcgcgagcgcggcatcacgatcttttccaagcaggcaatgctgtttgcgggcgataaggagttcacgctgcttgacacgccgggccacgtcgatttctccgccgagatggagcgcacgctgtcggtgctcgactacgcagtgctcgtcatcagtggcagcgacggcgtgcagagccacacgcgaacgctctggcgcctgctcacgcgctacgaggtgccgacgtttcttttcatcaacaagatggacttggcgggcgcggacaaggacgcgcttctgcgccagctcacggcgacactgagcgcggaatgcgccgatttctccgcatcgcaggaaacgcgcgacgaagcgctcgccctctgcgacgaggcggcgctcgagcagcttttggagcgtggaaaaatcgacgacgctctgattgctgagatggtcaaaaaccgcaaggtcttcccctgctttttcggttcggcgctcaagctggacggcgtggaggactttctcaccgcgctcgcgtgcttcacgcgcgagccggtctatccgaaggaattcggcgcaaaggtcttcaagatctcgcgcgacgcacagggcgcgcggctcacgtggctcaaggtcacaggcggcgcgctgcgcgtgaaggcgcctctcacctatcgcgcgcagaatcaggactacaatgaaaaggccgatcagctgcggctttactccggcgtcaaattccgcgcgctcgaagaggcgggcgcgggcagcgtcgtcgccgtcacgggcctcagccacagctatgttggtctcggcctcggcgcggaggcgggggcgtccgccccgcttttgcagccggttttgacctatcagctcatcctgcccgacggtgcggacgcgcacagcgcgcttataaagctccgcgagcttgaagaagaggacccgatgctgcgcatcgtctgggacgagcgctacgggcagatccacgtgcagctcatgggcaaaattcagctcgaaattctgcgccgccgcatcctcgaccgcttcggcctcgacgtgaccttcggcgagggcagcatcgtctatcgcgagaccatcgccgcccccgtcctcggcatgggacatttcgagcccctgcgccactatgcggaagtacagcttctaatagagccgcttccgcgcggggcgggcatccagcttgcgtcaaacgtgccgacggacgcgctcgacctcaactggcagcggctgattttcacccatcttttagagcgcgagcacgcgggtgtgctgaccggctcaccgttgacggatgtgaagttcacacttgtcgcgggccgcgcgcatctgaagcacaccgagggcggcgacttccgtcaagcgacgtaccgtgccgtgcggcagggcttgatgcaggcggaaaatgtgctgctcgagccgtattacgacttccgtctcgaggtgcccgccgagtgcgtcggccgcgcgatgaccgacctccagaacatgggcggcaccgtcgaaccgccgcagaacgagggggaaaacgccgtactcacgggctatgcgccggtgcgcacgctgcgcgactactttgccgacgtcgcggcctacacccgcggccgcggacagctctcctgcgccgtgcgcggatatgaggcctgccaaaatcaggacgagatcgtcgcgtcccttggctacgacgccgagcgcgacacggataatcccgcgtcctccgtcttctgcgaccacggcggcagcatcacggtcccgtggaatgaagttcccgcgcatgttcactgcgacagcggcatccgccttggtgaagaggccgtcgaagaagcgcccgcgccgctcccccgacgcggcgtcggcgcaggcggcgcatatgccgaggacaaggaattgcaggacattttcgagcgcacatacggcaaggtcgagcgccgcgcgttcgaaccgagcaaaaagcccgcgcgcacctcgctcgccgatcactatgacgtcacgatccactcagaggacacggaatatctgctcgtcgacggctacaacatcatcttcgcgtgggacgagctccatcggctcgccgcgcaggatgtcgccgcggcgcgcagcgcgctgatcgacattctcgccaactatcagggctttcgcaagtgccgcgtcatcgtcgtgtttgacgcctataaggtcaagggcaaccccggcagtgtgcagacggtgcacggcgtcaaggtcgtctacacgaaagaggctgagactgccgacacctacatcgagcgcgcgacctacgagctgcgccgcgaacgccgcgtgcgcgtggcgacgtccgacggccccgagcaggtcatcatcctcggccacggggcgctgcgcgtctccgcccgcgcgttccatgccgaggtcgaagccgccgaggggcagatcag

SEQ ID NO: 10122 - DNA, 21212 bp, Unknown
  gut microbiota DNA sequence
gtgcgcggcggcaaagtctgcgacgctggcgcctgttttctgcccgtgagggcagaaaatgcggcggggacgcgatgggagatagtgcgtggatttagggtgcggagggcctgttcactgccggaggcagcgaatgcggcacgggagggattttgcctgtttgccgccggaggcggcaaatgcggcgggaaaaattaccgttagttgccgttcattgcttctgtggggacaaagtagttttctgaggcgatgatcgtgccgtcgttcagggtgaccatcatgcggtccatgtctttgtcgatgtcgatgcttttcacgtcgagctgtgaaaagttgcccgcgtagaaaaatgtgaggatcggatactcgttgtccccccagttgatcttggcttcgacgccgtctctgcacgagggctcgtagccgtccatggcaaaggtcccgacaaagctggtggaggaccacgcctttttgagcgtgccggaaatggtgatggaggagggcgcgtaagtcgtaccgttgtcctcgtagacccttgcgggaacggttttgtcaatagtttttcgcgtcccgcggatgccgagcaggacgatcgcgcagaggatggcgagcagaagaatgagggccgtttttctctttttgcggttcatcgagtgtgtctccttgtcctattaaattttgatgtgaaattgtacctcaaaaaagcgtgcaaacccatgcgagcgcggcggagagggggatgtagagcagaaagtgcgtaagatgcgcttttttgttgtacccgaacagctgcggggcggcgatgcccttgacctcggggtaaaaatgaggaaagaagttcgaatggcacagcagcacccagtcgaaaaagagaatgtcgtaggcctccatgacatagaggatcacgagataccgcgtgaaaaacgcgccgaaggtgaaaccgttccgaacgccgtcccacgcggcgaggactgccgcaccgagaaacagcagcatcgccaagatgccgaggcaccagccgaggatatgcgcgccgcggaagcgctcggcttttctctcaggaacggcggcgaagacctcacgcggcgcggaggagaagaatttcttctcctgaatgagcccgacgccggcgtacagtaggagaaaatacgccgccatgacgagaaacgatgcaagcagggtgatcttcatttctgttgatgcctcttttgctgtcgttttttgatgccttacagccggtagagcgcgggccgccggtcgtggaaaacggggacgcgggcgcggaggggcgcgatggaggaaaggtccaagtcggcggtgacgatctcctcttccacgccgccttgggctaagaccgcgcccagcgggtcgatgatgcgcgaaaaaccgccatacagcgtgccgtcgcgctcgccgcaggcgttgcacgagacgacaaagagctggttttcgatcgcgcgggcggcggtgagcgtttcccagtggtattggcgcgccgccgtccactgggcgggcaggaacatgacctgcgctccgcgcagcgccagcgtgcgccacagctcgggaaagcgcacctcgtagcagatgagaaggccgcagcgcacgctatccagcgtgaaggtgacgaggtggttcccgggagtgtagacctcgtgctcgcccatcggcgtgaagggatgggtcttgtcgtattcggcaatgcacgcgcccgcgcggtcgaagacgcaggcggtgttgtagatcttgccattgcggagattcgacacgcttcccgcgacgatgttgacgttcagctcgcgcgcgagcggggaaaagcgcgcgcggacggccttcgcgtcctcgtcgctcgccgcggcaaggccgcccgcgggcatgaagcccgtgttccatgtttcgggcaggacgacaacgtcggggccgttttccccgacagcgcggcgcacgagcgcctccgcgcggtcaaagttcgctttgctctccagcgagcgcatattcatctggatcacgctgaccttcatggtggtgtcctccaaaatcgttttgatacggtcattatacgaaaagaaagcatgcattgcaatgcacaacaaaaagaggacggcaaatgccgtcctcttttttgctgaaaaaagcctcgcagagttttacccacaaggggtatgcggcatccgtaaagcagcagagctgctaacggctgcccaagcgccgcgcacggcgcaaataaattgaaatcgttttttggaacgacatgtgcgtgccaaaaaacactttgcacggagcgaacgtgcgcgcctttggcgcgtgcgctgagcgcagtgaaattctgctcaaaaaactgactttgtcagttttttgaagtgcgcagcgctctgattgcattgagaaccgctaagaccatcacgccgacgtcggcgaagatgcccatccacatgttggcgataccgatggcgacgagcagcaggcacgtcagcttcacgccgagcgagaagacgatgttctcgtacacgatgcggatgcacttgcgcgagatctggatgcccttggcgatcttcatcggatcgtcgtccatcagcacgacgtccgctgcctcaatggcggcgtcggaacccatcgcgcccatcgcgatgccgatatccgcgcgggagagcacgggcgcgtcgttgatgccgtcgccgacgaaggcgaggcagtcatccttgcccttttcacccagcaggcgctcgaggcgcgcgaccttgtcgcccgggagcagctctgcgtgcacttcgtcgacgccgagctcctgcgccacgtgatcggcgaccttcttgatgtcgcccgtgagcatgacggtcttctgcacgcccgcgcgcttgagggccgcgatggcatcgcgcgcgtcgttcttgacgacgtcggagatcacgatatggccggcgtactcgccgtcgaccgccatgtggacgatcgtgccgacgctgtggcagtcctgccacttgacgccgagctcatccatgagcttgccgttgcccgcggccacgctgtggccgtccacggccgcgaccacaccgcggccgctgcgctcttcgatgtccgtcacgcgggagcggtcaagctccacgccgcaggccttttgcaagctcctgctgatggggtgcgaggatgcgcactcggcgagtgccgcgtattcaagcagcttgcggtcctccatcgggctgtggtgcacgcccgtgacctcgaacacgccctgcgtgagcgtgccggtcttgtcgaagacgacgatcttggttttcgacagagcctccaagtaattcgagcccttgatgagaatgccctcgtgtcctgcgccgccgaggcccgcgaagaagctgagcgggatgctgatgaccagcgcgcagggacacgaaatgacaaggaacgtgagcgcgcggtagacccacacaccccacgaggcggcattgcccatcaaaagattgatgaccgggggcaaaatggccagcgccagcgcgctgtagcacacggcgggagtgtagacgcgggcaaagcgggagatgaacgcttcggagcgggatttgtgcgagctggagttttccatcagctccaaaatcttggacaccgtagactcgccgaaggccttcgtggtcctgaccttcagaacacccgtcatgttgatgcagccgctgatgacctcgtcgccggtcatcacgtcgcgcgggaggctctcgcccgtcagcgccgcagtgttgagcgtggacgcgccctcgacgatctcgccgtcgataggaattttctcgcccggctggacggtgatgaccgtgccgacggccacgtcgtcggggtcgacctgctcgagcttgccgtcgcgctcaatgttcgcgtagtcgggacggatgtccatcagcgccgtgatgttgcggcgggacttgccgacggcgtagctctggaacagctcgccgatctggtagaagagcatgaccgccacggcctcggcatagtcgccgctcttttcatagatggcgagcgcgatggcgccgatcgtggcgaccgccatcaggaagttttcgtcgaacacctgatggttgcagatgcccttccatgccttgcgcagaatgtcgtagccgatggtgacataggcggcgaagtagagcgcggtggagacgagcatcggcatgggaatgaatttcgcggcgaggaacagcaccgccgcgatcaggatgcggtaaagcatctttttttgctttttcgtcataaagatgacctccttgaagggggagaatttgaattttgcctaagaaagcgccccggtgcgttcgtccggggcgtgagagggagaagatctcttacagatagatctcgcagtcgtcctcgaccttcttgcaattcttgaggacggccttcatcacggccttggggtcctgaccctcggcgaactcgacggtcatcttctgggtcatgaagttcacgacggcgtcggcaacgccctcggtcttcttggtggcttcttccataaggttggcgcagttggcgcagtcgacttcgatctgataggtctttttcatggtatgtttctccttttcggcacaaaatatttaacgattaagcgcttgtttaatcttgatgaccgtactataatgtccgcaaaggcaaaagtcaagggttgctcgcatgtctcttccgttcgggcgaaacaaacttccaaacgggatacggacgcgcccgcaggccccaaaaagaaaggcggaacaacgatgagcgaagtgcatttaccccaccagcacagcgacgagggcacgatgcgggagctgcaggaatcggtggagacgatcggcagcttccagaccgtggcggacgtgttcaagcagctctccgacagcagccgcgtgcgcattttctggctgctgtgccactgcgaggagtgcgtcatcgacctctccgcgctggtcggcatgagctcgcccgcggtgtcgcaccatttgaggcagctgcgtgagagcggacttctcgtctcgcgccgcgtggggaaggaggtctactaccgcgcgtcggacagcgagcaggcgcagctattgcaccgcatgatcgagcgcacgatggagatttcctgtcccgaggaggagagcaaggccgccaccggcgcgccgcacctgcccccgctcgacgccgaggtgtacgagggcggcggcacgagtgagcagatcgagaccatccgtgccgtgcacgactacctgacgcagcacctttcaagccgcgtgacgatcgacgagctgtcgcgcatgtttttgatgaacccctcgacgatgaaggcgctcttcaagtccgtctacggcagctcgctcgcctcgcacattcgcgagcaccgcatgcagcacgcggcaaagctgctgctcaagggcgacgagaacgtcgcgcaggtcgcgcgcgccgtcggctacgagagccagagcaagttttccaccgaattccacaaggccttcggcgtcctgccgacggagtaccggagatcgcagaaaaagtgaattataagaggtcgagcgtccctgcttcccacggtgtttcgcggaagccgacgcgccagtcgacgtggtcgaccgccgcaaagtgcagcgacgagcacgcggtgtggagcttcccctgcgccgcttcgcccacgacgatggcgaccggcccgtccgcgccgccgataatgccgaagcagaaggcgttctgcgcctcgggcgcaaaggaagcggtctcacgtttgacctggcgcgggcggtcactttcgacgcagtcctcgacgaagatcgagttttccggcggctcgggcgtgagcgtaaagctgatggctgtgaaatgcgtcggatagtcgaaccgcgggtcgagattcatccgctcgcgcggcagttcctgcggctcgacctcctgtacggcgagcgtatactctgtgccgcggtaggagaaggcaaacgtatcgcccgccttgtccgcgcggaagcgcgccccggggacgcgcacctcgtccgccgtcatcgtgacggcgagcgacttgagcttcggcgcgcgcttcgtgacgaacgggaatgccgcgcggcggatgctccagccatacgcgcggtcaaggccgtagtgcgccatggcgggctctgcgtcggcgcagaagccgggctgctccggcaggaaaacgatgccgcagccgtggctcgtgcggagcttcgcaccgttcagggtgaggctgggggtaaaaccgaggctgagcgggtgctcgcgctccatctgttcgcgttcgtcgcgcgagaagtcgatggactcgtcgctttcgggatcgatcccccacttttccataaagccgcgcagcgcggaagcctccgtgcgcatgcaaaaatcaacgacaatgccctttgaacaaacgtaaaccgacggcacgaaccagtcgcgccccgcccacgaaaaccacttttgtacaggcatttccctgcccgcgcgctcgcgcccatggtggccccaaaagctgccgtcaaagtagaccttccagtccgttttctgttcgggcgcgtcgggattcatttcgggatcataaaagtcctcggtgaatttgagcttgctgagatcgaactccgcttgcagctcgcgcaggtattgccacggccgctccatcggcgtgagggaaaagactgtggtgatctgcgagagcaccgccttctgctcgtccgtcggcggattctcggcaaggaaggcgtcgaattgcgcctcgtcccactgccacgcctgctcgagcgccgcactgtcgccggtcgcgagcagtaggcgcagaaaatcgctgaaatcgcgcgcgatgacgtgcacgcagtccttgccgccgttcatcgggcttacggcgaagaccgtttcgccaaaaccgcggacaaagcagaagtggatgccgtccacgcccgcccagccgaagatagaagcgcccttgggcgtgcagaaatagggatcgttgtcctcccgccgcatcacgctgaggggcgataagtcaagatgcttgcgcagaaatttttgataaaacgccgccatggaaggccctcctttggagctcaggtttttcatagcataccatatgggtgcggaaaagtcaccggaattgcaaaagctgtggatttttcgcgccggaagccgcgctgcggccttgccacgctctcgcgaacatgatatactatattgctaaactatcgagattcgggaggaaacatcccttggaacgcaaagaagtcatcgtcagcgagcaggagctcgcgcgtcagaaggaatttacgcgcaagatgcgcgagatgaacgaccgccgcacccgcacgccgctcgcgctggtcgacacgttcggctgccagcagaacgtggcagacggcgaggtgctcatgggcatgctgcgcgagatgggctacgagctcacgcgcgacgaaaatcaggccgacgtcatcctgctcaacacctgcgccatccgcgagcatgcggaaaagcgcgtttacggccacttgggccgcctcagccacacgaaggccgccaagccggaccagatcatctgcctctgcggctgcatggcgcagcagaaggtcgtggccgacaaggtaaaaaattcctaccatcacgtcgaccttgtgcttggcccccaggccgaatggcggctccccgagctgctgcacgaggtgtacacgaagaataagcgcgttttctccatcgagaacgagcatggccgcatcgccgaggacctccccatcgtgcgcgagggcggcgtgcgcgcgtgggtgagcatcatgtacgggtgcaataacttctgctcgtactgcatcgtgccctatgtccgcggccgcgagcgcagccgcgagccggagaagatcatcgaggaatgccgcggcctcatcgccgagggctacaaggagatcaccctcctcggccagaacgtgaacagctacggcaaggacttgggcaccgattacgactttgcagacctgctcgccgccatcaacgccattcccggcgactattggctccgctttatgtcgagccagccgaaggacgcgaccaacaaacttttcgacacgatggcacgctgcgagcacgttgcaaagcagctccacctccccgtccagtccgggtgcgaccgcgttctgaaagcgatgaaccgcccctatacgcgcgcaaagtacgaggaaatgatcgcctacgcgcgaagcgtcatgccaagcatggtgctcacgagcgacgtcatcatcggcttcccgggagagaccgaggacgaagcgatgcagactgtcgatcttgtagaaaagacgcagttcgacgcgctcttcacttttattttctccccgcgtcccggcacgccggcggcgaagatggacgaccccgtctcgcgcgaggaaaagcaggtctggtttgaaaagctcgtcgacgcgcagaacgccatcagcgcgaaaaagcacgcagcctacatcggcaggacggtcaaggtgctggtcgacggcgagagcgacgacgaggccttccccctcgccgcgcgcacggagggcaaccgcctcgtgcgcatgaagggcgacaaggccctgatcggcacatttgccaaagcgaagatcaccgacagcaacacctgggcgctctacggcgaagcggtagaggaataaagaaaagggggctttttgatgaaagtcgtcattttgatggaaaacagcacgtgcagagacaccgtcgcctgcgcgcacggcctttcgatgtacatcgaaacggaaaagcacaagatccttttcgacatggggcccgacgcgcagttcatcgacaacgccaaggcgctcggcgtcgatttgacgcaggtcgacatcgcctttttgtcccacgcgcacaacgaccactgcggcggcctcgaagcgttcttgaagctgaacgaccgcgccaaggtctatatgcagaaggccgtctggggccagtactacgtcgtcacgcccagcaagtgcgcctacatcggcatggacgcggtgctcaagaattacgaggaccgcttcgttctctgcgatggcgtgcagaagcttgacgaagaactgacggttttctccgccgttccgggccgcgagctgtggagcggcgcgaacgacacgctgcgcgagaagatcggtgaggactatccgcgcgacacgttccgccacgagcaggatctattggtcacggaaaacggcaagaccgcgctgttcgcgggctgcgcgcactgcggcatcgtgaatatcctgaaaagcgccgaggacgtgctcggcagagcgcccgacgcggtgtttgcgggcttccacctctataacccctcgctcggcaagagcgagccggacgagctggtcgacgccgtgggcgaaaagctgcgcggcgacaaggtcgcgcactacttcacgggccactgcacgggcaaggaagcctatgaaagattgaaacgtaagctcggcgaccgcctcggcgaaatgcccgcgggctccgactttaccgtgtaaattttagattttagagagaaagaaagcgaggacggatcatggccgagatcacgccgatgatgaagcagtatttggagatcaaggaacagaataaggattcgatcctctttttccgcttgggcgacttctacgagatgttcaacgaggatgctcagctcgcctcgcgcgagctcgatttgacgctgacgacccgcgaccgcggcaaggcggcggaggatcagacgccgatgtgcggcattccctatcattcgagcgacgcctacatcgcgcgcctgatcgccaagggctacaaggtcgccatctgcgagcagaccgaggaccctgcgctcgccaagggccttgtcaagcgcgatatcatccgcgtcatcacgcccggcacggtcatcgacagcgcatgcctcgacgaccggcgcggcaacttcctctgcggcatctttttggacgggcagaacgccggcgcggccttctgcgacatgacgaccggccacacgcacgtgaccgctttttcgggcgacgaccgcgcagagcacctgtataacgagttatcccgtttctcccccgccgaggcggtgctgagcgcgggtgcttacgacaacggtgagctggtcgaataccttcgcgataagctgtcctgcgcggtcgagcgcggcgagaaccgctttgagctcaaagcgtgcgaaaaagccatccgcgcgcagtttggcgaggagcgctttgcaagccttccgcgcaacaacccggccgcgtcgctcgcgctgggcgcgctgctctcgtatctgcacgagacgcagaagaccgatctttcctacatcaaggacttagaatactacgagcagggccgcttcatggagcttgacctctccgcgcggcgcaatctggagctgaccgagaccatccgcgccaaggaaaagcgcgggagcctcctctgggtgctcgacaagacgaagaccgccatgggcgcgcgcaatctgcgcgcgtggctgacgcgcccgctgcgcgatgttgcggccatcgagcgccgccttggcgcggtcgaggcgctgacgaagaacaccgtcgcgcgcgaagagctgattctatcgctctccggcatcagcgacatggagcgtctcatcggccgcattgcctacggcacggcgggcgggcgcgactttgcgtcgctgcgcaactccatcgagcgcatcacggaggtcaaagcccagcttacggcgttcacgacgggcaggctgcatgagttagacaacgagctcgacacgctcaccgacgtggcgcagagcatccgcgacacgctcatcgacgagccgccgttttccgtgcgtgagggcggcttcatccgcaagggctacaatgccgaagtcgaccgcctgcacgagattttgtcgggcggcaaggggcttctcgccgacatcgagacgcgcgagaaggaaaagaccggcatccgcacgctgaagatcggctacaacaaggtcttcggctactatatcgaggtctcgaattcgttcaaggacctcgtccccgacacgtacatccgcaagcagacgctcgtgaacggcgagcgctacatcaccgaggaacttaaaaaccttgagcaggagattctgaccgcgggggatcgcgacaaggcgctcgaatttgaaattttcaccgccctgcgcgaatccgtcaccgccgagagcgtgcgcatccagcgcgcggcggggctcatcgccgagctcgacacgctctgctcgctcgcgtccgtcgcggtgaacaacaactattgccgtccgagcgtggacgacagcggcgtcatcgaaattcacgacggccgccaccccgtcgtcgagcgcgtgctcaaggacgcgctcttcgtcccgaacgacacctatatgggcgagcgcgaggaccgcgccgccatcatcaccggccccaacatggccggtaagtcgacctacatgcgtcaggtcgcgctcatcacgctcatggcgcagatcggctcgttcgtgcccgccaagagcgcgcgtatcggcgtggtcgaccgcatcttcacgcgtatcggcgcgagcgacgacctcgccggcggccagtcgaccttcatggtcgagatgaccgaggtgagcgagatcttgcatcaggcaacgccacgctcgctgctcattctcgacgagatcggccgcggcacgtcgacgttcgacggcatgagcatcgcccgcgcggtgctcgaattctgcgccgacccgaaacgcttaggtgccaagacgctgttcgccacgcactatcacgagctcacggagcttgagggcgtgctccccggcgtgaagaactacagcatttccatcaaaaagcgcggcgacgagctcatcttcctgcgcaagatcgtccccggcggcgccgaccgcagctacggcatcgaggtcgcaaagttagcgggccttccgaacgaggtcgtcaagcgcgcgaacgtcatcttaaaagagctggagcagggcggcgcgtatcaggcaaagccccgcgaggagaccgagcaggtcagccttgactcaatcggcgaggctgaggtgctcgcggccatccgccgcgcgcagccggacacgatgtcccccatcgaggcgatgcagctcctctacgagctcaagcagaagctttcgtaatttccccggaaaagaggtctccccatggcaaaaaagaaaaccgcctccggcggcatgaaccgcaccgagcgcgtcgccggaacgatcttcttcctcgtctatcttctggtgatgccgcttttggcaacaagaatattcgaccttctggaggtcgtgctcgacaccaccatcaacgattccctgcgcaatgtgctctattactacacgctcttcgccgtcacggtgctgctgttccactcgtatctggcgcacacatcctcgcgctttctcgacaatttgaaccgcgcgctttcgacgatgctgctgggccttctcgttttctacggcgcgaacgaacttttgttccgcgtgtgcaacgtgctttttaacagccgcacgaacttaaacgacatgaccatcgccgcgcaggtggcctccgccccgcgcatgacggcgctgatcgtcgtgctgctcgcgccgtttgtggaggaggtgctcttccgcggcctcgtgttcgggtgtctcaaagaaaagagcagaatattcgcctatatcctctcctgcgcgctgttcgcgtttttacacgtgtggacggcggcggtgtccaactgggacttaggctatctcattttgatgctgcaataccttgtgcccggccttgtgtttgcctgggcgtatgagcattcgggcacgctgtggacgtcgatcctgctccacatgctcgtcaatgccctttcccttttcaccatcgcttcctaaaaggaggaaatcaatgccccatattcagcaattatcgccgcatgtcgccgacctcatcgccgcgggcgaggtggtcgagcgccctgcgagcgttgtcaaggagctgctggaaaatgccattgacgccggcgcgcagagcgtgacggtggagatgaaaaacggcggcatgacctatcttcgcgtcagcgatgacggctgcggcatcgcgccaagcgagctgccgacggcttttctgcgccacgcgacgagcaagctgcgcacggcggaggatttggctgccatcggcacgctgggctttcgcggcgaggcgctcgcggcgatctcttccgtttctcggctcgacattttctcgcgcgagcgcggcgcgctcagcggagcaaagctccacttagagggcggcgtccccggcacggtcgaggacgcgggctgccccgaaggcacgagcatcatcgtgcgcgacctcttctacaacacgcctgcgcgcttaaagtttatgaagcgcgacagcgcggaggccacggccatcgcgggccttgtcgggcaccttgcgctctcgcatccggaggtgtcgttcaagctcatcaaggacggcacgcagacgcttttgacccccggcgacggcgcgctgcgctccgccatttacgcctctctcgggcgtgagttcacgctctcgcttcttgaggtcaagggcgcggacggcgacatgggcgtcacgggctttgtgacctcgcccatcgcctcgcgcggcacgcgcggcatgcagacgtttttcgtcaacgggcggctcgtcaaatcccagcttctcaccgccgcgctcgaagaagcgtactcaaaccgcatgatgaagggcaagttccccggctgcgtgctgctcgtcgagctgccgcgcgacatggtggatgtgaacgtccaccctgccaagaccatcgtgaagttcgtgggcgaaaagcgcgtgtttgatctcgtttaccacgcggtcatggccgcgctcgacaagcgcgaggaggccgagcgcccccagccgaagcccgcgtctcaagtacagaatccgcgcggcgatttcttcgccaacatgacctcgcagcagtaccgcgagagccggaagacggcggaaaagcccgcctatacacctgccggtgcgcgtcccgtatccgcgccgcagagcgcgccggtgaagcccgcgcccgccccgcagtggcagacgagagtgcccgccatcgacatgcagagcggcggcaaagcggcgctttccgactatgtgcgccatgaaacgcccgcgtccgcgccagtactgtcagcacagcagtcacagcctgtggaaaagtctgtccattctgtggaaaaccatgacgacgaggtcgtcacgctgccgatgccggaggaagacgcccgccccgtcgtgaccggcccgatcatcggaccggcggcggagactgcggcagagcccgagccggaagcgcccatcgtccctgtgtttgcccctgcgaagcaggaagagcccgaaattgagcagacgacgttcgttcccccgtccgcctcgccgtggcgcatcgcgggcgaggtgctcgacacctacatcgtctgcgaggacgaggataaaaacgtctggctcatcgacaagcacgccgcgcacgagcgcgtgaatttcgaccgcatgaaggccaaccaggagccactgatgtgtcaggccctgctcgctcccctcgtggcggagttcgccgccgaggagtacagcgcgcttgcggcgaatttggagcttctgcgcgaattcggctttgagtgcgaggagttcggcggcgggagcctgatcctgcgcgccatccccgccgatatcgacagcggcgacgccatccccgcgctcgaagagctcgccgacaagctcgtcaccgcccacaccgtcgaccccgccgccgcgcgcgacgcgctgctgcacacgatggcctgcaaggcggccatcaagggtggatggaagagcgatttaagcgagctgcgtgtgctcgtcgacaaggtgcagagcggcgaggtgcagttctgcccgcacggacggcccgtgaaagccaagctcacgaagtacgagctcgaaaaaatgttcaagcgcgcgtgagcgcaggagggagaagatgaaactcgtatgcgtcgtcggcccgacgggctgcggcaaaacgtggctcggcgtcgagcttgcgaaaatgctcggcggcgaggtcgtctcctgcgactcgatgcagatctaccgcggcatggccatcggtaccgccgcgccgacggcggaggagatgcagggcattccgcatcacatggtcggcgtcgccgacccgcgggaaaactattccgttgcccgctatgcggacgacgcggcgaagtgcgtcgacgatatcctctcgcgcgggaagcagcccgtcatcgtcggcggcacggggctttacctcaatgccctgctcgccggtcacggcttcgccggcggtgacaaggacggcagataccgcgcggagttggaatcccgctgggacaaggagggcagcgaggcgatgttcgtcgagctccgacgcatcgaccccgagaccgccggaaatctccatttgaacgacaaaaagcgcatcctccgcgcgctcgaggtctactacgagaccggcaagaccatggcgcagcacaacgcggagacgaaactcatccccccgcgctacgattccgtgcgcatcggccttgcctatgcggatcgggacgacatgaagcgcgccatcgacctccgcgtcgacaaaatggtcgaggcggggcttttcgacgaggtcagagcgctgctcgattccggactaccccgcgacgtgacggccatgcaggccatcgggtataaggaggcgcttgcctacttggacggcgaggccgcgcgcgaggaggccatcgacgagatcaagctccgctcccgccagtatgccaagcgccagctcacgtggctgcggcgcgaccccggcatccactggttttattggaaaaaaacgaggattctccccgattgcctcgctttttcgacagaaattctccatacctatggcgtatcctgactttaacgcggacaagccgtccgcaaaaaagaaaggaaagaaaagccatgaaaaaaatcgcaaaccttcaggacctatttctcctctctgcgcgccgcaatcgcacgagcgtgacggtatttctcgtcaacggcttccagatgcgcggcgtcatcacgggctttgacagctttgtcgtcatcttggagagcgacggcaagcagcagatgctctacaagcacgcgatctcaacgatcgtgcccatcgcggccatcgacctcaaaggcgcggaggaaagcgaggagtaagcacgcctgatccgggagtgtgccatgaaatctacatccgtttccacaaagatcatcacgatcctgctccttttggcggtcatcgggtatttcgccgtgcagggctacaactactttgtcagccccgagacgacgacgctcgtctaccgctatcacagcgagcggtccattgccctgcggggctgcgtggtgcgcgacgagcaggtcgtggactgcaatgaaacgctcatcgagctcaagcacgccgagggcgagcgcgtgggccagggcgacaccatcgcctccgtctaccgctcggccgacgcgctgaacgccacgcagcagctcgagacactgcgcgcgcagaaagagcagcttgagtacgccaagagcgcctcgagcgacgcggccaccgcgctgcgtctggataccgacatccgcgagcagatcatctccgtgcgcgcggcctacgagtcgggcgcgtacagctcgctcgacacgctgatcccccagctcaaaacgacggtcttgaagcgcgaatacgcctacaacggcagcgatgacttaacggcgaagctcgacgagctgaacgcgcagatcaccgcgctctcgggcgcggcgagcggcggcacgacgcgcatcacagcgcccgtgtcggggacttacagcgccgtggccgacgggtacgagagcgtgctgacgccggaggtccttgagacgatgacgccctcgcagctttcgtccgccgcgccgcagagcgtttcgaccacggtgggcaagctcattcagggcagcgcgtggtacttcgccgcgaacgtgagcgaggagaacgccgcgtccctgaaggaaaacagcaggctgacgctccgcatggcgtcgggcgtcgactttgacctgcccgtcacgctcacgcgcatcagcgccgcggagaacggcaaatgcctgatcgtgctcaagagcacgcggtacttatcctacatgacgctgctgcgcgagcagaacgccgagctcatcatcagcgcatacgacggcctgcgcgtgccgaaaaacgcgctgcgcgtggatgaaaacggcgtgtcaggcgtttactgcctcgtcgggcgcgtggcgtacttcaagcctgtgagcatcgtctatcagggcagcgactactgtctggtggagcccggcacgatcgaagccgcgacggagagccaaaagtccctttacaccctgcgcccgaacgatgaggtcatcgtttcggcaggggagctatataacggaaaggtcgtagattagaaatgagcattgctgaaaacatcgcgcgcgtgcgcgcaaacattgccgcggccgccaaagaggcgggccgcaatgtaagcgaaattaccctcgttggcgcgagcaagatgaacgacgcggacgcctgccgtcaggccatcgccgcgggcatcgacgtgctgggcgagaaccgcgagcaggagatgacgaaaaagctcgccgagcacgcctatgacggcgcgcccctgcactttatcggccacctccagcgcaacaaggtgaaaaatgtcgttggcaaggtcgcaatgatcgaatcggtcggctcgctcgagctgctctctgccatcgacaagcaggccgagaagctgggcatcgtgcaggatatcctgcttgaggtgaatatcggcggcgaggaggccaagagcggctttgcgcccgagagcctggagcaggcggcggaagaggccaaaaagtgcgcaaatgtccgcgtgcgcggcctcatgtgtatcccgccggtcgccgagggcgagcacggcagcctgccctactttgaaaaagttcatgcactttttgttgacatcaatgccaagttgtatgataatacacttgatatactgtcaatgggcatgagcggagactacgaggacgcggtgcgcgcaggcgcgacgatggtgcgcgtcggcacggcgatcttcggcgcccgcaattatacgatttgatcgaggaggtcttgataccatgggtattttggatgatctgaaaaagtgggctcacccctacgaggatgaggacgaggaatatgaagatgatttccccgatctgagagaccgcggcgacacgggcgcctttgccgaccgccgcagcgccgagcgcaaggcggaggaccgccgcaacaaggtcgtgaacatcaacgcgaccacgcagctcaaggtcgtgctcgtcaagcccgagcgctttgaaaacgcgagcgagatcgccgaccatctgaaggaaaagcgcacggtggtcatcaaccttgagtccacgaacaaggacattgcaagaagactgatcgacttcctctccggcgtggcctacgcgggcgagggcaagatcaaaaaggtcgcggccaacacgtacatcatcacgccctatcatgtggatatcatgggcgatctgatcgacgagctggaaaataacggcctctacctgtaaagaaacggagagtgggatagtatgctgacaccgcaggaagtttccggccgcgctttcagcaaagcggccttcggcggatataatatggcgatggtcgacgagtttctcgacgagctgaccgacgattatacctcgctctataaagaaaacgccgccctcaaggccaagctcaaggtgctggtcgacaaggtggaggagtaccgcgcgacggaggattccatgcgcgccgccctcctgaccgcccagcgcatggccaacaccatggtcgaagaggccgaggagaagaaaaaggccgtgctcgccggcgcggaggacgaagcccgcgccaagatcggcgcgctgcagagcgatgtcgagctcgagcagcgccgattgaacgcggccaaggccgcgacggcggaatttttgcagaagacgcgcgagcttgcgcaggcgcagcttgcgctcatcgagcgcgcgcccgacttgacgcccgagaagatcgcgggcggcgaaaaggccgagcagaaggccgaggccgacgtgaacgccatcgaggaaacgatcctcgcgtccttccgccccgcggcggaggaggccgcgcccgaaaaggcgcaggaggccgctccggcagaggagcagagcgcgccgaaggctgaggagcccaaggcagagccgctcgagccggacgacagcccgtttgtggaaacggccagccatgccatccgtctggatgacctcaagttcggccgcaactatcacggagaagagtaacagcaaaagggcggttttggccggctccacagaggagccggtttcagaccgcccttttattttttctttggccgcggcgcggtgaaaaggagacgacatgaacaaaaagcccatcatcgcctttctctacgactttgacaagaccctctgcacgaccgacatgcaggactatacgttcatcccctcgctcggctacacgcccggcgagttctggagcatcgcgaattccttcggctttgagaaccgcatggacggcctgctcgcctacatgtatacgatgatcgaggagtgccgcaaaaagggcatccgcctggaccgcgactacctcgtctcctgcgggcatgcgatcgagctgttccccggcgtgcaggactggttctcgcgcatcaacgccttcggcgaaacgctgggcgtggagatcgagcactacgtgctctcctccggcctgcgcgagatcatcgagggcagcggcgtgagccacgaatttaaggagatctacgcctgcgaattcttctacaacgaagagggccttgcttcgtggccgaagctcgacgtcaacttcacaaacaagacccagtttgtctaccgcatcaacaagggaatactcgacgtcgcaaaggacaaggagctcaacgcttcgatgcccgacgactccaagcgcatcccgttcacgaacatgatctacatcggcgacggcctttccgacgtgccgtgcatgaagatgatgcgcgcctacggcgggcaggccgtggccgtgtatcaggacagcaaccgcgcgggcgtggaggacctgctcgccaaggggcgcgtggacttcatcttccccgcggactaccgcgacgggacgctctttgacgagacgatgaaaaatatcgtccgcaagatcgccatcgccgacgcgctggccgaggaaaaccagcagcagctccgctcactcggccggagcgaggtgccgcagcaggtggggctgttctgatggtcaatttgcgctgccccgtctgcgctggggcgcttgaaaaacgcgcgggggcctatctctgcccgaaaaaccacagctttgacatcgccaagagcggatacgtcaacctcctgctcaactcctcgcagggccaccacggggatgacaagctcatggtacgcgcccgccgcgactttttggacaagggctattacgacagcttcatcgccgccgttgcggacgccgcggcggagttcacgccgccggaggcgacggtcctcgacgcaggctgcggcgaggggatttattctcttgccgttctgcgcgccatcgaaaaagcgggcaagcacggcgagcttttaggcgtcgacatttcgaagaccgcgctccagtacgcatcgaagcgctcgccggacttcacgctctgtgtcgcctcgtgcgcgcacctgccggtcgaagacggcagcgtcgacgaggtgctcaatatcttctcccctttcgtgccggaggaatttgcgcgcgtgctgaagccgggcggctatcttctgcgtgcctatcccctgcgcgagcatctgtgggagctcaaagcgctcatctacgacacgccgcgcgacaacccgcccacgccgcttacgaccgagggcttcacgctcgtcgaaacgcgcgaagtgcgcgatatcattcatttatcctgtaatgaggatattctatctttgttccgcatgacgccgtactattataaaactggcgctaaagaccagcaaaaggctgagcaggctcaggagcttagtgtcaaactggcgtttgggctggcgatttatcaaagggattgatgatactcccgcactatgcgggaggggagagcggcgtgcgcgccgcggcacaaaagggggccattc

SEQ ID NO: 10123 - DNA, 46529 bp, Unknown
  gut microbiota DNA sequence
ctcaaaaattcattggcaaaactgctttgcaccgaaaaagagcaaattttgtgcggagctgaggcgcgacggtgcgggcatgctgacgcatggcaagacggcgcaacgaaggagtccgtgcaaaatttgccttttacggcgcatgttttcttatgcggagtcggccaatgcgcggccctttttttgcgcgtttttccgtggtatactgagtgcattcctgaaagaaatgaggacggacacatgctaagcacgtttttctgccgcgcgtttcagtgctgctttgccgtcggcgcgcgctttctcccctggcgcacgccggaggtcttttcaggcgaggggagcttactgcgcgccgcagacattctgcgcgaaaacggcctgcgccgcccgttcgtcatcgcgagccgccgccagtgcgcggacgagcacttccgcgccttgcaggaaaaacttgacgagcaggacatcctgctctccatcttctcctcggtcgagccgaatccgtcggtcgagacggtcgaaaagatcgccgcgcagtacaagattgatagctgcgactgctttctcgtcatcggcggcggctcgccgatggacgcagccaaggccgctgcggcgcgcctcgcgcggccggacaggccgctttcgcagcttgtgggactcttaaaggtccgccgccgcattccgccgctcatcgccgtgcccacgacggcgggcacggggtcggagacgaccatcgccgccgttgtcaccggcagcgaccaccacaagtatgcgatctccgacctctgcctcattccgcgctacgcgatcttagaccccgcgctgaccgtcggcctgcctccacacatcacggcggagaccggcatggacgcgctgacgcacgcggtcgaggcgtacctgagccgcttttacaacacgaagcaaacgcgcctgctcgcggaaaacgccgtcgtgaccatcttcacgcatttggagcgcgcgtaccgcgacggcacgtcgctccccgaccgcgcggcgatgctgcaggcctcgttcgacgcaggcgcggcgttcacgcgcgcaagcgtcggcaatgtgcacgccatcgcgcacacgctcggcgggctttacggcgtaccccacggccttgcaaacgcggtgctgcttcccctcgtgcttgaggattacggcaaagcggcctgtccgtgccttgcccgtcttgctgcacttgtcggcctcaagggcgacacggaggaggtgcgcgccaaggcgtttattgccgaaatccgcgcgatgaatacccgcatgggcatccccgaccacttcaactgcatccgcaaagaggacattcccctcatggccacctgggccgcgcaggaggcgaaccccgtctaccccgtgccggtcatctacgacgaagcgcgctttgcgcacgtcatcgagcgttcacaccacagccaataaccttgtcagcattttagcgatactttcccgccgccgtctggtataatggtgctgcaatccaaaaggatcggacggttttttatgatcggagtttacgactacaccgtgatcgcaacctatctctcgctgctgctggggcttggcggcctctattccgccgcgcaaaacgagcctctcgacgccatgctgtgcctgatgctcgcggggctgctcgatgccttcgacgggcgcatcgcccgcacgaaaaaggaccgcaccgaacaggaaaagcgcttcggtatccagatcgactcgctcaacgacctcgtgtgcttcggcgtgctgcccgccgccatcggctggagcatggactgcgatagactctggttccttgcgacgatgtcgtttttcgcgctctgcgcgctcatccgcctcgcctacttcaacgtgacggaggaggagcggcaggaccgcacaagcgaaaaccgcgcctactacctcggcgtgccggtcacggcgagcgccgtgctcgcgccgcttttctacctgctctcgctgcgctttgccctgaactgcgcggtcgtttacgcgctggggctgttcctgcttggcgtactgtacatcacgccgctccacgtcaaaaagccgcagctgcgcggcgtggtgcttttgtccatattcgggcttggcgaatttgctgttttgctccgcgtattgacgcgttagcgctcccatctctctcctccgggccgtccgaaaggttttcttttgggcggcccctctctttttactttcccgattgacggcgggaagtccgcgtgctatgatagtcggcaactaccatttgcatgttctgtcagatcacgaggaatttttatgaaaaaggccgacccccgtctcatgctcattatgtcgatgaccgtcttcggcacgctggggccttttgtgcgcaatattcccgtctcgtccggcgagctggcgctgtaccgcgccgtgctggccgcgctgctgatcggcgtatacttacttgtcagcaggcagaagatccccttcgcgcgcatcaaaaaggaggtgccgctgctgcttctctccggtgcagcgatgggcgtcaactggatccttttatttgaggcctaccgctatacgagcgtttccgtcgccacactgagctattacttcgcgcccgtcatcgtcacgctcgtctgccccatcctcttccatgaaaagctgacggggaagaaatttctctgctttgtcatgtccacgctcggccttgtgctcatcaccggcattggcgacacgcgcgggtcggatgccctcaagggcattctcttcggcctcggcgcggcggtgttttacgcgaccgtcatcctgctcaacaagtccatccatcaggtcgagggcatccaccgcacgtttttgcagtttttgtccgccatcgtcgtgctcatcccctacgtgctctcgacaaatggcatcacactcagctcgctgaacgccgttggctgggtgaaccttctcatcgtcggccttgtccacacgggcatcacgtattgcctgtacttctcgtcgctcaaggagctgcccggacaggaggccgcgattttaagctacatcgaccccctcgtcgccgtcctcgtctccgtcaccctgctcggcgagagcatgaccgcaatgcaagtcatcggcggcgccctgatcttaggcttcaccctgctcaacgaactctctcccgtccccaaggcgaaaaaggagtaaatctctcaaatcacgccaaaacgcgtcgcagattttcgcgccgcgcacggcgcgaaataaattgaaatcgttttttgtcgcgacatgtgcgtgacaaaaaacacctctcagcccgcaagtgtggaaatcgcccgccgttggcgggcgatttatgcgcgcagcgggctgtgatctccctaaaaatagaggccgctcagccataactgagcggcctctatttttaatttagaaattctgctgggtcgcagggtaccccatctttgctgaccgaaaagtgcagatgcgccggcatcgagaactcggcgatcgagctgctgcccaccgcgccgatgacctcgcccgcggagacgtactgtccctcgccgacgcccggcgagctgcggagattggcgtacgtcgtctcgtacccgtcgtcgtgcgcgatggtcacgagcgtgcccatcatgtcgtcgtcgcgcaccgccgtcacaacgccgctgcacgcggcgatcacctgcgtgccgacctcggcggcgatgtcgatgccgtcgtgcgtgcgccagtcgccaagcgtctcgttatacgtgagctcgtcgaccgaaaacgccgcgacctcctcccccacgagcggcacgaccacgagccgcggggcgacgggctgcgcgtccgtctcgctctccatcgcggggacggtgtcctccacgcccgtggcctcatccatcacggtgaggtcctcgggcgcctcctccaccggctctgccggctttgccgcctcctgcggcagctccgtctccggcatctgcggcgtttcgtcctgcacgggaagctctacctgtgaggagacgttctccgcgtccttgtccgtcgtatttttcggcagcagcgtccaatagcccgcgacggccagcgccgtcacaccgaggaacagggctatgtataagcccgtcccgccgaagaagtgccgctttgcgcggccgttcgatcctgccatgtttcatcctttccgccgctttgcggctcgtgcgaaaattgggagcaaaaaaagctctgacggtagtgtgtaccgtcagagctttttctaaacatggcagattcgattttttagcggacgatcagcgtcttgccgtccatttccgcgggctgctcaaggcccatcacgtcgaggatcgtcggcgcgatgtcggcgaggcggccggggcgcagctccgtgcccgcgccgcagaggatgaagggcaccacattcgtcgtgtgcgcggtcatcgggctcttgccgtcgctttgcagcatctgctcggcgttgccgtggtcggcggtgatcatcgcgatgccgcccatcttgagcgtcgcctccacgacctgaccgacgcactcgtcaacggtctcgacggccttgacagccgcgtcgaagacgccggtgtggccgaccatgtcgcagttggcaaagttcagaatgatgacgtcgtacttgccggactcgatgcgctcgacgcacttgctcgcgacctcgtaggcgctcatctcgggctggaggtcgtaggtcgcgaccttcggggacgcgacgagtacgcggtcctcgccgggatacgggtcctcgacgccgccgttgaagaagaacgtgacatgtgcgtacttctcggtctcggcgatgcgcagctgggtcatgcccatcttgctcaggtactcgccaaggccgtttttcacgctgatgcgcgggaaggcgacgagcacgttcggcatggtcgcgtcatactcggtgttgcagacgtaggtgagcgggaagaactcgcgcttgaagccgtcgaacgcggggtcgacgaacgcacgcgtgatctcgcgggcgcggtcggggcggtagttgaagaagatgaccgaatcgttgtcggagatcatgccgtccttgtcgcagacgatgggctcgacgaattcatccgtcacgccgtttttatagctctcctcgatggcgtgaatggggtcgggatcctgcacgccctcgccgtagacgagcgcgtcataggcgttctcgaggcggtcccagcgcttgtcgcggtccatcgcgtaatagcggcccatgacggtcgcgatcttgccgacgccgagctcacggcacttttccatggtctttgcgacaaagtcgcggccggaggtcgggggcgtgtcgcgcccgtcgaggaacgcgtggatatacacgcgctttaagcccttgatgtgcgccatctttaaaagcgcgtagaggtggtcgagcgtggagtgcacgccgccggtggagtgcagaccgtaaaggtgcagcgcagagcccttttcaatgcagtcgtccatcgccttgttgtaggcgggattttcaaagaacgtgccgtcctcaatggagcgggtgatgcgcggcaggtcctggaacacgacgcggccgccgccgatgttggtatggccgacctcgctgttgcccatctggcccgcgggcaggcccacgtcaagaccggaggcctggagcgtcgtgtgggcatactcggcaaaaaggccgtcgagcacgggcgtgttggccgcgcgcaccgcgttgccgacggtatcgttggacaggccgaagccgtccatgatgatcagcgtggtgggagtcttattcatcgattttcctccttactcctggttggcagcgtggacgatctccatcagtgccttggggtcgagcgaagcgccgccgatcaggccgccgtcgatgtcctcgtgcgagagcagctcgtgggcgttcgagcccttcatcgagccgccgtactgaatggtcacgctgcgggcaatgcgcgcgccgtactgcgcgcggatgagcgagcggatataggtgcagacctcggccgcctgctcgcccgtggcggtcttgccggtgccgatggcccagatgggctcataggcgatgacgcagcggcgcatctgctcggcgctcacgcccgcgagggcggacttgacctgcagcgcgatgagctccatcgtcacgcccatctcgcgctgggcaaggctctcgcccacgcagatgatggggttcagccccgcctcgagcgcggcgaggacctttttgttgacgatctcgtccgtctcgccgaagagcgcgcggcgctcgctgtggccgacgatgacatagcgcacgccgaggtcggcgagcatgtcggcggaaatctcgccggtgtaggcgccgctcttttcaaagtagacgttctctgcgccgacggcgatgcggctgtccttgaacgcgcgcacggcggcagaaaggtcgaccgtgggcacgcacacgacgatgtcgcaccatttggttttgggaaggatggccttgaactgttcggcaaaggccttggtctcgctgggggtcttgttcattttccagttgcctgcgatgatggttttacggtatctgcgattcatattgggtcttttctcctgttactgtctaaatctaagatctatgcgaatatatgaaaatcaatagagatttttctcacttgtctaaaaggcacgcaacgcccggtaattccttgccttccaggaactcgagcgacgcgccgccgccggtggagatgtgcgtgatcttgtcggcaaagccgagctgctcggctgccgccgcgctgtcgccgccgccgatgatcgtgaccgcgccgctctcggcgagcgccttggccatggccttcgtgccggtcgcaaaggttgggaactcaaaaacgcccatggggccgttccacacgatcgtgcccgcgcccttggtcgccgcgcagaagagctcgacggtcttggggccgatgtccatgcccatcatatccgcggggatgtgcatcgcgtcgacgacgtggggctctgcgtcggcggcaaactccgtcgccgcgacggtatcgaccggcagcaggagcttgacgcccttctgcttggccttttcgatcatcccgagcgcgtaggcgcacttgtcttcctcgagcagggacttaccgatctcgccgccctgcgccttggcgaacgtgtaggccatgccgccgccgatgatgacggtgtcggccttgtctaaaaggttgttgatgacggcgatcttgtcgctgacctttgcgccgccgagcacggcgacgaacgggcgcttgggatcgtcgagcgccttgcccatgacctcaagctccttggcaacgagcaggcccgacacggcgggaagataggcggccacgcccgcggtggacgcgtgcgcgcggtgcaccgtgccgaacgcgtcggagacgtacagctccgccatcgaggcaagggccttggcaagctcggggtcgttcttggtctcacccgcttcaaaacgggtgttttcaagcagcatgatctcgccgcccttgagcgccgcggccttggccttggcgtcctcaccgacgacgtcgtgcgcgaagatgacatccttgcccaaaagctcggacaggcgcttggcgacgggcgcaagcgtcagcttgtcgagggactttttccacttctcctcggtcagcgtcgcggggtccttgcccttttcggtctgctttttcacccacttgtcaaacttggcctcgggcttgccgaggtgggagcaggcgatgaccgccgcgccgtggtcgagcagataccggatggtcggcagcgcggccacgatgcgcttatccgaggtgatctcgccggtctccttgtcctgaggcacgttgaaatcgcagcgcagcagcaccttcttgccgctcacgtccacatcgagaacagtcttcttgttataattcatgttgtttcctcctcataatatacacatacgatttggttacgcagttaaaacgaatttgggatttactccttttccagcatttccccctcgtgcttgagaccgggaaagcccgtctgccgcagcgcttcatacgtcaggatcgccacggagttcgatagattcaggctgcgcgcctccttccgcatcggaaggcggatgcagcgctcatagtgcgccacgcggaaaggctccggcaggcccgcggtctcctttccgaaaaagagccagcagccgtccttgaattccgcctggcagtagtcctgcggagccttggtcgtggcgagccagcagtcgcgttccgcctcgggatgctttgcaaaaaggtcggctaaattttcgtacacgctgatatccacaaggtaccagtagtccagccccgcgcgcttgacggcgcggtcggaaatgtcgaacccgaggggcttgatgagatgcagatgcgcccccgtcgccgcgcaggtgcgcgcgatattgccgcagttttgcgggatctccggctcgacgagcacgatattcagcatgacagcacctcctccatgcgaaagttttatcattgtaccgcaaaaatattgcgaattcaacctaaaatgcagtcttttgaaacgaaattttgaaaatgcaaaagtaaagccgccaaatcaaaaattttttgttttttttgtgagaaacggtggatttttcgggcatctttgctataatgtcgttaatagagagtagaattgaaaggagatgagctccgatggatcagaagttggcagttctctttatgccggacgatatgaccctgacaaaagaacaagcaccgctgatgctgaggcccattttgttctgccccattctcacgtggatggtcgaagaactgatggggcggggcattgagcggttttttattgtgtctgacaaacgggcgcacgacatgatgtgcccctacgtccccgaaaacgccgatgttgtctacgtcgacggtgccagacacggggaggagcttttaacgctcctcaaggatgaaaagggcagcgtgctcatcgtcaacggcgcggtgctgcccgtgggcgtgttctccggcggcgcggtctactccgcggacgcgaaggagtgctgcaaggtgctcaaggaacacggcgccttcgccgccttccccaagggggcggagatcacgaagggctttttgcccgtcggcgacgacgaggagctcagatccgcacaggacatgtgccgccgcaagatcgccgacaagcactttgccgcgggcgtttccatcatggaccccaacaatacctacattgacccccgcgtcaagatcggcagcggcacggtcatcctgccgggaacgatcctgcgcggccggaccgtcatcggcaagaactgcaccatcggcccgaacgccatgatccgcgactgcacggtcggcgacgagaccgaggtgaacgcctcgcagctcaatgagagcaccgtcggcgcgcacacgaccgtcggtccctttgcctatgtccgcccgaactcgaagatcggcgatcatgtcaaagtcggcgactttgtcgagatcaaaaacagcgtcatcggcaacggcacgaagatctcgcacctcacctacgtcggcgacagcgattgcggcgagcgcatcaacttcggctgcggcacggtcacgacgaactacgacggctttaaaaagttccgctgcacgatcggcgacgacgctttcatcggctgcaacacaaacctcatcgcccccgtcacggtcggaaacggcagctacatcgccgccggctccaccatcaccgacgaggtgcccgccgattccctcgccatcgcgcgcgagcgtcaggtcaacaagcccggctgggcggaacagtggcgcgcggcgcacgagaaaaagtaacttcagaaaaattttttataaacagaggagtacatcaacatgatctctcacggtaaggacatcaagattttcaccggcaacgcaaaccccaaactggcagcggacatctgcaagatcatcggcaccaagctcggcgagagcgaggtcaagagcttcgcagacggcgaggcctccgtctccctgtacgagaccgtgcgcggcagcgacgtgttcctcgttcagtccacctgcaagcccgtcaacgacagtctgatggagcttctcatcatggtcgacgcctgccgccgcgcttccgccggccgcatcaccgccgtcatgccctactttggctatgcccgtcaggaccgcaaggccaagagccgcgaccccatctccgccaagctcgtggccaacatgctcgttgccgcaggcgttgaccgtgtgctgacgatggacctgcacgccaaccagatccagggcttcttcgatatccccgtggataacctcttcggcaaccccatcttcgtcgactactacgccaagaagttcggttccgtgtgcgaggacatggtcgtcgtctcccccgacgtcggctccgtcgcccgcgcccgcaccttcgcccagaagctgcacatgaacctcgccatcgtcgataagcgccgccagaaggccaaccagtgcgaggtcatgaacgtcatcggcgacgttgagggcaaggagtgcatcctcttcgacgacatggtcgacaccgccggttccctctgcaacgcggccaaggccatcgttgaggtcggcggcgcgaagaaggtctacgcctgcgcgtctcacggcgttctctccggccccgcgctcgagcgcctggccgcgagcagcatcgaagagctcgccctgctcgacaccatccccgcccctgccggcgaagaggagctcgccaagtcccgcatcaagtacctgaccgttgcgccgatgttcgccgaagcgatcgagcgcacatatcaggaaatttctatcgcgaagctgtttaactaattcgttaaaacgattttgtcccccaccttgggtggggacgcggttaagggggatattctctttcctcggaaagagaatatccccctttgacccccaagagaaagggattagattggcagtctggagctcgaaggggctttttgcctccggaatgcaactgcctgcgtggcggtattgctgacgctcaccgccattggttctgctatacgacttgcctctgcttctattgtccgctgccgctctgcccatcttgtagaagtgcgcagtaatctccgtctaccgaggcactactcaatgcggcgagcgcagcaatgccgctatttcgcacgcagtccgccgccgagcaaacgtcactcgcgcctcacgacagtaaggcgcggttgatatctgtaacgacttgcagaagattcatggcgaagccatgtacaccgcacttacattgcgcagcgtgtgcaactcttcaagcctcaaactgccaatgcaaacgcctttcttttggacgggcgacgcccgttttctttctcgggaaagaaaatgggggtcgcatcacgcggcacatgtgccgcaaagcctttcgcacctgtgcgaaaaagcatccgcgccctcacgggcgcaaaaagtgaggaacattttcatgattttcaaaaaatccggcccgccggaatggctgctcgtctgtttgggcaactacggcaagcagtatgaaaacacccgccacaacatcggcttcatggccgcggagcgcctgatcgacaagcgcgatctgcgctgcaaccgcctgcgcttccgcgcgctgacggaagtcatcgaatttggcggggtgaatgtgcttttgatgatgccgcagacctacatgaacctctccggcgaggctgtgggcgaggcggcgcggttctataaaattcccgctgaccacgtcatcgtcatctccgacgatatttcgctcccgctcggcaagctccgcgtgcgcggcagcggcagcgcgggcggacacaacggcctcaagaacatcatcgcgcacctcggcaccgacgctttcccgcgcgtcaaggtcggcgtcggcgcgccggagcacgacattgtcgactgggtcatcggcccgttcacggccagcgagcgcaaggtcatcgacggtgtgctcgaccgcgcgctcggcgcggcggagtgcatcatcaccgacggcgtgctcaccgcgcagaaccgcttcaacggctgagcgctttttgccgccaaaatttaaaaaatcgacatagactttttgccaaaagcctatataataaaatgactgacgaccacgggcatgacccgccgcggctgcggcggatctgcccttttgtgcgctgcgggaggagggatacggcatggcgcaggggatgaacaaactcaatgaagcgctcgcatctcttcccgaggtgcgcgagctgctgctctcgctcgacgcgggcacatcgcccatcgccgtgtcgggcctttcgggtgtgcaccgcgcgcagcttgccgctgccgtgcggcacaagacacagcgcccgcttttgatcgtctgcgcggatgaaaacgaggcaaaccgcatggcgggcgacctgcacgagctgctcggcgaggacgtgagcctgctgttcgcgcgcgaatggcagctgcgcgaccgcgtgttcgcctcccacggctgggagcagcagcgcatcggctcgctgtgcagccttgccgccggaaaagcgccaatcctggtcgcgacggtcgacggcctgatgcagcgaacgctcccgcccgacgcgctgcgcggcgtggtgacggacatttcgctcggcgaccgctttgacctgaacgcgctctcgaaaaagcttgtcgaaagcggctacacgcgcgcggaaacggtcgagggcgtcggccagttcgcgctgcgcggcggtattctcgacgtctggtcgccgctgagcgcgcccgtgcgcgtcgagtttttcgacgatgaggtcgacgcgatgggcgaattcgacgtgacgacccagcgccgcacgcagaacgtcaaatccctgaccgtcctgcccgcggcagaggtgctgcccgccctctcggacggcggacgcgaaaaaatgctcgagcgccttgggcgcgccgcacagaaaattgcgaaaaaggccgaagacagccccatcgtccaaacgctgcgcagcgacatcgagaggcttcgtaacgacctgccgctcggcggcatggaccggtatctcgccgcgtgctaccccgacgaggtctgcgcgctcgactatctttcacccgacacgctcatcaccgtcagcgacggcatgcgtgttttggagcgcagcaagaactaccactgggaactctccgaggacgttaagcccctgatcgaagagggcgttttgtgcggcgaatttgccgcgctctcgctcagtcaggaggcattgagccaccgcatgggcgcgttccccgtgctgctgctcgattcgctccccacgtcgcgcaatctgctgccgccgagggccatcctcagcatgaacgcgcgctcgctgccgtcgtatggcggcagcctcgagaccgccgcgggcgacatggagcggtatcttggcgcaggctgcggcgtgctcgttctctgcggcaacgaaacgcgcgcgaaaaacttccggcgccttttggaagagcggaacatccgcgcgcagctcaacttgaaaaacgaccgcctccccgccccgcacgagaccgtcatcggcctcggcgcgctgagcgcgggcagcgaatatccacaattaaagctcgtcatcctgaccgagggccagctgaccgctcccctctccggcaagcgcgcaaaggcgcggccgaagaaagagacgtcggcccgcgccgcgctgcggtcctatgaagacctctcccccggcgatctcgtcgtgcatgtccaccacggcatcggccgctttgcgggcatcgagcgcatgcgcgtcgacggcgtggacaaggactatatcaagatctgctatgcgggcaacgacagcttatacgtccccgcgacgcagctcgacatggtgtcgaaatacatcggcggccatggcgaggacgaggacggccaaatacgcacgaagctcagtaagctcggcggcacggactggtcgcgcgcgaagacaaaggcgcgcgccgcggcaaaggacctcgccaaagggctcatcgcgctctatgccgagcgccagcgccgcccgggcttcgccttctcgcccgactccccgtggcagaaggaatttgaagaagccttcgactacgaagagaccgacgatcagctccgcgccatcgccgagatcaaggccgacatggagcgcagtacgccgatggaccgcctgctctgcggcgacgtcggctacggcaagactgaggtcgcgctgcgcgccgtgatgaagtgcgtgctcgacggcaagcaggcggcaatcctggtgccgaccaccgtgctcgcccagcagcactatgcgacggcgctgaaccgcttccgctcgttccccgtgcgcatcgaagtgctctcgcgcttcaaaacgccggcgcagaagaagcaaattttgcaggatgccgccgcgggaaagatcgacttactcattggcacgcactcgctgctgcaaaagagtttgcacttcaaggaccttggccttctcatcatcgacgaggagcagcgcttcggcgtaacgcacaaggaaaagctcaaggagctctcgcgtcaggtcgacacgctgacgctctcggcaacgcccatccccagaacgctcaacatggcgctttcgggcatccgcgacatgtcgaccatcgaggtcccgcctgttgaccgccagccggtgcagacatatgtgctcgagcataactggagcgtcatcgccgacgccatccggcgcgagctcgcgcgcggcgggcaggtctactacatgcacaaccgcgtcgagaccatcgaccgctgcgccgcgacactcaaaaagctcctcggcgacgatgtcgccatcggcgtcgcgcacggcaagatggacgaaaagggcctgtcgtccgtgatgcagcagctctcggacggagaaattcaggtgctcgtctgcacgacgatcatcgagacgggcatcgacattccgaacgtcaacaccctcatcatcgaggacgccgaccgcctcggcctcgctcagctgcaccagatccgcggccgcatcggccgcagcgcgcgccgggcgtatgcctatatgacctaccgcgcgggcaagatcctcaccgaggttgcggccaagcgcctgacggccatccgcgaatacgcggagttcggctcgggcttccgcatcgcgatgcgcgaccttgagattcgcggcgcgggcaatttgctcggccccgagcagtcgggctacatgatgagcgtcggctacgatatgtacttgcagctcctggaagaggccgtactcgagcagcgcggtgaaaaagcgccgcagcgcaccgaatgctcggcagacctcacagtctcggccaacctgccggagagctacattccctcgggcgagcagcgcatggatatctaccgccgcatcgcggcgctgcgcaccgccgagcagtcgcaggagctgctcgacgagctcatcgaccgctacggcgagccgccccagccggtcctcaagctcatggacgtcgcgcttttgcgcgcggaggccgtgcagatcggtgtgagcgatatctcgcagcgcggcagcgagatcaccttcacctttgccgcgtccgaggcagtccccgtggaggccgtgatggccctctgctcactgccgaagaaccgccgccggctcacgctctccgccacggggacggagccgaagctcctgctgcgtctttcgctgggcgaggacgcattggatacagccttgacgctggtcggagacctgcgtgtgaataaggaagaaaacgaaaaagaggtaacattatgatcaagaagagattgctttcgttccttggcgcggcggccatcaccgcggcgctcacctttgccgtcgtgtcgctctcgccctcgaacggcttcacctccggcacgatgcaggagggtctctgctacgaagcgaccggcgtcgcgcccgacgcgatcgtcgcaagcctgaacggcaacggcgcgagcgccgaccttgtcgcatactggatcggctacgacgtgtcgtatctcaacagctacatgcagtattacaccggctcgtccatcaactgggacgacaccctctccgacggcatgagtgtcgccgactatgtgaaagcaagcgtgctctcgtccgtcaagcagcacttggtgcttgaaaatctcgccagcaagtacggcgtgacgcttaccgccgagcaggaggccgccatggccgagagcgaccagagctacattgaccagtacggcagcgaggacgcttttgaggccgagatcgccaagctcggcatgcgccgcgagacctatgaccgcgtcgcgcgctcgaactacctgtatcagaatctctatgagctctacaataccgagggcagcgcgctctacgccgccgacgaggagctcgccgtctacgccgccgagcagggctacatcacggcagaccacatcctgcttgcgacgaaggacatgacgaccggcgaagccctcaccgacgagcagaaggccgaaaagaaagcgctcgctgaggagctcgtcgaaaagctcaattcctacaccggcgacgacatcgcctcctactttgccgagctcgccgacgagtacagcgaggaccccggccgcgagacctatcccacgggctacaccttcacgaccggctcgatggtgcaggagtttgaagacgccgcctacgcgctttccgagggcgaggtgagtgaagtcgtcgaatccagcctcggctatcacatcctgctccgcctgccgctcgacaagtccgccgcagccgacgaggtgcgcgaggagtacttcacgaacttcatcgccgagcaggtcgacgccgccgcgatggcgacgagcgaggactacgataagctcgacccgcagacgatctacgaggcgatcgtcgccgcgcaggcggagggttaaatcgcagcgcggcgcactgtacggcgcttgcgcccgcgagggcgcgtgaggggcagcccgaaagggctgcttcctttttgcgtctcggcaggggcactgcttttttccctgcaccgtgcagaggacaaaataaaaaggagacctctttcgaggtctccttttattttcaggggttagcggtgctttagcacttctcgaagatggtggcaacgccctgcccgccgccgatgcagagggtggcaaggcccttcttggcgtcgtcgcgcttgagcatttcgtgcagcagggtgacgatgatacgagcgccggaagctccgacggggtggccgatggagatcgcgccgccgttgacgttgaccttgctcatgtcgaagccgagctcacgggcaacagcgatggactgggccgcgaaggcttcgttggcctcgacgaggtcgatatcgtcgatggtcagaccggccttctgcatggcctgacgggaagcgggcacggggccgacgcccatgatcttcgggtcgacgccgccctggccccagctgacgagcttggccatgggcttgaggttgtacttcttcacggcctcgccggaagcgaggacgatggcggcagcgccgtcgttgatgccggaggcgttaccggcggtgacgcgctggacgtgcttcttggtatcggcttcgtggatgccggtgggctcgaaggtgtggacgatctcgtcctcaacgccctcggggccgacggggaacgcgccgcgcagcttggcaagaccctcaacggtggaaccggcgcgggggaactcatccttcttgaactcgacgatctccttcttgaccttcacggggacgggaacgatctcatcgtcaaaacggccggcagcctgagcagcctcggtcttctgctgggaggcagcgccgaaggcgtcgagctcttcgcgggtgatgccccaaacatcgcagatgttctcggcggtggtgcccatgtggtagttgttgaacgcatcccacaggccgtccttgatcatggtgtcgacaagcttcttgtcgcccatgcgggcgccccagcgggcgtcgggagcggcataaggagcggcgctcatgttctcggtgccgccgcagacgacgatatcggcgtcgccggcgaggatggcgcggccagcctcaatgacggacttcataccggagccgcagaccataccgacggtataggcggggacggaataggggagaccggcgcccacgccgacctgacgggcgacgttctgaccgagaccggcggtcaggatgcagccgaacatcagctcatcgacattctcgggagcgacattcgcgcgcttgagggcttccttcacgacgatggagccgagctgagcggcaggggtgttcttcagggaaccgccgaaggaaccgacagcggtacggcagcagttgacgacgtacaattctttcatttgacttctcctttaaaatttgtaaatccggaatgagatccgattttcttcgattttgattatacacacagaaaaatgaaaaatcaactgcaaagttgcgaaaaatataggcaattttgatttttttctttcatttcgttaactatttaacaagaatgaagaatatcttgcaccacgggatcattttgcacccaaagacgcagggaaagcagcgccgctggcgctgcatgggaaagggggccattgtctcgcgtgagacaatggccccctttcccgcgtctccacacgctgttggaataaaaagcagcagctctgcctgactgcccccccgcgcccaagggcgcaaaaaagggacgtctctttcgaggcgtcccttttaataagtagtttctacgaaacagaaataacttagaacttgggcttctgggccttgaccttgggctcctggccgttgcagacggcgacgatgtcgttggcaacggaggtgcagcagttgagaacgctctgctcggtggtggcggccatgtgcggggtcatgatgacgttgtcgaggttgaacagctcgcggctggactcctggatgggctcatgctcgaacacgtcgagaccggcctggaacagcgtgccgtccttcaggcactcgacaagctcgttctccttgatcagagcgccgcgcgcgcagttgatgaaggaagcggtgggcttcatccagctgaactgctcacggccgatggagtgctcggtggagggaacgacgggcagatgcacggacacgaagtcggcctgctcccagacctccttggcggtggccttcagctcgcacagatcgccgatcttgtcctgcgtgaggtacggatcgtagccgatgacgttcatgccgaagccgtacttgcacttctgcatggcgagctgggagatacggccgcagccgatcataccgagggtcttgccgccgagctcataggtgtgctccatgcccatacggacgaggaagttgccgccgcggaactgacggtcgacataggtgaaacgcttggcgcacatgagcatcagcatgacggcgtgctcagcgacggcgttggcgttgccggcaggcgcgtagacaacggtgatgtccttggcgtgggcgtggtccatgtcgatgttatcgaggccggcgccctgcttgccgatgaccttgaggttcttgcaggtgtccatcatcttggcggtgatgggctcggtgcggcacatgatggcgtcgggctggaactcggcgagctccttgacgtaggtctcctcgtcgttatggctgcacagcttcacttcaaagtcgttggactcgaagatgtgcgtggccacctcgttgagctcgatggtgtagtaaactttgaactttgccatgataaagatctcctctcaaatttttatttattgaattgccaaatgatttcatacggtttcttcattataccttgcgctttgcacaaaagcaagcgattttcagaaagatttgcaagaactcattcaaataattgaacagcatctttcattttgacgatttgccgtcatgtctttcccctgttttctgcaattttcgctgcaaaacaaaaaagaacataaaaggcgcttgacaaactactacatatgtagtatatagttatcaacgacaaatgtagtagatcatctaaggaggtcaacccatggacgataagaagagactgcccgacgcggagcttgccgtgatgcaggccatctgggccgtcggcggcgaggtcagccgcggcgatctcgacggcgcgctcgcgagccacggctggagcgccaacaccgtcaacacctaccttactcgcctgtgcgaaaaaggattcctctcgggccgccgcgaggggcggaacaatttgtacacgccgctcgtctcaaaggacagatacctcgaatttgaaagccgcagcgtcctgaagcggctctacggcgggtcgctcggcagcttcgtcgcggcgctgaacgccgagcagccgctcgaacagagcgagatcgacgagctgcggcagtttttggacgatatgagccgttaaacggcgataaaaaggaggacgcaccatggaaacatttctgctgaatctgttgaaaacttccctgttaggttccctcgccattctggcgatgctggtactcaaacccctctggcgcgagcgctaccgcgcgaagacgcgctgctggctgtggctggcgctggcggcatttttgctgctgccggtcgatttttcggtgaaaaacgcgccggtgcaggccgcgccgccgaaagactacaccctctttgtcggcacggataagacagccatccaatcgaccgacaacctgtttggcgacatggccgaaaaaagcggccagtcccccgcacaggtgcgcgacacgatcatccagcgccctgtgacgaatcccgagcagaagacgacgcgctacatccccgtgacgacgatcctgttctacggctatctcgcgggcgcggcggcgttcctgctgtatcagggtgtctcctacgccctcttccgccgcacggtgcgccgctggaagagagacgtctcccgcgcggactacgccgcgatgctctctgacacggcgcgcgacttaggcgtgagcgcgccggagatgatcgtctgcgaggccatctccacccccgcggtgacgggcctgctgcgcccgcggctgctcctgccccacgagcgctacgacgtgcaggagctgcgctacatcctgcgccatgagctgtgccacctcaagcggcgcgatatgctcttaaagctcgtgctgctcgcggccaacgcgatgcactggttcaaccccgtggtgtatctgatgctgcgtcaggcggacgaggacatcgagctcgcctgcgacagcgcggcgaccgacgggctcgaactccccgagcgcgcggcttacagccggacactgctcgccgccgtgcagtccagcgtgcgggcgctgcccgcgacgacgtgcttcggcggcacggtcgagcgtctgaagcgccgcatcacgaacgtgctgggcgcgcagaaaaagcgcgggctcggcgttgtcgccctcgtgctggcgctgacgctgacggcgggctgcgccgtcggctggggcgagcgcgcacagacgcagaaaaatgatgacccgtttgccgacaagagctatacggtcgacatactcttatatgaagcgcccgcctttacggacggctttacggacggcacttacccctccttccgcaccacgacaaatactgccggagaaaagtatgtgacgctgtgcgacgcctggggctccacatccatttacggcccgatggaggaatacacgctggaaaagcagtccttctacgcgctcttcggcagcaccaaagcttcgccggtcgacgatctcatacagaacaacaagtccgcttggagcggccattgcgaagaggcaagtgacggtcaaccgaatcaggtctatcttctgaagcaaaaggacggctcggtctacctcggccttgccggcgattacgaagaagacggcagcgaactcttttgttcggttttccgcttgaacgaacaggtcaatccgatctacgcctcgatggacgactatgccgccgcgtgcgtggaagacctcaaaaaaggcacgatgacctattccgtgtcggaaaacaacgactatgcgtcccgctcgatcgaagacacggtcgccgacgtgcgcgtgacgcagctggagcaggcagattcgctcggcaacctttcccccgacggcacggtgctggagctgtggtacttccagtatgagatgaagcccacgaacgaggcaggcatgcagatcgacgtcatcggcgggcaggagctgacggacgacggatatctcaacgagaactggacgcactatctcaccgtcctgcactacacctacggcgagaagaccggctatcagatcatcggcacctcgatgagcaacgacgggctgtggtacaacggctgcggctacggcgtggacctcaagtattacctgcacgacttctatatcgactacgcggggcttgatctgccgaagatgttcattcccgacctgctgaacgacacggcggcggacggctacggccgcgccaaccagtgcgaggcgcggctcatttcgggcgacggcagctactacttctatgcgccgatcaccgcctgggcgtgcaatccggggacggagttctggtactcccgctacgacaccggctcctacttcaacgcaaagaagctcgagcagagccttgacgaagcgaaggcggaatgggaaagcaccggcgcaaaggccgagaagaccgacgcgggctggcgctttgtgacgcacgagggcatgagcaacacaattgtcacgctctttgatgcgccggacggcacctgctacgaggtcacaacgcactggacgttcgacggcagcacggaagagaatcagtggggctggaaccgcgaccgcgccgttgagggcgaggcggccattttgcaggcgatggtcaacagcttccggacgtcaaagatccttttcacggatggttcccccaacggttccgaatcttccgatccagcgcctgacgataccgcatttcaggccgaccttcagcttgcatcgaatggcggcgcgtcctggctcagtctgaataccgacggcatggcggtcggcggccacgatccgaaggacgccgccccgaccgttctgctcgatacgtgcgattataaagagtacgatccgtctgagtcctcgccctcgggcagcgctgttccgcccggcggcgggaatcccctcgccctctgcctcagcctcagcaattctgcgcgctttaccttctacgagggctcggatttcatgctctaccagcacggcgatacgcgctactacaaggtcagcagctacggcgactatgcgacgatcttcgacgcgatgctcgcatggtacaacaagacgccggacaaggaagcgacatttgaaagcgaccttgtgctcgcgtcgaatgccgccacggtcgacattctcgccttctgccccgccagcggcgagagcgggagccatgctccccttttgacgggctattccgtcgcgctcgacagctatgaatacaagcccatcgacaagccgaaaaacctcgacggtctggactctgtcgagctctggccgcacaacgcgcaggcgacgtgcctgatattctataagggaacgaacaccgtcaaatatgtgtcgggcaaaagcgaacgctattaccgcgcggtcggcgatttcagcatcgtggacaatgatggccgcacactttacgacttgatgcgcgtgtggtacgacacggcggagtattccgacatgctcacctccgacgtccgcgcccagtcgaagagcttttcgtggcaggaggccgcgcagaactgggcgaacgcctattacgggacgcagaaagaggtgacgagcggcagcatctataaattcacatggctcaatgtcacggtaaaccccgccgaggagaccacgcaggccaagcgcaaggcgggcgagatcgacgacaacacctactgctttgccgtaagggtggaattcacggcggagagcgccaacgcgctgcaaagcgccatggcgggcaacaccgtcaaatgcgagaaccccgccgcgcctaaggacgcctatgagttctaccgctgctgcaccatccagctcagggacgacggccgctggtacggaacagagctcgggaccggctggtaatgcgcgattcctaaaaaggaggggctaccccctcctttttttgcagtttttcagcggcgggcgggaaaaagtactggaacatctcaaagatatgtggtatgatgggaatattccaaaacgtatttctcgggaggttcccaccatggaacacaatccggtccttaaaaatccgctgtcgctcgacagcgaaattccgctttactcgcagctgatgggcatcatcaagcgcagcatcacctccggcgcgctcaaggtcggcgacctgctgccgagcgaggccgagctctgccgcgtttacgacatcagccgcaacaccgtgcgccaggccatcggtgcgctcgaagaagagggctttgtcgtgcgaaagcgcggcaagggcacgttcgtcactgacccgaacacgcgccgcaagggcgtgcagtattcgttcacgacggaaatttcccagctgggcaaaacgccgtcgtccacgctggtcgacttcgcggtcatcacgccttctcccaagatcgtgacgctcatgggccttgagtcgggcgtgaaggtctatcgcttcacgcgcgtgcgaaacgtcgacggcgagccgctcattttagagacgtcgtactacccagagtacatctacccgaacctgacgcgcgagcttttggagacgcacagcttctatagtctgctctaccacgtcggcgtcatcccgttttccgcgtcggacacgtatgaggccgtcgtgctcgcgccgcacgaggcgcagcttctgcactgcgcgcccggctcggcggcgtttttccatcagcgccgcaccacgactgagaacgggcatacctatgaatacaccacgagctatatgcgcgcggaccgcgtgaagctggacgtgagattccagaagggatcgacgtccttcatgcgcacggtggactgaaaaaatcggcagccgaaaggctgcctttttttgcgccctccccgcgcagcggggtttttatcgcagcgcggcagcgctgcatcgttgttccccacaccgtgtggggacgcgacaaagggggatattctctttctcgaaagagaatatcccccttacacccccaagagaaaggacgaggggccttccccctcgaccccgcacattggcagtttagggctcgaagagctgcacgcgctgcgcagtgtaagtgcggtgtacatggcttcgccatgaattttctgcgagtcgtcaccgattgcaaccgcgccttactatcgtgaggcgcgagtgacgtttgtctggcggcagactgcctgcgaaatgcggctttgctgcgctcgccgcattgatgagactggcggtagacggaaattaggctgcacttctacgagactggcagagcggcagcggataatagaagcagagacaaatcgtatagcaacactaaccgcggcagcgccgcgcgcaggcatttccattccggaggcatcaaggtcattcaagattgaaactgccaatcaaagccctttctcttggggggtgtaaggggggatattctctttctgcggaaagagaatatccccccttggtgctgcggcgcgcacgccgcattttccctccgcgctctgcgcggaaagcaaccgctcccccgagggaacgcaaaaaagaagcagccctttcgggctgccacttttttacttttcacaaatgaccggcttttggcggtcagactccacaaaggccttggccttttccaccgcttccgcgcgggggagcttcacctgctcgccggtgctcatgtccttgcaggacacgacgcccgcgttgatctcgtcttcgccgaggaagtagacgtagggcaccttgagcttgtcggcgtagttcatcttggccttgaacttcttcttttccgtgtagatctgcgtgctgacgcccgcggcgcgaagatcggtcgcgagcgagatggcctcgctcaggtcctcggtcatcggcaggataagcacgtccgccggcgcggtgcagatgtcgctattcagaaggccctgctcgccgaggacatagaacaggcgcgtcacgccgatcgaaatgccgacgccgggaagcttgcggtcagtatagtactccgcaaggttatcgtagcggccgccggagcagaccgagccgatctcggggtggtcgagcagcgtcgtctcgtacaccgtgccggtgtagtagtcgaggccgcgcgcgatggtcaggtcgaccgcgaagttctcctgcggcacgccgaacgcgccgaggtacttggcgacggtcgtcagctcgtcgaggccctggtcgaacatctcgttgcggccgcggtacttttcaagagaagcgagcacctcttcgttcgtgcccttgataccgatgaaggcgaggatctcatccgccttttctccctcgatggcgtagtcgtcgaccaagatcgcgcgcacgaggtcagggccgatcttttcgatcttgtcgacggtgcgcatgatatcgccggacttgtcggaaaggcccagcatcgcgtagaagccgtttaagatgcggcggttgttgatgcggatctggaaacgggacaggccgaggcgggagaagacggtatagatgatggcggggatctcggcatcgttcgtgatgtcgagctcgccgtcgccgatgacgtcgatatctgcctgatagaactcgcggaagcggccgcgctgcgcgcgctcgccgcgatagacctttccgatctggaaacggcggaacgggaaagcgaggtcggcataatgcagggcaacgtatttcgccagaggcaccgtcaggtcgaagcgaagggacaggtcgctgtcgcccttggagaaacggtagatctgcttttcagtctcgccgccgcccttggcgagcagcacatcgctcgcttcgatgatgggcgtgtcgagcggggtgaagccatagacgccgtaggacgagcgcagcacctccataaggcgctccatctgggtctgcggcgcgggaagcagctccataaagccggataaggtgtgagctttgatcgttgccatgatagtgtgtgtcctttcctaatagaatgtatggacagcgtactgtactgcggtggcacagcagcgtatcggagtggttgacagatattttacggtacggcgcagggattgtcaagcgtccgcggccgtttttttcactttcgagacagtatagcattttccgcgcggaattgccatagctttcgccgcctgcggtgcaaaaatttttctttccgtcgcggacagtgttcacgaaaaatgaagatatccgccaaaaagcacgaattgcgcttgacggaactgccgctttttgttaccatagagacgatatcaacgggcaagctccgaaaaccgaggtttgcccgcaagcagcttccgggcagccgtcattcggcgtccgccgcggccacaccgcgcgggcaggagtcgatccgatcggatcgttgaggaggaacgttggatgtaccagagcaaaatgaaaagcgaagagaccgatcacctgttcaaggcgatcttatctttgaaaacggaggaagaatgctaccgcttcttcgacgatctctgcaccttcagcgagatcgaggcgatgtcccagcgcttcgaggtggcgtcgcttctcgccgatggcaagaccttcacgcagatctcgcagaagatcggcgtttcgtccacgaccatcacgcgcgtgaataagtgcctttgctacggggcggacggctataagctgctgctcgagcgggcaaaagaagaaaagtaaacttccgtcactttcaccagaacaggcgcagcgcgcctgttctttttgtctatatcgctttattataatgccgcagaagcatatcagtataacatcacgtcatcccgatatagaagaattgactaaaatattttttggaatctacgcgaattttattgctttcgctgaacaggtatgttacaattagttcacaaatagattagggcatgggaaacagcgtgcaagaaaccgttgcccgacggtgctgttgcctaagttctgtgtctgtttttctgcgggacccctccgcaggaaacgcacgtccccgcgtgcggtgtgcagcgtgttcgtcatggggaggagcggcttcccgcttcctgacgggcaagtatttttatgaagagagaggtattttatcaatggcaaacgaaaagaaagtcgcacgggagcccagttttctgctggcgttagttcccattgtggcaatgatcgggttcatgctttactgcttcctcggtcattccgaatccggttaccatgacgctcacctgcccctggtcatgtccatcgtcgtcgcgtgcatcgtcggtcacttctgcggtcacgactttaaggatatgctcgccggtatgatcgagcgcctgagcgcttccatggaagctgttctgatcctctgcaccgtcggtttcctggtcgcgagcttcatggcctccggtgcgatcccctccctgatcgtttacggtctggatctgctgaccccgaagctgttcctgcctgtcggctgcatcctctgcgcgatcgtcggtatggcgtgcggctcctcctggaccaccaccgccaccatcggtcttgcgttcctcggcattggcgcgggccttggcatcaatcccgccctcaccgccggtatgatcatctccggcgcgtatgtcggcgataagttctcccccctgtccgataccaccaacctcgccgcggctgttgccgagaccggtcttttcgaccacgtcaccgcgatggtctcctccaccggcccgaccttgctcatcgccctcatcctctacaccatcatgggcctgaacatcgacgccagcacctacgatccgaccgtcgcccagtccattcaggacgcgttccgcggggccttcgtgatctcccccgttctgctcatccccatcatcgtggttatcgtgatgtgcatcctgcgcgtgcccggcctcgtcggtatcgccatctccgttgccaccgcgaccatcttcatgatgatcttccagcccacctccatctacggctcccgcgccctgggcgacatcttcaacatgctgcactatggtatcggcgttgagaccggcaacgaagtcgctgactccatcctcggcaaggccggcggtatggacggcaccatgtggaccatcaacctcatcctcctcgcgctcgcctacggcggtgctctggagcgctgcggctgcgtcgagcgtctgttcggcggcctgaagcacaagatccactccgtcggcagcctgatcctcgccaccctgctgacctccatcttctgcgacgccaccatgtgcgaccagttcctcggcatcggcgttcccgcccccatctatgctgacaagtacgacgagctcggtctcggccgcaatatgctctcccgttctctggaagatgccggtaccctctgggccgttatgttcccctggaccggctgcggcgcttaccagaccggcgttctcggcatgagcccgctggtgttcttcccgtatgcgttcgtcaacctgctcaaccccatcttcgcctatgtgaccgctgcgttcggccgcaacatcttctgggctgacggttcctacaccaacatcttcggcaagaccaaggccggcaagcccgccggtgctcccgaggaagcccacgccaaggccatcgcgaaccttgaggctcgccgtgccgccggcaaggcccccaagatcaacgcgtaatctacgccccctgctttacttagaaaggaatcaccgctgtgaaacaatcgcttccctgggaatccgtcccgcccccgatctaccccgcgcagtcgtcgctcaagccacgtaaaaagtgggtgcagaccggcggatggatcttggttgtcgtgctgctgctgttcggcatttcgacccgcagcagaaacccgctgctcgccttcgtctcgctcgcgttttccgtgctgtatctgctgacgctgatgaccaaaaaggacgccgctctcacgagccgcggacttgagatcttctacaacatgcagttcaccaccaactacgagttcttcccctgggaggacatcaatgcgatcgtgtgcgaggaccgcgggcacaccgacatggtgcgcctgcacatcggccacggcaacacggaaaaggctctcttcttcccgcgcgaagacctcgacgagatctacgcgttcatcaagaagaagaatccggcgatccgcatcatggattatgccgcgcccgaaccgaagtccagcaagaagcacaagaagtgaacaactgtgacctttccacaaagaatgaagggcgccccgcttttgcggggcgctttttttatctattctgtccaattctatcactgtaccctgatagtgtgttatccaaatatggtgatagcgcacaacaagtaaaacttttttcggcaaaaaactattgattttgcacaaaaatgtgctatactgtttccagaacgatcctgtgggacttttccacaggcggagcgccatccacgcacgggcatgcgcggaaagcaaggggaacgcttcgacacgtttcttgcacttggacggttcgggcgaccggacacgccgaccgggtcacaccggaactttgagaaaagagaggacactaccatgatcatgaatcctaccgcgatcaagcatgtcgtcgtcgatggccacagcctgacgctcgaatccttcgtcgccatcgctcgctacaatgcgaccgtcgagctggctccctccgctctggaagccatgaagaagtcccgtgccctggccgagaagatcgccgctgagggccgcgtcgcttacggcatcaccacgggcttcggcgagttccagaaggtcgccgtccccaaggagatgagcaatcagctctccaccaacctgatcctcagccattgcaccgccgccggcgagccgtatgctgacgagatcgtccgcggcatgatgctgctgcgtgccaacgctctgtgcggcggcgtgagcggcgttcgtcccatcctcgtcgagatgctgctcgagatgctcaacaagggcgtgaccccggtcgtcccgcagaagggctctctcggctcctccggcgacctggctcctctcgctcacatgacgctccccatgctcggcaagggcgaggccatgtacgagggcgtgaagatgcccggtgctgaggccatggccaaggccggcatcaagacgctcgacaccctggtctccaaggaaggcctcggcatgacgaacggcacctgcgcgatgacctccgtcggtgctctcgcgctgtacgacaccatctgcgccgcccagctcggcgacgtgatcgcgtccatgtccttcgagggcctgaccggcctgcgcaacgccttcgacccccgcatccatcaggtgcgcggccagaagggccagatgctcgtcgccgcgaacatgcgcaagctgctcgacggctccgagatcctcgacaactgccagaaggaccgcgttcaggacgcttacgccctgcgctgcatcccgcagctgcacggtgcctgccgtgacgctctcgattacgtccgcgagaaggtcgagatcgagctcaacgccgtcaccgataacccgctgatgttcctcgatgacgaggccgtcatctccggcggtaacttccatggcgagcccatggccctgccgttcgacttcctcggcatcgccgcgagcgagctggccgacgcttccgagcgccgcaccgagcgtatggtcaaccccgcactctccaacggcctgaccgcgttcctgaccacccaggccggcgtcaactccggtttcatgatcgttcagtacgctgccgcttccatggtcagcgagaacaagatctacgctcaccccgcttccgtcgactccatcccctcctccgccaaccaggaagacatcgtctccatgggtaccaccgctgcccgtaaggccaagatgatcctgcagaacacgcaggacgtcctcgctgacgagctgatgaccgcctgccaggccatcgacatccgccgccgcctgaacacccacggccagggcatgaccccgctgcatgaggctctctatcagcacgtgcgcgagaaggtcgctttctatgagatcgaccgtgagatctggcccgacatccgtgcggtggaagcgatgatccgctccggcgagctgctggatatcgtcaaggagtatatccccgactttgaataagtcaaaaacgggcaagcccgtttttgagaggggtctcaaactttttcactcaccgtgaaaaagtttgcagagtgtccctgcggacgcatatgtcgtcctctgggacaatccaaattgtttgcggcgtgcgcggccgcaaatgtgatgcgtctcaaaaatggttattgcaaccgatttggggacaataatgctgaaagatttgtgttttgacacgaattgacaggatgtaaaagaaggtgtaaagttattttggctttacaccttctttttttaggaggaacttactatggaactgaatattttacgggcggacccggcggggaacattacggtgttcgtgctcgatccggtcgaaaaggcacagcgcgcggccatcgcggagaagatcatggcgatccccgcactcaaggccgagcaggtcggctacgcctgcgccgccgaggacgacgtcgacggccacatggagatgatgggcggcgaattctgcggcaacgcgacacgcgcctacggcatgtatattgcccagcaaaagggcggcctttccgccgtcaagctgcgcgtgagcggctgcgaccatgccgtcaccgcgcaggtcgatctgagatccggcacggcgcgcgctgaaatgccctgtccgcgcagcgtgaagcgtgtcacggtgaatggtcacgagggcacgctcgtcgacttaacaggcatcgcccacttcgtcgttgagggcgtggcgccgagcgaagggttcttccgcgcggcggagtcgatcttttccggaattgcaggacttgacgcctgcggcgtcattttcctcgatgcggaaaagcgcagcatgatcccgctcgtcaaggtcatcgagacaggctccctcgtctgggagggcagctgcggcagcggcagcgtcgcctgcgccgtcgcgcagagcgaatgcatggaaaacggcggtttttcgtgcgaataccggcagcccgcgggcgcggtccgcgcaagcgtcgagcgccaaggcggaaacgtcatcgccgcgagcatcggcggcgaggtcacgctggatgagcccatgcgcatcacgctgtgacgcggcagagtgaaatgaaagccgggcgctggcaactttcgcttttctcgttttgacctttgccgcaagcgttgaaaattcgtccaaaaatctcccgttttttctttttaaggcacgcgaaccaacgcttaattttttaaggtttttggaaaaaagaggattgcaaaacagtttacctttctctatcgtttggctataattgattttgtcaataagagacaattctccgcttttaaatacataattatttaggaggtattccccatgaccgacattgagatcgcccaggcacatgaaatgaaaaaaatcgtcgacgtcgccgccaaggccggcattgacgaaaagcaccttgagctctacggcaactacaaggccaagctcgacttaagcgagatccgcaagctgccccgcaaggcaaagctgatcctcgtcaccgctatcagccccacccccgcgggcgagggcaagaccaccacgtccgtcggccttgccgacgcgctcaacaagctcggcaagaacaccatggtctgcctgcgcgagccctctctcggccccgtgttcggcgtcaagggcggcgctgccggcggcggctacgctcaggtcgtccccatggaggatatcaacctgcacttcaccggcgacttccacgccatcggcgctgccaacaacctgctggccgctcttctcgacaaccacatccagcagggcaacgtgctcggcatcgacccccgcaagatcgtgtggaagcgcgctgtcgatatgaacgaccgccagctccgccacatcatcgacggcctcggcggcaaggccagcggcgtgccccgcgaggacggctttgagatcaccgtcgcgagcgaagtcatggcagttctctgccttgcgaccggcctcgccgacctcaaggagcgcctcggcaagatggtcgtcgcctacacctacgacgacaagcccgtcaccgcgcacgacctgaaggctgagggcgcgatggccgcgctcttaaaggatgccatcaagcccaacatggtccagacgctcgaaggcactcccgcgttcatccacggcggcccgttcgcaaacatcgcccacggctgcaactccattcaggccactgagaccgcgatgcgcctgagcgactataccgtcaccgaagccggcttcgccgccgacctcggcgccgagaagttcctcgacatcaagtgccgcgccgcgggcttccaccccgacgctgtcgtcatcgttgcgactgtccgcgcgctcaagtatcacggcggcgtgcccaaggccgagctcaacagcgagaaccttgaggcgcttgaaaagggcctgcccaacctcctccagcacgtcgacaacgtgaagaacgtctacggtctcccctgcgttgtcgccatcaacgcgttcccgaccgacaccaaggccgagctcgacctcgtcgagagcaagtgccgcgagctgggcgtcaacgtccgcctgagcgaagtgtgggccaagggcggcgaaggcggccttgcgctggctgaggaagtcgtgcgcctgtgcgacgagcccaaccacttccagttcgtctacgacgtcaacgacagcattgaggacaagctcaacgccatcgctaccaaggtctatcacgctgacggcgtggtcatcgccgcttccgccaagaagcagcttaagcagctcaccgagctcggctttgacaagctgcccatctgcatggccaagacgcagttctccttctccgatgacgccagcaagctcggcgcgccccgcggcttcaagatcaccgtccgcgacctcaaggtcaacgccggtgcgggcttcctggtcgccaagaccggcgacatcatgacgatgccgggcctgcccaaggtcccgtccgccgagaagatcgacgtcgacgaaaacggcaagatcaccggcctgttttaattgtacacgctcaggaacaggtggagcgcgcctccgcctgttcctgatgaatttttaattttaacccagggagggcactatgaagatcgcagatatgaaagtaaccgagctcatcaacgaagtcggcgcgggcactcccgcccccggcggcggcgcggtggcaggccttgccggcggcgtcggcgtggcgctgacgatgatggtcaacggcctgacgctcgacaagaagggctttgaaaacgaccgcgagcgccttttggacgccattgcaaagggcaatgagctcaaggagcgcttcatcgacgtgatgaaccgcgacagcgaggtctttgatgtcctgatcgaatctctggccctcccgaaggacgacgatgagcacaaggccatccgccgcggcgcggtgcaggcgagcttccgcaactgcacgctggtgccgctgacaatgatggaaatttgctccgaggccatcgacctgtgcgccggtctcgtcggcacgacgaacccgaacgtcgtcagcgacctcggtattgccgcgctcacgctcaaaaccgcgatggagagcgcatggctcaacgtgctcattaacctctcgtccttaaaggacaaggcgttccgcgacgagtgctgccagaagggcgaggcgctgctcgcgcacgctgtacctatcgcccaggagagctatgaaaaggtgatcaaggtcatcaccgaaaagtaagcgctccgccttttcgtctttcgtcattccacgccgtccgccgcgtcaagcacgcgccgcggacggcgcgcttttttctttcctgaatttttgcaatttacagtagcattttgcggattttgtggtacaataccatcggttcatattttatcgatctaaatactgcacgaaagaggcttttttcatggattttgttgcaaacggctccaaaaacgttgaaattgagacgtccacgggcgtctatctgcgccacgccatccagacgcacttcgtcgagattggcgaggattacatcgaactcgtcaaccgctacgtcaagcccctctacgaggagggcgacctgctgagcatcagcgaaaagatcatcgccctgtgccagaagcgcgtggtctaccgcaaggatatgaaaatttcgtggctggcgaaattcctcagccgctttgccatccagcacaacagcgccggcatcggcgtgggtgaggtgtgcaagatgcagttcgccatcgacgagtgcggcgcgtggaaggtcctctgggccgccatctgcgcgggctttggcaagctcgtcggcaagcacggcatcttctatgatatggtcggcatggaggtcacgggcctcgacggcttctaccccgacgtgttccccgtctacggcgactacggcatccgtattccggaaaatccctcgggcgtgtgcaacgagatctatgagaagaccggcgtgcgcgcgatgatcgtcgacgcgaacgacttcacgcgcgacatcctcggcaagggcgacaacgtgaccctcaccgacaaacagctgtgcgagatcatccgcgataaccccgcgggtcaggatgaccagtgcacgccgtttattctgatcaggaaaaaacagtaatttccccctgcgggggaagcgtgttgtttccctgctggcaggggaacgggcaaagggggccattctctcacgtgagagaatggcccccttttgatcccccaagagaacgcaaggggccttgccccttgaccccgcacattggcagtttgcagctcgaagagctgcacgcgctgcgcaatgtaagtgcggtgtacatggcttcgccatgaatccctgcgagtcgttaccgcttgcaaccgcgccttactatcgtgaggcgcgagtgacgttacctcagcggcagactgcgtgccgaatgcggcattgctgcgctcgccgcattgatgagtgccccagtagacggaaattagtccgcacttctacgagatcagcagagcggcagcgggtagtagaagtaacccaaatcgtatagcagatccaaacgcggcaacgccgcgctatgggaagtgcagtcggcaagcattgcagctcttcgagctgctcgcttgcaatggcaaagcctttctcttggggttccaaaggggatattctcttttgcgaaagagaatatcccctttgattcgtgcagcgccactggcgctgctttctcccccgccgcgcagtgcgcggcgttatgtacccttcttatgcgggtaaggagcccgctcctccgtgagccccacaagataatccacactcgtgtggtaaaaccgtgcgagcctgatgagcacgtcgctcgggacgtcgcgcttgccggtctcgtagttggaatagcagacctgcgagcagctcagatagtccgccaagctcttttgtgtcaggtcgctgtcctctctcaagtctcgaatgcgtcgatacattttgcttcactccatccagaattcgtgtttagattctgtaaagaagtatacgtaaaacaaaatgttatattgtgctatataacaaaacgttatataatttttgagggtggttctatgacggactacaaggcaatgtatctgctcctcttcaacgccgtgactgacgcgctggagaaaatggacaggcagaactatggtgaggccagcgcgctgctgatcgccgcgcagcagaaggccgaagagctctacatggactcggacggcgaataacacttgaacaacgtaaaaacggagaggcaatgcctctccgttttctcgttctgctgtttttaccggtcgagccccgtatcgagccaaccgggcttttcctgctcgacgggcggctctgtggtcgtgccggggtctgtcacgccggggtcagttgtggtgcccgggtcagtcgtggtcccggggtcaacgggcgttgtcgggtcggtcggcgtggtcgtaccgggatcgacaggtgtggcgggatccgtcggcgtgaccgccgcggacttgccgacgagcacgatgcggttgcgcgccttataattgctgctcgcctcgaacgtggacgaaatgagcttgccgtcaccggagtagacgttgcggtacgtcttgaccttgtagccggtgtaggcggtctgctcgaccttgcgctcgccgggggcgagctcgtcggtctcaacgatctcctccgtgaacgggatggtttcaagcacttcggtcttgatcttcacgtagctgtcgtcgaccttcgtgccgaggagggacaccttcaggtagttcttgccgccgctcgtgtaatattcggcaatgaccttgatggggtacatcgtgttgttgcggaactcgaactcgggcccgccctgcgcgaccgtcgcgtcgaggccgaggccgatgtagtcggacgcaaagccgtggttcgtgcgctgcacgatctcaaggttggcgtagagcgccgcggcgtagagcgtggagctcgcctgacacgcgccgccgccgaccatatcgacggtcttgccatgcaagtaaccgggcgcggtgctgtagccgttcgccgcggtaaagggcgtgacgagcgggccgtatttcatcgtttcgccggagttcaatatgtagccggtgatgcgcgaggccgtcagcttgacgttcgcgcggcggccggacgcgccgccaaccttcgtggtgtaggtactcagcacatcgcggaacaggaccttttggagctgctctgccgtgacgtccggcgtctcgaccgtggcgttcggcaactcgaccgtctcccccgccgccgcggcgttgtaggcggattcaaggtcagaaagcgtaaattccacgcccgcgtggcctggcgtgaccgcgccggtctccttatcatacgtcgcgttgaccttctggccgatgatggcctcgcgctgcgcgctcaggtcgacctcctgtgcagggatgacatcgtagacgccgccctcgctcgcaggctcaagcacgatctcggacgggtcgccgccgctcaaatacgcgccgtttaagtatacgccgatctggtcttttgcggtatcagtcgtcgcgcggccgtcctgcggcttcgtcacgctgaccttgccatcctctgtcacgttgatggcaaactccacggggtcgcagttgatgctgtcgcacaccgtgtcgacaaggttctccatcaagtctggcgaataggccgcgccgaccacctgtgcggcgtcctgcggcttgaagagtgcgcgcagatacttcgcgcccgcggtcagaaagctgtcattgcagccgtagacgttgtagatatgcttggcaagtccgtcgaagtcgacatactccggcatctcgtcgagcgaaacatgcgcgacctccgtgccgtcgggcaggacgaagtcgacgcccgcgcccttcgcctgcgcgacgctcgctttgagctgctcggcgacctgctgctcggtcatcccgccgtagttggtatcgcccatcatcacgttgggataaattttatggctggccgacgcccacgcgccaaggcccaagtacgccaccacgagcacacccgcgacaatgccgacgaccttgccggtctttcccgatgtttcacgtggaacgcgcggcggcttttccgcgcggggctccttggccgcctttgcggccttttccggctgcatcaggcgcttgccgccctttcttctcttcttttcctcaaaggcgccgttcatttcatccatgctggctcctcctgtttcttccgatcttccggacagggacttccctgccagtcgtttcagtataccacagtttgtgagaaaaagaatcacaatttggtgacaattttacgggattatccggcctcttttgcacgtttcgggatgcggatagtcaaaaggatgccatcgtccgtgtcctcgcgctgcatgtcggcctcgacgcccgcgcgctgcatcaggccgagcgagtggcggatggtgttcaaaaagatgcgcacatccttgacgatgtaggtcggcaggcgcggcgggggcgttttctgcttgagcttcaaaagctcttcgatatacgcctcgctctgcgcgacgttgtagccgcgtgcggcgataacctgcaaggctttgaggcggtcttcctcgtccgtcaggcgcagcagcgcccgtgcgtgccgctcggagaggtcatgctcgcgcagaaggcgcacacagtcgggcgacaggcgcagcagccgcagcttgttggcaatggcggactgggatttccccagtctttccgccgcctgctcctgcgaaaggccgtaggtcgcgatcagccgcgcgatggccgcagcctcctccaagtagtgcaaatcgcggcgctggaggttttcgatcagcgcgagcagcgcgctctcctcctcgctcgagcgcgcgagcaggcacggcacctcgcgcagtcccgctatcttcgccgcgcgcagccgcctctctcccgcgatgagctcgtagccctcgtccgtgcggcggacggtcagcggctggaggatgccatagcggcggatgctgtcgctcagcgagcgcagcgaggcctcgtcaaactcgatgcgcggctggttggggttggggcgcagcgcatcgatgggcaggtcgagcacgcggcgcgggagcagcggctttcttgcggacatttccatggatttcccctcctttttctccacttttagcacaaaaagtgtgcaaaaacgggcgaaaatcggcggagagatcaaaaaattcgcaccttgcggtgcgaattttcgttttctcatttatttcccgtcgtgcttgacgtggatacggctgatcgcgcgggcgatgcgggcattggcaatggcctgctcctgcgcgctgcgcttcgccttgagctcggcgcgcgcctcggcggccatttcctcggcgcggtggaggtcgatctcctccggccgctcgatcgtgtccaccagcacgagcgcctcgccgtgctccatcttgagcacaccctcggacacggcggcgatctgctcgacgccgtcggcgtcccgcagcgtcagcttgccgggaacgaccgcgagcacgatgtcctcgtgctgcgccatcaggccgtacatgccgtcgatgctcggcacggtgagtgatgtgcacgccccgtcaaaaaacgtgcgctcgggcgcgaggacgcggagaggaaaggtcttcatcacgcttccccgctttccatcttcttcgccttggcgagcgcgtcgtcaagcgtgccgacgttgtagaacgccatctcgggatagccgtccatctcgccggagagaatggcttcaaagccgcggagtgtctcctcaagcggcacatagacgcccggaaggcccgtgaacttttcggccacgaacgtcggctgggccaaaaagcgctggatctttctcgcgcggttgaccgtgaccttatccgtgtcgctcagctcctccatgccgaggatggcgatgatatcctgcaattcgcggtatttctgcaaggtcgcctgcacgctgcgcgcgatgcggtagtgccgctcgcccacgatgtcctcttccagaatgcgggaggacgattcgagcgggtcgaccgcgggatataagccctgttcggcgatcttacggctcaaaaccgtcgtcgcgtcgaggtgggtgaacgtcgtcgccggggcagggtcggtcagatcgtccgcgggaacgtagaccgcctgcacggacgtgatcgagccgctcttggtcgaggtgatgcgctcctgcagctcgcccatttcgtttgcgagcgtcggctgatagccgacggcggagggcatgcggccgagcagggtcgagacctcgctgcccgcctgcacaaagcggaaaatattgtcgatgaacagcagcacgtcgcgctgctcctcgtcgcggaagtattcggccatcgtaaggcctgtcagcgccacgcgcatacgaacgccgggcgcttcgttcatctggccgaagacgagcgcggtcttgtcgataacgccgctctcgtgcatctcgttccagaggtcgttgccctcgcggctgcgctcgcccacgccggtgaagatcgaatagccgccgtgctcgacggcgatgttgtggataagctcctgaatgagcaccgtcttgccgacgcccgcgccgccgaacaggccgatcttgccgccgcgcggatagggctccaaaaggtcgatgaccttgatgccggtctccaagatctcaacgctcgggctctgctcgtcgaaggcggggggctttctgtggatgctgcggcgcggctccgcgccgccgatcggcgcgccgccgtcgatggtatcgccaaagacgttgaaaagccgtccgagcgtcgccttgccgacgggcacgcgaaggccgctgccttcgcccgtgacggtcatgccgcggctgaggccctcgctaccggagagcatgatgcagcgcaccgtttcggcgctcaaatgctgctccacctccatcacaaggcgcttgccgttcagctcgacggacagcgcctcgcggatgcgcggcagctcgccgtgcgggaagcgcacgtccaccacgctgcccgatacctgaatgatcttacctgtgcgcatgctgcgcctccttcttcatgtggttcttcttgctgcgcgcgccggcggaaacctccgtgatctcgctcgtgatggcgccctgccgctcatggttgtactcgagccgcagctcgcgcagcatgtcgtcctcgttctggttggccgagtccatggcagaggcgcgcgcgttctgctcggcgcaaaagctgtcgaccatcgccgagtacaaaaagcccgtgatgtacgccggcatgaccctggcgagcacctcctctgccgagggctcaaagcggatgggcttttcccccgtctcctctttggcaaagtgctcatcctccagcggcagcaggcgcacggtgcgcacgtccatgtccacgccgctgccaaggtcggtgtagatgataaagagcttggagatctcgccccggtcgaagagatccaaaagcttcgccgtgatctctcgcgcgcggcggagcgtggggctctgcgcatcgtagaggaagctcttttccaccggcacgccgtggccggagaagaagtgccgcccgttgccgcccaccacaaaaaggcggctgtcggggtgcttttcaaggcgcttcatcgtctcctgaataacattctggttgtaggcgcccgcgaggccgcggtccgccgtcaccacaagataggcgtatgttcccggctgggccagatcgtccgcgttgccccggtagaggtacgggctctcgatctcgcccgcgtgctggaatatctgcttgatctgcgtcgagaccgcgtcgaaaaacggacgcgtcttggcaaggtcttctttcgcccgccgcatcttggtcgaggcaatgaggtacatcgcgttcgtcaccttctgcgtgctctggatgctcgcgatgtgctcgcggatctccttcatgctcgccatgtacctgtcacctcactttttatttggaaaaatagctttgcacaaattcctttgcgcactcgatgatctgcgactgctgatcgtcgctgagctggccggtctgctcgatggcattgcacagcgcgccctgcgtctcgccaaagtgctgcaagagcgcggggataaacgcgtcaagctgctctggcacgatctcttgaaaaacatggttcagccccgcgacgagcaggatgacctgctcatactgcttgtaggggtggaactgcttctgccgcagcatgcgcatcaagccatgaccgtaggataaaagctttgccgtcgactcgtcgaggtcgcttgcaaactgcgtgaacgactccatctcgcggtactgcgaaaggtcgaggcggatggtcttggctgcctttttcatcgccttggtctgcgcgtcgccgcccacgcgggacacggacaggcccacattcaccgccggacgctggccggagaagaacaggcgcgtttccagaatgagctgaccgtcggtgatggaaatgacgttcgtcgggatataggccgaaacgtcgccggactgcgtctcgatgatcggcagcgccgtgatgctgccgccgcccttctccccgctcagatgcgccgcgcgctcgagcaggcgggagtgcagatagaacacgtcgcccggatacgcctcgcggcccggggagcgctccaaaagaaggctcatcgcgcggtacgcgatggcgtgcttggaaagatcgtcgtagacgatcagcacgtcgcggcccttattcataaagtattcgcccatggcgcagcccgcgtagggcgcaatgtactgtaacggcgcgggatcgctcgccgtggcgttgacgatgatcgtataatccatcgcgccgtgcgtttccagcgtctttttgagctgggcgacggagctcgccttctgtccgatggcgacatagatgcagatgacatccttgcccttctggttgacgatggtgtcgagggcgatagcggtcttgccggtctggcggtcgccgatgatgagctcgcgctggccgcggccgatggggaacatcgagtcgacggtcagaatgcccgtctcaagcggcgtgtcgacgctctggcggtcgatgataccgggggcgggactctccactgcgcggtagccgtcggcgcggatgtctcccccgccgtcgatgggcacgccgagcgcgttgaccacgcggccgaggaacccctcgcccacgggaacgcccgccgtgcgtccggtgcggcggaccgtgctgcctgcgcagacgctcgcgtcgtcgtcaaagaggatgcagccgacgctgtcctcggataagtcctgcaccatgccgcgcacgccgccgtcgaaaagcagcacctcgccataggcggcgccctccagcccgtccacgcgggcaatgccgtcgccgacggtcagaacggtgccgacctcctgtgccatggcctgcggcgtccatgagagcaccgtctccttcagcagcgggatgacgtcgccctgcgtggcagcgagcttttcgagcgcgtccttgaactggctcaggcgtccgcccgcgctccagtcgtagacctccgcgcccacctcgaggcggaaaccgtcggggaagtcatcactcttttgccaggtgagcgtcgtgccctcgccgtacttttcggcgaggaaggccagaaatcgcttctcctgctcctgcgacggacgcacggcagagagcagtacggcctctaaatgctccgtgcgctcagccattgtccttgcgctcctccgccgtgtccaggaacttgtcgtaagcgtccgacgtgctggagagcaccagcttttccgccgcggcgctcatcagctcggaaatttcgcccttggcctgctccatcacgcgctcatgctcgcgcgcggcatcttcccgcgccttgcgcacgatctcgcccgcctgctgctcggcctgcgcgcggcgctcgtccaccgcgtgctgcaaggcttcgttcgcctcacgctggcggcgtgcgatctcctcgtcggcactcttgagctgcgcttcatagccggccttcgtcttctcggcctcggcaagcacggccttggcgtcctcgtccatcttctcatagtgcgccttgcggctgtccataaagctcttcacaggcttgtagagcagaaaatacatcgcgccgaacaggataacaaagttcagcgcatgcagcaggatctgctgcaaattgatattaagcggcattcaaagcccctcctttttgggagtgttcttcatcaaaggacgaagataatgaggatcgccacgatcagggcgtaaatgatgaccgtctcgataaacacaaggcccatcatcatcgtggttctgatctgacttgtggcctcgggctggcgggcgatggcctcgctcgacttgccgaccgcaatgcccatggccagcgcgccgccaaggcacgcaatgccgatcatcacgcccgagcccatcgctttggcagaggtcacgtcgttgtcgttgctgccggccgtgacgctcacggtctcagtcacgttgctgtcgctcccgctttcgtttgcggcgagggccggaatggtgcagatcatcagcgcgcacagcagcatcatcagcgctgcgaatttcttcatcgttttcatggcaattttacctctttcttcaggcagccgtttcgctgcgggattctttcatcttttttgccttgggctttttctcgtgcttttcggtcgattcgccgtagaacgtcgacaccagcatcgttaaaacatacgcctggatcagcgcgtgcagcagcgtgaacatcacgcccacgatgaccggcagcacataggaaagcgccgcgtagtaatacacaag

SEQ ID NO: 10124 - DNA, 13489 bp, Unknown
  gut microbiota DNA sequence
aaagcgtattcggagaatatttgacggtaattatagtgcaaaagctgggcagcgagtttcctcgccgcccagcttttttaggtaatgaactgcggctgccccccatttggggcgttttagagcttgaacagcctgatacaatgaatcagcgttgcactaagttcctggaagagatcctcgtcaaagatgccgttcacgcaggactccttgaacagcagcggacgatacatcaaaaatatctcttccttcgcctgttggtcaccgtcttttgcacggagcaatagatccttgaagttcactttacgtccctccctgtagcctccttgactttttttgcagacacgatgatatgcagccgcaactccctgatacccaaggtcaagctctaaagcgagttcatggaagctgcgtccatgtaaagcacgggaaaagaagatatagcggtctctctcgctgatgcgattcaaaacctcctcaagcgcagcattttcaatgcagcaaagcaagtcggtcggatcagaaatgccgggtgcctcctcagttgacaggtcatccggatctgtcagtacctctctcgcctggcggcgctgtttggcgtgaaggtagtctgcctttctgtgcgcaaccgccgagagcaaataggcggtaaatccattctgggtgatgttgctttccccttttccatcgtttcttatatacatcttcgttcctccgtttctgatttttttggaaaatttcagaaacgggggacttcgacagcgatatcgctcactcgctaaattccgacaaagtaaaagagaagcgcacagcagacaatgctgtacgtttctctttttccttatctgccccgctatatcggggacgtattcatcatcctgaaaatagaagtttccttcgtgcgaatagaaaagaacttcaaatcgcagggcataaactgttatgcttccagagttcctttggctgcttggacggcatctgttcttttcctctaatacaaggatcttcttagcgaccctccagcttgcttacctcttttttcatggtttgcttcaccctcattatgcagataatttgtactatctttctaatcattagaagtgaaacggcatttattagaagcgcggttccaattaaaatagtgataaaaagacgagcaaaacagttggaaggagctgcccgcgaacaaaagacatagccgccattctggtggatgccgcgatcagtgaagaaaacgccgaagcgttccaaagctgctgtaatgagcgctttggcgctggcgttaccttaaacctgttgaatctgatcgacagtggccgttttgaggtaaaaacggccaacgcgactatctttgttgcgcccgagcagagttatctgctggagactcgtgtgatcgatgggcgcaattatctgacgatccccgtcgaagaggaaatcgaggtcaacggcttcggtgtccgcacccagggagaaaagcaaggatgaatgtccgataacgcggtcataaagttaacaagcaggaagcctctaccgtggcagaggcttcctgcttctttagtatacttagtatttacctgcaaaccacagtataggaagtgatataccctgtgtctgagcctttgctgtttcgcgcatagactgtcagcgttacgcggtagctgacaccgggtgtcccttgaaagtaggttgttccaacataatcccatgtattgtaatcataaaattcagggtgttcggcaccatactgagaatcatagtaggtccatttcccgtttattttctgctcgatttccacttcgtgcacaccgagcttttccattttgctgcgggcctcgactgtcatggctaccgcaatcttaccattccctctcgcttcgattccaacactgtaaccgtccaaataggcgctggagcggatgccgtttattgtgggcattccggtttccggacgatatacggcggatgcagtcatgcctacgctgaacatcataattagcatcaaaaaaagggaaaagagtcttctcttcatagtcattctcctcatatgattttattgaattgagttaatcatctctttaatctcagcctcggatatctgtccactgattacataagatagcattccatcttgccatcctgcttttgtcactccgtcgtccgtcaaaatgtagtattcggtttgattgtgcgtataaacacttcccaatgaatcaagctctttcgcttcggttgatagtgccatcgtatgctctattacgcgaatcactaaacctccacgggtcgaatcataaatggcagaacatttaagcacaccatctgacaacttaactgcaatagccgaaaccgcataatctctcggcacccatgtgggcagaccttctgtactgatcccgtttgccgccagagcctcatacatggaatgatactcgctgggatcgtcgtcaggcaattccatgatgccggaaggattggtatagatctgaatgattccttcggcccatcgcaggacagcctgaacaggttggaatcccatagcgctggcggttataataaagcaaaatgccgcggctgcggcaatagctgccgcacggaaaacgcgggaaaaggatcgacgagttcggttcccatgtcgattccttgcttctgccgcaagatcagacttgcaggaactcgtttcttcttcaaaaatcaacggatgggattcttcgagttttgcccatttttcttccgggtcataatgctctgcgactggtgcccttttttgcaacagtgacagatattcctcaatcctgtccgtatccatctcctccgcagatacacttagcattgcttctacttcattcagaagctgcaaattagatttttccgtgatggacgcggaagcagaatctgtttgctttctcccgacagcagatttatcgggatgctggctacccaacatttcattaccccctttactagttcatctcatgaattatcggttttgtgacaataatttgataattattttggcgtgctgccaagaggctcctccagcagtgttctgcacttgtggagcgctctggataatcgctgacggcacgccatttcactgattccaaaatgctctgcgagttccagaaatgaatagcctttatcgatgcgaagcaggatgatctcctgctcagatccgcttagccccatcggaatatgacaggccattggaagttccgtgagttcatagctttcagcgatatcttcaatcgaaacctctgtatgataaaagcggcggctttcgcgaaggtcaaattgttcaatgtctcaaagagccacgccaccggtttcttgtgaccgcatacccgttccgacttacagcacgctgtcagaaaggtctcctgcaccaagtcctccgcaagatgccagtcccctacgcgacgatatgtaagccggaccatggcatcagagtattgaagcatcaaatgatggatgtactctcgctgctgcttatccatacaatcccttccttcgcaaaatctcaccaaaaaatcagctgccatgcaatcaacagccggcagctgatttatttgaactggtggctctcaccatgctccataatcgttttgcacacagacaggcacaatttgacctgctccggcgcggcatctttcaacatgcttgcaaattcaacagaaatgctgacgtctggaggaaccggaatgttgcttccaagcagagtataaagatcaacgcgcagtgctgtcgatatatccaccagtaatgtcaggctcggcttcgtttgacacctctcaacgtggctgatgtgctgggatgtaacaccgaccatttcggcaagttcagcctgcttgagattgcagcggattcgacatattttaatgttgtttccgatttcctgataatcaatcatacttcagcgtctcctgtaatacgcgccacggtactattctgcctatacgcatattatacagggagtcattcgtacaataaatcgactatcaaggcgtttatcgctcttatagatataatgcgcatgatatttttgcattttccccatgcgaaaacaataggagtgcatctgtaccgatgatcattacggtgcagagaaatgaacggcatgcgtcacaaaaaattgcagaaaaaatcgaacttcttgtcacaaatcgacactgtcaagagatgaatatagtaagggcacatttttggaggaggtggtcattggggcaacatccgccgcagatccactgtcatgtatcgtagagaggagaatagcaaatgaagctaaaacgattccgaaacaaattcatttcgatgctgcttacgctggcaatgcttttgacactgttccctaccgcagtctttgccgaggatacggcggctgaccgaccggccagcgccgaatttaagatcatgggactgtacgctctccgggataacgggcggcgtgtgtccttcttctcttatgagtcaagagacaacgcattcctgacaaaagccaatatgacctatcccgactcctggttcaagttgatctatgtgatcgagagatcacagccggtcacgctggaactgtatgagatgaaggatgaacccgcgtatatggatgaagatattgtttccatgccgtatgcgccggaggatgatgcggatggacacggaaaactccagagcgaggagttccttggccgccgactaggcgtactggtgggcgttccggtgcaggaaaatattgccccgcttcaggagggggatgacatttatacggcggagcaggtgagctattcgcctatcgatgaagatgagtggctgaatatcgtctatcagacgatccgcgggaagcgtcagccggaagtgattgaggatttctacgcttttggctttgagggcaatcgcctcgccggactggacgatgcggctgcaacggtgagccttgatgagctccctgccccggaagatatggcagagacagacgctctgctcccctcggaaaatctagatgctccaaatccagaagcaaatttgcccgctgacatcaacgatgaagcaatggatacggaaaaatctcctgccaatgagacatcggaggatggggcttccgaggaaagcctgacaacggatacggagtctgcaacggcgatagaggagtcctttgctccctctgcaaatgcggaaccattggaagatgatgcggacacgacacctgccgatgcggatacggtggattcggaggcggtggaaacggataaggcagatgtgccggtgacagcaattgaggacgagccttctgcagaaaaacctgtcgaagctgtttcggacgtggaaccggaggagcagccggagatcaatgcggagatcgactatctgccggaaagttctgtcctgcccagcgcacacgctttcttcggcttgacggatgctgccgaagaaagtgaaaacaccatccagaatatagttctgtgggacggcagttacagggatgacagcggcagcctcacccgtatttccagcggcggccgctacgtcatcgtcatgcagccctgcacgccccggacagcgatctacaacagcttcctcggttttgatgtgccggagaaaggtgaggccattgacaccttcgagatgatcaattcctgggatgatctgatcgcaattcgggatgaactggcctgcagcggcgaccctgtggatctgctcagcggcagttttacatggaattaccgtgaccttgcgctgtacggcaaggatgatctggaatttacacgttactacgaatctgtccacgcggatgaaaattacgggcttggcggcggctggacgtccaacttctcctatgcgctggagtttgacggccgttccgtgatcgcccatttgccgagagccgttacgctttatttcccaatcggctttgacggcagctttgacacctgcggtgattactcgctggtgcagacaggcagcggttacgccatgacggataaggcggggacaatctaccgcttcgacaatagcggccgtattctgagcatcgtctatcttagtgggaatacgctgtccttccaatatgacggtgacaagctccagagcgtgtccaacggcgccggcagctttacattctcctacagcggtgacaatatcgctgcggtgacggacagcgtagggcgcagcatccatctgtcctatgacggcggcctcctgactgaagtggaaaaccctgatggagacagcctgcgctatgcgtatgacggcaacgggtatctcagttctgttcagaatctcaagggtgagatctatgtagagaatgaatatgacgcacagggccgtgtagtccatcagtatgccgtaaacttcggcacctttgattttacctacgatttcgatgggcggcacaacacctgcaccggcgaggacggctattttcatgagatctggtttgatgagcagggacggatcaccaagtctacagatgccagcggcagccagacggtgacctataatgacctcaatcaagtcaccagccggacggatcgtgagggcaaccgcacatcctatgcctatgatgccgcgggcaacaaaaccaaaatcacttacgccgacggcacttatgagcggttcgagtacgacagcaatcggatgccgaccatgatccgtgaccgcaacgggaatacgagctactatacctacgaccatcagggcaatatgacttccgctaccgatggccgcggtatgccccgctcctatgtctatgatgccgacggcaatctcacttccgcggcggatgcgcttggcgcgcagacgacctacacctatgacgctcagggtaactgcacgtccatgacagacccgctgggcaatgtgaccgcctatatttatgacgggcagggccgcctgatcacagtcaccgacgccatggggtcagtcacttcctatgagtataccgaggccggcaaactggtgaaggtcatcggcgccgatggcagcgagcagacctacacggtggatggcaacggcttcaacatcagcgaaagcgaccgcatgggccatgtcaccacctttacccgtgacgcgcagaacaacgtgacctctatcaccgatccgctgggcaatgtgacccgctatacctatgatgacagcggaaatctgaccacagcaacagacgccaacggagcggtcacccgctatacctacgatgctgatggccgtattgtttccatgaccgatgcccgcggcaatacctggcgctatgcttatgatcggaacggtcaactggtttccaccaccgatcctgtcggcggcgtcagttctaccaggtacaacagcgttggacgtacatcttccagtacggacgccaatggcaataccacccaatatacctatgatggcgtcggcaaccttacaaagatcaccgatgcactcggcaagagcaccgtcagcgaatacgatgccaacggcaacctgaccgccactacggatcgcaacggccacaccacccgctatgcttacgacgcggagaaccgtttgatccgcatggtggatgccgagggcagcacgacttcctacacctatgacgctaacggtcagatgaccaagaccacctctgccatgggcgcggagacttccagcacttatgacgcgctggggcgtcagatatcctcggcagatgcactgggccacgtgaccggctacgaatatgatgtgctgggtcgcgccacaaagatcacctacgcggatggcggctttgttgcctacacctatgatgccaacggtcaggttttgactgccaccgatgaactgggcggcgtgatctcctatgcctacgatgccaacggcagactgatcgagatgacggacgccatgggcggcaaaacggcatacgcctatgacgctgtcggcaatgtgacttctgttaccgatgctctgggcgggagcacaacctatcgctacgacgaaacgggaaatatgacctcggttacagacgccaacggcaatacgaccggctacacctatgatgctctcggccgcgctgttgccgttacggacgccaatggcggcgtgacccgcgcggaatacgatcataacgggaacattgtcaaggctgtcgatgccgaaggaaatgccactacttatgtctatgatgcgctggaccgccttaccagttataccaatgctgaaggatgtaccttctccttcaagtatgataacgagggaaatacggttgcctctactgacggtaacggcaataccacccgctatacctacgatggattgaaccgcgcagtctccagcaccaacgccgaaggcaataccgcgtacaatacctatgatgcagatggccgtatggtaaagtccgtgaatgaagagggtgcggaaaccgcctatgcctatgatgcggatggccgcctgatctccatgacggatgccctgggtaatgttaccggctttgagtacgacagcagggatcgggtcatcaaggttaccgatgccaagggcaatgcgaccacattcacctatgacctggcaggcaatgtcaagagcgagaccaatgccaagggcgttgtgaccagctatgcctacgatgccaatggcaacctcacctccatgacggatgctgccggcaccgtgacctatacctatgacgccctgaatcgggttaccagtgtgaaagaccgccgtggcaatacgcagttcttcacctatgatgccacagaccgcatcgtgcaggtcaaggaccgcaacggcaatgccacacggtatgtctatgatggcaatggaaacattgtaaagaccatcgatgcactgggcacggagtccgtattcacctacaataaaaatgaccagctcatttccaccgacctccaccgtgtggatgccctcaatggcgtggactcccacgagatcacgctgtatgagtacgatggtcggaatctggtcacgaaggagatcaacgcgcttggcgacagtaccgtttatgtctacgacggcaacggcaatctggtctccaagaccgacgcggacggttatgtgacccggtattcctacaccgcccttgatttggtgaagaaaatcaattacaatggggcaaaggaggtctcctaccagtataacaaggtcggcgaactggtgcagatggatgactggaccggcaccaacaccttcgagttggacctgctgggccgcctccagaagatgaccgaccacaagggcaacacggtttcctacacctatgacgccgtgggcaatcagaccggcattacctatccggacggcagcaagacccgcagcttctacgatgcggtgtataacctcaccagcgtcattgacgcggatgacggcacctacgcctatgtctacgatgctgccaaccgccctgtcaagctgacctatcccaacggctggatcgagcagtatacctatgacgcggagggcaacctcctcaagacggtggacaccgatcccttccagctctacaacaagacgcccaaggtcaagtatgagtacacctacgacgccgagggcaatgtgctgacggagttccagcgggacagcgacgctacggaaaatctcaagagccgcacggcctttacctatgatgcgctgaaccggctcaccggcagcacccgcaggctggaggtctatccctacgataccctcgcctatgcctacacctacgatacgctgggcaacctgctgaagcagagcggtcccaccaagggcgaagaggatacctaccagtacaacgacctcaaccagatggtgagcaagcatgtgtgcggctatgagcagaagatcacccgcatctatgactacggctatacctacgataagcgcggcaatctggtgaaggaagaagagatttgttcgcctaccaccaccggacccaagaatatcaccattgcaacctatctctatgacgagacgaaccgcatggtgcggggtaccaacaaagccggcgaggtcagtgcgtacaccttcaacggtctcggcgtccgcgtcggcacggagctgattttggaggacaatacccacggctatacggacttccactgccagacgcccagcgtggagaccggcattgaaaagccggaagtggtcaagacggattatgtcattgactataccagactggacatcgaccagcgggtgctgatgaagtccgagcaggacggctacgatttcttctacacctacggtttggacaagctgcaggtcatgacgattggcgaaggcagcaactggtggggtcagagcatcaagaaatgcgtcaatatggcctacgtccacaccgaccgccttggcagcgtggtgaatctctccgaccagtacggtcgtgtgaccgcacgggcagactacaccgattggggcgaggtgcgccggtatacggatatcaccgtggacggtggtttccgcagattgctgccggagatcacctacgccacccacgagtatgacgatgtcctaaaccagttctacgcaaaggccagaatgtacgatgcggtgaacaagcggtttgatgcggttgacccaattctggatgcgagccgatatgaaatcggactgtatgtactcaatccgatgatgctggtacagcaggtctatgcgtttgatgcaccgtatacctacattgatccacttgggttgatgaattacttcacgcagacggacgatttgttgtctggcgtttggaagggtgttaaagacaacacaattggcttggtggagagtatcccacaagcagttcctatggtcaaggaactggtcaagggtgttatcggcggagatattgatattgcagaattggcgaaagcggttctgaagggtgctgttggagattattggcatgtaattagatacgccgacactcttaatccattgaagaaaaagaccgatagtgaagtctataattatggacgcgctgtcggaagcgtagccacagatattgttcttgcttttgcaggagctaccattgttgataaagcaatggatttattaaaaggcagcaaggttgggcagaaaatagttagtcttgcaaatcaagctagaaactatttcaatgattttacctgccaaaataagcaagtgcttgccaacacgctatatgatattctggacgatagtagtgatgtagcaaaagctgcagctaagcggagaatcttcagcggtggggatgcgggcgaagaatttttgaaagaaatgtttggtggaagacaacaggcttacttcaaaacatctcaagggcgcagatttgtggatcagcttgctgggagaactgctcatgaatctaaggtcggttatgttgcagcaactgattttattaagaaacaggccgcaaaagatgcagagttgcttgcaaccaaacaggtcgatgaggttgtatggcatttctttagaagcgcagatactcagaaaattggtccatccgcgccactcaaaaagctgctggaggattacgggattaaagttgtgatctatgaataagaaccgaggtagaaaatgtgatttacaaaatgcagataccaccattcccagtaaaatcttttgatttgctaacgacaagacaagctaaggaaatatttaaatggtatacagatgatattcctgcacgtttagatcaattgcagaaatgcattgatgcggatgttaacggaacagtacagcttacaagagggaaagattcactgcgtcctttgtggagttggttggttgctaacatccaattacaagagctaacagaaagcgacttaaaagaatcgcttgatgcagttcctaaatggctgcatgaatacatcgttgctggcaaatataagctaacaacagagagcttatcgataggaatggatgtagcaatttatctgggcgaagtattcgttcacgagtttcctcagatatattggggattttttactaaacccaaaagcagagtctcggtgaatgagccggtgcttttaggatttgaaaatggtcttgacatgaatcctcgacgtatagttgataccttgatgtggcaatgtgccaatggaaaaagttcagaaggattatatgaagtgtttgaaatatggagtaagtttgtcccagcgcaaccgtcgaaaacgaattagcccattttcaatgacaacggagtttagacagctatcattctgaatgtaaaacgccgccactggggatagcgccgggcaatcagagaatccctgcgtgatgaagaagagggtgtggctctgccacgccctcttcttcgaaagctgttttcgatgctgctttgaacgcagcgggcacgattggatctgcagctcttgcggttaagagtttccccgcggttaagcatgagattggctattacatggccaagtatcagtgcaagactcaaagtgcaattccgaccgatgaaggagcaaccacagcaacggctaaatctgctggaggacgccttggaaatagtgctacaaggcagcaaaacaaagcaattggtgattacctccagcaaaagggatggactgtgaccggtggcggcgggcaggttaaagaagaatatttaccgccgctgagtggaaaaggcagagctggtagtaactacattgacattacagcaaccaaaaccacatcccatggggaggtaacgattcgtatcaatacggtcgatacctatgcctctggattgccgactgctcgtgaacaagctgcagcagatctaattaaccggaagattggtagtgatccatccattattctcattcctaaaggaactggacttggaaatcttcctgaacttcttagaggctttgactgattaggagtaaagttatggcagcacagttttcgtattttacaacaagtgacgatttaagagagatagttaaacaagttgatgcaaacactcaattccaatatattgagtacaaaaacttctctgaaagtgagtatccgaatgcgagaatgtatgattccttgcttgaatacccccatcttggctacgcacgatcggcgcaatgtagaggagatatgtttttggtgttgaatcgcacacaggcgttgtgccccaaaattattcctactgatgaaggcagtagaattgttgtgtctcaggaactgaatacgccatctattgtctgggcactcggtgggcatcgattcgaaaacttgttgctgaaaggtgaagtttcgacaatttgctcagacaatgtttccaagcaaatgatggcagatgttcgaaaagtgttttcaagatattgtaaaaaggtagatgggtattatgtttctccaagagtatttctgctctcaaatactcgccttatcactatatctgctgcagaaaacacggcagtagatttctgcttgcccgaaaagaaccgttgaataaagacatcctaatcaacgctttatggggacacatcaaacgatgtgtccccatatttaaaacaatacgaacaacggttgatgcatttgccggagggatcaaaacaatctgtacagattgatcttcgatcaaaaactttgctgataaaggtgt

SEQ ID NO: 10125 - DNA, 38139 bp, Unknown
  gut microbiota DNA sequence
atgagaaacatcgccgagacaattccggaatacaaggtactccgagcaatgcgcggcgtcggtgaccgtctcgggccaattattctcgctgagatcggcgacatccgtcgctttcacagcggcaaggcattgaactcctatgccggcaacgatgcccctccatatcaatccggacaattcgagagcagaaaccgccacatttcaaaacgtggcagctctgccctccggaaggcttgttacgaggtaatgcaggcccttaaactgacaaaacctcaagacgaccccgtgtacctttttatgctcaaaaaagagcaggaagggaagcctttcaacgtagccaagatggctggcgtgaacaagttcctccggatctactacgccagagcaatggagctctacaagtaaaccgatttgattctacatcattgtttcaaagcccgcaatctggtgggttcgtttagtgcacccttttttctgtgcaactttcagaaaaaagtccttgacaaacattagcaagatttgttgagccgagtataccatatttctcaacgaaaaaacattcttatatacgagaacctgaccgttttactgcgtacagaaccccgatctgcaaaaagccccatgcgcgacaccttgacggcgcgaacatggggcttgatatttccttggcttattcgggtactcgtaaccgatcctggcaggcggctgccgtgtcatctctcgaaagctgttttacgaacgcccggcttagggagaaccgcttttttattttgccgcgctgagcaatttatcctctttccgcttttcgagcatgattggcacgtccatcagcgcgagcaccgccacgagcagcacggggaagccgatccagtggtagccgacatggtcgcggaaccacgcgagcggattgccgtccggcgcgtacatcagaaacatgaaattcgtatcgagcagcaggttgacgcaataaatcggcaccgccatcgccagcagcagcaagaagcacttgcccatgtacctgacgctcggtcggatatcaccgcccgaaaacagcatgatgggataggccgcaagcagaatgtgcacgctcgtcgaatgccagaacatgaagttcgccgccggaagcgacgtccacgtcgggaacagcagtgccgccgtcgccgcggggatatagataaaatagagaaaattgtcgagcagcctgctcggcttccatgcgtacagcgcgataaggaaaatgttgatcgagcacaggtgcagcggcagatagtcccagttgaaattcccgccgatctgcaaaccgatctgtttgaacgcctcgtccgcgagcaggagaacggcaaagagcccccgcagctgcgcccgcttcttctcgtccgccgccttgtagagcttgcagctcagcgcggcaaagccgatatacagcgcaagcgtcactaagtgccgcgcgccgaagagcgaaaagccaaagccctcgccgatcgtatccaccgtatcccaaaagtgctccacttgatccagcctccgcaaatttgttgtccctgccagcatatcatacggcggcgaaaatacacctgaaaatttctttaagatttcagtatcccatccgcgctcccagcatctcgccgctgctgccgccgcggtacacgccgttttcgatcacgcgctcgccaagcacgaatacctcgtcaaagcctgtcgcaggcaggttgggccgcgcgtaggtaccgtgctcgcggacgttttcgggcgagaagagtaaaaggtccgcatccatgcccgccgcgatgacgccctttttctcaaagccgaagcggtccgccgcatgccccgtcaccttgtgcacggcctgctcgagcgtgagtacacgctcctgcacgacgtatttttcaatgagccgcgcgaatgtgccgtacacgcgcgggtggacacgcccgccgctggggtacgtcgcatccgaaatgacgcccgagaacggcgcgcgcaggatatctttcacgtcttcttcgtccgagatgtagtcgatcatccccgtattgcactgttccgccgccagcaggtcaaagagcgtatcgaacgggtctttttgaagcgtctgcgcgatctcggcgacggattttccctcaaagcggcggtattcgtccatctgaagcccgatggcgatcacattgtcaaagccgacgagcagcgtgacgttctcaaagtcgctgcccgcctccatccgtgcgcgcatttcctttcgcgcagcatcgtcgagcaggcgcttggtcagcgcctccgtgccgccctcctggaattccggcggcagcacgtggataagctgtgtcgagcccgcagtgtaggggtacacgtcgcacatgacgtcaagcccgtcctgtcgcgccttttcaatgagcgagagcatttccggcacggcctttcgcgcgttgcgccctccgatggccttgagatggctgacctccagcggcgtttgcagcgcgcgggcgacctcgagcatttcgcgcagcgcatcgaccacgccgtcgccctcctgacgcatatggacgcagatgggcacgccgctccggtgcagcggcgcgagcgcgcggatgagcccgtcggtcgagtaaaagatctccggcgcgtagccaaggccgagcgacacgccgcacgcgccgtcggccagcgccgcttccatgtgatagtgcagatcgcgcagctcgagcggtgacaaatctcccgtcgtgaagcccgcggcaagcgtgcgcagcgcgcccatgccgatgagttccgcgcacgagagcggcagtccccgcccctgcgccgccttgaaatagctgtcaatggacgcaaagcgcagctccggcgggatgttccccgtgatgggcgcgaggtatttcgcgcactcgtccgcgtgcgcgcccgagagcggcgcgagcgacatgccgcagttgccgttcacaagcgtcgtaaggccctggcagagctccgcctcgccaaagccttcgcgaaacagcgccgcgtcggcgtggcggtgcatgtcgataaagcccggcgtcagaacgcggcccgcggcctcgatggtctcgaacgcctgcgcacctgataaatttccgaccgcttcgatcatgccgtctaaaatgccgacgtccgccgtgaacgccgcctttcccgtgccgtcgacgatcttcgcgccgcggatcaacgtatccagcatgtatatcacctcttttttgcagtctaccacaccccacgcccgcttggcaaggtcatttccccttgcaatctgccgtgccgcagggtatactgtggaaaacgcaaaaaaggagcgcttccatgaataagaaagaccgcatccacgactggcgcaagctcaagtggccgttcaccgccacgtttttatattactctctcctctcgctctacaccggcaccgccgagcagagcgagcagggctttctcgtcatgttcctcacggttttgatcgtggacgccgtggcgtatttttcctactgctatttcctctgcaaaaaagaggagaacatgcagaagctctggttcgtcttcattctggcctatgtgctcatctccacacagcagctctccgtcctctggcagatgatgacggcgcatgtgatcggcgcataaacacaatttttcttttttcataccgcctttttgaacgtcctttccatcgggaaaggacgttttcttatattttgtcttctgtgacatttgcgtgccactgtctgaaaatctgatacgcggctccttttgtccatagttttcggcagtttcctttgttaagttggtgttaacgaggggagcgtccccttctcgcgccgtgaacaaaaaagtttacaccctgcccattgaaagcgcggcgcttctttgctatgcttttcctgcaagcccgcatttttccgtgcgggacaagaaatgctaagtacaaaggagctgatgacagtgccgatccgtccgcttgtcgatcgcacttatcttgaacaggtgctgctctcccgtttttcccacggtgaggtacagcagtgggtccagaaatacttccagccctaccgtgagctgatgagctattaccgctgcgcgatcatggaggtcgagacgaagttcaacgtgctcaacgaggagctctcgctgcaatacgaccgcaaccccatcgagacgatcaagacccgcctcaagtcccccgagagcatcatggaaaagctcagccgccgcggatatccgctcacggtggagagcatcgaaaagaatttgaacgacatcgccggtgtgcgcgtgatctgctcgcaccctgccgacatctacaaactctccgaggcatttttgcgccaggacgacatcacactcttagagcgcaaggactacatcgcaaaccctaagtccaacggctaccgcagcctccatctcatcgtcgaaacgcccatcttcctgcatgaccagaagcggctcatgaaagtcgaggtgcagttccgcacgatctcgatggattggtgggccagccttgagcataagatccgctacaagaaaaatctccccgaaatggaatacgtggagcgcgagctctatgagtgcgccgagatcagcgcacagctcgatgcgcgcatggaaaagctccagaaaatcgccgcacaggcaacggagggaaaggatcgcgccctttcctcctgaatttttaggatgcccgcaccgcgggcagggaaaggaatcgtgacactatgaacgcagcagaaaaaatcgcccacgcagcagagcgcaaggcctttgaggccatgctcgactcgctcatcagaaaaagccagacgaaggacgtctgcaccgtcgcaaacgactttgtcaacatggtccaaaagatccactccagcgtctggacgccggagaccttcgagatgctgcaccagattgcaaatgaccccgacagcaaatgggcacactacgccgagcgcctgctgcgcgagtgcgacccctaccttctcaggaccttcctgacggccgccgcctacgagggcggcttccgcggcttccagcaggcacgggcaaactccgagaagtatgactgcaatatcccttggatcgtcctcatggacccgacgagcgcctgcaacatgcgctgcgcgggctgctgggcggcggagtacggccacaagcagaacctcacctttgaggagatggaccgcgtgctgaccgagggcgcagagctcggcacccacgcctgcctcttcaccggcggcgaaccgctcatgcgcaaggcggacatcttccgcctgtgcgaaaagcaccgcgacatcgctttccacgccttcacaaacggcacgctcatcgaccaggccttctgcgacgagctcaagcgcgtgggcaacttcatcgtctcggtcagcatcgagggctttgaggacgccaacgacggccgccgcggcgcgggacattttgaaaaggcgctcgccgcgatggacctcatgcacaaaaaccacatcccgttcggcgtgtccatctgctacacgagcaagaactacaaggtcgtcacgagcgatgagttcctcgacctgctcatctccaagggctgcttcttcgcctggtacttccactacatgccagtcggcatgggcgcgacgaccgacctgctgcttaatcccgagcagcgcgcctatatgaaagaccgcgtgcgcgagatccgcggtctcaccggcggcaaggagatcttcgccatcgacttccagaatgacggcgagttcacaggcggctgcatcgccggcggcaagctctactgccatatcaacgccgcgggcgacgttgagccctgcgtgtttatccactattccggcgcgaacatccgcgaaaagagcttcctcgaatgtctccagcagccgctttttaaggagtaccgcaagggccagccgttcaacaacaaccacctgcgcccctgcccgatgctggaaaatcccgaatatctgccacagatggtcgcgcgcagcggcgcgcattcgaccgacctggaagcgcccgagagcgtggagcacctgtgcaacaagtgcgagtcctacgccgcctgctggcgtcccgaggccgaaaagctctgggacgaggagcaccacaactgatcgatcccgcccatataggaaaacagcgccagcccgctttcgcgggtcggcgctgtttttatcaaatggtctcacagagtttcgtgccgcgcacggcacgaaataaatttgaatcggttttctgccgcgacatgcgcgtggcagaaaacactttgcgcggagtggaaaacggtgaagcgccgcctgcggcggaaacagcaagccgttttcgaggaagcggcacgattggcgcgcccgaaagggcgcgccaatcgtaatgccgcgacggtgcaatgtcgcagctgccctgcgggtggcaaggcgcaaaacgcagcgaaactttttcgaagacggggctttgccccgtcttcgattgctcttacttcagcgcggcgagcagcgcgtcgacgcggtcagtcttctcccacgttacgccgaggtcttcgcggcccatgtggccataagcggcgagctggcggtagatggggcggcgcagatcgaggtcgcggatgatggcggtcgggcgcaggtcgaagaccttctcgacggcctcttcgagcttaccgtcatcgaccttgccggtgccgaacgtctcaacgagcacgctcacgggatgcgcaacgccgatagcgtaggcgagctggacctggcacttgtcggcaaggcccgcggccacaatgttcttagcgacatagcgcgcggcgtaagcggcactgcggtcgaccttcgtcgggtccttgccggagaatgcgccgccgccgtgcggggcgctgccgccgtaggtgtcgacgatgatcttgcggccggtcaggccgctgtcgccctgcgggccgccgatgacgaagcggccggtcgggttgacataaatcttggtgttctcgtccatcagctccgcgggaacggtcggcttgatgacaagctcgatcatgtccttgcggatctgctcaagcgtcgcctccggcgcgtgctgggtggagaggacgaccgtgtcgacgcggacgggcttgccgctctcgtcgtactcgaccgtcacctgcgtcttgccgtcgggacggagatagtcgacaaggccctgcttgcgcacgtcggtcagcttctttgccatcttatgggaaagggagatcgcgagcggcatgagctcaggggtctcggtgcaggcgtagccgaacatcatgccctggtcgcccgcgccgttgtcgagctcgctcgcgccgctttccttattttcaaaggagttgtcgacgcccatcgcgatatcgccgctctgctcgtcgatgttcgtgataacgccgcaggtgtcacagtcaaagccgtacttcgcgcggtcgtagccgatgtcgcggatgacgtcgcgcgcgatcttcgggatgtcgacatagcagctcgtggtgatctcgcccatgatgtggacaaggccggtggagacggtcgtctcgcaggccacgcggccgttggggtctttttcaaggatcgcgtcgagcaccgcatcggagatctggtcgcagatcttgtcgggatgcccctcggtgacggattcggaggtgaataaacgttttgccatggttctttttcttcctttctcgttgttgggaaaaacaaaaaatactctgtcgaaccgacagagtatcgcgctttctgctcttcctcatctttcgattcgttcgtcggatttggcaccttgcctcttcgggcaggttgtcgtggtgtcatagggccgatccctcaaccactctcgatgaagtattcacttgtggctttcgccgaatcatattctaccatgtttgtgcgttttgtcaatcagtttttgaagattttgtgcaaatacttgactttgtccggatttatgctacaatattgttcacaaattgaatgtcatcggggacttgcggccgcagccgcagcggtcgagagatgtcggatgcgtccggtcaagcagtgaccggactttttttatattttttgaaacaatcggaggctcttccatgcagatctccctttccgatcattttacgtatcaaaagctgctgcgctttgtcgcgcccagcattttgatgatgatcatcacctctatttacagcattgtcgacggctttttcgtctcgaacttcgtcggcaaaaattcgtttgccgcgctgaacctcatctttcccgtcatcatggcgctcgccgccgtcggctttatgatcggcacgggcggcagcgcgctcatcgccaaaacgctcggcgagggtaagcccaggaaagcgaacgagatcttctccatgctcgtcatcgtgcttgccgctggcggcgcgattttaagcggcgtgtgcatcgttttcctgcgccccatctcgttcgccgtcggcgcgacggacctgacgatcgacgactgcgtgctctacgggcgcgtactgctggctgctctcccttttttcatgctgcaaaacagcttccagagctttttggcgacggcggaaaagccgcacttcggcctgcgcgtgacggtgttcgcggggctgacgaacatggtactcgattttctgctcgtctacgtgttcccgttcggccttctcggcgcggcgctcgccacggcgttttcgcagatcgtcggcgcgctcatcccgcttgtctactttctccgcccgaacgattcaccgctgtgcctcacgcgtccgcgctttgacttccgcgccctcggcaaggcctgctacaacggctcgagcgagatggtcagcaacctttcgacctctctcgtcggcgtactctacaacgtgcagctcatggcgattgccaaggaaaacggcgtgaatgcctacggtgttctgatgtacgtgagcttcatcttcatggcgtttttcttcggctattccatcgccgtcacacccgtcgtcggctatcactacggcgcgaagaatcacgccgagctcaagagcctcctcaaaaagagcctgaccgtcacgctcatcacgagccttgcgatgacggcctcgtccatcctgctggcaaaccccatcgcacatcttttcgtcggctacgacgcggaactgtgcgacatgacggtcaacgcgctgcgcatctacgcgctctcattcctcgtctgcggtttcaatatcttcggttcggcgtttttcacggggctcaacaatggcacagccagcgcgctcatttcgttcctgcgcacgctcgtcattcaggtcgccgcggtacttcttttgccaaaacttctcggcatcaacggcatctggctcgccatcaccgtggccgaagcgctcacactgatcgtcacagaaacgcttttcctcctcggacggaaaaaataccactacgcataaagcagatcatccaaacagccgcggtggctcgaaccaccgtggctgtgcttgcgctttctgacgggctgtggtataataattctatcaaattctacttttggaggtgaatgttatgtgcttttggtggtttatgttactatgcgatttgatcattcccattgttatggtcattgcaggaagaatgatgtggaagcattgcccaaaacatataaacagcatgttaggatacagaacaactcgttcaatgaaaaatatggatacatggaaatttgctcataactattgtggaaaactttggtggaaaataggatgggtaatggttataccatctgccttgatacatattccgttataccatagtgataagaatacgattggatttgcagggataattcttgtaacaatccaatgttttattatgattctatcaatttacccgacagaaaaagctttgaaaaaacattttaatgatgatggaatacccagatagattccagtttgtcattgccacataattgatttttcaccgaccggtgcaatcaccggtcgtttttttgcattttcctcttgacacctcatattgttgtgatattattttgatatcaattttggaggtgctttttatggaagaaaagatcatcaccggtcacaaaaacggcatgctcgtgctgctgctcgagcttgttctctacatcgccgcggtcgtttttctgatcgtcggcatcaatgcaggctttctgccccttgtcgtcctttgcgtcatcctgctgttgctcggctggatcccactgtgcggcctgcgcgttctgaagccgcaggaggcgctggtgctgacgctgttcggcaagtacatcggcacgctcaagggcgagggcttctactgggtcaatcccttctgctcgtcgttcaaccccgccgccaagacgaagctcaaccagtccggcgatgtggacggcggccacaagggcacggaccttctcgctgccatgcagggcgcgtctgccgcggtcgaggtgggcggcagcaagaagatctcgctcaagatcatgacgctcaacaacgcccgccagaagatcaacgactgtctcggtaaccccgtggagatcggaatcgccgtgatgtggcgcgtgaccgacacagccaaggccgtattcaacgtggataactacaaggagtacctgtcgctccagtgcgacgcggcgctgcgcaatatcgtgcgcgtctatccctacgacgtcgctccgaatgttgacaccacgggcgacggtcaggccgacgagggcagccttcgcggctcgagcgaggtcgtggccgcacgcatccgcgatgaaattcaggccaaggtcgccgacgcgggccttgagatcatcgaagcgcgcatcacctacctcgcctatgcgcccgagatcgcggccgtcatgctccagcgccagcaggccagcgccatcatcgacgcgcgcaagatgatcgttgacggcgcggtcggcatggtcgaaatggcgcttgagcgtctggcggaaaagggcacggtcgagctcgacgaggagcgcaaggcggccatggtctcgaacctgctcgtggtgctgtgcggcaaccacgatgcccagcccgtcgtcaactccggcagcctgtattaagcgcgccgcgctactttttgggaggctgccatgaacgacaacgccaaaaagcaggtgcccctgcgcctgtcccccaagctctacgccgccatcgccgcctgggcagaggacgatttccgctccgtcaacggccaaatcgagtatcttttgaccgagtgcgtacgccagcggaaaaagaacggcaaatacgtcggcgaggagatcgacgttcctcccgagctcgatctcaagtgaacaagtgttaagaatgtggaaagaattcgtttctttccgcattcttgctcttcattccattcaggaatggtcatttgttcaaactttattgatgacttttccccgccgctgtgtcataatgtttttaaatgttatttgatcgaaacgaggtatcccgcattgaaaaaactcaaccaggcgatcgaccgcttttgtatcctgcacccgaattttggcatccccaacctgatgctctatgttgtcatcggcaacgtggtgctggggcttttgtccaacttctcgaacggcaactttctgagcttcttctcctacacgctctcgggtcttctccatgggcaggtctggcggctcgtcaccttcgtcctcatccctgagagcacgagtccgttctatcttctcatcacctgctatttctactactggatcggctcgacgctcgagcggcagtggggcacagccaagtttacgacgtattacctgagcggcatgctgctcaccgtcgtcggcgcgagcatcgtcagcctgatcacgggctacagcatccccgtctacggtgcaaattatgtcaactttgccatgttcatggccttcgcgctcctctatcccgatgcgcaggtgctgctgtttttcatcttccccatccgcatgaagtggctcgcgtatattgacgtattctacttcttcttcgacattgtgcgctacattgccgccggcagatggtactattccatcatgcccattgtggcgcttttgaatttcgtcattttcttctggcccgagcttacacggttttggggactcgaacgccaccagagcaagcaggccacgcacttccataacaccgtgcgcgcccagcagcgtcaggagcagtatcagcagcagacgcagggcttccgccacaaatgtgccgtgtgcggccgcacggacgtgacaaatcctgagctgcagttccgctattgcagcaagtgcgcagggtaccactgcttctgctctgaccacattttcaatcacgtccactttacggacgagcagccataagcaaagagaggcaatcattatggcatatacgaaagaacaggcgtgggagctgctcacgcagtacaacaagggtgaattccacttaaagcacgccaacaccgtcgccgacgtgatgcgctggtacgcggaaaagctcggctacggcgacgaggcggacttctgggagatcgtcggccttctccacgaccttgattttgagatgtatcccgacgagcactgcatcaagtcgcaggagatcatgcgtgaaaacggtctcgacgagcgcctgatccgcgccacctccagccacggctatggcctgcactttgacggccttcccgagccgcagcacgagatggaaaagatcctctttgccaccgacgagctcacaggcctgatcggcgcggtcgcgctcatgcgcccgagtaagagcgtcagcgatcttgaggtcaagtccgtcaagaaaaagtacaaggacaagaagtttgccgccggctgctcgcgcgaggtcatcgagcgcggcgcggaaatgctcggctgggatcttgacacgctcattgagcagacgatcctcgccatgcgtgcaagcattcatgtcgaataatttccctgcataacattttaccggtcatctattacctgcggaaaggaaggtgtttttatgagcgattttacccctacgcccacgccgagttacagcggaaagctccgcaaccatatgctgatggtacccgagtgcatcaacgagtgcagcggcatccgcatcttcggcagaacgatcaagtcctttgtcttttccactgacgttgccaccatcgcaagcgtcaatgccgatgcggtgattgccgtttatccctttaccccgcagccgcgcatcgtgcgcgccgtcatcagcgtggcggatatgcccgtgttctgcggcgtcggcggcggcttcacgtctggcgcgcgctctgtcgcccaggcgatggaggctgagcactgcggcgcttacggcgttgtgctcaacgcgcccgtttcggcggatatcctgcgcgacatcaagtcgcacatcgacattccggtcgtggcgaccatcgtctccgccacgcaggacactgaggctcgtatcgccgcaggcgtcgacattttgaacgtctctgccgcgtcggaaacgccgcagcttgtcgccgcgctccgcgagcgccatcccgagatccccatcatcgccaccggcggcccgaaggatgagactattcgcaagaccatcgcggcaggcgcgaacgccatcacctacaccccgcccgacaacggtgtgctgctggctgagatcatgcacgcacaccgcgagcgctaccggtaagctacataaaaaatgctggctcataagagccagcatttttcttttatcttcacgcttccttgttcgacacaaactggtagctgcctttgctgcccttcagcgtgacgatccccttttcaccgctctccttctcataggtgagcgcgatagtcccgtcctcgttctgctcgagcgaggtgaccgtgcagcgctggaaattcgtatcgccgtggagcagataataggcgtcgtactcctcgagatagatgaactggtcgagattctttttgttcgtctcgtccagtgccacgcccaaatactcctgcaaaaaggcgtccatttccgttctctgcgttttgatgggataatgctcaaacgccactgggccgattgctgtctgttctgcctcagtaacctcttcctgtattcctgtcgggccattatagaagagctcatagaggtcgatgtccgcggcggtgtcgtaatagctgctgagcagcatattcgtcatgcacacgccgctgcccacattgaaaaattccgtgttgaaccattcgatgtccaccgcagacgtctcatcatccggcggcggtacatcgtccgcgggctttgtgccgcaagcagtcagtgcgcagcacagggtaaaaagcagcagaaagatttttactctcttcatttctctcatcctccgtaaaagtggtcctatatgatcgcttctgcggcgcggccgcactttttacgccatgggactcccctccctctctcctattctctcagtacgggcacgggaacgctgagaacaccgcgtgaccgccgacgatggtaaagggatattcgaagttctcctcctcgccgttcggcgtccagctctgcgacgcttcgtcccaatcgccgtaggtgatggtctgtgtcacggtgccgctctcaccgtcgagcgtcacgctgtgcgtctcatcgattacggaatcgtcgctaccgcggtcggcagacaggacgtatagtctgccgttcacctcagcgtagcggtcagactcttcaaaccactggtcggccagcgccttgtcgaagtagcggtacatcagatcgtgcatgtcctcgagcgtcgaaacgccggggatcgccgcactgtagtaggtgtagccgttgatctccgtctcgtccggcgcatctccgatcggcggcgtgttcataaagaaccacgcccacagtgtcgccgccgccttgaaatccgctgtcacggtctgctcctgcgacacgctcaggatcgtcttcgcgtgctcgctcagcgcgttgtaaaattcgctgtacggcaccgagaacacctgcggccctgccgcatacggcgcgatgacgtactggtcgaacgtgaccgtcaggccgttttccgtaaagttcagcgtcgcgagcgtggggaaatcctgcaaataagagtcataatcgtcaaaatatccttcgctgagacccttttgcgcgatctgctcgtagatattccaataaatgctctcctgcagcgagtttccctgcaaatcgccctcctccgaggccagcgcgtccagcgtcaggaattcgcccgtcgtcagatcaaagctccacgcgcgggtggcggaattcggatgcacgccgccgtagtaggtgtagttctccgccgcgatgctcaggagcttcccctcggtcatgtaggtctgcgtcaggctcagctcgttcgtccagtagcttccgttcaaaaagaccgatgtgccgttttccgcatagagctccttggcctctgcggccatctgcgccgcctcggactcaagccctgcgagcacgttgttcatctccgtgttgaaggcgttctgcgccgtgaactgcgcggggttgcccgtgccgccgttcgccgtcacgttctccgccagcgtgtagagctcgccgtcctccgtgcgcagttcgagcaccggcagttcgtagcgctccgccagaagcaccgtgccgtcgtcggccttgtactcgttttcgtaaacttgcgtcgcgacttcaaagtgcagcgtgctcgcctgcggcggcgcgttgtcctctggcccgtcgggcgctcctgcgccgcaggcggtcaaattcagcgccagcacgcagcaaagcagcagcgtcatccattttttcattctgttctcctttcgaggtctcggttccttgctcaaacgatcacaggcccctccgtccacgcactgctgcctctggccgcgcgcagctcgggataggcgagcacgtattgatccgccgcgcgcgccgtcagagcgaagagcttctgcgcctcctcgctcaacgcgcgcacatcggcgctcttggtcagcaccggcgcgcttcccgtttttttgatcgttttgagcagctttcgtccccgctcattgcacgccagcacgcgcagataggggacctccggcggcacatccgccgccgtcacgtccagatacgccgcaagcagcatccgccgcagccgcgcataggcatagcgcttcgtcttcaccgcggagagcagctcgtcgacggacgctgccgtccgcgctgcgtcataaaaccggcgataaaggccttcattcccgctgtcatagcgggcgaagtcctcctcgcacatcgcgcgcagccgggaaagcaccgctcgctccgcattctgcatcgtcaccggcgcgcggcccgctgcgcattcgcgcgcatagatggcagcgctctccgccgtcagatacgcggaggcgtcctctccgttcgtgagcagctcgcggatgtggcttgccgaggcgaagcccttcgccgcacccccgttgtgcccgacgacctttcgcaatattgccagcggcgcgatggtactgccgctttgcagcagcgccttgcagtattctacgccgaggatatcgttcggctcccggagcaccgcggcatcctcgccgatgagcgccctcgcggcgctctccctcgccgcggcaaaggacaggcccttggcaagctcctctcgcagcgcgtcgggaaaatccgcccgcagcagtgcctttgccgcgcgctgcaatttcgccgcgttaccgcattcgctgccaaagaccagcgtgtcgaccacgcccgtcgccgccaaaatgctcacgccgccgcgggcaaagccctccgccgacgaaatggcccacggcagcggcagctcaaggactaaatctgccccgccgcgcacggcagcctcggcgcgcgcatgcgcgcgttcaatggcaaaatcgccccgctggacaaaatcgccgctcatcgcgcacacgaccgcgcactcttcctcgcctgccagacggcgcaattcatcaatttgccacttgtggccgcggtggaagggattatattcacatattataccaaataccctcatggaagtcctctcaaagcggttacaaaagagttacgttttgttaaatttacttgtctttgcaaaaaaagttgttataatatattttgtattgaattatacatccgatcaatttgattcttattttatcggaaattcgggcgcaatgcaagcgccctcggaaaaaggagtatacttatgaatgttctggtcatcaacgcaggttcttcttccctgaagtatcagctgctcaaccccaccacgggcgagctgctggcgaagggtctgtgcgagcgcatcggcatcgacggtctgttcacctataagccccagcttcccggcaaggaagccatcaaggccgcttccgtctccatgcccacccacagcgaggctatccaggccgtgctgaacgcgctcgtcgacgagaagaacggcgtcatcggctccatgaaggagatcgacgctgtcggccaccgcgtcgtccacggcggcgaaaagtttgccaagtccgtcgtcatcaccgacgaggtcatgcaggcaatcgaggagtgcaatcccctcgccccgctccacaaccccgccaacatcatcggcatcaaggcctgccaggagctcatgcccggcgtgcccatggtcgccgtgttcgacactgccttccaccagaccatgcctcccgtggcttacacctatgctcttccctatgagtactatgagaaggacaaggtccgccgctacggcttccacggcacctctcacaagtatgtttcccagcgcgcggccgatatgctcggcaagcccatcgagcagctcaagctgatctcctgccacctcggcaacggctcctccgtcaccgcgatcgacggcggcaagagcgtcgacacctccatgggcttcaccccgctcgccggtcttcccatgggtacccgctccggcgacattgacgccggtatcctcgagtacctgatgaacaagtacggcatggacatcaaggagatggtcaatgtcctcaacaagaagtccggcgtcatgggcgtcagcggcgtcagctccgacttccgcgatctcgaagaggccttcgagcagggcaatgagcgcgccggccttgccgtcgatatgttcaactacggcgtgaagaagctcatcggtgcgtatgccgccgcgatgggcggcgtggacgccatcatcttcaccgcaggtgtcggcgagaacagcgcttcccagcgcatggccatcgcctccggcctcgagttcatgggcgtcaagatggacgaggacgccaacaaggtccgcggcgaagaacgcgtcatctccgcgcccgactccaaggtcaccgtcctcctcatccccacgaacgaggagctcatgatcgccatggataccgaggcgctcgtcggctaagtcatcgacaatcgattataaaagatccgcttacgaaattcgtaagcggatctttttattgccggtcttcgagccactgcatcgcgccataggcgagcagtgcgctcccgcgcggtaaaatgttctcgttgaagacgacgctctcgttgtgcatgggctttccgtagcgcgcgtcctcctgcgccgtgcccgcgccgagcaacagatacgcgcacggcagctcgtaggtgtaggacgcaaagtcctccgagcccatgccgccctcacgcaggcggtagacgctcttctcgccgaacagcatttcggcgcagcgtgccatctgctcggtcagcgcctcgtcgtttttgagcggcggcgcgctcgcgagctcttcgacgctcgcactgccgcggaaggccctggccgtcgcgtccgcgatctcgccgatgcggcgcaggatcagcccggtcacgtcgcggtcgaacgtgcggatcgtgccctcgatcacggcctcctgcgggatgatattcggcgcgtgccccgcgctgaatttgcccattgtcacgatggcgggcgtcttcgcgggcagctcgcgcgccgtgatctcctgaagcgcaaggtagatgtgcgcggcaatgttgattgggtcgacgcccgtctccggcattgccccgtgacagccgacacccttgaccgtgatgcgaaacagcgtgcagcccgccataaacgttcccttgccgcagagcaccaggcccgacggcgtcccggagttcacgtgcagcgccatcgccgcctgcggctccggcgcctccagcacaccggccttaagcatcgctttcgcgcccgtgaagccttcctcgtcgggctggaagacgagcttcaccgtgcccttgagttcgctttgatgcgccttgagcagccttgcagcgcccagcagcatcgcggcatgcatatcgtgtccgcaggcgtgcatgctgccgttttccgaacggaacggcaggtcggtcttctcccgcaccttgagcgcgtccatgtcggcgcgcagcaggatacagcgccccatgtcttcgcccgtgagctccgcgaccacgccgccgcccagctcgcgcggctcatagccgagcaatcgcagcttttcttcgacaaattgaaccgtctgcggcaggtgcgcgccgacctccggcgcgcggtggatcgctctccggttctcgacgatctcatttttcatttcgatggcttccgccagtaacgtctttccgttcatacaaagtcctttctcatttctgcgcggcggcttttttcgccgcgcgctgctgcgctgtccgccgcacgagctcgcacagcggcaggatgtacaaaaagcacgcaaacgccatgcccgtcatcggcgcgccgacggtcgagagcggcgtcgcccccgcgatcgaccacgggatcagcggcgcgacgacaacggcgctgttttcaaggttgatggcaaattcttctttatccttctgcgacggcgcgcagagctggtgtgtcaggatgatcgtcaacgtctggttgcaggcgagaaggctcgccaaaaccgccgtcagcagcatcgaggcatagggcgacgttttgtcgcgcagtgccgtcacacgcccgcacagcccgtcgagcagccccgtcttgcgaaaaatgccggaatacgccgacgagatcatcacgatcagcgccacgcgcaccattgaaatgatgccgccgccgttgagcatcgcgccgacctcggcgtccgacgccgtgtagcctaagattgcggtcttgaggatcgtcaccgcgtccagatgccgcaggaaaatgcacagcacgaccgccgctaaaatgctgaccgacatcgcctttttcacgttcacgcgtaggaccgacaggatcaaaatgagcaccgccggcaggcacatgacccagtgaagtgtcatctcgcgtccgtagagcgaccacagctcgcccgccgcgccgctgccgcttttcaccatgccgagcgccgcatagacgccgcagctcagaagaaacggcacgagcgccgtcttgagcatgcgcttgatgttgtcgtaaatgttcgtctccgtcagctcgctcacgagcagcgcgctcgtcgagaccggcgagcagcggtcgccgaagtacacgcccgaaagcatcgcgccgccgagcagcacggggtccatgcccatcgaaatgccgacactcacgcagatggtgcccatcgtcgccgccgtgccgaacgccgtgcctgtcagcatcgagacgccgcaattcaggagaaacgtcatcagcagcacgatctccggccggatgaggtcgacggcgcagcagatgatgaacggcagcgtgccgcacgcgcgccagaacgccgtcagaataccgatcagcggaaagacgagcagcacgcttgccgacgtcttcacgcccgagcagatcatcttcccgagctctttccacgaaaagctctgctttttgccgtacagcgtaaagatcacaagccccgccaggagcgcgtagaggatgttcgtccccagcacgatgcacacgagcagcgcaaggcagaataaaacgatcgcagccatccaagtcctccctatcctttttaacacagcatcgctatcttagcacaaagcgatcaaaaagaaaacccgtttttatcccaccgcatacgcccacagcggcagcgtcagcatggataaaagcgttgtgaacacgacatttcgcgcggcgaacggcgcgtcgctgccgtatttggcggcaaagatggccgccgtcgcgcccgcgggcatgcccgtcatcaggacactcacgccaagcgccgtcggttcaaggtgcagcagcccaacgcccagcgctgccgcgggcagcagcgcgagccgcagcaagctgaactttaccgtgtcgcggctcacgatgctcttgagcggcgcatccgtcaggatcgtgccgacaataaacatcgtcagtgcggagttgcagttcccgatgtacttcacgctgttcaggatcacggacggcagctgcacctgcgtcaccatgcagagatgtcccaagtagatggcgacaaggcaggggtgcgtcagcacgtttttgatggtctttctcttctccaccgtctcgcccgcgacaaaatacgtcgtgccgaccgaccacatcacaatgcacatcgggatcaaaaaaatcgaggtgtagagcacgccgatcagcatcatcgcaaaaagcgtgagctgcaagctccccagctctaaaatgctcatgttcctctcccgccatcctttccgatatgccctgcaagccggagtgcagcaggcggaaattgcaaaatctcctgctggtgctccggcggtcaggttcccccacgcaaagcgaacgaacgtgtgtggatggaggcgcggtgaaaaagaaaacccgtgcgctttgccgttcgttcagcctttcgttgtctttagtataagcgcggatttccattttgtaaaactgttaaaattgatatattctacaagaagcagctgtgaaaggagcgttcccatgaatttccattctcttgactattttctcgtgcttgcgcgggagaaaaacttcacccgcgccgctgaagcgctgcacatcacgcagcaatcactctcatcgcacattgccaatttagagcgcgagctgaactgcacgctcgttgtgcgccgcacgccgcttgagctcacctacgcaggccggacgtttctgcgctatgccgaatccatcggccagacgcgccaggccatggagcgcgaattctgcgacatctccgaaaatcagaaaggcgagctgcgcgtcggcatcgcctatacgcgcggccgcgccatcatgccgcacctgatccccgtctttcagcgcagatacccgaatgtcgagatcacgctgcttgagggctcgaacgacgcgatccaaaaggcgctgctcagcggcggcattgacctcgccatcgccgcctttccccgcccgctccccggcgcggtgcttgaggattactatctggagcacaccgtgctatgtctgtctgatggactgctcgcgcagtgcggcatcgaccttgacacgcaccgcggcgagatcgcctcgggaaatttgagctccctgcgcggctgcccctttgtcctcggctccgcggaggacatcggcgggcgcatcgggcgcggacttttgcgctcctcgggcgtctcgcccgtcagcaaagcgacgtcggaaaacgtcgaaacgctgctcgcgctctgcgagcagggcgtcggcgcatgcttctgcccggaaaatctgctgcacacagcgctctcgcccgcgcagcttgcgcacctgcacattctcccgctctgccccgaggcgtcctatcccatctgctttgggtacttgagccgctcgtatccgtggagcgtgctctcggaattcatccgcatcgcccgcgagcagactgcataagcaccataaaaacgccgcccgtacatttattgcacggacggcactcttttttacttcttcaccgcaggctgctgctgggtgatgcagtggatgttgccgccgccgaaggcgacctccttcgtctgcacgcccacgacctcgcggtcggggaacattttctgcacctgttcgatggcgactgcgtcgttttcgtcgccgtactgcggcaagatgaccgcgccgttgacgatcaaaaagttcatatacgacgcgatgctgacctcgccgtcctcacgcgggatagtaccctccacagcgtcgatggtatccgcgccctcgagtaagcacggctttttcgtcagacagagcttgtggacctttaatttgcggcccttggcgtccgtcgcctcgctcaggaatctgtacgccgcctgcgcctgctcataaaacggatggttcttgtcctccgtccagatgcaggcgacctcgccgggtgcgacgaagcacgccacgtcgtcgatgtgcccgttcgtctcgtcggggtcgatgccgtccttgatccacagcaccttctcgcagccgaggtagtcgcgcagcatctgctcgatctcttctttcgacttgtcggggttgcgcccctcggagagcaggcacatctcggtcgtcagcaccgtgccctctccgtcgacgtggatggagccgccctcgagcacgaagccctctgtgcggtagctgtccacatccgcgatctcgcagatcttgcgcgcgatctggtcgtccttgtcccaggggaaatacagcccgtcgacgagcccgccccaggcgttgaactcccagtccaccgcgcgaagaccgcccttgtcgttcacaaggaacgtcggcccgcagtcgcgcacccacgcgtcgtcgctctcgagctccacgacgcggatattttcggggagcttggcgcgcgcgttctgatactggcgcacggatgcgccgaccgtgaccttttcaaatcttgcgatggcttttgccacgtcagcaaaggccttctgcgcgggcttgccgccgtcgcgccagttgtcgtttcgctcgggccagagcatccacacgccctgctggggctcaaattcggcgggcatgcgatacccgtcctgcttcggcgttgtgccgatgattcgttttgccatagctttgtctccttatgatgaaaccatacttagctgcgcgcgtttttcccgcgcagcgcgatcagcacctcgccgatcgccacgctgaggatcgacccgatcgtaatgggcagaaagctcgcaagcgtctctgcgtcaaacgagagcgggaccgcagtgaaaatgatcgaaatgacgatgagcaccatcggcacgtaggcgatccatttgagcgccgtgtcagaccccggcacgcggaacgggcgcggcgtcttcgcatcctcgcgccgcagcttcaaaaacgccggaaacacgggaagatagctcaaaagcagcatcacgagattcagcgcgaaaaagctccagaagagtgacgaatccggcgacgccatctcgatgagcacgcccaaaacacacacgcacgaggcgacgacgcccgacgtgaccgccgcgccgacgggcatgtcgttctttgcccagcgcttggcgaacacccgcggcatgtcgttgtggtccgccgccagcgccgccgtcgaattgacgcccatcgaccacgagatcatgttgccgaacagcgtcacgaggaacaaaagcgccaccacgcccacgagcacgccgccgctgccgcccagaatgagcgacaccgcgtcgataagccccgaatccacgctgatctcacgcacatccaccgccgcgccgatgccgaacgccgagaagaggtagatggccgcgatgacgatgccgccggtcacgatagactgcgggatctgctttttcgggtcgctcatgttgtttgcatacgtgcacacgacctcaaagccgaggaagttgaagatgataacagagatatacgaaaggctgtttaagtcgaacgacggcagaaatgtccgcgccgacatgtcgttgacaaagccgtaacggctgatataccacacgccgagcccgccgacaagcagcgccagcacgatcttgatgacagcgctcacgttcaggataatgatgctgtcgcacacgggatagcacgcgatgagcgtgacgatccagatgaacagcagctcgaccacgagcgagccgaacgtcccgaggctccgccccgtgatgaacgtgatgagctcgggacacatcaccgcgagcgatgccatccacagcggaaagttgatccagtagtaccacgaggcgcgcgccgcccacttgccgttcggatacgccgcgtggatccagtcatagagcccgccgtctcccgcgtaggctgtgccgagctcggcggcgatgaggccgtagggcagcagaaacgccaatatcataaagatccaccagaaatactggctgttgccgatcgacgcgaccggcgccgccgcctcggcgacaaacaccacgcagatgaccgacaaaatgacgtctgcgagccggaattgattcttctccatggtttttctcagctcttttccgctttcgaaacgccgcagtaggcctcgacgcagccgagcttgtcgcagagcactttgtcaagctcctccttcgccgccgcgatctgaagaccgctcggctcctgccggcagcgcgtgaagtagacaagaaggccgcgcatggccgtcaggcggttgcctgcctcctcccagcagagggaggcgtcgctgtcggcgacctcgtcggtcacgtcctcgccgcgcgtcgcgggcaggcagtgcatgaatttgcagccgaggttccccagctgcatcagctcgcggttgacctgatagtcgtggaagacacgcacgcgctcttccttcggcatctcgttttcgtagagaccgtaccacacatcggtatagatgaagtccgcgccgcgtacgctctcgcggtcgtccgtgacaaggtagctgccgccggagagcgcgcagtttttcttcatgatctccttgtgctgctcattcagctggtgaccctgggggccgtactggacaaagtgcatgccgagcttcgtcgtgataaagccgagcgacgcgcacacctgcgtcgcgtcgcccacgaacacgaccttgcagtcctctaactttttcccctgcggaaggttctccacgatcgtgcagaggtcgccgatctcctgcgtggggtggttgtagtccgacatgccgttgatgacggggatggtgcagctttttgcgagctcttcgatcgtcttgtgctcgatgacgcgcgccatcacgacatcgacaagctttgagagtaccttgcccgtgtcgccgatggtctcatgcccgccgagctggatcataccggggcctaaatactgcgcgtgcccgcccatctggctcatcgcggtctcaaacgagacgcgcgtgcgcgtagaggactgctggaagatcatgccgagcgtcatgttgcgcatcaggggcggatagtagcccgccttaatggcctttttgatggcgagcgacaagtcgatgatgtcgagcagttcctgctttgtgaattcattggtgtcgataaagtcttttttcatacgattcctccgacatttcaagttgctttttgccgcggaggcagatgccgcggcgaatgctgcgcttagtgtctgcacttttttccagttcatgcggaaaaaaactgtgcaacatgacacaaatcacgccgcattccgtcgccgctgtgtattttacatagattttacaattctcctctggcagttttgacatttagcgcgtagactattacttggttataaatagagtctcaaaaaagaaaaaaggaaagatagaaaatatggatattttcaatgtgctcacgatgatcggcgggctgtgcctgttcctcttcggcatgaacctgatgggccaggcgctcgagcgccgcgcgggcggtaagctccgctcccttctcgacaagatgaccggcagcgtattcggcggatttttaacgggtcttggcatcacggccatcatccagagctcatccgccaccacggtcatggtggtcggctttgtcaactcgggcctgatgacgctgcgtcaggccatcaacgtcatcatgggcgccaacgtcggcacgaccgtcacggcctggcttttgagccttggcggcatcgactccggcaacttctggatcaagctcttaaagccctcatccttcactcccgtccttgcgctcatcggcatcatctactacatgttctgcaaggacaacaagaaaaaggacaccggcatgatcctgctcggctttgccacgctcatgttcggcatggagacgatgagcggcgcggtcgcgggcctcaaggacgtccccgcgttcacgaatctctttgttgcctttcagaatcccctcctcggcgtgctcgccggcgcgctgctcacggccatcatccagtcgagctccgcgtccgtcggtattttgcaggcgctcgccgtcacgggctcggtgagctatgccgcggccattcccatcatcatgggccagaacatcggcacgaccgtcacggccatgctgtcgtccatcggcacgaacaaaaacgcccgccgcgccgcggtcgttcaccttctcttcaatgtcatcggcgttgtcgtgctgctgacggtcttctgcattgtgcgcgcggcttttgcgcccgcgctgctgaatgaatccgccaccatggcgggcatcgccgtcacacactcggtcttcaacatcctctgcaccgccatgctcctgcccgcgggcggccttcttgaaaagctcgcctgccgcatcgtccccgacgattcccagacgcagggtgaaaagacgaccgagctcgacgagcgtcttctccccaccccgtccctcgcccttcgccagagccgcgccgtcgcccgcgaaatggcggactgcgccgtgcgcgcgctgaacaacgctctcaccgcccttgaccacaacacgcccgagctcgcccagagcatccgcgacgatgaggagctttgcgaccactatgaagatatcctcggcacctacctcgtcaagctcagcacgcagaaaatgggccgcgacgagagcgaggaggcgaccgagttactcaagaccatcggcgactttgagcgcatttctgaccacgcggtcaacattctctcctccgctgaggagatggagcaaaagggcctcacgttctccggcagcgccctcaacgagctcgccattctcacctccgccatccgcgagatcctttcgctctcgctcaagtccttctcctcgcaggacgtcgcgctcgcccaacaggtcgagccgctcgagcaggtcatcgacacgctcaaagagcagatgcgcacgcgccacatcctgcgcatgcagcagggccattgcagcattgaggctggctttgtcctctccgatcttctgaccgaccttgagcgcacatccgaccactgctccaacatcgccggctgcgtcatcgacgcccgtgcgcataacctcaacctgcacgaaacgctgcgccaggccaagactgccgacggcagcttccagcagacgtacgaatcctacgtggaaaagtaccagcttcctgttccgtcgtcaaacgtgtaaaaagcggggcgcttgcgagcgccccatttttgctattttcttgcttgtaaagcgcccgtttccctgctatactacggtcattaggttatttccgcgcaaactgtcaattttgcgcggtaggaaaggatgataccatggacccgatttatgagatcgaattgcaggactgcccctactgccgcggcaccggtacggtggaggatgagcagggctggtgcgtttatgtcacctgtgtcgactgcggcgcgcagaccgcgcacgcaagctacgagtcccccgaggaacgtctggccgccgcgcagcaggtcgcgcacctgtggaatgtcggcaaggttctgaaccccggcgtcggcgactgattcgactggaactgcataaaaaggacggaagaaaagcatcttccgtcctttttgcgctcaaccgccgtttgagcgcgcgaaactccccctccattgcgcgttttcccgcaatcggctatactgaactcatcaaggacgtccgcactttatagaaacggagttttgcctttatgaacatcgacatcggcagcaagatcaaaacgctgcgcctctccaaaagcatgacgcaggagcagcttgcaaaagccctccacgtgagcgcgcaggccgtgagcaagtgggaaaacggcagctcgcttcccgatattcagcttttgcccgcgctgtccgtcacgctgggaacgagcatcgactcgctcttctccctcacagacgagagccgctttgcccgcatcgacaatatgctctgggacaagcgctttctcacacagcaggaatttgacgaagaggagcactttttgcaggaaaagtgccgcgaggaggaaacgcgcccgcgcgcgacgctgctgctcgcagagctttactgcaagcgcgcacgggaatacaatgacctcgcctctcccctcgcgcgtcaggcgctcgcactgaatcccgactgcaaggaggcgcacaacgccatcttcgacgccgagcacggcgcgtacctcgactggaacgcgacgaaccactaccgcacgatcgccttctatcaggagtttctcgccgcgcatccggagaaccacagcgcgcacctgtggcttctggaccttctcatcgccgaccgccgctgctcggaggcgcgcgaggtcttggacaaaatgcaccgcctgaagccgacctacaacgacgacttttacctcggctgtatccttttgcaggaggggcacaccgacgacgcgctcgcgcagtgggaggccatgtgcgcaaagtatcccgacacgtgggaggtctacgttatgcgcgcgagcgagctcgccaagctcgctcactacgacgaggccatcgcggactatgaaaaggcgatggcgctcatgccgcccccgcgctttgtcgaccctgccgaggccatcgcgcagatctgcgaaattcgcggtgactatgaaacggcgatcacctactacgaaaaggtcatcgccatcgaaaaggccgactggcacgaaacgcagggcgaagccatcgacgccccgcagcgaagcatcgcaaggctgcgcgaaaagctggcaagccgctgatatcggggcgaaaaggcgcttgtcaaaatcttttgacaagcaatttttcctcatgtaaagcagctttgctcgacaaactttcccgttttggctacccttggggcagatcgaacgaaacgcacaggaggcacttatggaactcggtaatcagatcaaggcacatcgcgccgcgctctcgctttcgcaggaggagctggcggaaaaggtctacgtcacgcgccagaccgtttccaactgggaaaccggcaagagctaccccgatatccacagcctgctcctgctcagcgccctcttcgatgtttcgctcgaccaactcatcaaaggagatttggaaaccatgaaacaggaagtcaacgccgccgacgtcagggccatgaaccgcgacggcatcatctacaccattctgctcgccgccacgatcattctgcccgtgcctctaatcaagtggttcgacctctacggtctcattccggagcttttgctctggggcagcgcgatgtactttgccctccgcctcgagcgcatcaaaaaagcaaataacgtccagtcctacagggagatcttggccttcagcgagggcagaaagctcgatgagatcgagcaaaaggtcgaagcgggcaagcggccctatcagaagtttctgctcgtcctgctcaccgccgggatcacactgcttgtcggcatggtgctcagctggctgctgctgtaagcaaacatcacaaaacccgccccgacgcaaaagcgtcagggcgggttttccattttcagaagcaggtttcacatattgaagcgtctgcgcgcttcctcgcgcagcgacgggacgcggcgcacgatgcgcagcgggatgatgagcccgatgcagatgacaagcacgacgagcgaccagctcggctgccacacctcaagaaaataccggtcaaggcagtattcgacgcccatcgccatcaggcccaccgcgccgatgcacatggcgatggaagaaaggcgtgagcgcctgccgtcgcgcagcagaaagctcagcaggaatacgacgacgcacgcccagccgagcatcggcagcacgagcccgcggaaccagcgccccccgtgcagcgcaacggaaatgatccacacgtaaatgccgatggcggcgacgtccaccgtcagtcggaagaagattgggatgccgcgcacgagcatcggcagtgcgaaccagatccacagcatcactgccgcgcccgcgacgtagagcgcccaagggtgctccgtcggcaaaatgagattcagcagcccgcagcagagcgacacggacgcgagcatcgccgttagcagtgcggcggcggctctgcgcgatgctctcggcacctcggccggcttggtcgggaaatagcgcggctcggtctcatccggcttccacgccggcgtgccgcagagcgggcagcgctccgcgccctcgtccagctccacgccgcatttgacacaatatgacatcaaattccttctttcgatctgctattcatcggttgctctctacgtgcacggggattcccgcgcgcacgaggaagcggaaaaagtcgcgctcggtgtccgtctccgcctgcgtgccggcaaaggtgatctccatcgtgtcgccatagctgatggacgcgcagtggcagcgcggcaccgtcgcctgtcccagaatgacctccgccccgcggatatgctcagccatttcgggcggcacggtgaacgcgcctgggttcgtatatgtgcaggaatagggcctcacgccgtgcaggcggtaattgagcgccatgacgggatttttgaaaacgaccggaatgagccgcaggaaaaagttttccgtaaagcgaacgttgcccgtgaacgccgcctgcaattcctggcggttgatgtgcagcttcataaaatgccgcacttgcgagacgatctcggggaacgtgtagtcgccgagcgcggggtcgatatacgggcgaacggtggtaatgaagtttcgcagcgtctcgctcgggaaccagccgcgcagattgatggggatggccagcgccacggggcgcaggcggtagggcttttcgcgcttctgcttttccaaaatgacgtaaatgagcacagcggagaggtattcggtgatcgacgcgtcgtactttttcgactcctcgcgcagcttcgagagcggcacgaagcccatcgtcacatggaacgtgtaaaacggctcgcttgtgccggtattctgatacgccgtcggctggcggtggaggcccagtgcgtgatgtcctgcgtagcgggcataggcgtcctccatctcctcctcgcgcggcggctcgttcaaatcaagcacaccgttccccgcagggatatcaacgccggtctggcgcaggtattcggccagcagcgtgcggaagaagacgatggctccgccgccgtcggaaagcgcgtggaagacctcgatcgaaatgcggttgcggtaatagtaaaagcgcacgagccagccgttgtcttccttgaagcgcacgggctggcaggggtcggacacgtcctctttcaaaaacggccccggcgcgctgttgtgctccaaatagtaccagaacgcacccttacggatgcgcacggcaaaggtcgggaagcgcggcatgcagcggtcgatggcgcgctgaagcgccgcggggtcgacgtctttttccatcagagcggaaaagcggtagatggctgaatactcctccttttgcagcgcggagtagagcgtgcccgcggagtcgagcttataccatttgctgttgggcttggccatccgatgttccttctttccctctgcgcggtcttgagaggtttattgtagcacaaagcgcgccgtgctacaagaaagatgcggcttttccttggcatttttacgaaattatgatatcatgctcccaaagaattttgtttttcaggaggagctatggaacccaaactccgcatcatccgcaaaaagaagagcgaggccgagaacacgcatctcgacccgctgatgcgtgcgctcaaggcgctgcacagcgtcggtgcgccagaaagcatgaccgccgaagagcttgagcgtcagcgccgcagtcaggaggtcctcggcaagctgactgcgccgatgacgggcatggattacgaggaatttgccctctcgggcatgagcgcggcgtggacgcggctcaaggccccccacggcagccgccatgcgattttatactgccacggcggcggctacacgagcggcaacctcggctattcgcgcgtactgtcgtccaagctcgcgcatgcgacgggctacgatgtgctgagctttgaataccgcctcgcgcccgagttcccctaccccgccgccgtcgaggacgcgctgcgcgcgtgggactatctgatgctccaaggctacggcgcgcgcgatatcgtcctcgcgggcgacagcgcgggcggcaacctcgcccttgtgctctgcaaccgcctcaagacggcgggccgcaagctccccggcatgctcatcctgatgtccccgtggaccgacatgacgatgtccggccagtcctatacagagcgtgcggagatcgacccgatgctcacgcccgagtacatcgaagccgtgcgtctcgcctacgccgcaggaagagactaccgttcgagcgacctgtccccactttttgccgacttcaccggcttcccgccgacgctcatccaggtcggcgaccacgagatcctgtattcggattcagaacaactctatcaggcgatgaagcgcgcaaacgttccctgccgcctgcaggtcagcgaggggatgtggcatgtgtttcagatgtttcccattagaaaggcttctgttgcaatagaaaatatcgcacggttccttttggaacaataagttccggttttttcccggacgcagataagggagggatatctctttttcgaaaagagatatccctcccttacaccctcccagagaaaattcacattgcaagcgagcagctcaaagagctgcggcgcttgccgattgcactgccatagcgcggcgaagccgcgttagcattgctatacgatttgcctctgctcctatcatccgctgttgctctgcccatcttgtagaagtgcgcagtaatctccgtctaccgaggcactactcaatgcggcgagcgcagcaatgccgctatttcgcaagcagtctgccgccgggcaaacgtcactcgcgcctcacgacagtaaggcgcggttgctgtcaggtcgcgactcgcagggattcatggcgaagccatgtacaccgcacccacactgcgcagcgcgtgcagcccttcaagctgcaaacccgcaatgtgcggggtcaaggggcagtgccccttgcgttctcttgggggtccaagggggccattctctcacgtgagagaatggcccccttatccgtgcagcgccatcggcgctgcctctccctcccgcgccgtgcgcgggaaactccctcacccgttgggcaaatcaaaaaagtacaacttttttgaaaaacccacttgacaagtgggccccgcgtgctataatgcaaccaacaagtgaagagcttcaaacctatgacggagagaagtagccgatgcagataagcacaaagagagtcccgggtggtgtgatcggggcggcggacggtcggtgaatggacttcagagggcggaccgaacggcggaagtcaagtagggaccgacgggtatcccacccgttatccatcggggcgcgtatgatggtgcgcgtaagcgagcgggcgttttacaaaacgtcaatttgggtggtatcgcagaagtttgatgacttttgtcccatgtgtatgggatgaaggtcttttttctttatattcctcctgttccggcaaaccaggacctcatctgccacccgaaatcaaataaatttggaggaaaacaaaaatgaaaaacaacatggtgaaaaagcttctgaccctggccctcgccggtgcgatgaccctgtctctggccgcgtgcggcagcaagagcgacgacagcagcaacgacgcccagcagggcggcgacgaaagcggcaagacctacaaggtcgccatcatcaagcagctcgaccacgcctctctcgacgagatcgcgaacgctgtggccgccgagctcgacaagatcgcagccgacaataatgtgaccatcgagtacgacatcacctccggccagaacgatcagaccatcttaaagcagctgtccgatcaggcgatcgccgatcaggtcgacgccatcatccccatcgcgacgaccgccgcgcagatctctgccctctccgctgaggacaccaagacccccgttgtttatgccgccgtctccgatcccgaggccgcgagcctgacgggcatcgactatgtgaccggcacgagcgacgcgctgaacaccagcttcatcatggacatgatgttcgcccagaacccggacgtcgccaaggttggcctgctttactccctctctgagcccaactccaccaagcccatcgccgacgcgaaggcctacctcgacgccaagggcatcgagtacgttgagcagaccgcgaacacgaacgacgaagtcgtcgctgccgcttccgcgctgatcgccgatggtgtggacgccgtcttcaccccgactgacaacgtcatcatggccgccgagctcgccatctatgaggacctcgccaaggccggcatcccccactacaccggcgctgactccttcgtccgcaacggcgcttacgccacctgcggcgtgaactacaccgacctcggcgccaagaccgccgacctcgcctactccgccatcaccgacggcatggacgccatggaggactactacctgatggacggcggcatcatcaccgtcaacaccgacaccgccgccgcgatgagccttgactactcctgcttcgacagcatgggcaccgttgtcgaggtcacgaccaccaaggactaagaaaaccgtttccccgcaaatgaactgcctttcccccgaccttcccgtcgggggaaattggcctgaaaggagaatttccccatgctcatcatcacgcagaccgcccttgagctgggcttcctctacgccctggtcgcgatggcgctgtttttaagctaccgcatcctcgacatcgccgatctgacgaccgacggctgcttcgtcctcggcgcggccgtgtccgtcaccgtgacggccgcgggacaccctgtccttgccatcttcgccgcgatgctcgcgggcgcgtgcgcgggctttgtcaccgcgtttttgcagacgaagctcggcgtgccgtcgatcctcgccggcatcgtcacgaacaccggcctttacaccatcaacttaatggcgatgggctggaaatccaaccagagcctgctcggcggcaagaccgtcttcacgatgctgcgcgagaccggcatcggcggcgagtggtacgagctgctgctcgcagcgttcgtcacacttctggccggtcttctgctggtgctgtttctcggcacgcgcatgggtctttccatccgcgccacgggcgataaccccgacatggtgcgtgcctcgtcgctgaatccgtcgttcacgatcacggtcggcctgtgccttgccaacatgctcacggcgctctccggcgcaatcgtcggccagtatcagaagactgtggacatcaactccggcacgggcatcgtcgtcatcggcctcgcctgcctcatcatcggcgagacgctgctcgggcgcagaagcgtcaaaaagggcgtcatcgccgcgattctcggctcgatcgtttaccgcttcatctacgccatcgtattctacacgaagatcgtgcccgtcgagtgcctgaagctcctgacggccatcattgtggcgctggccattgccgcgccgagcatccagaagtgggcgacattccagaagcgcaaaatggccgccagaaataaggagggcgtgtaagatgctggacattcaaaatctctccaagaccttcaaccccggcacggtgaatgaaaaaaaggcgctttcttccctttccctgcatttggacgagggcgatttcgtcaccatcgtcggctcgaacggagcgggcaagtcgacgctcttcaacgccatcgcgggcagcttttatgccgacgagggcagcatttcgctcgcgggcaaggacatcaccttcatgcccgagcacgagcgctcccgccgcatcgggcgtctctttcaggaccccctgcgcggcaccgcgccgagcatgacgatcgaagaaaaccttgcgctcgcgtacctgcgcgcggcgcacggcaatccgttcagccgcatcagcaagaaggacaaggatttcttcgccgagcagctcaagcagctcgacatgggccttgaggaccgcatgaaaaaccccgtgggcctgctctccggcggccagcgtcaggcgctcacgctgctgatggcgacgatggtaccgccgcagctcttacttcttgacgagcacaccgcggcgctcgaccccgcaacggcggaaaaggtgctcgacctcacccgccgcgtcgtggcggaaagtcacatcacctgcctgatggtcacgcacaacatgcatcaggcacttgagctcggcaaccgcacactgatgatggcggacgggcgcattgtgctcgacgtcgcgggcagtgaacgcgcggggatgggagtcgacgatctcatcgcgcggttcaaagcaggtgccggacatgagcttgataacgatagaattcttttatcggaataaaattgcagcacaaagtgctgctccttattccctgtgccgcgcagggagtgcgaataaagggggtcattctctcacgtgagagaatgaccccctttaaatcccccaagagaacgcaaggggccttgccccttgaccccgcacattggcagctttgggcttgaatgactgcatgcgctgcgcaaagtaagtgcggtgtacatggcttcgccatgaatccctgcgattcgttactgaccagcaaccgcgccttactatcgtgaggcgcgagtgacgctaccttggcggcagactgcctgcgaaatgcggcattgctgcgctcgccgcactgatgagactggcggtagacggaaattaggctgcacttctacgagactggcaaagcggcagcggagatagaagtaagacaaatcgtttagattcatca

SEQ ID NO: 10126 - DNA, 61269 bp, Unknown
  gut microbiota DNA sequence
taaaagtcattcaagccagagactgccaatcaaaagcctttctcttggggttccaaaggggatattctctttcgcgaaagagaatatcccctttgattcgtgcagcgccgacggcgccgccttcccctccgcacctgtgcggaaacaacgctccacaatgtggagcttttttaacgcatgggtcattttgcccgcttgaggcaataccaattccatgctatacttatcgttaagaaaacggcaaattcaaaggagaactgcatggagagcatttttgaaaaacgtcttaccgtcacgcccgactactgtgacgcgtcgggcgcgctgtcgccgttggcggcgtttacgatttttcagggcatcgcagcgcagcacgcggaggtgctgggcgtcggcagcagcgcgatggcgaaaaagggtgaattctggctcacggtccacacgcgcgtcgatctctttgagcgcgcgtacctgatggacgaactcacggtgcgcacgtgggcggaggcgtgcagcgagcgcgacgtacgcacgtaccgcagttacacactctcgcgcggtgaggcggtcattgcccgcggcaagaccgagtgggccatcttaggaccggagcagaagatcatccgctttggcgactcgggcttcccgaaggactaccccttccccgccgagacggccatccccgaaaaattgcagcgcttccatgaaaagtttgaggacgccggccttttctcgcactacgccgtgcggtcgacggacatcgacctcggccaccacatgaacaacgtggcctatgtgcgcctgctgctcgactgcttttcggcaaaggagctcgcgagcggtaatattcaatcggtcgagctgcactactcaacgccgtgcttcgagggtgaggcgctgacggtctacaagaagtcactcgatgacggcacgtgccgcatcggcatcgtcaagccggacggcaaaaccgcctcgcaggcgtgcgtgacgttcaaaaagtaaggacgcggcggcagtgaaatactttttacagggccttacgatggggcttgcatacgtcgcgcccatcgggctgcaaaatttattcgtcatcaactcggcgctgacgcacacgcgaaagcgcgcacttttgacggcgctcatcgtcatctttttcgacgtgacgctcgcgctcgcgtgctttttcggcgtgggcgcggtcatgcagcgctatgaatggctgcaaatggtcatcctgctgctcggcagcctgatcgtgctgtatatcggcgtcggcctcctgcgcgccaaggcggaggagatcgaccgcagccggaccgcggactcgatccccaagaccatctcgtccgcctgtgtggtcacatggttcaacccgcaggcactcatcgacggaacgatgatgctcggcgcgttctacgtgacgctgcccgcggcgcagagcacgtcgtttatcagcggcgtggcgctcgcgtcctgcctgtggttcacggggctgacgctgctcatctcgcttttcagcgacaatttcacgcccaaaacgctcgttgtcatcaacaaggtctgcggcgtgatcatcgttttctacggctgcaagctgctctacagcttcctgacgatggtattttgatctcagtgctcaaaaaagcggttcccgtttgggaaccgctttttgttgttctttgcgctgtttagttgttgctggcgttcgtggcgcggagggtgacgtcgtgatagccgccctcgacgatgctggtggcggagacgagcgtgagcttcgcgttcttctgcaggtcggggatcgtggtcacgccgcagttgcacatggtcgacttgaccttgtaaaggcttcttgcgacgttatcctgcagggagcccgcgtaggtgacgtaggaatccacgccctcttcaaacgcaaggcccgtcttgccgccgaggtcgtaacgctgccagttgcgcgcgcggttcgagccttcgccccagtattccttgacgtacacgccgttgacaagcagcttgttcgtcggcgattcgtcgaagcgagcgaagtagcggcccagcatcaggaagtccgcgcccatggcgagcgcgagcgtcatgtgatagtcgtgcacgatgccgccgtcggagcagatggggacatacacgccggtctcgcggaagtattcgtcgcgtgcggcgctcacctcaatgagcgcggtggcctggccgcggccgatacccttcgtttcgcgcgtaatgcagatggagccgccgccgatgccgactttgacaaagtccgcgccgctctcggcgaggaagcggaagccgtcgcggtcgacgacattgcccgcgccgatcttgatggtattgccatagttcgcgcgcacgtagtcgatgaccttcttctgccagacggagtagccctccgacgagtcaatacacagcacatccgcgccggcctccacgagcgcgggaatgcgctcggcgtagtcgcgggagttgatgcccgcgccgacgaggtagcgcttcttgtcgtcctgaagcgcgagggggtgctccttgtgctcggcgtagtccttgcggaagacgaagtagagcaggtggtcgttttcatccacgatgggcagcgcgttgagcttgtgctcccagatgatgtcgttagcctccttgagcgtggtcgacgcaggagcggtgacgagcttttcgcgcggagtcataaactcgcgcaccttcaaatcagtgctcatgcggctcacgcggtagtcgcggctcgtcacgatgccgaggagcttgccgttgggcgttgcgtcctcggtgatggcgacggtcgagaagccgtttttctccttgagggccagcacatcggccagcgtgtgctcgcttgtcaggttcgaggctgacggcacaaagcccgccttattgctcttcacgcggcgcaccatctcggcctcgctctcgatggactgggagccgaagatgaacgaaaggccgccctctttggccagcgcgatggccagcgtgtcgttcgacaccgactgcatgatggccgagaccatcgggatattcaggctgatggggcactcctcctgccccttgcggtagcgcacgaggggtgttttgagcgagacgttgtcaggaatgcagtcctcggacgtgtaaccggggacgagcagatattcgctgaacgtgtgagacggttcgggataataataagccattgggtctgctcctctcttcttaaattacttgaaatagcgcacggcagaggtgaacagctccatctcatactgtccgggaacgttgcggtaaagctccttgccgatgcgctcggtgtgccccatcttgccgaatacacggccatcgggcgaggtgataccctcgatggcacagatcgagccgttggggttgaatgctgcatccattgtagcatacccgtcaaggtctacgtactgcgtggcgatctggccgttttcggcgagcttcttcacaagctcttcggatgcgaggaagcggccctcgccgtgggaaatgggcacggtgtaaatgtcgccgaccttcgtacccgcaagccagggggacttgttggagcacacgcgcgtgcggaccagacgggactggtggcggccgatgacgttgtaggtgagcgtcgggaaatcagcgtcggtgtccatgatcttgccatagggaacgagaccgagcttgatgagcgcctggaagccgttgcacacgccgagcatcagaccgtcgcgcttttcgaggaggtccgtgacctgctccttgaccgcggcgttgcggaagaacgccgtgatgagcttggcactgccgtcgggctcgtcgccgccggagaagccgccggggatgacgatgatctggctctccttgacggccttggcaaagcgctcgacgctgtcagcaacgtcggcgctcgttaagttgcggatgatgaactgcccggcgtccgcgcctgcttcgagcagggcgcgctgggtgtcgtactcgcagtttgtgccggggaagacggggatcagcgccttcggacgcgcgatcttgacagcgggcgcggcgcgcttttccgtttcacaggtaaagcactcgaccgtgccggcgtcctgcgtcttcgtcggatagacggattcgaggacggcatcgttcagggcaagcagcccagagatgctcgcctcgtcattgccgatggtgatcgtcttctcctccgtcgtgatgccgatgcagacggcgtcgggaatttcctcggtgagctcggcgacgatcgcgccgggcatgggccggtaccagtcgagagcggtcgaagccgcggcaaagccgacctcgttgccgagcgacatcttcatcaccgcctcggcaaggccgttttcaacggcccaggcgcttgcggccttgcccgcgcgggcaagcgcggtgaagcgctcccacgcggcggtcttctgctccgccgtgccgccgtagaagagataaacgccgtgaccggcggacttgaagtcagtcgtcacaagctcgcccgcgcacaccggtgcaatggcgaacgagatgagcgtcggcgggacgtcgtggtctaagaacgtgccggacatcgagtccttaccgccgatggcggcggcgccgagctcaagctgcgcgtccagcgcaccgaggagcgcggcaaaaggcttgccccagcgcacgggctcattgcggagcttttcaaaaaattcctgtaaggtgagatatgccttgtgataatcggcgcccgcggcgacgatcttagcaaccgaggtgtagaccgcgctgtgcgcgcccgtgtaaggatcggcgctcagtgcgtcggggtcgcagccccaggccatgacgctgccctgctcggtcttgctacccggcagcaccggcagcagcgccgccatcgcctgcgagggactgcgctgcgtcttgccgccaaagggcatgagcagcgagaacgcaccgacggtggagtcgaagcgctcggtgagaccgcggcgggacgcgctcttgagactgcccgccatatcgcgcagcgtgcacggcgcgcaagcggactccgcctgcttctttcccacttccacgcgaatgcttgcgtgcttgactgcgccgttcgtgtcgaggaaggcgcgcgaaaggtcggcgaccgtctggccgcgccagtgcatgaccatgcggggactctcagtcacgacggccacgcggtaggcctccaggttttcggcctgcgcggcggcgatgaacttcgcctcatcctccggcgcgacgacgacggccatgcgctcctgcgattcggagatcgcaagctcggtaccgtcgaggccctcatacttcttgcgcacggcgtcgagctcgatctcgaggccgtcggccagctctccgatggcgacagacacaccgcccgcgccgaagtcgttgcagcgcttgatgaggcgggtgacctcgccgtttcggaacaagcgctggatcttgcgctcttcgggcgcgttgcccttctggacctcgctcgccatggtggtgagggacttcatatcgtggctcttcgacgaaccggtcgcgccgccgatgccgtcacggcccgtgcggccgccgagcaagataacgacgtcgcccggggcgggacgctcgcgcacaacgttcttggcgggcgccgcggcgacgaccgcgccgcactcaaggcgtttggcaatgtagccctcgtggtagagctcggcgacatggcccgtggcaaggccgatctggttgccgtaggacgaatatcccgccgccgcggtctgcgccagcttgcgctgggggagctttccgggaagcgtctccgcgagcgtctttcgcgggtcgccgccgccggtgacgcgcatcgcctgatggacataagcgcggccggagagcgggtcgcggatgcagcctccgatgcaggtggccgcgccgccgaagggttcaatttcggtggggtggttgtgggtctcgtttttgaacatcagcagccagtcctgctcctcgccgttcaccttggcgggaacgtggatagagcaggcgttgatctcctcgctctcgtcgagctcggggagaaggccgcgtttcttgagcgtcttggtgccgatggtcgcgatgtccatgagcgtctgggggcgcttggcggccttctcgatgccgtagacctcctcgcgcgcggcgaggtagcggtcatacgcatccttgacggcgggattctcgatgctgacctcgtccaaatgcgtagagaacgtcgtgtggcggcagtgatcggaccagtaggtgtcgacgacgcgcacctcggtcacggtggggtcgcggtgctcttcgtcgcggaaataggcctgcaaggtcttgaggtcgtctaagtccatcgcaaggcccatggacgaaagaagcgccgagagcgccgattcatccatcccggtaaagccgtcgaccgatgcgacgctcttgggctcggagaggttctcttcgagcgtctcgggctttgcaagcgaggcctcgcggctctcgacagggttgatgacatggtgcttgacggcctcgacgtccttttcagagagcgtgccatagagcgcgtagaccttcgccgtgcggatgcgcgggcgctcgccctggctgaggagctggatgcactgcgccgcgctgtccgcgcgctggtcgaactggccgggcagcggctcgacggcaaacacggcggcagcgccgctcgcgtcgatctccccgctcgtcaggtcgagctgcggctcggagaaaacggtgtttgttgcataggcaaacagagtctcgtcgatgccctcgacgtcgtagcggttccagatgcgcacgctttcgagacccttgaggtccagaaacgagcggcagtcggaaagaaggctcgcgcactcgggcgcaaggccgggctttttttcaacacagacgcgatagaccatttactctctctccttttgcgcggcgagggctcggcggccaatgtcgctgcggcagtatttgttggcaaaatcgacctcggacgataaacggtaggcctccttcacggcctcctcgagcgcgggggcgacagcggtaacgccgagcacgcggccgcccgcggtcaggagcctgtctccgtctttcttcgcgcccgcgacgtaggtgtgcgcagcggcctcttcgctcatcgtgatggggaagccgctctcgtacttcttggggtacccgttcgaggcgaggacgacgcagcaggcggaatcggtcgaaaattcgacggacacatccttgagcgtgccgttcgtcgttgcctgcatgaccgtgagcaggtcggacttgagaagcggcagcacgacctgcgtctcgggatcgccgaagcggcagttgtactccacgaccttcgggccgtcctttgtgagcatcaggccgaagtacaggcagcccttgaaggggcggccctcggccttcatcgcgcggatcgtgggcaggaagatcgtctgcatgcactcgtccgcgatcttttccgtgtagcagggatttggggcgatcgtgcccatgccgccggtgttcgggcccttgtcgccgtccagcgcgcacttgtggtccatggaggacaccatgggaacaacggtttcgccgtcggtaaagctcagaacggagacctcgggcccctccatgaactcctcgatgacgacgcgcgcgccgctctgaccgaaggccttgtcctcgatcatggagcgaacggcggctttcgcctcctccaccgtctgcgcgacgatgacgcccttgccgagcgccagaccgtcggccttgacgacgatgggcgcgccctgcgcctcaatataggcgcaggcggcgtccgcgtcggtgaagagctcgtacttcgccgtggggatgccgtattttttcatcagatccttggaaaaggccttgctcgcctcgatgacggcggcctttttgtcggggccgaagcacgggatgcccgcctcggtcagcgcgtccaccgcgccgagggccagcggatcgtccggcgcgacgacggcgtagtcgatccggtgcgctttcgcaaattcgacctgcgcggggatgtcctttgcgccgatctccggcacgcagaccgcgtcggcggcgatgccgccgttaccgggcaggcagtaaatttcctcaactgcgggattttcttttaacttcttgataatggcgtgttcgcggcctccgccgccgatgaccatgagtttcattcgtttcgttcctccttttagtgatggaacaatctctgtccggtaaaggccatggtgatgccgtatttattcgcggtctcgatgacgttgtcgtcgcggatcgagccgccgggttccgcgatgtaggtgacgccgctctttctcgcgcgctcaacattgtcgccgaacgggaaaaacgcgtcggagccgacggtcacgccgctctggcgggcgacccagtccttgcgctcctgcaccgtcagcggctcggggcgctccttgaagacgcgctgccatgcaccgtcggccaaaacgtcgtcacactcgtcggaaatataaacatcgatggcgttgtcgcggtcagggcggcggataccgtccacaaacggcagcgcaagcaccttcgggtggcggcggagataccagttgtccgccttgctgccggcaaggcgcgtacagtggatgcggctctgctggcccgcgcccacaccgatggtctggccgtccttggcgtagcagacggagttcgactgcgtgtatttgagcgtaatgagcgaaacgatcatgtcgcgcttcgcgtcatcgggaagattcttattttcggtgacgatattcacaagaagcgactcgtcgatcttgcagttgttgcggccctgctcgaacgtgacgccgaagacgtccttctgctcctgtggggcgggaatgtaggcggggtccatctgcacgatgttgtacttgccgccctttttcgtctttaggatggcaagcgcctcctcgctgaacgagggggcgatgatgccgtcggagacctcgcctttcagatattccgccgtcgcggcgtcgcactcgtcggagagcgccgcccagtcaccataggagcagaggcggtccgcgccgcgggcgcggatgtaggcgcaggcgatgggcgaaagggcctcgtcaggctcaacaaagtaaatctgcttgtccacctcgtcgagcggcaggccgagcgccgcgcccgcgggagagacgtgcttaaagctcgccgcggcgggcaggcccgtggcctccttaagctcgcgcacgagctggaaggagttgaaggcatcgagcagattgatgtagcctggcttgccgttcagcacggtgaacggcaggtcgccgccgtctttcataaagacgcgcgcaggcttctggttggggttgcagccatatttgagttcgagctcgttcatatcgttctcctcaatcgcctaaattcttgttgaacagcttgacttcgccgttcacgttcgcgtaaagggacaccttgttgtcctcgttgagcgcgtcccagacctcttcggggctggggacgctcacctccatcggctcgcccgcaaatgtcggcagcggcgtgccgtcgccctgataggtgctgatgaagtaggccttgtccgcgtcgcagccctcgtagcagaagaactcgcgcaggcaccggccgttgttatgcttgaggatggacatctcgaacgagccgtcctcatgcacgatggcggaaatacgcggcgtccagttcggctcgtcgggctcgtactcgcgcgtcatcaggccgcggcggaagtcgccgtgctcgcagatcgtgtcggtctggtcgccgttcgtcacaacgaggtcgctgcccatcgtgcggacggggtgatagatgatgaggctcgggtcggcgagcttgtcggggtcaaaggcctcggtgcggatgccgtcgtcggtcttgacaaagacgcggttgcggctgttctcgctgcggcccatgatgaaataatagacgcggtccttgccgactaaaatgccgcggccgggataagacgtatttttcagaaagtgcaaaaagtcgaccatttcagttctcctcttctgtgatggcgcggcagacaagctccgtcgcgcgcggcaggagcttccattcggcctgctccatcacgcggcgctgtaaggtctcgggcgtgtcgccctcttcgatctcgaccgctttttgcaggatgatctcgccgccgtcgggaatttcgttgacaaagtgcaccgtcgcgcccgtgaccttcacgccgcgcgcgagcgcagcctcgtgcacctttaagccgtacatgcccctgccgcagaacgacgggatcagcgacggatggatattcagaatgcggcgcggccactttttcgtgaagttctcgctcaggatgctcaaaaagcccgcgaggacgataacatcgatcttgtactgctcgagcagaagctcgatcgccgcctcaaagtcgtgctggatgaggctcgacggcacggtgtgcgcggggacgttcgccttttccgcgcgttcgagcgcgtaggcgcatgcctgagaggaaatgacgagcgcgatctcgccgtgtggaattttgccgtctctctgcgcgtcgagcaaggcttgtaaattcgtgccgccgcccgagacgaacaccgcgatgcgcgcgcttttcagcatagtgcgaccttctcttccccgctcacgacctcgccgatcacgtaggcgtcctggccgttttccttgagggcggcaagcgccttgtcggcgtcatctttggcgacgatcatcgtcataccgacgcccatgttgtaggtgttgaacatgtcgtgctcggggatgctgcccatgcgctggagcattgagaagatcggcggcgtgcggagagaggacttgtcgatcttcgcgcacaggccgtcggggatgcagcgggggatattttcgtagaagccgccgcctgtgatgtggctgacgccgtggacgtcggccacgtccatcgcggcgagaacgggcttcacgtagatcttcgtcgggcgcagcagctcttcgcccagcgtgcagccgagctcgtcgacatatgcgccgaggtccgcgtgctcaacgttgaagaccttgcgcacgagggaatagccgttggagtggataccgctcgaggtgagcgcgatcacaacgtcgcccggacgcatgcggtcatggtcgatgatcttcgcgcggtcgacaatgccgacggcgaagcccgcaaggtcgtagtcgtcggcggacatggtgccggggtgttcggcggtctcgccgccgatgagcgcgcagccggactgcacgcagccctcggccacgccggaaacaagcgtcgcgaccttctccggctcgttcttgccgatggcgatgtagtcgaggaagaagatgggctttgcgccgcagcagatgatgtcgttgacgcacatggcaacgcagtcgatgccgacggagtcgtgcttgttcatcagctgcgcgatacgctgcttcgtgcccacgccgtccgtgcccgagacgagcacgggctcgctcataccagtaagatcaggcgcaaacaggccgccaaagccgccaatatcggacacaacgcccgggatcatggtgcgctggacgtgctttttcatcagcttgacgccctcgtagccggcctcgatattcacgccggcggccgcgtatgcttccgaatgagaaatgcccatattgttattcctttccggtccagcaataggtgcagacctgttccctgtcaataccgatcgcctccaacattccctcaagggactggtaggacagcgaatcaaagccgaactgctcgcagatggcgtgcagcagacactttccgcgttcgcagctgctgtcggcgtattcttccagatgcttttgcccctcgttgccctccagctgctgcaccatgcggcgcgccagcagatccatggggctgttgccgcgcgagaagttcaggtaacggcagggatacatgatgggcggacaggccgagcgcatatgcacctccgacgcgccggcgctgtacaggaattcgaccgtttcacgaagctgcgtgccgcgcacgatggagtcgtccacaaagaggagtttcttgccctcgatcagctccggcacggggatctgcttcatgcgcgccactttgctgcgcacctgctgatcctcgggcatgaacgagcgcggccaggtcggggtatacttgacgaaggggcgcgcaaggggcttgccgctttggtttgcatagcccatggcgtgcggcacgccggaatccggcacaccggcgacgaagtcaacatcgggcacgccgccgcgcgcttcctcgtcgcgcgccatgatcgcgccgttgcgatagcgcatcagctcgacgttcacgccttcgtagttggagttcggatagccgtaataggtccacaggaaggcgcagatcttcatctgcttgcccgcaggtgagagcgtttcaaaccctctcgcgttcaggcggacgatctcccgagggccaagctcgtaggcatcctgatagtcgagcttatggtaggcgaaggactcaaacgacacgcagtagccgtcctcgcgctgaccgatgagcacgggaaggcggcccatgctgtctctcgcagcgatgatctcgccctcttccgtgaggatgaggatcgtcatggagccgtcgataacctcctgggcatggaggatgccggaggcaaggtcgtccttctggttgatgagcgccgcggtcagctcggtgacattcacgcggccgctgctcagcgtgaggaactgctggcccttttcggaaagatagtcctgcaccagctcgtcggcattgttgatgatgccgaccgttacaatggcgtagaggcccagatgcgagcgcacgagcagcggctgggggtcgctgtcgctgatgcagccaaggcccgcgtgaccacggaaatccgcaagatcgcgctcgaacttcgtccgaaagggtgtgttctcaatattatggatctgccgctggaagccctcttccttgtcaaagagaaccataccaccccggcgtgtgccgaggtgggaatggtagtccgtgccgaaaaagacgtccagggcgacattgcggtcagataccgcgccaaaaaagccgcccattacgcaaagaacagctcagagagcgtcatggggtcgatgtacttgccgtcgcgataaacgcgcatattgcccgaggagatctcgtcgatgagcatcacgctgccgtcgggcgcgtagccgtactcaaacttgatgtcatagaggacgaggcccttctcgctcaggtcatcggcaacgatcttggtgatcttctgcgtcatggccttgatctcgtcatactgctgctcggtcatgacgttcagcgccgcgagcgcgtccttcgtcacgaggggatcgcccagcgcgtcgttcttgaaggtcatttcgacataggagggaagatccgcgccctcttcgatgtactcgccgtagcggcggcggaagctgcccaccgccttgagacggcagatgacctcgaggccgtggccgaagaccttcgcgggcaggacctccatcgtggtctccttcaggtccgcggaaacaaagtgggtgcggatgccggcggcgttgatcttttcaaagaagtgcttggtcatgcgcaggttgacgttgcccacaccctcgatggtcaggcccacgctgttctcgcccggatcgaacacaccgtccttgccggtgcagtcgtccttaaacttgagaaggtagttgccattgtccagtacgtacacattcttggtctttccggtataaacgagtttcattgtctgttctcctttataaataatgaataaatgatcgatttgttgtttgatcggtgatgctttttgttttgctcagtttttgtagcgctcgcgaagctcttcgtccgccttcaagacagcggcggtgccctcgtcacgtgcggcctggagcttgtgggcaaggccctcgtcgctcacagccatgatctggacggcaaggatggcggcgtttttcgccccgtcgatagcgacggtggcaacggggatgccgctcggcatctggacggtcgagagcagcgcgtccatgccgtcgagcttcgcgccgctgcacggcacgccgatgacgggaagcgtcgtattcgcggccatcgcgccggccaagtgcgcggccatgcccgcgagcgcgatgatacaagaaaatccgctctcccgtgccgacgccgcaaattctcttgcctcgttcgggcaccggtgggcggataacacgcggacctcggtctcgatcccatattccttgagcgtctggatcgccttctcggcgacgggcaggtcgctcgtgctgcccataataacggctacctttcgcatagttctgcctccttaaaagcaaaaatgggcgctccactgcctcgatgtgcagttgaagtgcccagacggtcggctgctgaatttcagcaagaaacgctctctgctcccctgtggtgacccacgtttccgtcagttacaaagagctcaacttgacaagcaatatggtatcacagagggctcttttcgtccatgcggcaaaagagagaaaggcttcgccctatttatcagttttttgataataatctacatatctataagttatgctaatacttatcagtaaaaatctgccgtttcggcagcgcaaataaaaatcggaaggccgcgcactccccgtacgcggccttccatcgcatcgtgttttcaaaaaggcaggcatccgccgatggcaagactcagcaggatgaccgcaagcgcaacgagcacaggtgctttccgcctgagcttcctcatcgcgcgcttttcgtccacagaggaatcctcacttcgcaagctccttgcccagcgcgcggcaggcgtccagcgcggcgtcatcaggcgcttcgcagcaggtcacgctctcgcacacaaggcggatgccggaatcatcgcagtccttttcccagccgcgcatccactcgccgtcgccccagccgtaggagccgaacagcgcggcgctcttgccgccaaggctgcgcttgacctcgtcaaacatgggctggaactccatttcctcgagcacctcgctgcccatggcggggcagccgaaggcgatcgcgtcgtaagcgctcagctcgctggccttgacctggtcaggggtcaacatcgtgacctgcgcgcccgcgctctccatgccctcagcgacggccttggccatggcctcggtgttgcccgtgccactccaataaacaacagcagtctttttcatattagtatgttcctttcataaatcagtatctatcacactgccacggcaagctgctcgatgcccgagccggcctcccagagtgcgcagtagatctccgtgcattttttgaagcgggcgaacagctcgcgcgccttcttctcgtcgccgtagaccttccacagccccgcgcatttgaagttgcaggcgcggtggtcgatgaagcccttgacgtcctccggcggatacgagaggaaaagcccgacctcatgggggaattcgccgccctcgcggaatcggcgaacgaggtttgcgatgcagcgtccgcagtggccgctattgtagcccgcgtggtgcaggatctcggccgcctgttcgttctccaaatctctccgcagctcagaggggcggtacaggtacaaaaggacctgtcctttcagaaaacggatcggcagcagacacaggccctttggcacaagcagacggttcaggcggcggatgtccgcaaagagcgcttccttatcttcgcaaggacaagggaagaggctgcccgttttgatacctgccaacgtcggcgcaccctgccgcaccaggatctcttcagacatgcccgtttccctcccctttggtttcggtggtggctccccagaagttagatttctttaactcttagggagcggcgtcctcgctcttgacgtgtcttaggatacccgaaaagaagagccccatccgctccaaattgatcggatgaggctccaaaatattttattctgccttttccgccgtcggcgcgcagctgtcgctgtccgcgcccgcgcggtacgcgctcggcgacacaccgatcacactgcggaaggccttggcaaacttgctggcgttgtcatagccgaactgccccgcgatatcgagcaccgtgcggtcgctcgtgcgcaggagctgcgcggcactgtgcatcttctgcgcgcgcaaaaatgctgcgggcgtcatgccgtacacgccgcgaaagctcgcggcgagctgcgaggacgacgcgccaagctcctgtgcaagcgcggagatcgtgacgtcgtcctccgtgcttgcaagcagcgtgtcgcgcgccgtgcgcgcaaggcgcacctgcgcggcggtatagccgtgcttttcatgcgccacatcgagcgcactcaaaaagagcagcagttcgagcaccttaaccttaaagtagccgcggcggatgccggcgggcacggcgtagagctcagagaagatgtgctccacgcgcgccgacgaacgcgagacaaagcactccgagtcggcgaagaacttctccgccagcacgctggggcggacgtcgacatcctgcaaaatgcaggacaaacagtcaggtgcgagggcggggtcgagcgtgacggtgatgccgtggtagtgccccgtggggaactccacctccccctcgatggcggcgcggcgcacgacggagaggtcgccgggggctaaaaagtaatgctcgccgccgcagcagtattccgcacgcccctcgcggcagtgctggatctcgatgagtcccgccgcgcccggctctgccagacggtacgacggcgcgtgcacatcgtgataggcaagctcgatgccggggaaaacgggatagaccgtgatgcgcacctcgccgtccgtctctctgaggcggtagacggtgcgttcctcgttttgctgcaaaatttctgcgtgggcgctgcatttctttacctgagactttggttcgatcaaggaagcttccctgtcctttcttctatacataaaaatagaaaacgccgcaaagcgcagatcccgcgctttgcggcttgtggctgctgatcaaacgcattcctccgcgggataggcgttttcctccgtcggcttcccctccagcagctcggggtgcttgagatagcggcgcacgctcgcccagaacagcgcgtactcgtgtcccgtgcagatgcgctcatccatcacgacggagagcgggatcatttttttattatactccccgctcctgtaattggcaataggcttgcccatgctgacgaacacacccgtcgtgccgaactcgtagcagtggtggaagatggaattcgtgttgatggaggcaaggttcgtgataaaaagactcgtgtggaacgggctcagatcaatgatcttacgcggcagcaggccgcaacggtccatcagcttgacaaggccgaacaaaaaccccggcaggatggggatggcgaacaggaaattcgcgaatttatccgtattgttgttgtgcgcggccacctgattctgcgcgaccgcctcctcgatcttgcggttgatggagaagatatcgtccccgtcctcgaagaacaccttgatcgacgtctcgtccgcgcggccgtcggcgcgcgttttcaggatgacgaagctgacgcagaagtggttgcgctgatagatcttgctgttcatgataaagcggttgatcttcggattttcctgatacgccttgaagtatgccgccagaatgagcgtcatatacgggatgcggacgccttcgcggcgcttttcctgaatgtagcggcgcaggacctccatatcagcgtattcggtgatgaaattctgcgcgtcgtagcgccgcggcatgacatagggcagtgccgaaacgatggtggacgcctctttcactcgggttccgtcgggacgcatggcaagttcctcttttctttgagttaaccccatcttacccgctttgcccgcgtattgcaatcattttcttagcgaatcctttattaagaattggttaagtctcgtcctctccccagtcgagcgagacgtcgacaacgcgcagaagtccggaaagcgtcgagggcacataggctctggagaacagatcgtcctgcgtgcagagcgtgcgctcggtcgtaccgtccacactctgcatcgccgtgacgagaagcgtcgcatgctcgggtgcggccagcgtctcgggaagagcgtcagcggcgtattccgcgcgcgacagaacgttcttatcgctgtccatccagacaaattcgaccgattctgccgccgtgcgctcctcaaatgtgacgctcaccttgatggagcgtcgctctgttctgccgtttactttccattcgacgctttcttccctgctcacgccgacgtgggccccgatgccggtgtgatcccattcggcgtaatattttccgtcacttgtgcggtaaacggaacactgtttgaccggcttccattcaccgcttgcatagaagatctcgccgcccgtctcgtagctgctgccgttgtcgtcgaccttgacgttcattccactgcccacggcctcatcgcccacggccgcgccgataacatggttaaaatcatcgttttcgacatagcccggctcgccgggcaggatatccgtgatggtcacgaacatcggtacaccgggtacgccgaagtcgtaatcatcgacgttctccgtcgcgtagcgcctgccgtcgaagggttcgagggcgaagaagtatccgacccactcgtcgtccatggtctcctgcgccgcggcttcgatacgctcaggcttatagagcgcgaagctcacgccgaacaccaccgcgagtgccagcgcaaaagcgatcagtcgtttcatgctgttccctccccccagttgaccttgatgctgattgagcagagcttcccgtcctgatagcggaaagtgtccagatttgagtaagaatacggcgcactgtcattgctgcggctgcaaatgtcgtattccgccgtctctccgttccagtccgtgccatagctcgtgccgatgagatacgccgcgccgtccgcggcagtgatagactcgggcagcgcgtctggcgcgaactcctcgagcttcaaaaggttgtcgttttcgtccatgtgcgcgacggtgaacttcgtcggtgtcgggcgggagacggcggtgatggcaactttgaccttcacgcgctcggacttgccgccgatcgtctcggtcttatcgctcgtgagcgtgtgggtcatgctgccgccgtccgagccggacatgcccatgctgttgccgcgcgtcaaataaatgcgtccatccgacgtctggtagatgggataaagattgaaaatcacttgtctgtcgccgcaggcgtagacctcgcccgagaggtcgatgtccgtcgtacggacgccgttgtcatcgtcgataccggccttccccagcggcgcaccgagttcgccgaagatcgtgatattcggcgacttggcgtcctcttcgccgtagcgcgcgtccggctccatcgtgcagtagatgccgctgccgcggtctttgagcgcccaccagtcttcgtccgtatccatatagagccgcccggccttccagacgaatttgcccgcggccgagaccgcaagatcaccgccgatgtcgatgtcctcttccgagacgaaagcgccgatcagcgtcccctcttcctcctcgtccgcggcggactgcaccgcgccgccgtcgagaaaggcaatgagaaagaccgccgcgaggatcgcagcaaaaatcagtatcgttttcgttttactcttcatgctctgcctccaattctccgtcgcattgcagaatgtcgcccacattgcactcgagcgcgcagcagatgcggttgagcgttgcaaatcgcacgcccttggccttgccgctgcgcagaatggaaagatttgcctccgtgatgccgacgatggcacaaagttccttgcttgtcatgccgcgcgctttcagcacttcgtccaaatgtaccgtgatcgccatagcagcaccctcaaataaagaggtcgttgtccgccgcaagggcgacgttcgagacgatgagccgcgcaccgaggagcgcggcgagcacaaagcacagctcgaagatcggcagacggatcgaaatgctggtgctcaggagcatcggcgcacagaacgcctgcaaaacgttgaccgcgagggcgaacagcacgctgagcttgagcaccttgacacaccattcggcgagctttggcgcgtaggcggcgctctcctgcgtaaacgcgccgtcttccatcgtgtcgagaaggccgatggcgaagtacgccgtcgccgcggcgagcagcgtaggaaggacttccgcggcaaagcgcagggcgaggacaacatagctgaacacaaggctcttcgatcccgttatgtccgttgccacaggcaggatcgtatcgtctgtaaaggcggtgttgcccgccttgagcgcgtcgatggcggaaaacagtcccgcgaattcggcaaagcagacctcgaagacgaagtacgccgccgcgaggataagcagcgcgcggaatagcttcaagagctcctgcgtatcgccgccggaaaaccggcgcagcagtcgcagcacgacccagcccgcgagcagcgcgaaaatgagccactgccaggcaaggcgcgggaacagtgcctccgccgatgtgctccaataggtggtccagccgtgcggaaagagcgcgccggccgcggcaaacgcgatgagcacgagcagcgcgtcctcgggcttcagctcccgccgcgccgcgatgtgcacgagcgcatagagcggcagcaggatcaccgcggcatacagcgtgaacgccagtgcgaagccgaagcggcccgaggcggccagcgcactcagtccctgccccactgcgctgccggggaatccggcgacggaaaaggcgtcgccctcgaaaagccacagggcgagcgcaagcagcgcgcagatgagcgcctccgccaaaagtaaggtcttgatccggtcacgtttcatatcgcacctccagaattattgttttgcgataatttctatcgtcagcgtagcagaagaattatcgtttgtcaataatttctgcattttctttttgtttttcaaagcgcggcacagttgtttttaaataaatgataagtttgcttttttctattgattatccccgcacaatagactatactgtagctgtcatatcatgcaatttctgttgctattgctcaaaaaagacaatcaggaggacaccaacaatgaagtacaatcgcacctacaacttctctgccggtcccgctatgatgccggagcccgtgctggaggaaatccgtgacgagatgatgaactaccgcggcagcggcatgtgcgtcatggaaatgagccaccgctccaaggttttccagcagatcgtcgacgaggccgaggctgacctgcgcgacctgatgggcatccccgacaactacaaggtcctgttcattcagggcggcgctacgctgcagttcgcggctgtgccttggaatctgatgaagaacggcaaggccgtctacgtcgagaccggcgcatggtccaagaaggccattgccgaggccaagaagtacggcgaggtcatcgtcgccgcttcctccaaggacaagaactacagctacattcccgactgctccgatctcgacattcccgacgatgccgactatgtctacatctgcgagaacgagaccatccacggtgtgacctggcagcagctccccaacaccaagggccatgttcttgtctccgaccagagctccatgttcctctcccagccctgcaatgtcagcgattacggcatgatctatgcgggcgtgcagaagaacgtcggccctgccggtatggtcatcgccatcatccgcgaggacctcatccgcgaggatctcgatcccaagatgcccatctacatgcgctatgacacccacgccaagaacgactccatgtacaacaccccgaactgctgggcgatttactgctgcggcaaggtgttcaagtacctcaagagcatcggcggtctcgaggtcatgcatcagcgcaacatcgagaaggccaaggtcatctatgacttcctggattcctccaagatgttccacggcaccgttgagcccgagttccgttccctcatgaacatccccttcgtcaccgattccgccgagctcgacgccgaagtcgtcgctgctaccaaggctgccggttacgataacctcaagggccacaagagcgtcggcggtctgcgcgccagcgtttacaacgccatgcccatcgagggcgctcaggctctcgtcgaattcctgaagaagtttgaggccgagcacaccaagtaattgctttttaaaagggggatcacatcccccttttagatactccctcaccggtgaagcgttcaccggtgccgccgccaaaggcggctgggccaatgtatttttgtgacgcacatgtcgtcacaaaaatgatttaatattatttaaggagaatttcgttatgcgtattcttgttaccgacggtatggataagggcgcgatcgagaaggttcgcgcgatgggtcacgagctcgttgagcagttctacgagcccgacgagcttggtaaggccctgcgcgactttgatgtcgccatcattcgctccaagaccaagctgcgcgccaagcagatcgacgaggccaagggcagccgcttcaagtgcgtcatccgcgccggtgtcggcctcgacaacatcgacgtgcagtacgccaaggacaacggcatcgaggtgaagaacaccccgaagtccccctccgagtccgttgctgagctcgctatggctcacatgttctcctgcgcccgttacatctccatcgccggccactccatgcgcgagggcaagtgggagaagaaggcctacggcaagggcatcgagctgaccggcaagacgctcggtatcgtcggcttcggccgcatcggccagaagctcggcaagatggccaaggccatcggcatgaacgtcatcgcgttcgatatcttccacatccccggcatcgaggaagagctcggcatcccctatgttgagatggacgagctgctcgccaagtccgacttcatctccgtccacgctcccgctgtcgacggcggcgctctcatcaacgctgagcgcatcgccaagatgaaggacggcgtcgtcatcatcaacacctcccgcggcaccaacgtcgacgaggctgcgcttcttgacgcgctcaacagcggcaaggtccgcgccgccggtctggacgtctatgccgacgagcccgcgaccaacgttgcgctctactcccacccgatggtctcctgcacgccgcacatcggctccgcgaccgtcgaggctcagggccgcatcggcgaagagctggtcgagatcatctccaagatgtaatttatcgctcacgcgaatgacaaaaagaaagagccgtcgaaagacggctctttcttcttgtcctcgtgctcggcacggcatatctccacgttctttttcataggatacaccaacaaaactgtgctgaggtgtacgatatggagcgcaaccagaactatgtggagctgtggggcgtcgccgcaggcgagcccgtcttttcgcacgagaaccatacccgccggttcgacaaatttcccctgcgggtcgagcgcctgtcaggccagaacgacgtgcccgtcatcgtggcgagcgaggcactgctgcgcgtctgccctgtggaggagggacagagccttcgcatcgtcgggcagctgcgctcgtttaacaacaagagcgggcagggcaaccggctcgtcatcaccgtgttcgcccagagcatcgagccgggcgacggctcgtactttaaccgcatcctgctttcgggcgcgctgtgcaaaaagcccgtgctgcggcgcacgccgctcggccgcagcatatgcgatgtcattctggcagtcaaccgccactacgggcgcgcggactacttaccctgcatcgcctggggacagaccgccgtgcagatcgcgggcatggacgtcggcgagcgattggcacttgagggccgcgtgcagagccggacctacaccaagctgctcgaaagcggcagtgaggaacgcacggcgtttgaagtgtcgatcatgcagcttttggacgaagaagaaacagaggagaccgccttattataggcggtctcctccgttttttgcttatagcccgctctcctattcaaataatttatcagtgcatccctttacaattttaaggcgcagtgttagagtttttcgtgctatatattctattagatttttgaaatttaaaaacgaaacacggagagagaaatggcaagaatttttttactcaagggtgacatcgccaaccccggctatgtagacattcccgacgaggcgaccaccatccgagaggcgatctacgggatcggcggcggcattccgaatgggaaaaagtttaaggcggtgcagatcggcggcccgagcggcggccttctcgtcgaggagcatctcgatctgcccctgcactttcaaaagctcaagccctacggcgtgcgccgcggcgacagcgtcatcacggtgctcgacgaggaccgctgcatggtcgatgtcgcgtgtcgctttatgcagtacacgcagacagagttctgcggcaagtgcgttccctgccgcgagggcacaaagcgcatgaacgagctgctctgggccatgcgggactaccgcctcagcgagtcggactttcatatgctcaccgaccttggcgagatgatctcgatcacggcgttctgcaatctgggccgcaattcctaccacacgctggagacggccatcaaatactttcccgaggaattcaaggatcacctgcgcggggactgcgcgctctgcgagcttgatcgcgagccgatcgagccgggtggacttccctataaccgcatccgcctcgagatcgacccgagcatctgccgcggatgcagcaagtgctcgcgttcctgccacgccgaggccatcacgggcgtcatcaagtcgccgttcgtgatcgacccggaaaagtgcgtcaaatgctatacctgcatcgaggcctgcccctttgatgcgatccaggaggtggagatcgatggctaagggtatcatgtatgtcgacaacatccgcgtggagttcgacgacgagcccacgatcatggatgtctgccgcaaggcgggcgtggaaatgccgaacttctgcttccactccgacctttccgtttacggcgcgtgccgcatgtgtatggtcgaggatctggacaccggcaagatcgacgccgcctgcacgaccaagccgaaaaacggcatgcgcatccgcaccaacacatcgcgccttctcaaataccgccgcatgatactggagctgatgcttgcctcgcactgccgcgactgcaccgcctgcgaaaaaaaccgctcctgccgcctgcaggagatggccgtgcgcttcggcatccatcacgttcacttcaaggatacgcgcgagcatgtaccgatggacttttcaagccctgcggtcacattcgacctcaacaaatgcattctctgcggcgactgcgtgcgcgtgtgcaaagaggttcagggcatgagcatcctgcactttgcaggccgcggcccagggctgcacattgaggcaggcgacgaccagcccatctcgaccacgcactgcgtcagctgcggccagtgcgccgccgtatgcacgaccggcgccatcaccgtcaaaaacgacatcggcgcggcgtggcgtgccctgcacgacccgcaaaagcgtgtcgtcatccagatcgcgcccgccgtgcgcgtcgccatcggtgaggcctatggtctgcccgcgggcgaaaatgtgctcgacaagctcgtcacggcgctcaagatcatgggtgcggacgaaatttacgatacgatcttcggcgcggacctcacggtgcgcgaggaatcgaaggaattcctccgccgcctggaaacaggcgaaaatctcccgctgatgacatcctgctgcccgtcctgggtgcgctatgtggagcaggagcgcccgcagttcatcaagaacctgtcctccgcgctctcgcctatgcaaatgttcgcaacggtcttaaaggacaagtaccgcgaaaaggacgccgccgacggccgcacgaccttccatatcgccatcatgccctgcacagccaagaaaatggaggccggacgcgaggaattccgccgcgacggcgtaccgaacgtcgacctcgtgctgaccacgcaggaggtcatcaagatgatcaaggaatccggcatccgcttccagatgctcgaaaaggagtcgcccgacctgccgttcggcatgggcagcggcgcggccgagatcttcggcacctccggcggcgtggcggaggcggtgctccgctgctgcctgcccgacaagagcaaaaacgtcctgcgcatgctcgagcacagcggtcttcgcggcacggaggccatccgctttgtgaccatccccgttaacgggcgcgacgtgcgcgtcgccctggcccacggccttgccaacgcggcaaagctgctcgatcaaatcgaaaacggcgaggtcgaggtcgacctggtcgaggtcatgtcctgccgcaccggctgcgtcggcggcgcgggccagccctacgcgctgatgagcaccaagctcaagcgcgcccacggcctgtacgagatcgaccgcagcgcgatgttcaagcgcagcgagcgcaaccccgtcctcgacgcgatgtatgccgcgggtctcaatgagcgcgcgcacgagctgctgcaccacgagtacaaggactgatccccttcataaaaagccggccgtgtgtccacggccgactttttcgcccgactcattattttttataatgcgtctattgacaaattaagatatttccactaatatatttttgaaaatgtattacaaatttgaatcggaggacagccatggaagtccgcaacctggtcacattcttaaaagtcacggagctcaagagcttctcccgtgcggcggaagctctggattattcccagtccgccgtcacggtgcagatccagcagctcgagcgcgagctgggcgtgcagctctttgaccgcatcggcaaaacggtctccatcacgcagtacggcaaggactttgtctcctacgcgcgcgacgtggtgagcgccatcgcgcgtgccagcgcctttgcctcgtcggattccgagctgagcggcaccgtgcgcgtcggcacgctcaattcgctgctcaccgcctcgttctctaacatcgtgccgctctaccacgagcgttttccgcacgtgcagatcagcctgcacgcgggcaatatcgcctccatcaccgaaatgctcgtcaagaatgagctcgacatcatctacacgctcgatgagcagatcttcgacacgcagtttgtcaaagtctttgaagcgcaggaggacgtcgtcatcgtgacgaacacggaaaacccgctctctgcccgcgatgatgtgcaccttgccgaccttgtgtcgcacccgttcatcctgatgaaccacggcaacccctaccgcgaccagttcgaccgcgagcttgcccgtcaggatctaagtgtcgagccgtttttggagctcgagagcgacacgctcgcgctcaagctcatccgcgagaatccagagtatctctccgtgctgccgcgctacacggcgaagatgagcattcacaagggcaaccttgccatcatccctgtggccgactgtcagatgagccagtggcggcaggtgctttatcaccgcaacaaggtcatcaccccgcagatccaaggcatgctcgacgtgatcttagaggtcgcgaaaaagccgttttaagcagaatctcacaaaaaagcacaggcgcgctttcgcgcgcctgtgctttttcactttactgtgtcattacggcgcaaaatttgcaaaaaaagagtgcaaaatgcaaattggcgcggtataataatgggcaaattccagcgtccgcgcgcatcgcgcgcccgctttgatcggagggatcacgatatgagaattgtcgtcaaggtcggcacatccacgctggcacaccccacggggcggctgaacatccagcgtatggaaaagctgtgcaaggttttaagcgaccttaaaaatatgggacacgagatcatcctcgtctcctctggcgccatcgccatgggctttggcaagctcaacctgagcgaacggccgaaagacgtgccgacgaagcaggcctccgccgctgtcggccagtgcgagttgatgtacatttacgacaagctcttcaccgagtataaccacaccgtggcacagctgctcatcaccgcaccggatatcgaagagggcggcgtgcgcaagcagaacttccacaacacgctcgcgcggcttttagaactcggcgcgctgccggtcatcaacgagaacgacaccatctccaccgaggagttcggcatcggcgacaacgatacgctctctgccatcgtggccgtgacgatccaggcggacctcctcattctgctttcggacatcgacgggctcttcgacggagacccgcgcaagaaccccgacgcgaagctcatcgacacggtggaaaagatcgacgagcacatcatttcgctcggcgggggcagcggttcgagcctcggcaccggcggcatggcgaccaagctccgcgccgcgcagatggcgacggcagcaggctgcgaaatggtcatcgccaacggccagtcgcccgaggtactctacgatgtggccgcgggcaagcgcgtgggcacaagatttttggcaaagagggatgaagcatgacaacgatcgaacttctggaacgcacaaaagctgcctggggcagcatccgcagcgcaagcgccgaggagaaggaccggctgctgctcgcgatggcggagagccttgaggccaacagcgaagatatcctgcgcgaaaatgtcaaggacatggaggcggcgaagggcacgatctccgacgtgatgctcgaccgtctcgccctgacggagagccgcatccacgcgatggccgagggcatccgcgaggccgcggcgctgcccgaccacgtgggccgcgcgctcgcgcagttcaagcgccccaatggtatgaccatcaccaagcggcaggtgccgctcggtctggtcgccatcatctacgagagccgcccgaacgtcacatcggacgccgcggcgctgtgcatcaagagcggcaacgtctgcatgctgcgcagcggcaaggaggcctatcgctcctctcacgccatcgtcacggcgctcaaggcgggcgttgagtccgtcggcggcgattccgacattgtcaacatcgttgaggatacaacgcatgcgagcgcgcaggtattgatgacggcggacggccttgtcgacctgctgatcccccgcggcggcaaggggctcatccgcgcgtgcgtggaaaatgcaagcgttccctgcatcgagaccggcacgggcatctgccatgtgtacgtcgacagggacgctgacctcaacatggcggtaaagatcatcgaaaacgccaagacgagccgcccgtccgtctgcaacgcggaggaggtctgccttgtccaccgcgacattgcaaaggaatttctccccaagctcaaggccgcgcttatcgacaagcgtagggaagcgggccttgtccccgtcgagctgcggctcgacgaagccgcggcggagatcattcccggcacggcggcaacggagctcgacttcgacacggaatttctcgattacattctcgccgtcgcggtcgtagacgatctggatgcggccatcgcgcatgtccagcatcactcgacgcaccacagcgattgcatcgtgaccgagaaccaagccgcggccgaccgctttgtcgacgaggtcgacagcgcggcggtgtacgtcaacgtctccacccgcttcaccgacggcggggagttcggcctcggctgcgagatgggcatttcgacgcagaagctccacgcgcgcggcccgatggggctcgacgagctgagcacctataaatacgtcatcaccggcagcggccagattcgataacaggaaaggcgcacactccgatgtaccacaacgacaaaaagtacgcattgacaaactgcgtgcttctcgacggctctgagcacatggagccgcagacgggcaaggccgtctgcatcgacggcgagaaaatcaatgagatcgtcgacgcacagcatatccccgcaggctatgaggcagtcgacctcggtggaaaatatgtgctgccgggtctcatcaacatgcacgtgcacctgcccgcctcgggcaagccgaaaaagaaggcgagcgaccccaaaaagctcgtcaagctcatcaccttctgcgcgctgacgaacaggatcggcgtcaacatgtgcgagggctacgccaaaaccgagctgctctccggcgtcacgaccatccgcacagttggcggcgtcgccgattacgacacgaaaattcgcgacctcgccgcggcgggcaaaattcttgccccgcgcgtgctggcgtcgaacatggcggtctccgtccccggcgggcacatggcgggttcgctcgcctacgaggcgcactccgccgaagaggccgcggcgctcgtcgaaaagatcgccgccgaaaagcccgacctcatcaagctgatgatcaccggcggcgtgctggacgccgaagtcgtgggcgagccgggcgtgctgcgcatgcagcccgagcttgtcaaggccgcgtgcgacaaggcacattcgctcggcatgatcgtcgcggcgcacgttgagagccctgagggcgtgatggtcgcgctgcaaaacggcgtcgactccatcgagcacggcgcgcagccaagcgatgaaatgatcacgctcttcaagcagcgcaaggcgttccaaatttcgaccatttcccccgccctgccctacgcgctcttcgaccgcagcatttcgcacgcgacgtatgagcagcaggaaaacggcaagatcgtcttcgacggcatcgtcgcgctcgcaaaggcaaccctcgccgcgggcgtgccagtcggtctcggcacggacgtcggctgcccgtacatcacacattacgacatgtggcgcgagctgcactatttcgtcaaatactgcggcgtgacgcccgcgttcgcgctctacagcgcgacgaaactcaatgcccggctcgcgggcatcggtgatctgaccggcagcattgaggcggacaagcaggccgacctgatcgtctgctccggcaaccctcttcagaatttgagcgcgctgcgtgagctcgacatggtcgtcaagggcggctaccgcatcgacaagccgcagatcaagaagatggatgaggtcgagcgcgagctcgacaagttcctgtaagcgctatgaaatacttggtactatccgactcgcacggcaatgtcgacaacatggtgtgcgcggtagagctcgtaaagccgcagggcatcatccatcttggcgacggctggcgcgatgtcgaggagctgcgtgaacttttccccagcctgccgctcgagcaggtccccggcaactgcgacttcgggcgctttgaagcgcttgagcgcgtgctgattctggacgatcaccgcgtgctcatcgcgcacgggcacacgttaggggtgaagaccgggcttctccgcgcgcagtaccgcgcgctcgagatgaacgccgacattctgctcttcggccacacgcacgtgccgctcgtggacgcggcgtcgcggccgatgatgatgaatcccggttcgattggcgatccccgccgcccgacctacggcgtactcgaattcagggacggacaaatttacccgtcggtctttcggctggacgcataacaaaaaagagatgtaccttgcggtacatctctttcccttttctcacccgttccaagcgcgcacctgctcgcgcagccaattacaccaagcgtccacgccctcgccggttttggcggagagggagaatatcttgagcttcgggttgcgcatgtgcgcgtattcgacgactttttccatgtcgaagtcgaaatacggcagcacgtcgatcttgttgatgatgagcgcgtcgcacacagtgaagatgagcgggtacttgagcggcttgtcgtgcccctccggcacggagaggatcatcgcgtttttgaccgcgcccgtgtcgaactccgcggggcagacgaggttgccgacgttttcgagcacgacgaggtccaagtccttcgtgccgatctccttgaggccctgccccgtcatgcttgcatcgaggtggcacatgccgcccgtgtggagctggatggacttgacgcccgcgtccgcgatagtcttcgcgtccacgtcggagtcgatgtctgcctccatcacgccgatgcgcagctcatccttgagcgcttcaagcgtgcgcagcagcgtcgtcgtcttgccgctgcccggcgaggacatcaggttcagcagaaacgttctgtcctgcttgagctgcgtgcgaaggcgtgcggcctcgcggtcgttgtcggcgaagacgctctctttcacctcgatgatcttatagggttctgtcatatcgcctcgatctcctttaagttgatctcgcggccctgcttgagccacgttttttcgccgccgcagtgcgggcaggtgcggccaaactgcacggtgggatagtcgcgcccgcagccctcgcagtacgtaacggcggggatggtctcgatcttgagcgcggcctccggtaaaagctcggtcttcttgactgcccagttccagcagctttcgagttcgtgcgggatcgcaccggacacctcgccgagctcgagcgtcacggacgcgacgttcgtcaggccgttttcctctccgatcttttccacgctcttgatgacgtggaagacaatgcccagctcgtgcattacttgctctttctcgccgcacgcttgatcttgaactcacgcttgatcatgtacggcaggatggccttcatcttgtcctcacaggcgtacatcttgctgcactccggtctctcgcggtgcaggtggatggcgtcgaacgcgcacttcgtcgtgcagacgccgcagccgatgcacttgttcgggtcgacgatgctcgcgccgcagctaaggcagcgcgcggtctcctttttgatctgctcttcggtgaacgcgacgcgctcgtcgctaaacgtcctgcgcagcgcctcgttatagccgatgcgctggcgcggtgttgtgtcgtaattgacggggatcagcgcgctttccttgtcgagctcaatgaactggcggcggttgcggccgaccgtcaacgtcgcgtgctggacaaaacggtgcagcgagatcgcgccctccttgcccgcggcgatggcgtcgatggcaaatttctgacccgtataagcgtcgccgccgacgaagatatccttttccgccgtctgatacgtgacggggtctgccttgaccgtgccgttggggttgaactcaacagcggtgccggtgagcagctcacgccagtcgaccttctggccgatgcagtagagaaccgtcgcgcactcggcctgttcgctcacactgtcgtcaaactcaggtgcgaagcggccctcgtcgttcttaacgcgcgtgcacttgcggaacctgatgcccgcgcacttgccgtcctccaccacgatctcggtctggccccagccggcgtggacggtgatgccgtcgcgctcacactcgctgcggtcttcctcgcccatcggcatatcgtcgtaagcctctaagcagtagaggtcaacgctctctgcgccgcagcgcaccgccgtgcgcgcagcgtccgcgccgatgttgccgccgccgatgacgacgaccttaccggaaagcgtcttcttttcatgcaggttgacctgccgcataaagtcgatacccgccatgacgccgtccgcgtcgccgccggggatgttcagcttaccgccggactggaggccgacggccacatagaagccctgatagccctgctcgcgcagctgcgcgatggtcacgtcttttccgacctccacgccgcagcggaactcgacaccgagttcacgcaagatgtcgatctcggcatccaccacgtctttttcgaggcggaagctcggaatgccgttcatcagcatgccgccgggacgcgcttccctttcaaacaccgtcgggcggtagcccttttcagcgaggtagtatgcgcacgacaggcccgcggggccgccgccgatgacggcgatcttctcgggaaattcgccgtcgaccctcggaatgaccttttcgggcacaaagcgcgtttccgcgttcaggtcctgctgggcgatgaagcgcttgacctcgtcgatggcgacggcctgatcgaccgtaccgcgcgtgcaggcatcctcgcagcggcggttgcagatgcggccgcagaccgcggggaacggattttcgcgcttgatgagctgcaaggcttcgcggtacttgccctgcgcggcaagcttcagatagccctgcaccgcgatgtgcgctgggcaggccgtcttgcacggcgaggtgccggtatcatagcagttgatgcggttcctgtcgcggtagtcgatgctccacttttccggcccccacttgacatcgtcgggtaattcctgacggggatattcgatgtagccatccttcgtgcagagcttctgtcccagcttgaccgcgcccgcggggcagttttcgacgcagcggccgcaggcgacacagctctcgctctcgacgctcgcgacataggcgctgcgcgacaggttcggcgtattgaacagctgcgatgtgcgcagcgcgttgcagacattgacgttgcagttgcagatgccgaaaattttctgctcgccgtcgatattcgtgatctggtggacaaagccgttgtcctcggcccttttgaaaattttgagcgcttcgtccttcgtgatgtattcgccgcgctgtgtctcgacgatgtagtcggccatgtcgcccacaccgatgcaccagctttcggcgtcgtcgccgcagccctcgccgagcttggcgcggctagcgcggcaggagcacatgctcttggcgtacttgccctcgtacttgctgagccagtaggagatgtgctctaagtcaacggactcgttctctgtctcgatggccttttccacggggataacgtgcatgccgatgcctgcgcctcccggcggcaccatgggcgtgatcttttcgagcgggagcatcgtcatgcgctcaaagaacgccgcgacctcgggatgctcgtcgatctggcttttgcgcatgttcagaaattccgcgctgccggggacgaacagcggcagcacccagcgcttttcatgcttggggttcttgccgtccaggttctcccagttgtactcgatgatgcctgtccacgccatctccgtcaggagcttttcgagcggctcgcgctccattttggtgagcttcatcaactgctcggtcgtcttgggcttgcgcacgcccattttgagcgcgacgtcgaccatctcgtcggtcatcacgccggcaaggccccagtactcggggtcgtccgccgtggccttgaggccgatgcggttcgtgatcatgctgccgagcttgaggacgttttcgcgcggggcgtccgtgcggggaattttgaaatccagtttactctcgtcgagagggaaattcgtgggcttgctgccgttgatatcgctcatgttcctgctctcccttttcgcggcgtaccgcgtgcttgccgccgcgcagcaaaaatatcgcgcggcgatcatcacctatcttatccaagctctattttacaggaaaatgttggattttccattgactgattccataaaccgcagtcatatcgctcaattccccgcatttttgcgcagatcggcagaattgtccaaatttacagatcaaggaaccgccgcgcaagcgcgggcacattggtgtttttgagacacacgacgttcagctcgtgcacgcccgtgagcggcgggcaggaaaaatgcccgaactgcgcatcattcttgacgacggcctcgtagaggaagctcacgccgcagccctcgctcaccagatgccggatgagcttgaagctgctgatgcagacattcgcgcgaaacgcctcgaccgtgtagccgcactgcatgagctctcgctctaaaatctttcgcgtaccggagccaggctcgcgcaggatgagccgctcggaaaagagctcatccatcggcacctcacagcccgaaaacgggtgatctttcgcgcagatgccgatgtagggctcgttgcgcagcagaaagctctcgtaccggctcttgtcgaaaatgccctcgagcacgacgaagtcaagctcacctccctcgagctgggcgagcaggtgtgccgtattgtcgacggtaaaaaagagctcgttgtccggttctttcaaaaagcggatgatctgcggcagcaggatatagtcgccgatggacttcgtcgcgccgatgcgaaggctcgtcttctcctgccgtttgagcgcacggcgcagctcctcgtcctgatagcgctggctgatggcgtagatctcaagcgtttcgccctgcggcgtttttctgagctttcggctgtcgtaggtaaaaaggcgcacgccgtacagcgcttcaagcgcctgaatttgtttcgtcacggcgggctgcgtcaaatgcagctgctccgccgccttgcggtagttcatcgtggcgcacacagtcaaaaaggtctcaagccgctggtccatgttctctctcctttgtcgataacaaacaggaatcgacatattcttatttataattttattatatcataagtcggtgatataatacacccgcaacacgcattggaggagaaaaaaagcacatgaaatttatcgaatccgtaaagaaaatgctgcccggctgcgccatcgcgctcgtcatcgccgtggtggccaagtttttagagcagctggaggaatccgtggggctgcacctgatcggcgcgtcggtcatcgcgatgttcatcggcatgatcgtgaaccgcttttacgcgccgaatgacaagacgaagcccggcatcaaattcacctcgaagaaaattctgaaattcgccatcatcctgctcggtgccagcctgaacatcacgaccgtgctgacggtcggtaagttctcgctcaccgtcatgctcttcacactggcgacgtgcttcggcctcggctatgtgatcggcaaggcgctggggcttgactggaagacgagcagcctcatcaacgcgggcacgggcatctgcggcggcagcgccatcgccgccatcgcgccggtcatcgaggcaacggacatggacatcgcctacggcatgtcggcaacgttcctctttgacacgatcatggtcgtcgtgttcccgctgctcggccgcgcgatgagcctttccgacgcggcgttcggcctgtgggccggcacggcggtcaacgacacctcgagcgtcgtcgccacgggctacgccttcagcgaggccgcaggcgactttgccacgatggtcaagctgacgcgcacactcgccatcatcccgacggtgctggtcttcgccgccatcagcgtgcacctcaagaaaaaggccgccgcgcaaagcggcgaccatggcgtcaaggtcaatatgaagtcggtgttcccgtggttcatcctcggtttccttgcaatgtccattctgtgcagcgtcggcgtcattcccgcaggcctcgctgcgacgctcaagagtatcagcaagttcctgatggtcgcggcgctcgccgccatcggcctcaatacgaacttcgcggcgctgtgcaagtctggtgcaaagccgatgcttcacggcttcatcatttcgctgctggtcgttcttgtggcgattgcggtcgaatatgtgctcggcatcgcgccgagcggcacgctcatttaatcgtccgccgaaaggatgaaatcgcagcggttccgcacatcgagcgcgtcgaaatagcgctgctcgaaagggatccagcggtcgaaaaactgctttgcatgcgcgggcgcattccgtttgaggatgcgctcgcgctgtttttctgccgaaatcggcagaaaaacggatagatcgtagtacggcgcaaggtcggggtgcatggagtacgcgccctcgacaatgttgagtgttcccgccttaatccgctgcggcggggcgatggtaaacgtcgcgcagtcgaagcggcggtagtcgacgggtcttccctcgcgcagagggatcagcacctcttccaaaaagcgctcgcggtcgacgttgccgccgggctgcgtgaagcgcgcctccgtgcgctgctcgggccggaggaaaaagtcgtccatgtggaagacagagcagccgtaaacattttgcagcagctcgccgagcgtcgtcttgccgctggcgctgccgccctcgatggcgacgagcacgcggcttctttccgccgtcaggcggtcgatgcgcgcaaacagcggcagcgcgcgggcgaagtcacgccgcaggacgcggtacgcgggcgcgtaattctgccgaaatatctcggagtggtgcagcggcggaaagccgtccttgcgccacctctcaacagcttccgccgtctcctgcgcagaaaacggcagctcgcccgcgtcggccattgtctgcaaggcggtgagcatcgcttcgagcttttcgcgcccgcactcctcgtgccgcgcagagagggcgaagagccgcgcaaacgtctccgcgttcaagccgtcctgcaaaatgccgaggtgcacacggcagtagtcgccgccgagcagctcgacgagctcggagatacggtcaccgcttcgcgccgcttcggcgcggatgtagtctgcggcggcggacgggtcggcgatcagatgctcgcagccaaaggcgctctgatagagcgccttgaagacgtcctgaagcgccagctctggatagcgcgcgcagtgggcgcgcagaaagtcgcgaatatcggtaaaattcgtcatagcggcggagttcctttaccaaaaagtttcgtttatcatagcgctttttcgcccctttcgcaaggggcaagggattgacagccctgcgcttttttgataaaattcccgcgtcggcacaagccggcagcgttggcacaagctgacttttcttccgcgcgttccctgaaagcaaacgaggtatcaccaaggtatcaatctccctgcaaggggaatattgatgccttttctttgtcttttcaagggttttcgcgcagaaaacaagacgcaagagaggatgagaacaccgtgacgatccttgtcatcgacggccagggcggaaagctcggcaaaactttggtcgagaacatcaaaaagtccttcccgcacctcgagatcatggcggtcggtacgaacagcgccgcttccgacgtgatgcgccacgcgggcgctgaccgcgtggccacgggcgaaaaccccgtcatcgtggcctgccgcagcgcgcagatcatcgtcggccccatcggcatcgcgatcgccgatgcgctgatgggcgagatctcccccgccatggcaaacgccgtcgcgtcaagcaatgcctaccgtgtgctcatcccgatgaatctatgcagcacgtatgtcgcgggcgtggacaaaaagtcctccgccattctggacgacgccatggcgcacatccgttcgctgctcgaaggaatggagaacaaaccatgaacaacgctgccactgcaactgcccgtaccgcttccccggtgagaaaactcacctattccgcgctcttcctcgccttggcgatggtcctgccgtttttgaccggccagatccccgagatcggctccatgctctgccccatgcacctgcccgcgctgctgtgcggcttcatgtgcggctggccgtggggactcgcggtcggctttatctccccgctgttgcgctcgatgatcttcggcatgccgcccgtttgggtcgccatcgccatggcgtttgaaatggcgacctacggcgccatcgccggtcttctgtaccgcaagctgccgaaaacaggctggcgcatctatgcctcgctcatctccgcgatggtcgcgggccgccttgtgtggggccttgtgaagttcctgctcgcgggccttcagggcacggagttcagcctcgccctcttcctctccggcgcggtgacgacggccatccccggcatcatcttgcagctcatcctcattcccatccttgtggtggtaatggagcgcacaaatatggcgctcgacgtgtgagcacttgataaaagcagaaaaggacttggacgaaagcgtccaagtccttttctttattcctccgctttactcagcagcttcggcgcgctcgtgtccatcaaaaacgccccgagcggcgcggtgatgacgatgccgagcaccgcgactgacagcacgatgctgccgcagggcagccccgccgcaagcggcaccgagccgatggccgcctgcaccgtcgccttgggaagataggcaaacacgcagtaaagcctctctttcgccgtgagcggcgttctgacaaggcaaaggcacacacccacggtgcggaaaatgagcgtcgagaagatcatgccgaccgccgcaaggcccacgcccgccatatagcggatatcgaccgccgctccgacgaggacgaacaaaatgacctccgccgccagccagagcttgccgaatttttcagagagccgcttggcaacgaacggcgtgcacttcatcttaagtaagcacgccatgctgacgaccgcgagcaggcccgacacgggcacgatgccctcgagccagccctccgccgcgacgagcagcagcgagacccccagcacgatgatgaccttcatgctgttgcggatgcagtgcgctcgggcataggcagtctcgaaaaagcggctgagcaaccacccgacaagcgcacccagcgcaacgccgagcacgatcgacgcagggatgctcaaaaagtccgcggcgttggcgctgccgccctgcgccgtgtgcagaaacgttgtaaacagcacaatgacgaagatatcgtcgcacgatgcgccggccaggatcatctgcgggatgctcttgtccgttccgcggccgctttccatcagctgcaccatgcgcggcacgacgaccgcgggcgacaccgccgcgagcaccgagcccatgaccgccgcctccgcgcgcgtgatgccaaggaagcacggcgcgagcagcacatagccgatgatctcgcacgttgcgggcaggcacgacatcaggatcgccggacggccgacctttttgaggtcgcccaaatcgagcgacagtcccgccttgagcaggataataacgagcgcgagcttgcgcaggtcggctgagatcgacaaaatcgagccgtccagcacgttgagcacgcacggccccagcaggatgcccgtcgccagcatgccgatgatgcgcggcagcttcagcttctgacacagcgcggccagcgcaaggccaaccaaaaagacgagtgcgagtgaagttaacataaatttcctcctccggacacaaaaaaagctgatgccccctgtgaccgttcaaaatcacagaagtcatcagctcaaaaaagcggtttcggcagtgccgtgggagaacctcattcccgattgcgcagtatagcaaagcgcgggcaaaaatgcaagccctttttcaaaaatcagcgctcgaacgtcacctgataggcccccaacacctgcatgcaggggatgacggcggcattttcgaccgtgaaagccgccttttcatagtgcgtcatctcctcttctgggatggcgggcagcgttttgccaaggctgacaccgtgcgcgccgcctgcaaagcgccaggcgaattcacagtcgcagaattccttgtttgctgtgatcttctccgcgggcacgagcgtaaacgtaccgtctttcaagtaatagcagcctacgttgtccttttccgcagggcagccgccctcgatgccgacgccggtgaacgagatcgtcagctccggcagcgtgaaggtcgtctttttgccgtccttcgtaaagggaacatcgtcccagcggccgatgttgaccctgccgcgattgtcggctctttccgcggcagtgttgaactcgagagcccccgttttgccgtcgcgcacctccgcgttgatgcgcagcaccggccgcagcgaggcaaagccctccggcagcagggcgcgcagacggtcctgctccgcgccgtaggccatgacaaactgttcaacggtcattgcgcttcctctgtttccttttgtgcgcgctccgcgtcttgcctcagcagccgcagataggcgtcgagatagagcttgtgcgtcacgcttaaaagtgccgagcgcagcagttccttttcatccgactcgtcctgtccgacgcttgcaagatggtcgctcgcgccgaagacatagcggatgagattttcaaattcctcgcagaagtagtgataagcggtcggcagatcgtaggtctcgtgctgaatgccgatcagcgcgcggatgtcgtccatcgcgacgacgctcttgatgcacgagacaaagatgaggtacgcaatgctctccgcgccgtaggcctttttctctggcccggggatgatcttctgcttaacataattgctgaccatcgaggccgtgatgggactgagcccgcatcccgtgatggattgattgacataacgcgtcacctgttcgagatacagccccacatcggggatctccccgagccgcgggatatgaaagcttcggacagactccgccagacggctgcgcatattttcgtccatagctgctcctccgttcaaactgcgttttcatcatcttaaactttggtgaaaaaaatgtcaataagttttccaaaaaccgattgacagttattgaaaatcgttgtattgtagtcaaagataatttcacctgacagcaggtttttgaataaccgattatttttttggaggcttccccatgatgaaactgatcgccgactcctctgccaacctcacgatgctggagggcgtaacctatcagagcgtgcccatgatcatccgcgccggcgagcgcgacttcgtggacgatgaaacgctcgacacgcacgagctgctcgactatctcgcggcccacaacggcaaatccggcacggcctgccccagcctcgacggctggctcaaggcgttcgagggcgcggatgagatcttcgtcattaccatcacaagcagcctgtccggcacctgtgcctcggccatggccgcgcgcgacgtgtatctccagtcgcatcccgaggtcaaaattcacatctttgacacgctgagcacgggaccggagatgcagttgctcgcagagaagctcgcagagctgcacgccaagggcctccccttcgatgtgatctgcgaaaaggcgcgggaatatcttgccaccacgcacctcttcttcagtcttaagtccctgcacaatctggcgcaaaacggccgcgtcagcaaaatcgccgcgggtgccatcggcattctcggcattcagatcctcgccaccgcaagtcttgagggcacgatccagcccgttgaaaaatgccgcggcgaaaaaaagacgtgcgcggcgatggtacagaagcttctggaagctggctaccacggcggcaaggtgcgcatccaccacgccgaaaatccagaggcggctggggcgctcgccgcttcgctgcgcgggcactttcccgaagcagacattgagatccgtccctgccgtggtctttgcagctactatgccgagcgcggcggcgtgatcgtcggttttgagacgatgtaaaaccgaacagacagcaaaaagcagacggcctgcgcgagccgtctgcttttctttatctctgccattaggcagttggagtggtatcggaggtactgtcgcccgctggggcgttgccgtcagcggggcttccctgcccactgggcggtgtggggcgctcgccgctgggcatttcgggcacttccccgtcgagaagctctgacttctcgccgtttgacatctgaccgtcaaagctctcgggcggttcaccgtctggcttctgtccgccgccggggaagccgccgcccatgcccatgccgctgctgccgcccgcggcgagcaccgtgccgcctgagacggtgatggtgccgtcggcatccagcggctcgttgtccgccgtgttggccgtccagacgatcactgttccgcccgtgatggtcaggtcgccgttggagtcgaagccgtcgcccgcggaggaataggcgtcgatcgtgccgccggagatcgtcatcgtgaagtcatagtccgtcaggtcggaatttgccgcattcaggcagtcgtccgaggcgttgatcgtaatatcaccggagcaaacgttcagctccgcgccctcaaggccctcgcagcaattcgtgatgtcgatcgtggagccgtccgtgccgtccgcaccgatgttcagcaccaaatcgcagtgaatggtgtcatccgcggcgtcgatggtcagcgtgccgctctcgacgttcaaaagctgctcggcgttgatggcgtcgttgacgggtgcatcgatattcagcgtcaaatcgcggatggtcagcgacgcttcgccgtcctcatccgtcgtcgcgccggatttgatgccgtttttgccgttggccgtgatggtcaactctccatcgccgcagagggtgacaagcgagccatccttacacttaatgacggcgttttcggcattttcgtttttggggtagttgtcgtcattgttctgctcggtatcgctcagggaattttccgtaccgttggaaacaaggatggtcacctcgctcgacttgccgcaggtgatggcggcagtgttctcactcgtaagtgtcaggccgtccagcaccagcgtcacgccggtcgtaccctttttcaccttgatggagccgtccgcgcagctgccggagacggtgtaggtaccactcggcgtgatcgtgagcgctgtgccgtcgatctcgtagcccgtgtccgtctcgcccgcagcggtcacgccgctgtctgtaaaggtaaaggtcacattgcttgccgtgtccgccgtactattatttatcgtaccggcgcaggccgtgagcgacagcgccagcgccgacgcgcacaggaaaggcagcggctttggcatcggcctttccatcgcgcgctcgatcgccgagggacaccacggctccatccgcgccagagtggagaacgggaggatcgccttcaccgccgagctcaaataaacggcttttgggcaaaaaaacgcttcgcagaacttctgcgaagcgtttttcttatcaaaggcttttctccccgcccgtgacggtctcgatggcgcaggcaatgaactttttcgctgcgggcgaggcctctttgagcgacgggacggagatgccgagcgtgacgaactgcggcgggtcgaacgggacctccgccaccgtgccgctccacttgcgtgagatgagccgctggttgaagctgacgccgagccccgcctcgaccatgttgtaggtcgtgaagccgtcgcgcgtcgtaaagcaggtctgcgggtgcaggtcgtgctgctcgagcaggcggtcctgatcggtgtcgtgattgggcgaggtgtggatgaacggctcgttctgcaagcgcataagcggaaagacatccgccgctgccaactcgtgcccgcgcggcagccacgcgacgagctcgtcacgaaagacaggcagccagtcgtacttgtcgccgtgcatctgcgcgccgaaacagcagtcgaccgagcgctcgttcagccagcgcgccatctcgaggttgccgccctcctgcatgcgcacggtcacgcccggatagcgggcgcggaacgccgtcaggatctctggcatccacagggccgaaatgctgtaatagcagcctatcgtcagcgagccctttgacacgccgccgatctccgcgctgagctgctcggcgttgtggtgcgcgcgcacgacctcgcgcagcagcggcagcatgagctttccgttttccgtgagctgcacgccctttttgctgcgaagaaacagcggaaagccgagctcttcttccagcgtgccgatcatgcgcgtcacgcccgactgcgtgtagcccaaaagctccgccgtggccgtcaggctgccgagctctgccgcggcaaggaacgcctcgcatttgaccgcttccatacgccctcctatccatgattttatatcatgtttttcatttcaaataaccgtttgcgtcatgttttctcttattctacaatagcagtcagaaaccgtcaatcctgtttttgaaacgaggtcttttttcatggagcatcgtctttctttttcctgcgactatcttgagggcgcacatcccgccatcctgcagcgcctgtgcgaaacgaattttgcgcagaccgccggttacggcacggatgaatactgcgaatccgcgcgcaagaagattcgcgccgcttgcggcgcgccgaacgcggagattcacttccttgtcggcggcacacagacgaacgcgaccgtcatcgacgcgctgctgcgctcttacgagggtgtgatcgccgcggacacggggcacatcagcgtgcacgaggccggcgccatcgagttcggcgggcacaaggtgctcacgctgccgcaggagaacggcaaaatcaccgcatcccaaatccgcgcactgcttgatcagtacgaggacgacgcgaaccgcgaccacacggtcatgcccgggatggtctacctctcccagccgacggagtacggcacgctctattccaaaaaggagctcgcggccatcagcgcgctctgccgcgaaaagcgcctgccgctctatatcgacggcgcgcgccttgcctacgcgctcgcctgtcctgaaaacgacgtgacactgcgcgaccttgccgcgctgtgcgacattttctacatcggcggcacgaaatgcggcgcgctgctcggcgaggcggtcgtcattccccagccggggctcattccacactttttcaccatcatcaagcagcacggcgcgctgctcgccaagggacggctgctcggcatccagttcgacacgctctttaccgatgggctctacgagcgcatcggcgcagacgccgttcgctacgccgacgctatccggcgcgcgatggcggaaaacggctatttgccctgtttcccctccccgacgaaccagagcttctgcatcgtcagtgagcagcagcgcaaagagctcgccgagcgcgtggacttctccgtctgggagcaatatgacgagacgcacagcatcatccgctttgccacaagctgggcgacgcgggaagaggatgtgaacgcgctctgtcgcatcctgcgcgagtgcaccgcgcaggaaaaggcagcgtcctaaaatcaaaaaagagctttctccgattttcaggagaaagctctttttatttcattgcgctgcgctcagttctttttcatcagctgttcatcctgctgcaaaagctgctgcgtgatgatatcgagctgccggtgcttggccatgcggtcggcgatgttattctgcaccagctccgtctcctgatggccgcggaaggacagcttaagcagaatcggcgtcaggatcgtgccgcatacgaccgtgatgacgaccggcgtcatcatcgcgggcgacagcacacccatcgaaaggccgcggttggcgacgatcagcgcgacttcgccgcggcaggccatgcccacgccgacctggatgctctcgcgcgtggtgaactggcacgccttggcgccaaggccgcagccgaggagcttcgagatgatcgaaacaagcagcagcaaaatcgagaagacgaccatgccgcccgtcagacccgtgatctgcacattgataccgatgctcgcgaagaacaccggcgtgagcagaagatacccgagggggttgtacttcgtctggatgtaggtgcccttgggtgtgcatgcgacggcaaggcccgcggcgtaagcgcccgtgatatcagcgacgccgaagaactcctcggcgcagtaggccatcacaaggcacaggacaaaggcgaacacggagtttctgtggctggcccaaccgtgctgacgcttgagcatccagcagaagatgcggtttgcgccaaagccgaccacgaaggcaaaggcgaaaaagcccacgatcttgaggagcaccatgccgatgctctcgtcaccgccggcaaggctgcaaacgagcgtcagggcaatcaggccgagcacatcgtcgatgagcgcggcggccaaaatcgtgttgccaaccttggtctcgagctttttcatctccttgagcgtttcgactgtaatgctcacggacgtggccgtcaggatggtgccgatgaagatattttcaataaagccggtgctctcgatgagtccgagctcatccgcgccccaggcaagcgccgtgcccatgagaaacggcacgaccacgccgagaaccgcgaccatgaagcccgccttgccgctgtgcttgagctcgttgatgtccgtgcccataccggcggagaacatcagcacgatgacaccaagctcgctgagctgcttggtgaactccgtttccgaaagaaggccaaggcccgcggggctgagcaaaaggcccgcgatcagcgcacccacgacctgcggcatctgaaacttctgcgcaatgaggcccagaatcttcgtgctcagcaggatcagcgcaagatccagcaaaaagtgatacgacatattgatttcctcccaaactctctgatctctatccaaattcttccgtttcatttcgcgaggctctattctaacttctttttttcttttttcaacagtcagaatcaccaaggaaacggaagaattcctgcacagctcaggcaaaatgcaatatatctttcatttttaacgtgaaatgtttgctttgattccgtttccatagccgttttcacaaaaagcagcgtcaaatgcggcgttaagaagccgtaaaatatggacagattcattgaatttctctatgatttacagggatatcgtctatatagtccacacatcgcgcacattttgtcgctcacgcccattttgcatcttttcctgcattttgcgcattttcgtcgcacaatgcgccgtttctccccttgccgcggcggcgcgggcgtggtaaaatcggccttgtgacatgaacaaaggaaaggacgagccatgaatcagaaagaactcaatgaactgcgccggcgcttccggctcgataagaataatttcagccgcgtgtacggctgctatgtgaactccaataaagagatcattgcgtgggtcgatacctcgatgggcctcatgcggcaggaggagcaggagatgtacctgggccttctcaaaaagtccctctccggcacgcttggcaagaacctcatcgacgtggtgttctccacgcagcaggtcgccgacagcgatgagcaccgcctcttgcagactcttcgccaaacagagctcaaggaccccgcctcgcgcgaaacgctctgccgccaaatcatcgactgcatcgacatgggcgagacaaactatctcatcctcctcgccgccgacgcctacgacgtgccgcaccgcagcaaggatgacgagattcaggccgacgcgtcgagtgaggtcttcaagtactttgtctgctccatctgccccgtcaaggccccgacgctcgaactgcgctacgaccttgaccagagcgagtttcactcaagctccaccggctacatcgcgacctcgcccgagctcggcttcctctaccccgcgttcgacaaccgcacggcgaacatttacaatgtgctgttctactcgaaaaacgccgcggagatccatcaagaggtcatcgacgcgctgttccacgtcgacccgccgatgtctgccgaggagcagaaaaacgcctttggctcggcgcttgccgacgcgctcgacaaggattgcagctacgatgtcgtccagtccgtgcacgagcagatcagagcgcgcatcgaagatcacaaggagagcaaagaccccgagccgcttgaaatgacggcgggcgacgtcggcggcatcctcgccaacagcggcgtgaacgacgagcagatcgcagcgttccagcgcgagtgcgatgagcagtacggcgagaacgccgcgctgaacccgaacaacatcatcgagagcaagaagtttgagatcacgacccccgaggtcaaaatttccattgcaccggagaacagctatatgatcgaagcgcgcgtcatcaatggccgcaaatacctcctcatccccgccgacgacggcgtggaggtcaacggcatcggcgtgaacatcccgggtcttacaaaagaggaataagaaaaaaggagagaagccgcggcttctctccttctctttttgaccatttacgccttgctcttgtagaggtcagcgatgatgtcggcgcacttgtcgatgccgagctcgccgctgtcgagcgtgatgtggtaattctgcgcgtagccccacttcatgttcgtgtagaagcggtgataggccgcgcggcgcttgtccttgtcgcgcaggcgctgctcgggcgactgctcgcgctcgccgtagacctcgacgatgcgcttggcgcggaacgccatatccgcgtggataaagaccttgaggcacttggccttgtcctgcaaaatgtagtccgcgcagcggccgacgatgacacaggggcccttttcggcaagctcgctgatgacgcggcactgaatttcccataggatgtcctcgttcgtcgggccgaacgcgcggttcgagagcgctgaggacaggaagccgccgggtgtgtactcgcccgcctccttgacataattttctgcaaagccgctctcctcggcgatcttctggatgagctctgagtcatagcaggggatgccgagctgctctgcaacctttttgccgaccgtgcggccgccgctgccgaattcacggctgatggtgataatatgattcataatacagttgctccttccgtattgagttcccgatacgtttttacaatcatacccgccgcgatgacgaaagtcaacacatccgacaccggcatggagtacagcacgccgtcaaggccgaaaaagcgcggcagcagcagtgcaaagcccacgccgaacacgacctcgcgcaccatggaaagcatcgtggatgagaacgccttgcccacggcctgcaaaaagatgaagcaggccttgttcacgcaggcgagcaccatcatgcaaagatacgtgcggaatgccttgatcgcaaagtccgtgtagtagctgctctcgttcgccgcgccgaagacggcgatgagctgacgcgggaagccctcggccagaacgagcgcgacggcgccgacgattgcctcgcagagcaggagctttgtaaagagctcacgcacgcgcgtctttttccccgcgcccatgttgtaacctacgacgggaatgcagcccgccgccatgccgacaacgatggaaatgacgatctggaagaacttcatcacaatgccgacgacggccatcgggatctgcgcgtactgctcctgcgagaatatctcatccagcgcgccgtacttgcgcagcatgttgttgatggccgccatcgccgcgacgaggctgatctgcgagagaaagctcgtgatgccgagcgtcagcatccgggtacagaggcttgcgtgcaggcggaagtctcccttttccggcttgacggtcttcatgcggcagaggtacctcaccgcaagcgccgccgtgacgatctggcccaacacggtggcgaccgccgcgcccatcatgccccacttacattcaaagatgaagatggggtctaaaatgatgttgagcaccgcgcccgcgagcgtggagatcatggcgaaccgcgggttgccgtcggcacggatgacagggttcatcgcctgaccgaacatataaaacgggatgccgagcgagatatagaagaaatactcccgcgcgtaatgaaatgtctcctcgttcaccgtgccgccgaacattgaaatgatgggatcggcaaaaccaaggtacagcgccgtcaggacaaggctgctcgcaatcgacagcacgaccgcgctgccgacgctctttcttgcctctcccacttcgcccttgccgagcgaaatgctgacgaacgcgcagcagccgtcgccgatcatcacggcgatggcgagcgccacgaccgtgagcggaaagacgacggtgtttgccgcgttgccgtaggaaccgaggtagcttgcgttggcgatgaagatctggtcgacgatgttatagagcgcgccgacgagcagcgagatgatgcacgggacggcatagcgccgcatgagctttcccacgcgctccgtccccaaaaactggtttgtgttttccatggtggtcttccccctgaacataaaaaataagagatgcgttccgccggatcaatccggacttacgcatctctgccgcacgatttgactatgaagttgtcttctccctccttttgccgcaaaaaacgtgcggcgtttctgcaactggatttacgcagaaacgccacacgctgtgaattgattttatcaaattgtttcgagcatttcaaatgttttttgcggcacggggcgcaaatttttatttagtcctgctccatgaagctgcggatataggcgatcagcattttcgccgtgccctcgaagccgagcacatcgctcttgacggtcatgtcgtagccgcgggcgtcgccccactttgtctcgcagtagtagttgtggtaggactttctggagcggtcgacctctttgatctcctcgatcgcgtcctcggcagacaggcccttcttctccatcacgcggccgactttggcctgctggttgccgcagatgaaaatgctcagcatattggggttgcccttgagcacctggtcgccgcagcggccgatgatgaggaagctctcgccatttgccgccttgtcacgcagcatggcgaacgtcttttccgccacgttgacctcaagagaattcgaatacttgccgatgcggcgcgaggcaaagaagttgacgggcttttcgtccatcttgcggatcatttcctcgctgtagccttcggaaacgatttccttttcgatggagtccttgtcatagagcttgataccgagctcttgcgcgatcatgtcggcaatgtaatggccgccgctgccgtgctcgcggccaagggtgatgatgatctggtttttcatgggatcgcactcctttcctttttccgtttacagatagcgcaggaataagtaggccgtggacaccgccatgacaatgatcgtcgcgggcacgcagtacttgcagtagcggccccagccaatgggatagccgcccttggccgaagccgaagtgccgacgacgttggcgctcgcgccgatgggcgtcgcgttgccgccgaggtccgtgccgagcgaaagcgcccaggcaagcacgccgatatccatgccctctgtcgcggcgatggcgcggatgacagggatcatggtcgcggcaaaggggatattgtcgacaaaggcgctcgtgatggccgagagccacagaatgacgatcacaataaccgcgatattgccctcgctgaccgaggtgatgaagttcgcgatcatgttgagcacgcctgtcttttcaaggcccgccacggaaacgaacaagccgatgaaaaagagcagcgtcttatagtccacgcccttaatgatttctataacagattttttgccgctggtcaagcccaaaacgatcagcgtcaaaatcgcgacaatcacgccgatgcacgcgacggaaagttccgtctgcgcgtgcgtgatgagcagcacgaccgccagcaggaaaacgcctgcgctcgcaagaaatgccttcttgttcgtgatggccgtcgaaggctcgggacaggtgacggggccgccgttggcatgctcggcgcgctcaagttccttgcggaagcagagcgtgaagtaaatgagcatgaacacaaagcagattgccacgaccgcgccggtattttcgatgaagtcgaagaatgtgtagccgagcgaggtgccgatgatgatgttcggcgggtcgccgcacatcgtggccgcgccgccgaggttcgcgcagaaaatttcagacaggatcatcggcacggggtcgaatttcatcgtctgcgccagttcgagcgtgacggtggcgagaaacagcacgaccgtgatgctgtcgatgaacatcgacaaaaacgccgagagcgacataaagcagatgagcagcggcaccgtgcggtagtgtacgagcttagcaagcgtcaggcacagccagcggaaaaagcccgccttgccgaggccctcgaccatgatcatcatgccggcgataaacaggatcgtcgaccagttgatgccagcggtgctctcctcacttgcgccgtaccagaatgtgctctggaaaaacgcgccgaggttgagcgtctcccaaatggcgctcatcgagcgcatgcagacgccgaacaccagcacgagcacgagcgcgccgctcccgagcgtaatgtaatgccgttcaaacttatcgaggataataagcaggaacatagtgacaaaaatgcagatggcaatgatctgagcaaacatgttattcctccctgtgctatggaatttccaacgcgagtcattatatcgaccctttgcgcggaaacgaaatgctttcttgacatggaggatatgtcattttgctatgccgtccgaattttcctgatttcatgcggctttgcggcgatgtttacttttcgtcaaggttctgttctttttttcccgaatacgcttgcgccgccgcttcgcttctgttacaatcagtcttgccgtccgcaaagtgcggacgaatgcttttctcttccgtcaaattttacgcagtcaggttcctcgccgccgcgcagaaccccaatcatttctttttcagaggagcttgctatgaacatcagctacgacagctatcgcgtcttttattacgccgccaaataccgcagcttttcgcaggccgccgcggcgctctacagcaaccagcccaacgtgacacgcatgatccgaaagctcgaatccgagctcggctgcgcgctgtttttccgctcgccgcagggcgtgcgcctcacgcccgagggggagaagctctacacgcacatcgccgtcgcgtttgagagcatcgaggcaggcgaagaggaggtcctctccgaccagagcttgcaaagcggtatcgtccacatcgcagcgagcagccttgccctgcgcacgcggcttttgcaggtgctcgcgcgctaccggcgcgcatacccgcacgtgcgcatctgcctgacgaaccactctgcctcccacggcctcgccgccgtgcagaacggccttgccgacttcgccattctggcagagggcgcgtccgtgccggattcgctcacggcgcagaagatcgacgaaattcaggagatccccatctgcggcccggcgtttttggagctcaccgaggagcccgtttcgctcaaaaggcttgccgactacccgatcatcagcttgacggaggggacatcgtcgcacgatttttatgccgagctcttcctgcgccacggtctttcgttcagccccgatgtggaggtcgagaccacggcacaggtgccgcccgtagtgcagagcgaccttggcgtcggcttcgtgccgcgcgagatgctttacggcacgccggaggcaagcggtatctaccccatcatgctcgaagagcccattcccgcgcgcagcgtcttcctcttccagcgcaagacacaaccgctgagcatcgccgcgaagaagctgcggcagatgctgctcgaagacgcgccgcaggagagtggaaaataatcagacaaagccccgccggtttcgaaccggcgggacatctttcatatatgaatgcttaatcggcacgctgcacgcgcttttctttgcggtcaagatagaggtagaagccgacgttcaggattacgccgaccagcgtggacaccggcgcggcaaggccaatcttcgtcaggctcgcgttcggctggatgctcatcacatacgcaaacggcaggcggacgagcagcgtttggatgagaccctgtgccatgacccagagcgtcttgttgttgccgttgaagtagccgagcatgctgaagaggatcgccgtcaggatggtctcgggcgcgaagcccttcagatactcaaagcctttctgcacgacctcggcatccggcgagaaaaatcccgccaacgcatcgcccttgagcatcacgagcgcgaatacggcgcagccaaaaaacagccccacgccgatgcccgtcagcattgactttttcgcgcgtttctgatcccccgcgcccacgttctgcgcgacgaaggacgccatcgactgcatcagcgcgctcgggatcagcatggcaaagttgacgatcttgctcgcaacgccgtagcccgacgacgctgtcaggcccagccggttgacaaacgcgcagagcgcgaggaacgacagctgcgtcaaaaactcctgcaaggcgagcggcagaccgatgctcaaaaactttctgcactggggattcaggcgaaagtctgcgcgcgtgatggcgaacggcagtttctttctgacgagcagtgcgaccgcgagcaacacgctgacagcctgcgccagaaccgtcgcgatggccgcgcccgcggcgtccatgtcaaagcccgcaactaaaacgaggtcgcccgcgatgttgacgatgcacgccaccagcacaaaaaggagcggcgagcggctgtcgccaaggccgcggaaaatggcggagagcaggttgtaggcgacgatgaagaagatcccgccgccgcagatgcgcacatagctcgccgtgagaccgacggcctcctcgggcgcctgcatcagcacggaaacgggccgcgcaaagcccacgagcaggatgaatattccgacggataaaattgtgaacacgaccgccgcaccgccgagcaccgcgctgatctgctccggccgtttttcgccgagataccgcgcgatcaggaccgtaacgcccatcgcaagctgcgtgaccacgaaagtcacaaggttcaagatctggctgccggtcgaaacggcggagaggcccgccgtcgagccgaaccggccgacaaccagcaggtcgaccgcgccgtaagccgcctgcaaaatgagcgcaccgagcacaggcagcatgaagagcgacagcttttttaaaatgctgccctgcgtaaaatcgctgcgatcagtagacaagggtgatcctcctttcggccatgacgtcgtaaagcgcctgaatggtgcggatggtgcacgccgcgtcctcgtcggaaatatcgtcgagaagcggcgcgagctgggcgaaaaactgctcgttgaacgtctgcgagagctttctcccctgctcggtgatggtgagatacgtcacgcgcccgtcctctgccgaggcggacttttgcagataccctttgtcctccatctccccgactgtgcgcgtcacgccggggcgcggcagatgcagcgcgtcgctgatgtcggacaccttgacgcgcacgccctcgcgctcgagctgctcaatcgcgtcgagatactggatataggacgacgtgacgcccttcggcagcgccgggagcagctcacgggcgcgcttggcctgataacaggcgtccagcaacgccttgatcttttcaacggtcatagctacctcctgcatgtaattatctttgttaattatcttaggtaattataagagtatcatacagaattgtccatgcgcaatttgaaagaaaacacacccaacgtttcctccccaaatttgtgcaaaaagccccgccattttcacagcagagcttttctcttcacttttttacagattcagcagcgtttcgctcaggcgcttgccggcgcttccggcaaagtcctccgcccggcggatgcgcaggaacgacgcgccgtagatcatgcgctcgttttcaagctctccgtcctcgccgaggaaaataccgatgacctgagcgccttcccgccggagctttcgcacctgaaagcaggtgtcgcggatggcggcgtcgccgacgtaggtttccggcgcgccctcgcgcttgcggccgctgaccatgtcgttcggtaagccgtcgctgaacacgatgataattttgtgctcctcgcgccgcttcttgaggtcgagtcccgccgcggccagcgcaaggccgtcgcggttattcgacgtcgcgcggtactccaaaatgcggcggtcggcctccggtttgtcgtcgtaatcgcggaagcgccgcagcaccgtgtagttgccgtaggtacagtagctcatcacgcggtgcggaatgcggatgtggctgagcgccgcgctgaagaggtagctttgcagcgccaccatgctctgccgcacgctctgcgagccgcttgcgtcgatcaaaagctccacgacgatggcggacggttcctgccggacgatcttttcaaaaagctgcggattttcgcagcggctgaccttccagagcagatcgttttgcagcacgccgtggtcggcgcggtaaacgtccggctcgctgcgcaggctcagcgcattgcgaaaggcctgctcgatgctgcggatgccctgacgcgcggcgtcctcgtgctcttggagcattttgaggttgccgtcccgactggcgcgcagcgatagggcgcgcggctcactgccctcgtaggcgtccgcgctcaggccgtcggtgaagaggagctttcgctcctcgtggatgccggtgcagacagcgctttcgatctcctccatcgcctgctcggtctgaaagctggggccaaagttgcgcatcagatactccggaatgccggcgagcgcgtcgtccggcaggacgaggccatcggccgatgcctcgcccgccttgtcgtattggagttccatctcctcggtccgcgtccactcgatgtcccccggttcggctgcgggctcccactcttccgtctcgcgctcgggtaagatgtcctgattgtggtcgggcgcaaaatagcggatgaaaattttgcggtacaaaagcgctgcgagttcgacgagcgactttgcgtccgcgcagctctcgctgcgcgcggcaaggtcgtcaaactcggccagcatgtcttcaaaaccgctgaaatttttcaaaatgcggcggtcgccctccgtcgccgcggcgggaaagtgcttcgtcagatcgtaaatgtacatccagccgcgcgagctgcgccggtagcgcaggaggtcgccacgcaaaatcttgcccgccgactgctccgccatcacggcgacgcccgggcgctcgcccatcagcctcgcccgcacggcgcgctcgacgcacaggtgcgcaatgggcagcagcacgtccatattgtaggccgcgtagcggtgccgccgcagccacagattcaagtcatcgagcccgaaaaacttgtccgccccgccgaggacgacgccctcgtacacctccaccatgccgcccgcgcgctcaaagggttcgctcatcttctgcacatactcgggataggtccgcttgcggtgatcttcggaaacagtcaaaaataggctctcttctctgccgatgctcatatcttcaggcaaagcgcgtcagcgctacgtcgcgcacgagcgcatactcgtactcatcgaagcatttattcgtgatgctcacggcgatggcatccttgggcgccatgccgtcggtcatcaggtgcagggccgcgatcatgccgcgcatatcgacggagttcgtcgagatctcgccgttcacggccttggcgttcagatcaaggaacagccccgtgcagcgcttgatgttctcgtccgacgcctccggtacgtttgcgcgcagcagctcgcagagctggggttcctcgagcgtcggcatgcggatgaccgtaaagcgcgagacaagcgcttcgttcagctcgcgcgtaccggcgtaaccgtagttcatcgtggcgatgaagcgcgcggcggggtggatagggatacactcatagcccggcacgtcgatgagacggcggtagtcgagcgcggagtgcagcacggccacagcgtcgtttttcgccatgttgatctcatccaagatgcagaagccgccgtactgcgcggcgagcgcgacagggccgcggcgcagccgcacttcgccgccggtgaaggtgtcggtgccgatgagcgtgctgctgtcggtgttcacatggaacgacacagtgtagaccggacgggcgaagagccacgcgaggttgtccgccagaatgttcttgcccgtggccttgccgccggagagcagaacgttctccccctgcagcagcgcggcgacggccagctccatgatctcgtcgccgatgaatttgacgggcggctcggcgatgcggctgcgcaccgtctcgtccgcgacgtattgctttttgaattgctccaaacggagcgatagatcctgtctcatgtctttgataattcccttctgtgtgcggaaacggttcccgcgcgatgcgctcttttcagcgcttttccatgcagagcattatagtattcacgcggaatattgtcaatttgcgccgccgttgcgcgcgggaaaacctgtggtaaaatgaatgcagagaactccattttcaaaaagggggccgtattatgctgacgatcttcaaccgcaaggaactcatcaccacgatggacatgcagcgtcagtccaacatccgcagcatcctgtccgccaacggcattgcctacacggtcagaaccgagaatttgcagggctcttccgcgttcggcggccgcagccgcgggcgcagcggcagcttcggcgttgacccgaactattcgtatgaatatcatatctacgttcacaaaaacgactatgaaaatgctctgagactgattcggtaacgtccctgagccctagaacgataaaaggcattccgcgcgatagacgggtatccgtaaaacagttaatcctccgtatggcttagaccatgcggaggatttgtttatgtctaatcttcaaacttgctggcggcaaacggtttgtcaaaaccgtttgcggacggcaagtccacaagggatagccgcataagcggcgcaaggggggtgtagccaccttgacggaacgaagtgacgcaacattctcggtcaagcagttttcttctgctgacggagaatgaagctccgcaggacgcacgatactcccgataggagagtatagaagtgcgccctttcgttcctaaagggattttatcagttcgacaaactggaatttgaaaacca

SEQ ID NO: 10127 - DNA, 15304 bp, Unknown
  gut microbiota DNA sequence
ttgacctttaagtccattaaatcctgcccgtcgaaccagatgtggcccgagtcggcctcttccagtaagttgatgcagcgcagcagtgtcgatttgccagagccggatgcgccgatgatgcacacgacctctccgcggttgacctcaaggtcaatgcccttgagcacgtgcaggtcgccgaaggacttttcgagctgttcgattttgatgatgggatcgttcgtcatagcgccctcctgtcagttcgagctgggaagccccagatcgacggtttggttgccctggtgccgcttggtgttgtccggcgcggtcatctttcccgtgatggccttgagcaggagcgaagaaagatacgtcaggaacaggtaaacgatggcggcgatgaggtagcactcggtacctttataataaataccggcgaccgagcgggtcatgaacatcagatcggacacgccgacgacgcagagaacggacgaatccttgatgttgatgatgaattcgttgccgatggcgggaagcgagttcttgatggcctgcgggaagacgaccttgcgcatggcctgccagtgcgtcatgccgagcgagcgcgcggcctccatctggcccgcgtccacggcgagaatgccgccgcgcagcacctcggcaagatatgccgtcgagttgagcgagatcgtgacaaggcctgctaaaaagagcggccagacgcggttgatgtccgaaacgctcatgcccgtgcgcttgaagaggccgaacaccgcgttgtagaggatcagcgactgcaccatcattggcgtgccgcggatgacgaagatatagaagcgggagaacttgttggcaacgatcttgaggaacttcacaaagtcgttgtcgcgtttgtcgggctcctgaatgcggagaaagaccatgagaagcgccagcacgaacgcgatcgccgtgccgaagagcgcgaggcgcaccgtgtacgaaatgccgatggcgaagagcgagcgctggttgtacgccatgtaggccatcatggagagcgtgtcggtcgggttgctgtcggcatgaatggcggcgttgatgatgtaggcgagctttaaaatgaagcggtcgagcaccagcagcgcgcaggccgcggcgtcgagatacgagaggtaacggctgacgcgcacgatgagggggcgcttcataatagtggagctgtaattgttccaataggcccacttgacgagcagcgccatggcgctcacgccgaggaagaaccagcagatcgccgcgagcgccgtgccgaacacggactgcgcggggatgaagctgtacgggctgggggcggagtagaacatgccgagacccagcagggcgatgaaacttccgcctaaataaacataacggtgatcccgggtgatgaagttcttccggggcgcggtgggtgctgccatggtgtttcctcctttatggtgcgaagcgcgttgtctctagagtgcttcgcgtacccgccgccgcgtgaaaaacgcggcggcggtgcgtgggatattactggggctggccgtcgacggctgcctgccacatggcggcgcgggcgtcgtcgtcgatgccggaaaggatggtgttgatctgatcaaggagttcattgtcgctcttgcgcagacccacgcaggagcccttggccggcagcgtgaagccgctgccctcatcgaaggtgaccaggcggaagttcgggttggaagcgaggtagccctgcgcgttctcaacgttgatgacgatggcgtcgcaggtgccctgctgcaggcgggagatcatgtcgggcacgctgccgacggggcttaagtggtcgacgccttcgatctgctcgatgacatcgtcaagcgccgtgccctgctggccgaggacggccgcgccggagaagtcctgaatggaggtggcatttaagtacggggaatcggcgagcaccatcaggccgtaggtggtctcacggtagggctcggagaagttgatggattcgcggcgctcggcggtgtccatcataccggcgatgatggcgtcgatctggccctgattgagcgcgttgatcaggccgtcccagctgagcttgacgatgacgagctccttgccgaggccctctgcgatggccttggcgatctgcacgtcgtaaccctcggcatacgtgccggcgacgttttcaacggggacgttcgagtccgtcgcttcgctttcctgccagttgttgggggcgtaagcgcactccatgccgacgcggaattcgttgctttcgttcgtgctggtgtcctgctgttcctgctgctgatcgctgctggaatcgtcggcggcctgactgccgcaggcggtgagtgcgaagagcatgatggccgccagcaggagggcggtaaaggttctgagcttcatggtggtggtttcctttcttgtgatgaggttgatttttcaaaaacaggggagtcctgcttttttcgggttttcgcactcccgatgcagacgaaaaacaaagccgtaaatgctttgtgaagcatttacggctgcaactgtactgcaatccggcaaaccggtcatcaccctgggggggacaaacagcttgccgacctcgatagcgctccacatacgtgacagtccggcggatcttctccgacgaaccagcggcaaacggcacaggaaccgtttccacttcggcggcatcccctttcgcgcgctccggcttcctgtgccggtgcgaacgcgctacttttgtcagccgcgcctctatcttcccgacctcgcgatcgggcgtttgaaattgttggcgttaccatactcccatgctgggaaaatgtcaatccctaattttccacttctccaaattttgagaatctttttacacggaagaatgagttcttgtgaaatattaccacagctttcctgcatgaatatcggatatgacacggcggaatgtaaaaaaggggccggagcatgataccccagcccgctgaaaattcatctcaaaactcggtgacgacatcgtacccgctgcccgtccagatggcgggacgcgtttccagcgtgtgcagtgcggtgacaaaatcgggcagcgttgtgaccgtttcgggcagccatgtcacgtattttcccacctgctccggcacgtgcgcgtcgctcgcgccgatggccttgagccccagctcgcggcagaagcgcagtgccgtccggttctcctcaagcggcgtgctgccgttgaggacctccacgccgtcaagaccgtgcacatcgcgcaggtgctcgcgcagcccgcgattgttgctgcgaaaggggtggcaggagacgcagaaaccgtccttttcgcgcaccaggtcgataaggtcctgtgcgctgacgcgctggtcggggatgccgtcgatcccccaggcggtgatatcgccccagagcgagaaaaattccacgccgacgaagatgggatagccgatctcgcgggaataggcctccgcgcgctcgcgcaggcccatgctgtcgtggtccgtgatgcagatcgcgtccagccccttttgcctggcgatagagacgatctcctccaggtggagaaagctgtcggtcgagtaggtgcattcgtgcaggtgcatatcaacaagcatggtaagtttactccttttctccgtggcggatgaccttcagtacgctgccgtcgtccttccacacaatgtcgttgaggccgagaaatgacgcgatatagtcgtttgcaggatggcggaagacctcctctgccgagccgagctgcaagagctcgccctcgctcatcacggcgatggagtcggccagaatgagcgcctcctcctgatcgtgtgtgacgaagaccatcgtggtgccgagctcgcgctgcaagcgcttgagctccccgcgcatccgcacgcgcagcgccgcgtcgaggttcgagagcggctcgtcaagcagacagagctttggctcgacgatgagcgcgcgggcgagtgccacgcgctgctgctggccgcccgagagctcgccgatgcgcgcgtcctcgcgctcggcaaggccgacgagagtcaagtaccggcggcccttttcctttgcctccgcgcgggaatagccgcggaatttgagtccgtaggtcacgttttgcagcacgctcatgtgcgggaacagaccgtaggactggaagacggtcgaaaccggccgccgctcgggcgggagcgcggtgatatcctgcccgtcgaggagtaccctgccgccgtcgggcttgagaaagccgccgatcatgttgagcgtggtcgtcttgccgcagcccgacgagccgagaatgcacaaaagtccgccctcttccaggccgagggagaggtcatgcacggcgtatttgccgtcaaactgcttgctcaagcggtcaagttcgagatacacggcgattttctcctttccgggtgatgaggaaggcgaggccttcgacaagaagcacgatgacggtgatgacgctcgcgatcagcgaggcgagggcgtaatcgccctgatataccgcgtcaaagagcttgaagacggccagctgacgcttggcgtcgatgagaaagatgatcgagcccgccgtcgtcatgctgctcgtgaagttatagacaaagcagctcaaaaacgcgggccgcagtgcgggaaagaccacatcgcgcagcacagcgagccgtcccgcgccaaggtcgcgcgccgagcgctcctgtacttcgggtaggagcgcgagcgacgcggtgcagatcttcgtggaggtcggcagctgcttgaagagcatgttggccagcacgatgagggctgtgcccgtcagcttgagcggcgcgtggttgaacgcgagaatgtagccgatgccgaagcacgtgcccggcagcatatagggcagcgtcgccaggcagtcgaaaaggctgcggccgatgatgcgtcggcggtccatgtaataggcgaagagcatcgcaaaaaccgtgccggcgatggagacgatgagcgcgtattcaacgcttcgcagcatcgtcgacgagccgatgcgccagagctgatcccagtattgcagcgtgaaggagcagacacctttcgtgctcttcaaaaagcccgagaggaacacgcagccgtattgcagcacgatcattacgaagaaaacggtgctcagcgcgatcatgccccagcccatcgcgccgcagtgcggcagcaaaaggccaagctctgtctgagcggtgcggctggcgtcggtcagcctgtccgagcggcgcatcagcgcgcggtagacgaaaaagaacacaatggacgggatgagcaggaacatgttcattgccgaggacttttcaaggtccgagtatccaacgacttgcaaatagatgtccgcggccagcgtgctgaagcgcccgccgatgatgatgggcgtgccgaagtccgcaagcgagcggacgaacgagagcagcaggcacacgagcgtcgcgggccgaatgagcggcaggacaatatcgcgcaggatggcgccgcccgatgcgccgaggtcgcgcgccgagcgaaggctgccctcgtccagcttttcgagaatgccggagagaaacattgcgttgagcggcacgaacgagatcgactgcatcaggatgacgccccagcgattgtaggggttcaggctcaggtgcagcaggcggtaggtgatccacccgcgccgtccgtagagctggatataggcgagcgacgagacgaacggcggcgacaccatggcgacgagcatgatgatcatgcagagcgtcttcttccacccgcgcgccgtggcgcatacgagcgccgctgagagcgagaggatagtggacagcactgccgtaaaaacgccgacaaatacgctgttgcgcagactcccgccgtattggcgcagaacagtgccgaacattgcaaagctcacgccgccgcccgcgccgcgcaggctccgcagcgcgatgcacgcgatgggccagagaatgaacagcagcacgctcccgagcaggacaagtaagatcagcttgtcggccgcgttttcacatagggaaaaaaggacatcgtgagatgcccttttttctgtatttttttggatagcgccggcggacttcatttattccgcggcggccttgtcgcccatcaggggctcaaagcgatcgaggatctcggtgcgctgggaaccgaacagggacaggtcctccgtcatgaggagcgtaggatcataggacagctcaatgccttcgatggagggcttgatgaccttgatgccgttcttctgctcgatctcggcgagctgacggagatgatcgtcgctgctgaagagccactcgacgaagtacttggcggcgtcaacgttttcagcgttcttgaacacggccacaccctcggggacccaaggcatcccgtcagaggggtaaacgatggtcaggtcgttctcctcggcggcctgctcgatgctggcgtcgatgtaggagatgccgacagcgaactcaccggaagagaccttgttcttcgggtcggagccgcgcttgccgtagtaggcgatgttgttgttcagggcctcgaagtagtcccagccctgatcgcccttggcctgcagcagcgcgttgaccacggcgtagttggtgccggaaacggcggggttggacatgacgatctcgccctcatactggctgtcggtcaggtcatcccagctctcgggagcggtcagacccagctcctccatgagagagttgttgagcaggaagccgacaatggtgatgcccttggaataccagtgaccctcggtatccttgtactcgtcgccgagctcggcggccgcgtcaaaggtgacgggctcaagcaggccgtcgtccttggcactcatgaacgcgtcgatgccgccgccgaaccacaggtcagcggacggggtgccgccctcggcgcggagcttggagagcacctcgccggaggacatggacaggcattcgacctccacgccggtgtcggcggtgaacgcgtcgaacaggggaccgtagacgtcgccggtggcgacgaccttcatcgtgccggagagctcgggagcggtgtcctgaggctcgtcgggcgtctgcgtgtcatcagtcttcgagccgcaggcgaccagagagagcaccatcacgacgcaaagcagcagagaaaacagctttttcataatgaacctcttttccaaatttgctaaagaaatccccgccgctgtgctgacagtggcgaggattatattttaaatagaataacgcaaaaagtaaaatcgaaatttgcacacgactaaggcgatttcatcgaaaaaaacaattatttggcaaactgcggatcaaggacggacagcgcgtatgccgcgtagagcgccgcgccgagggggagcgtttcctcgtcgatgtcgaaatcgccgcggtggttggagatgcaggtgtgcggctttttggggtttgccgtgccgaggtaggcgtaagcgcccttcgtttgcagcagatactcggcgaaatcgtccccgctgagcgacagcgcgcggtttgccgtcgtggggatgccgagcgcgtcggcgacgcgctcgacctccccgcacacaccggcgtcgttcgtgagcggcgtggcgaagtcgtcccattcgacctctgccgtgccgccgtaaagggcggagatgtgtgcggccgcggcgttgatcgtttcgcgaaggtgcgcgcggctctcgggcgagaacatgcgcgtcgtgccctcgagcacggcggtctcggccacggcgttgtaggccgtgccggcgttcagcttgcccacgccgatgagcaccggctcgaccggcgaggtcatgcgcgtgacgatggactggagcgcgacgacgagctcgcttgcgatatagagcgcgtccacgccgagctgcggcgtggagacgtgcgcgcttttgccgtggatgcggatgataaagtggtcgacgcccgcgttgttggcccccggcttgacgccgacggtccccgcgggaaggtcggacgccgtgtgcagcccgaagacgcgctgtgcgccatccagcatgcccgcagcgatgagcggccttgcgccctgaccgatctcctcggcgggctggaagaggaagcgcacctcgccaccaaagtccgcgcggtgtgcgctcaaaacctttgccgcgccgagaagacacgtcgtgtgcgcgtcgtggccgcaggcgtgcatcatgcccggcgtttgcgagcggtagggcacgtcgttcgtctcctgaatgggtaaggcgtcgatatccgcgcgcagcacgacaaggccgcttccattgccgttgccggtcaaatggccggcaacggcggtctcgccgacgcgctcgtgcgggatgccgcacctgtcaagctcgcgctcgatgcgcgcggcagtgtggtattcgtgcaggccgagctctggggcgcggtgaaattcccgccgcagtgcgatgagctcgtcgcgaagctgctggcactcttctctcagggcgttcatggcgaatttcctttcttaacccttggcagggatcttttcgcgcagggattcgaggcggttcagcgcgtcggtgagcgtttcgtccttcttggcgaagtgcaggcggatgaggtggttgaccggctcgcggaagaagctcgagcctggcaccgcgcccacgccgaccttgctcgcaaggtcctcgcagaattgaagatcgctctcgtagccgaactccgagatgtcgagcatcacgtagtaagcgccctcggggtcattgtggacgatcttgaggtcgtcaaggccctttaagaacaggtcctttttgtgcgtgtactcggcctgcagcgcgtcgtagtactcctgaccaaagttgaggccggggatgatggcctcctgtaggggcgccgccgcgccgacggtgagaaagtcgtggaccttcttcgcgcggtcgatgatctccggcggggcgatgatgtagccaaggcgccagccggtgatggaataggtcttggaaagcgacgagcaggacagcgtgcgctcccacatgtcgggcagcgtcgcaaaataggtgtgctggtgcggggcgtaaatgatgtgctcgtagacctcgtcggtgatgacgtagacgtcatatttcctggcaagacccgcgatgatctcaagctcctcgcgcgtgaagaccttgccgcaggggttcgaggggttgcacagcacgagcgccttggggtgctggcggaacgcgtcctcgagcacttcggggtcaaacgtgaacgacggcggcgtgagcggcacatagatgggcaccgcgccggagaggatcgtgtcggcactgtaattttcgtagaacggggagaagatgacgaccttgtcgccgggattggcgacggtcatcattgcggccatcatggcctcggtgctgccgcaggtgacgacgatctcgccgttggggtcgatgtcgcggcccatgaagtgggactgcttcttcgccagcgcctcgcggaagtcctgcgcgccccaggtgatggagtattgatgatagtcctcgtaggcgacctgagagaggcggtcgaggatgggcttgggcgggtcgaagtcggggaagccctgggaaagattcaccgcgccgtactggttggagatacgggtcatgcggcggatgacggaatcggtaaagctcgcggtgcggtcagaaagtgcctgcattgttgtttcctcctgtgagataagattttccgttgttcaagatatgctgcgggtcgagcgccgttttgatggcgttcatggcctgtaaattttccttcgccgtctggcgcaggaagtagggacgcttcgatagcccgatgccgtgctcgccggaggcgacgccgccgaggcgataggcttcggcataggccctgtccatgttttcgtgcagctcgcgctgccacgtttcttcatcgcgctcgccgcgcacgacgcacaggtgcacgttgccgtcgcccgcgtggccgaagctgaccatctgcatgccgctctgggcttccaagtcgttgatgaagcggatgaagtccgccgtgcggctgatgggcacgacgatatcgaccggctcctgctcggaaacggcctccacggccttgacaagcgcgccgcgcacgcgccagatgtcagcgcactgccgcgcgtcggagagctcgataaagtcgagcgcgccgttttgcagcgccagagagcgcacgcgcgcggcattggccgtgacctcttcgcttctgccgtcaaaggtcaagagaatataagagccggcgtcggggcggggataagagatgccgcagaagcgttcgccaagcgcgacgactttgcgctccatgaattcgaccgccgtggggttcgcgttcgcgcgcaggatggtcaaaacgctctggatgccggttttcaggtcggcatacggcacaagcacgctgagcgaggcctcgggcttgggaacaaggcgcagcaggcactttgtgatgacggcgagcgtaccctctgagccgatgagaaggtgcttgagcgagagcccgctcgcgtccttgacctgcttgccgccgacttgcatcaccgtgccgtcagcgagcacgacctcgagtccgcgcacgtagtcgcgcgtgacgccgtacttcaccgcgcgcatgccgccggcgttcgtgctgatgttgccgccgatgctcgaggccttttcgccgggatcgggcgggtagaacagcccgcgcgcttcgacataggcctgcaagtcctgcaagagcataccgggctcgaccgtgacggtcatcgtgtcctcgtcgagctcgagcacgcggtccatgcgggaaaggtcgaggatgatgccgccctcgagcggcacggtagagccgacaagattcgtccccgcgccgcgcggcgtgacgggaacacggtgctcgtgcgcgtagcgcaggagcgcgctcacctcctcggtggataaggggaaggcgagcgcctcggcgctgccgtgaacgcggccgagcacgtcgctctggtattctgcgggaatgtccgcgccggtgagcaggcggtcttcgtctgcaatgatgcgccgcagcgcggaaagatcaagtgccataataaattcctcccggaaaggcgtaccgccgcccgcgctccctgtgttgcgggagcgcggcggcggtcagatggtgtttactgattgatcaagtcctgatcccagcccactgcgatgaagtaaccgccgaaggtgttgttgaacacgtcctccgtcgcgctggactggaaggcttcgacgaccttctcatagatggcggcggtgtcggggtcttcgacgtcagcggtgcgcgcggcgatcagattccagtactcctccacgtcgaggacgctgtccttgtagatggcctcgtcggtcttgaggccaaagtcgagcgcgtagttgccgttcacgaccgcggcggccacgtcgggcaggacggaggggatggtgttggccttgagttcttcgatggtgatgttgaccttgtagctcgtgatatcgtcaacggtggggttaaaggcggcgttggggtcgagctcgatgaggcccgcggcttcgagcaccttgagcgcgcggccgccgttggtcagatcgtcgggaatggcgacgacgtcaccgtctttgagctcgtcaacggaactgaccttctgggagtagaggttcagcgggatgatgaaggtgttgccgatgttctggatcgcatagccgtagttgtcgatctcgctctggagataaatgcggtgctggaaggcgttgaggtcgatgtcgccgttggcgagcgcgttgttcggggtcacgtagtccgagaactgcacgatctcgaggtcgatgccctcgtcggcgagcgcggccttcgcgctcgcccagaggtcgtcatagatgccgccgaccacgccgagcttgacggtcacggtctcgccggtctgattgtcggtgttggcatcgctgttgtcggcggagtcgtcggccttggagccgcaggcggtcagcgcgagggcgagcgtggcggctgcaagggcgagggcaaagaactttttgagcttcatggaaatatcctccgttaaaataattttttgtaatggggtgggtaggggctgtatggggatcacgttaatgcgtgttctttttgacgatgcgtccgccgacaaattcgatgacgcagacgatgagcacaaggacgagcacggtgacgttcgtgatgtcggccatgttgcggtcgtggccgtagcggatggcgaagtcgccgaggccgcccgcgccggcgacgccggccatggccgtgaggtttaagagactcacgatcgtgatggtcgtgccgcgcgcgatggccgcgatgctctccttgagatacacgcggaagatgatctcaagcgggctcgagcccatcgagagcgccgcctcgataaggccgccgtcgagctcggcgagcgcactttcgacctgacgggtgaaaaacggcactgagccgaacaccagcggcacgatcgcgccgcgcacatagagcaccgtgccgaccagcgcgcgcgtgatgggcatgacccacgtcagtaggatgataaacgggatggagcggaacaggctcacgagcttgtcgagaatttggtagacgaccttgttctccaaaatgccgttcggctttgtcaccgtgagcaccacgccgagcagaagcccgaatacgaacgagatgaggcccgaccagagcaccatgagcatcgtgtcgccgagggccttataaaagtccggcagcttgcttgcaaggttcggggcaatgttaacgatcagctcttgcatctttgatgacctccactccgacatttttttcgatcaggtattcgatcgctttcgtgatctgctttctctcgccgctgatgatggcgaccgttccgccgatgggggaatcctgcacgatggtgatatcggcgaaaatgatgttgagcgagacgttgaacatctgcgacacggcggagatgatcggctcgttgacgttgcgctgaacataggacaggcggacgatgagctcgccgggctggagacgcgtgacgggggaatcctcggcgatgagcgcttcgaccttctggaggttcgaggtcgtgtggatgaagctcttcgtgatgtcctgcttgggctcagcgaagaccgtgaagacctcgccctgctcgacgacgcggccgtattccatgacggcgacgcggtcacagatctccttgacgacagccatttcgtgcgtgatgagcacgatcgtgatgccgagcgtttcgttgaggtgcttgagaaggtgcaggatcgccttcgttgtctgcgggtcgagcgcggaggtcgcctcgtcgcacagaagcacctgtgggtcgttggcaagggcgcgggcgatggcgacgcgctgcttctgtccgccggagagctggctggggtaggcgtccgccttgtcgccgatgccgacgagttccaagagcgttgcgaccttcttctggatatcctccttgctcaggccgctgcccttgagcgggtaggcgacgtttccggccaccgtgcgcgacggcatcaggttgaagtgctggaagatcatgccgatcttcttgcgcgccgcgcgcagatccttggcagagagcgccgtcaagtcctgtcccgcgacgaagacgctgccggagcttggccgctccaaaaggttgatgcatcgcacgagcgtggacttgcccgcgcctgagaagccgatgatcccgaagatctcgcccgagccgatggagagcgacacgtcgcgcacggcgtgcacggccttttcgcccgagccgaagtccttggaaatgttcttgagttcgatcaagtgaattcctcctttatcccaaaagcaaacaaaaaagcggggagctcatgagctccccgcttcaggtcaaacgatgttcgggtggcaagacccttctgcgcgctttcaatcagcggcggcaatttcgttcctgtgcgtatcgggcaggcaaatgagcatgagcaatcgtgggcatcggcatcgccatgtccatgttcatgcacattaacattcgagaagtgtaagagaacatttcgtcgaaatcctttccgaaaatcatactgagattgtaggtatcatagcaccgtgaaaagcacacgtcaacagaaaatgcgggaaaattcgcaacttagtcacacttgactaaagcggaagaataaacatgcggaaaaaatcgggtaatattgccagcaaatttgccgcgccgttcagttttgaaatgaaaaaagaggaacggaggcggtcagcttcgttcctctttcgctgattgaatgccgaaaaagcggcggccgttttcgttcgtcagggcgatgatttcatctgtgctcatgccgcgaatttctgcgaattttgccgcaatatgggacacattgcgcgagtcgttgcgcgtgccgcgcacgggaacgggggccatgtaagggctgtccgtttcgagaagcaccctgtcaagcgggacgacctttgcgacctcgacggtcttcttcgcgttcttgtaggtcagcgggccgtcaaagcccaggtaccagccgcgctttatcagctcctgcgcgatctcgacgctgccggaaaagcaatggaacacgccgcgcacctgcggaaactccttcacgatggcgaggcagtcagcatgcgcgtcgcggtcgtgcacgatgacggggagacctgattcctgcgccagcgcgagctggtcgcggaaaacctcctgctggaattcccgcggcgggttttgctcccagtagtagtcgagcccgatctcaccaatggcgacgaccttcgggttctttgcccatgcgcgcagcgtgtcgaggctctcgcgcgtgtagggcgcgcagttttccggatgccagccgacggcggcgtagacgtggggatattgttccgcgatctccaccgcgcggcgcgaggtatccaagtcgcagcccgggtcgacgatcagccccacgccgttttcgggcatggacgcgagcaatgcctcgcggtcagcgtcgaacgcctcatcgtcataatgggcgtgggtgtcaaaaatcagattcatttcttctcctgctcaaagatgaggtcatattcaaggatcgcgccattcaccgactgcgacacaggcagaaagccaacatagcgccagccttcctccgctgcacggtcgatgatgttccggtattcggggtcaagcgaaaatccgccaagaatagacgcattggcggcgacttttacatgaaagtattcatacatggctcttttctcctttgcaggcccaaagagggtgggttttcgcgcccccaggggcgcggggatatgccgcctgcgggcggcgggagcaaagggggtattctctttccaaagagaatacc

SEQ ID NO: 10128 - DNA, 21912 bp, Unknown
  gut microbiota DNA sequence
tctgggtagcaattacttgtatggcattgttcaaagtagttgtatccttggtggttgcatctattgttggagtgctcccgatgatcgttggtaaaagagaataacatacttcaatttggaacttccagtttgccgtacttgatcccaacagggcttgaggcgggcacgccccgacaggaagctgtcccaaagagacagaaattttcaagaattgaaaatttgcggccacgggacgatccgcgctcttgtgaacaatagaaaaaccagaactgcatggctgattcagcgaacggttctggtttttcttgacgggcgaaggcctttctgatagggtaaaggcaaactggagaactggcgcccgacgcactgcatgtcgggcgcggggagggaaaagcgtggaagaaaatctgtttcgttccatcccgcgggtggacgagctgctcggtcgggacgagctcaaggtgtcggcgctgccgccggtgctgctgcgcgagagcgtgcgcgaggagctggacgcgctgcgagacgaagtgcgcggcggcctttccgcgctgccggagacaggcatactctgcgcgcgcattctggcacgtgcagaggaaaagcagctgccgacgctgcgctcggtcatcaacgcgaccggcgtgacgctgcacacgaaccttggccgcgcctgcctgagcgagcgcgcggcgaacgccgcggcagaggcggcgagagattattcgacgcttgaatacgatgtggaaaacggctgccgcggctcgcgctatcagcacgtggaggcgcttttgtgccgcctgacgggtgcggaggcggcgatggccgtgaacaacaacgccgcggcggtgctgctcatcctgtccgcgctcgcgggcgggggagaggtcatcgcctcgcgcggcgagctcgtcgagatcggcggctcgttccgcattccggagatcgtgacgcagtgcggctgcacgctgtgcgaggtcggcgcgacgaacaagacgcaccggcgcgactatgaagccgccatcggcgagcagacgagagcgcttttgaaggtgcatacgagcaactaccgcatcgtgggctttaccgaatccgtgccgcgggaggagctggcggagatcgcgcatgggcacggcctgccgctcattgaagacctcggcagcggggcgatcgtcgacctcgaaccgtttggcatccgcggcgagccgacggtgcagagaagtctgcacgctggtgtggacgttgcgtcgttttcgggcgacaagctgctcggcgggccgcaggcggggctgatcgtcggcaaaagggagtacatcgaacggatcaaaaagcacccgcttgcgcgggcgctgcggctcgacaagatgacgcttgccgcgctgcacgcgacgctcagcgcctatctggatgccgagatcgccgtgcgagagatcccgacgctcgcgatgctgtcggcgagcgaggataagctgcacgccaaggcgctgcggctgcaaaaggcgctcgcggacacgggcgtttcctcgcagctcgtgtggacgggcgacgctgtcggcggcggcagcgctccgacgcaggaactcaccggatgggccgtcgcgatcgagccggggaggctcagcgtggatgaactggaagagaagctgcgccttcgcgccaagcccatcgtcgcgcgaatccaccgcaggcaatatttgctgtgcgtgcgcacgattcgagaggaagactttgccgagatcgccgcggcggctgcggaggccatccgatgaagcatgttatcatcggcatggcgggtcatgtcgaccacggcaagaccgagctcgtcaaggcgctcacgggcgtggacaccgaccggctggccgaggagaaaaagcgcggcatcacgatcgacctcggctttgcgcgcctcgactttccggacgggagctgtgcgagcatcgtcgatgtgccggggcacgagaggttcatcaagaacatgctcgccggcgcgggcggtgtcgaccttgcgatgcttgtcgtggcggcggacgagggcttcatgccgcagacagtcgagcatctggacatcctgcagctgctcggtgtgaaggacggactcatcgtgctgacaaagaccgacttagtcgacgaggactggctgaacatgctcgaagaggacgtcaaaagccgcgtcaagggcacgtttttagaggataagccgatcctgcgcacgtctgttcgcacgggcgaaggcattgaggcactgcgcgaagcactgcacgacttgacactgcatgcggaggaaaagagcgcgcgcacgccgttccgcctgcccatcgaccgcgtgttttccgtcgacggcttcggcacgatcgtcaccggcacgctcatcgacgggcacatcgccgtcggcgacgaggcgcagctcatgccgctcgggaatcagtgccgcgtacgcaatttgcaggtgcacgggcgcgacgtgtcggcggtgtacgccggacagcgcgcggcggtcaacttagcgggcatcaaaaaagagagcatcagccgcggcgatgtgctgtgcaggacggattcgatgcagccgtcgctgatgctggacgtgaaactgcaaaatctgccggattctaagcggatcatcgagagcggctcgcgcctgcacctctaccacggcgcggcggtgcgccttgcaaaggcggtgctgctggaccgcgacgcgctgcgtccgggcgagagctgctatgcccagctgcggctgagcgaagcgctcgccgcgcggcagggcgaccgctttgtcgtgcgcttctactcgccgctcgagaccgtcggcggcggggtgatcctggacgagcatccgtaccggcacaagcgaaacgacgcgcgcgtgatcgcctcgctcgccgtgcgcgagagcggatcggacgaggcaaagctcgtgcaggccgtcggcgagcgcggcgcagatggcatgacgcttgcggaccttgccgcgtgcttcgatgaaccagaagaaaaactggtggaaatgctcgccgtgctctgtgcgcggggaaagctcgtcgagatcgcgccgtcgcgctatcttacatcgtcgacgctggacaggctgtggacagactgtgagacgatgctgacaaagtaccaccgcgagcatccgctgcacgcgggcatgcgcctcgccgaggcgcggcagcggcttctgcgcggcaaagcacgggaaaatgcggacgcgatcctcgcctgctttgcgcgcgagggaaaactcacgctgacggcggagcactgcgcgcttgcggacttttccgtgcatctgaccaagcggcagagtgccatccgggaagagctgctgcgcacttgccgcgcggcgggaattcttggcaaaaagcaggacgcgctctgtgcgctgttcgacaaaaaaaaccgcgtggagtgcgcgcgcgtgcttgagagccttttatctaccggcgagcttgtgctgctcgcgccagagctctgcgtcgaaaaaagcgttttggatgcggtcgacgcaagggtgaaggcgtggttcgaaacgcacgacacgctcacgctgggagaattccgcgacgcgctcggcacctcgcgcgaccacgcgctgctggtgctggagtattacgaccggcgagggattcttcgccgcgagggtgatgtccgcaggccgggcgcgcagtttggcgagatagaaaaatgaggcggcttttgtcgcctctcacatgggagtagatgggtgctggtgtgccccccggtcttcaaaaccggtgagaggggtgaagagcctctcgggtgagttcgatcctcacatgctcccgccagagcctcgcggccgtgtgccgcggggctttttgaaaaatgtggatttccctcttgacagaacggagggaagctcatataatactactgttcgcgacgtgagccgtacaacttcatatccgggtgtagcgcagttggtagcgcgcatggttcgggaccatgaggccgtgagttcgaatctcgccactcggaccaacgaaaaagcctgtaactgcaatggttacaggctcttttcttgcacttttgcagggcgttttccctttagttttccctttacaggtcaaaaaaggtgtctgacggctcaaccgccagacactttttcgataaacttttccatgtggtcggcgctgctctttttcatctcctccgtcacatgtccatagacatccaacgtaaaagaagatgtcgcgtgtccgaggttcccttgcaccgtcttaatatcatcaccggcatgaatcgcggcaactgcgtagctatgtcgaagatcgtggaaacgagcctcgggcataccgatcgatgcgacaatgcgtttatagctgtgatacacattgtgcggtgaaacatgacggcccagttcgtccgtaaagacaaagccgctgttttcccacgcactgcccgcgcggatctgctctgcgctttgctgcgccttatgctttttcagcagtgaaacgacaaaaggtgcaacggcaatgctgcggccttttccgttcttagaggaaataagccgatacttccccggctgtccgggaatgttttgcagttgcttgttaatgagaatcgtgcctttttccagatcgacacaattccattgtaagccgcagacctcgccgcgccgcattccggtaaacagcgtcagtaaataaagtgttccatagcgcgacccctctaccgctttcataaatgcggcgattgcctcactgtccagcggcttgatctccttacgctccacgcgaggcagcttgcaggcatcggcaggattgaagcgcagataaccgaccgccaccgcctgctgcagcgccttgtgcagcacaccgtttacgcacttgacggtctttgcggacagtcccgccttgtcgccgtgcggcttttgcaggtcattatagaaactctgaatttcgtgtgtgttgagcgcttccagtttgatcgcgccgagcgcaggcttgatatggttgttgacgtgctgcgtgtagttcagcaccgtcatcggcttcacgccgcccaaatactccacgagccagatatcgagccactcgctgacggtcattttcagcggctccttgtaagtcccagcgttaagctcgacagccgcggcctgcatcttctcgcgcacctctttttgggttttgcccgaaaatgagcgctggatctgcctacctgtgccagaatcataacccgtcgtgatgcgggcttcccagtaggtatatggtacgcccttgcgtgtgacggtcttcttcctaatcgtacccgcaccctgcgcggcgcgggaatttgatttgcggggcatagcgttttcctcctattgcaaagtttataaatatattgtaaaacaaagaggagagagaaacttgtccctctccccccaaaatttttacgaattcaaaaattcgaaaatcgcctcacgcgggatgcggataattttgccgcagcggatactcctcaaccgcccacagcgaacgagattatacgcagaggtgcgcccgatccggagcacagtcgccgcctcaacaaccgtgagcgtaagcggtaaatctgtggacatcagacgtcgcctcccttcaaagaagcaccgcggtagccgtttttgggcctccctgcaacacgctgtttatcgcgcgtaacagcaccgccgcacacaaccgaaaatttatgcgagaacagagtcttgtcatgcagagggtagacctgcttgcccgcacaaaaggcggaatacgccacaaacagatcctccgtcgcggtgaagctgacgcggtcaaagtcacagcactgctgcacgaacagctcaacgccgtcattgttggcgagactggtctcaggcgtctgagagtagaacgtgaagcggtcatcgcctgcaaaaatatagttgtgctggcgcagttcacggtactccaaaatcgcgcgatacaagatccccgcgcgttcgtcgagcaaacggtcgagaagatgaggatcctgatgcgtcttggggacagaatagcggaacgggatcagcagcatacggcgtgcaaacgcttcatcccctgcgggcaatacaatctcatggttcgagctgaaaacgagcttgcacgagatcttggccgagcgaggtgttttatacttttcttcaatcgacacagtatcgccgccagtgatggctttcatcgccgcgacgttctgttcgccaaggacggcacgcggcatttcagacgcgatattcaagcgcctatccgcaagcgccgcaatggaaaagcggtttcctttgtgaatgccgacgtgcgaaactgcagacggctcaaaaaaggacgcgagcaggtttgcaaaaacgcttttacccgaatcaccctcgccctgcaagacgatgaagcgcttcccgcgattatccggtacgagcgcgtagccgaccgcctgccagatccgctttgtaaggatcggatcgccgccactgatctgagccacgaagccgtcaaaagtcgggcaaggctgcgctccgcaccaatcaacagaaatgaagctggtaaagaaaaacgcgggggacgggtcggaaagtctcagcgtgtcgaggtcgagaagaccatttttgacacataagaaatgcgaatcagacgcttcgagcgggatgtcttcaatgttcggttccgccttcaaaatcgccgagacgcctgcgagctggctggcgctaccattttcgccgagctcactgcgaagattgccgagaatcagagacgagagctgattgtcggtcagacggtggaaacaggggtgctgccaagcgtagatggtctcgccgcagcgcttgagccacacgcgggacagcaagattttggcgagttcgacatgcgacactccgccgccagcgaagcgacgctcgtagcggtggaaggttccgtctctgcttccctgattgcgctgtccttgatacggcatcagcgggttaccatagggaagtagaatggggcggttggcaagcccgagctcttccttatattgtgcacgcaggtcgtcagcggctatcacgaccgctgcctcttctgccgacgcgaaaaaggtcatggcgggcttgccacctgtttttcctgcctctacgcgtgcgcgctgctctgctgcgttttcgatgcttgccgccgccgcgatgagcttggcttcattgccctcaacgtagaaaatatccattctgttatcctcctcgaaaagtttggtgcgaggatcataccacgtggtgagagactttcctattgacagagacaccgacaaattttttattgaaccgaggtttttcgatggagaaaaaagatgctcgtcgcaagcgaagagcggaggaggatcttcttccgctgcttcagaaacggcgaaacgaatttttaagttatgcctacgttggggatccggaggtaatgatgtcgttatttccgaattgcgattttgaaagagagcccgactatttcgatagaattcaggcttctgtgttcaacgatccaaaggtcatcaaagactatggcataaagctcaaagaactgcgtaccaaaatgaactgtaccttacagtgtgtcgctgactatattgggattgactatcaggctctctttgaaattgaaaagggaaaacgcaagaaaatcgaccgcagccgtctccttttgctgtgcgctttctatcagcgtccgccagaagttttgctgggattatcagacgatatgaaagagccgatgcagttcttcagtagttcatctcgagatcgcgcattttatattgtaaatcacatggcagcacttgatcgtgtaagagagatggatattgccctacttatgcagttttttcggctgtccgagagcgaacgcggagttcagcaaaagatggttgccgttttcagaaatgcaccggctttcaagattttatcttataccgatgcgacaaagaaagcggcgacagcattctcaaagaagtcatcggttcccactgatgacatgatccgcgtgaataaggcgtgcggttatgcgcttttcgaggacatggataaagtcttccctgatttgattgatatcttcatttcgatcacagcgagcgactataagacgcggcgtttggcgttgctgcttctccaagtagcgggattctgtgacaatgaaattccgcactgttagcgcctttggctaacttgcacaaaaaatttttattgaaatgactttttttgagggggggtaatttctccaaatccatcctcaaaagagtctacgcacttcgcaggtcgtctcacctcccgttccacgttctgcgttccaccctcaaaaacccttattttccttgatagaaaaagaaaaacgggggagaacactggaacggaggaacagaaaaatgcatttaccccgcgaggggtgaggttgagcgccgcagcgcgaaggagaggggacaaggctcgaagccgcgcaacgcgtcggctttgggcctgcggaatgttccctctccttatcccctctgtcgtgctattttttcttccctcgcagcgcactcttgccgccgcgcacaaggaggtagacgtttccaccgagtacgcaccctgccgcgaagtcgtagatcggtgtcccaaccacagcccaaaaaatcggcatggttcactcctttcggatagctgcgcagattccctccgcaacaaataaaacaaacagcgtcaaaaccattcctgccgcaacaaagctcatatccatggggatcctcctcaatttcttctgccgccacgggcgttgcaatgcgctttgtggcggtatttttctttgtgtacgataacagcgcaagtaaagtcgacactgtttccacgtgcacgatattttacttttgatcttgtctttctcgccattttcaatttcctcctttttaagtgaagctcaacaaatagaagagctttgacaaggaaaactccttgctaaacttggcaagttcttcttctgttagggatgtgaagtgttcactgtttgccggtgcaccgcacagaaaaaatgtcccttgcacaacgtcatatatttcgcccgtttcagggttgactaatggccggttggtcggcaaattcagcaagcatcccttgtcgttacaaatcaatgcaatgggctcttcgaatggatacacggcgtcgatcagtccaccgacaacactttgcattgcttcgagagaatcgtcaatctcggcgggataaggctcagagccaggttcaacgatcaagattcgcataggattcctccataaataaagatagcgccgcgggcagatccgcagcgcctcataacaataatatatagttgagatagagcaccgtctcgaataaaaagaccacttccgtctatgtcacggaagtggtcattctttttctatgccgagcagccaatctgttgatacatttaatgcttccgcaatgataggaagctcaaagtcaggaacaaggcgtttaccgctttcaattctgctgattgccatttggcccatttgcaggcccgctacttgcagccttgccgcaagctgatcctgtgtcaattttgctttggtgcgtgcagacttaatccgctcgccagagatattgcatttgccgtctaacgtgtatagccgcaccgtgtcgtcctctcatgatcatctttgacatattctttgttgacagtaccacaaatatgagctattcttataaaaaagatgattaaagagaccgagaatacttcattttttgaggagagggaaaaccatgaaatgtaagcactgcggagctgacaacttcaacgaatccaagttctgttttcaatgcggtcaagaactgagctcggacgatgtacagcattcagaagatccccctgttgatccgacacatcctatttgcaaaaattgcggtgcgagtaacacggcagatgcaaaattctgtcatcagtgtggacaagagttatcttccaaggccgaagatcccgagcagaagtcagacgacgatttaggaaaagatgcgcttgcatttggggcgggactcttggatgaatctgctgcgaagactcgtaacgatacggtttgccccttttgcggggaacctgcttgccaccctctgcaaaagaacgaaactaccgttacgaacaaaagctatggttggggaagcggttgctgcggtatgctcctgcttgggccgtttggactgttgtgcgggttgtgcggtaaaggctctaaagtggaatcaaaaagtgaattgtggtgggtgtgcaaaaaatgcggaaaagctcatatcgcccttgttgatgcgttaaaaaagtgggaaattgcaactgatggaatctatggaagtgcggttgccgctgcgattgtattgattgttgcaaagtacctatttagttttggtatccttgcgtatattatggcggcggttcccgcgctcgggcttgccactgttcatagcgagatatcaaaggaactgggagaacctttaatcaacttcctgacgcctgaacagaagaaggactgcttatcctctattgcaatcgctaccgtgatcgtgatagcgctcggcctgttcggagtcccactgttaaattcttggcttggtgactgaacgtgagcagtaagttctaccattcctgcatgagtttcggaaaacatgcaggatgccaccagcgtccagaccggagtttttttatcaacgggcatcaattccctgtatgtgctcgctgtaccggcgtgttgatcgggcagtgcagcgcgttgatcctgtacagaatactatctttacctgctgtgatcttagtcagtttttgtgccgtcatgtttcttgactggcttctgcaatacttagatattctggaatctactaactggcgcagactaattacaggcacattttgcgggtatgcgttatgcacattcttcttgcggttgcttgtccgctgcaagtcctttatctcacatcaaaatataatttaggagaagctatcatgtattgtttcaaatgcggtgctaaagtctctgatggagctaagttctgttcttcttgtggtgctcagttaatcgatgatccctctgctaaagagcctgctatccctgaagagatcaggtctgagccatctgttgctcctgattctaaaatgactcaggtagaagaagtatcagaagacactaaagtgcaaggcacaagtgaagaacttcctaagaagaaatcaacggtcaagagcatcattgagctggttcttggtgctgttattcttgtagcatttcttctgagtgcaactggtgttctcgataagcagttgtccggcaagattggtagttatgtcatgttctttgaagataatggttcctatactattggtgatgacgatggcaatgatatcattgctatgacctttggtagaggctacaacattgaatggacaaccttgaatgataatgtgactcatactggtgagtataagtgcactagtaaagatggtgaagagtatacattcatggttaaggaaaggggcctattctataaagaattcatgactatcgatggtacagaaggtgatcaattccgttatcgctatattactatggctgatggcatgcagggtacaatgtttaacgataattatgagggcctcatgtttgatgagcagtacagtagcgagtatacatctgctgatggacttcctgaatattatgatggcacaggtattgcagcttatgattcaatcatttacaattatagcactctgattaactgggttaataaagagcctactattagcgattggcaatctaccgattatgtaaatgcatatgcttataatttcagtcctgaagaacttggctattatgtcatggatttgaatggtgatggaattgaagagcttgtaatctttgctcagtatattgatactcctcttcagatctggaccacctataataatggcagtgatgcggcgttactattctatgagacaagccatgatcatattcttcttggagatggagttattgctacatttagcggtactaatcgtactgtaaatgatagtggaatctttaatgtttggcaaattgaatatgcaagtactcagtgcacgattgttggtgatgatctttctaagtataatcagattgaggttcctgaagacatcatttatcagttttaagaaaggtagtaaatatcatggtgtatcctatcattgcttccgataaatttgtatatcgtagtaaacgttgatataactatatgaaagtcgatgtaattgtttattaaatacagaaccaaagcgtcctcagattcccacatttttccctttaattttccctttagagtctgccagtcggtaacatcaagaggcatgaattgacacttgatcccttgaaaagcgcatgtcacagcacaaaaaaataaggggtatcacaccccgttttgcctatcgacgagttcgaatctcgccactccgaccaaagggcaagtccttataggacttgcctttttttattgccggagtctttccgttgcacggaactgtgcatcttccgctatcctttcctcctactcgtagaaggacttattccttactacattgcaggaggttccatatgactgaagaaaactacatctaccgaacgagtcaggcgctgcttcgcaatcaatttcccggaaaaggaaagttaaaaatccctgtcattcccaagtttcaagagaaccccggagactttgatgatctcttattgattggatttgacaagacccatctggaagatcaaaatcaccttgaccgtatggttcatttcttcctttacgattatcgcttcgaacgggtgtggaagaaccccgacaacgacatcgagaagttgtcccgctaccgggcggtactgtcacccgatttcagtatgtatctagaaatggctcccgtgatgcagctttacaatgtatttcgcaaccgctggtgcggcgcatactgggcatcgaaaggaatccgtgttgttcccacggtaaactggggcgatgaatccacctttgatttctgctttgagggaattgaaaaaggaagcgttgttgctgtttccacctatatggcatctgagcatgataaccgctgcgaccagaaagaatggttcatggccggctataacgaaatgctgcggcgtattgagccggagaaaatcatctgctacaacacgccttttccggagatgcagggcaatatcgtgtatgtggattatgagcgcagctcgtggaaatatatgagctatgagagaaattataaggcagaagatctcgacgctttcaaaattggcgagacatatcgacctgaatgtgatacaatagagccatacttgatcggcggcacttataagggcggcggcagcgcctatggcggaaagtggaagccctctaagccggatgatgaacgttttttaggtgaacccggcagcatcaaccgcacagctgatcgtaacggggatttaagagaaactaagattggcgcagacggtagggcagtcaaggaacggcattactcaaatcacggcaatcccaaacagcactctattcctcacgatcataacattgtatgggaaggtaaccgaccaaactggggcaaagcagaaaactattggggcggagatattcctgatttcaagtcatattggaggtgtggcatgccctatcgcattttaaaatccaaaaactcattggaagataaccgttttaaatcgatcagcgattttaagtggtgtatgaaatgtggcggagaagtagaaattgaatggaacggcattcattatggcgttattcgatatggaacagatgacaaaatcacaatttatgtttggaattgtcccgagacggaatgctgctttaacaccgctgatgatgcacttgagtacatggtcggttccgatcgtctgcgtgatgtgatcacacaggtcactgtgcttgaccgttcaatttaggatgaatacctcttgctgaccaccagcaaaccattgatatatctgtattttctgagatcctataattacactcggaccatgcagagtgtccttataggatctgagtatcctgtaatggacactctgcttttttatttcccacaaagttcatactgcaacctgttccggggcgtagctgagtgctacgccttttcttgtttccatgataatgtcggcctccgggatcttccggcgatccggcacatcgaaggcaccaatgcagttatagcccagcttgcggaaggcggctgtgccggtgtagccctggagactgagcgcccagaacgcctccttaaaagcgagggtgtaggatatgctgtctgccgtcacccgcagcgtgtaggggtttgcctgcagatgcttcagttcctctggtgtgaatttcttcttcgtgcccatacagcacctccgttcggtagttctatcataacacaggtgcggcgcttctgaccctatgggtcaaatgcgtgtccgccgaacggggccatgggtcaaaatctcgtgtccattttcttgggtacagtttattccccgtgtgggtctcggtgtgggtcaaaccacttttagaatacgaacgaggggcgtacctctgacaacggcaaaccgagcctctgcgccctatcccgctcataggtgacgcgtgtcacttcctcaataaagtctttctctttcggcgtggcgctcgcccatcgcacactatatttgcggcacagttgaaagaatatctcataaaaacgttcttcctccgcatccttgcggcaatagctaagtatgcgtatatgtacgacgtgctcaacaacgagagcatcgccgcgatgatcaacaaggtcgcggaggacctcggcggcatctacggcctcgtcaatcattgccccggcccgaaggccggcaccttcgaggcgctgaccgaggccgactgggcagacggctatcagaagtgcctgtacagctacaccaccgccatctgtgcggcgcttccgtacatgaagaagggcggcagcggacgcatcgtgaactccacctcgtcctccattaagcaggagctcgataacctcattctctccaataccttccgcatgggtgtggtcggcatgagcaagacgatggcgcgcgagttcggtccgtacaacatcatggtcaacacgatgggccccggccgtatctacaccgaccgcatcaagtacctcaacaccatccgcgccgagaaggcgggcatcacgctcgaggagtacaacacccgcgacgccgcgagcttcccgcagaagcgctaccagacggcggacgagtacgcccgctccgtggtgttcatctgctcgcccgcgaacagcgcgatctccggtcaggtcatctgcgtcgacggcgccatgaccaccgcgtactaaaccgataaacgcaaaaagaaaacaagcggaggctgtctcgctgacagcctccgctttttcgtatacagcggatcggtcgtaaccgtcaaggcgggagcggtgtgagctgctcccgccttgcctgcaaaataacagcagcttatgggcgtgtcaagggcggggataaaaagccactaccacagccctttcaaaccttgtacactggaaagtggataatgtacaataacggacctgttacagcatcctcattttcgttccaaaaacgcaccgctgtaccaatcaaagaagctgtcgcagcctttcttctgtattttcagtcgcctttagcggttttcttgattttaattcttttcctaacatcttgcggcccgagtttccactgtgttctacacatgcctacggcattttatgtggtcaaagacaaagtctcgccaaagctgctccggcaaaggacttatcgttccttgatacccaaatccaacctgtgaaatcgcattttgcaagacagaatcatactgctgttgtgacaactaagaccatgtattattattcttgctttttccggcggtatcctgtaaaatgacatcatcaagggagaggagagcagacatttttgaaagagcgcttccattgatcaaattggaacgccgtttgctcgaaaaaccctgtagaccaactataaaaaggagggtatttcagtatgtacaaggtagatctcaacagcgacctcggcgagagcttcggcgcgtataccatcgggctcgacaacgaggtcatcgcgcatgtttcctctgtcaatgtggcctgtggctatcacgcaggagatccgttggtgatggaaaagaccgttgccgcagccaaggcggcaggcgtcgccgtcggcgcacacccgggcttccccgatctgatgggctttggccgcaggaacatggtcgtctcgcccaaggaggtcaaggcgtatgtcaagtatcagctcggcgcgctgatggccttcgctgcggcagagggtatcaggctccagcactgcaagccccacggcgctctctacaacatggctggtaaagacatggatctggcgcttgccatcgccgaggcgattgccgaggtagacgagagcattatcctgcttggccttgccaacagcaagatgattgatgcaggcaagcagttgggcttgcgcgtcgcaaacgaggtctttgccgaccgcgcctatcaggccgacggctcgcttgtgccgcgcaagctgcccggcgccgtcatccacgataaggacgaggccatcgcgcgcaccgtccgcatggtcaccgagggcaaggtcacggccatcaccggcgaggaggtcgaaatcgcggctcactccatctgtgtccacggtgacaacccttcggccgtcgaattcgtcaaaaatatccgcacgcagctcaccgcccgtggcgtggagattgcccccatccgcgagatcgtataaaaagagcctcgtttccagctgttccgttccgcaaagaccaacaccccaaatctgccgcactgcggcaatattccaggaggatgatcatgagtaacgaaaccacccagaagcgctcactgtccgtcagccttggcgcggcctttctgatggcgacatccgccatcggccccggctttctgacccagacctcgcaattcaccgcaaagtatctttcttctttcgctttcgtcatcgtctgcgtcatcatcatggatatgatcgcgcagaccaatgtatggtccatcgtcggcgtttccggcctgcgcggtcaggagattgccaataaggtccttcccggtctcgggtatcttcttgtcgtgcttgttgtgcttggcggtcttgcgttcaatatcggcaatgtcggcggcgtgtcactcggcttcaatgccatgatcggcattcccgaaaaggcaggcgtcatcatcggcggcgtgcttgcgatctgcattttcctttccaagaaggcaaacgacatcgtcggcaaggtcgcccagatcctcggcggcatcattatcgtcgtcatgctggtcgtggcttttatggccaagccccccgtcggcgatgcggtcgtccatatctttacccctgagaatcccaaggaactcattcccgtcatggtcacgctgctcggcggctcctgcggcgggtacatcaccttctccggcgcacacaagctgctcgatgcggggtggggcggcaagccggaggaagtcaagcacttccgcaagtccgtcctgaccggcatctgtgtctcgagcagcgttcgtatcctgctgttcctgtgcgtgctcggtgtctgcacggccggtacggtcgttgtggctgaaaatgtcgcggctgtcactggcgctgccaaccccgcagccgaggctttccgccttgctgccggcgacatcggctaccgtctcttcggtctcgcgctgttctccgccggtatcacctccgtcatcggcgcggcctacacctccgtctcctttctcaagaccgttcaccccttcatcgccaagaacgacaagtggttcatcgtcggtttcatcgctttctccacgcttgttatggcgatcctcggcggcgcgaagcgcatggtcatcctggccggtgctctcaacggtctgatcctgccgatctccctgtgctgtatgctgctcggctgccacaagaagtccattgtcggcgagtacaagcaccccgtgtggctgcagatccttggctggtgcgtggtcggtgtcgcaggctaccttgccgtcacggcgctgcccaaccttgccaagctcttcgcgtaacgaacctgcaccattccgcgagccggtctgtcccacaggccggctccgcctgaaaggagaacgatatgtccgacatcagattcctgctcagcggtgactcagccgtaaccgtggaattcggcaacgagatcagtgagcacatcaacgcgcagattcgtgcgttcagcatcgcgctcaccgagagcaaactccccgggatcgtggagctcgtgccgacctaccgctcgctgatggttcactacgaccctgaggtcatcccctacggtgtgcttgtcaaaaaactcaagggcctgctcaatcagcttgaccacatccggattccgccaagcgatgtgttggaaatccccgtgctctacggcggggaggaaatgggccccgaccttggctttgtcgccgagcacaatcacaaaacgcctgacgaggtcatccggattcacacctccacggaatatctcatctatatgctgggctttacccccggtttcacctatcttggcggtatgagcgaggaaattgccgcgccgcgccttgcccaacctcgtgtcaggattcccgccggcagcgtcggcatcgccggcagccagacgggcgtatatcccatcgactccccgggcggctggcagcttatcggccgcacgcccgtgcgcatgtacgaccctgaccgcgccgttcccatcctgcccaaggcaggccagtacatcaagttctacgccatcgatcaggcggaatttgaccgtatcgccgcgctggaggcctccagcggctatacggttcacacctacccgagaaaggaggcggagcaggcatgagcatcaccattctcaaccctggcatgctcaccagcgtgcaggatctcggccgcatcggctaccagcagttcggcgtgtccgtctccggcgtgatggatccgcgcagcgcgtccatcgccaacattctcgtcggcaacgacgagagcgaggccgtactcgaatgtaccatgatgggtccccatatccgctttgatgcgcccaacatcatcgcaatcaccggcggcgaccttggcgcgacgcttgacggtcagcgtatcgatacctaccgcgccattcccgtcaatgcgggccagacgctgcgcttcaccatgctgcgcaccggctgccgcgcgtttgtagcctttgcgggcggactcgatattcccgtagttatgggcagccgctcaacgaatataaaagcaaagatcggcggctatcagggccgcaagctgcaaaaggatgacgtcatcggcttccgcgcgcccaagaccgacctcaagaacctcggcttgcgccacacctcgcccgagttcatgccgcgcgcagaatataagctgcgcatcgtactcggcccgcaggacgatgcgttcaccgagcgtggcatcacgacctttctcagcagcgtttacactctcacgccggagtttgaccgcatgggctgccgtcttgatggcgagttgatcgaacacgttaaaagcggcgacatcatctccgacggcatcgcctttggcgccgtccaggtgccatcggcgggtaagccgatcatcatgctggccgaccgccagaccaccggcggatatgcaaaaatcgccaacgtcatctccgcagactttcgcattctcgcccagctcaaggctggcgacaaagtgcgcttcgaaaaggtctccatcgccgctgcacaggaggctctgcttgcgcagcgcgctacgctgaactgcctgcgcagcgccatgaatcgttgacgcagccctaaaacgcaaaaaataatagtaataggaggaacgacacatggcctttgatattacaccttatatcgatatgaagccgagcgaggtgcgcaagctcatccgcgagggcgtcatcgacttccccaccgccggtatgtgccgcggctacgcgcaggccaacctcatcatcctgccgccggaatatgcgggagattttgaggaatttgcccggcgcaaccccttcccctgccccattctcgagatcgtccgtggtacgcccgaaacccacgacatgggcgagggcggcaacatttgcaccgacattcccaaataccgcatctaccgcgacggtaagtgggacggcaaggagctgaccgacgtaagcggctactggaaggagggctatgtcggcttcctgattggctgctcgttctcgtttgaggaagcgctcatgcgcgagggcatcgaggtcaggcacatcgcgcagggacgcaatgtgccgatgttcaagaccaatatcatgaccgagccggccggcccgttctgcggtcctatggtctgctccatgcgccccatgacgccggaaaacgccaaaaaggcgtatgacatcaccgtcaaaatgccgaatgtccacggcgcgcccgtccacatgggcgatgccgccgaggtcggcgttgccgatgtgatgaagcctgactacggcgaggcggttgatttctacgagggtgagattcccgtgttctggccctgcggcgtgacgccgcaggcggcggtcgaaaatgcgaaaccgcccattgctatcacccatgccccgggccacatgttcatcacggatatcatcaattccgaactgaacgactttctggaagctaaaaagaatcgctgaattctctcttttccgatcaacgcggtgtcggatcttgacatcgtaccgcttcgcttttcggccgttgtcgttgccgcgcagcgggtcgggagagtgacccggaagctctctcccgaggttctctttgcgctgccggacggcttccgcgccgctgcggtctacacaatgtaagggaaaacattgcctgtattcaggactttggcagacaaaaaggaggatggagctatgagcgcaatgatcatcaaatccagagaagcaaacgatttgaagctgaccgcataccacgggcattttgcgacccgccactctcacaacagccattatctcgacatcacccgcatgaagcatgaatgtgcaatggccaatatcgctgccgcctctcttgccaatcactatgtctatgaaaaggagatcgatacggtcgtctgcctggacggcagcgaggtcatcggtacgtttctcgcccgccagctctctcagaagaatctcttttccctgagcagcgaaaaaaatatctgcgtcgccgcaccggagcacgattccaacggacttctgatcttccgggataatcttcgccccatggtgtctgaaaagaatgtcctgctgctgatctccacggtgaattcgggaaagaccgcggctcgcgcactcgagtgcatcgagtattacggaggcaccacgcagggggtcgcagctgtcttcagcgccttgaagcaggtgggcgacatccccgtgatcagcctgttttccccggaggatatccccggatatgtgaccagtcttgtcaaggattgtcccatgtgcaaggcagggcagaaaattgacgcgctgtccaatagctacggtttttctcccctggcctgatgcctgcggcagcagcttgcttcttcctgccgcaagaatcataaccatcagtatccttcttcttgacaactcttcaaactttctattatattggtaacaggcgaaaaccgaatctcgcagctttccggtgaggtccacaccgtaagtgtggcctcaggcattcatgggccccatagggcattatgaccacccctgtacgcaggatgctccatgaaggtcgacagtttttggcgctgtaccggcagcgcgggtgtgtacccttccgttgaaagcggaaaggacacaaaatgaacgac

SEQ ID NO: 10129 - DNA, 16102 bp, Unknown
  gut microbiota DNA sequence
ttgcttggcggcagactgcgtgcgaaatagcggcattgctggcgctcgccgcattgtggagtgcttcggtagacggtgattactgtgtacttctacaagatgggcagagcggcagcggataatagaagtaggccaaatcgtatagcaacgctaaacgcggcttcgccgcgcgcaggcatttccattccggaggcataaaggtcattcaagcctgagactgccaatctaaacgcctttcttttggacgggcgacgcccgttttctttctcgggaaagaaaatgggggttgcattgcgtgcagcgccgtcggcgctgctttccctccgcgcctgcgcggagtaaaaagggagccgggaaccggctccctttttgtttagcagagtttcgcgccagcaggaattttatcatccaccataataaggttgaggacctcctcacccttctcggtgtggacagcagagagcagcatgccgcagctctcaagccccatcatcttgcgcgggggcaggttgacgatggcgacgagcgtcttgccgacgagctcttcgggcttgtaccacttgtggatgccggagaggatctggcggtcggtgccggtgccgtcgtcgagcgtgaagcgcaggagcttttcgctctttttcacggcctcgcaggccttgaccttgacggcgcggaagtcggacttgcagaacgtgtcgaaatcgaccttttcctcgaccatcggctcaaactccatcgcggggagggcagccttcttctgcgcctcctgaatggcctcgagctcttcgagcgccttctgcgcgtccacgcgcgggaagatggcctcacccttgtggacggtgacggtggcgctcaggctgccccacttcgcggcgctgtcccaatcgcggcagcactcgcacgcgccgatctgcgcgaagatcctctcgcaggaatcggggatgaacggagtgagcagcaccgtgcagatgcggatgctctcgaggagattatacatgacggaagcgaggcggggcttgttggcctcgtccttggcgagcgcccagggtgcggtctcgtcgatatacttgttggcgcgctggatgcacttgaagatcagctcgagcgcgttctggaactggaacttctccatctcggcctcatacttgccgcgcagcgcggagagctgagagatgagctcgtcgtcgagcgcatcggcctgacggctttccggcagcgtgccgccgaaatatttttcgaccatggccgtcgtgcgggagacgaggttgccgaggtcgttggcgaggtcgacattgatggtgttgatgagcagttcattcgagaagttgccgtccgagccgaacgggaacgtgcgcagcaggaagaagcgcagcgcgtccacgccgaagcgctcggcgagcacatacggatcaacgacgttgcccttggacttactcatcttgccaccgtccatgacgagccagccgtggccgtagacgtgcttgggaagcggcatgcccatgctcatgagcatcgcaggccagataatggagtggaagcggacgatctccttgccgacgaagtgaacgtcggcgggccaatacttgtcgtaatcgtcgtacttctcgttcataaagccaagcgccgtgcagtagttgaagagcgcgtcgacccagacgtaaacgacgtgacccgggtcaaagtccacggggatgccccaggtgaagctcgtgcgggagacgcagaggtcttcaaggcccggcttgatgaagttgttgaccatctcgttgacgcgagaggcgggctggagaaagtcggtgtcctcaagcaggtgctgcacgcggtcggcgtacttggaaagcttgaagaagtaggcctcttcctcggcgtcctcgacctcgcggccgcagtcggggcacttgccgtcgacaagctggctctcagtccagaagctctcgcagggcttgcagtacttgcccttgtaggtgcccttgtagatgtcgccgttgtcgtgcatcttcttgaagatcttctggatggcctcgacatggtagtcatccgttgtgcggatgaagcggtcgttcgaaatattcatgagcttccacagatcgaggatgcccttttcgccgcagacgatgttgtcgacgaactgctgcggggtcacgcccgcggccttggccttatcttcgatcttctggccgtgctcgtcggtgccggtcaggaacatgacgtcatagcccgtcaggcgcttgtagcgcgccatcgcgtcggtcgccacggtgcagtaggtgtggccgatgtggagcttgtcggaggggtagtagatgggggtcgtgatatagaatttcttcttgtccattggtgttttcctcttttctgcccgcgccgaatgaaagcggggcgtaattatttacagtctaccaccgaaagggcggtatttgcaaggttttacagaatttttccccaaaagaagaaagcgcggcgccataagcaccgcactttttcgatttgaaagagtaggatcgccgcatttgccgcccccaggcggcaaacaggcataacgcatcgcagattttcgcgtccgcagacgcgaaataaatttcaatcgtaatttgtcgcgacatgtgcgtgacaaattactctttgcgcggagcgcgtgtcgcagccgccctgcgggcggcaaggcacgaagcgcagcgaaactccctcaaaaaagcggctttgccgcttttttgaagttatagcgagtcgtcctcgtcgatccacttttgcaccggaacgatatcaaactcctcctccgtccggcggatcaccacctcgtcgatgccggcgttgatgatcatgcggcggcacatggggcagctcgtcgcgtcgtgcagcagctcgccgctgcgcgcgtcgcggccgactaaatagatcgtcgcgccgaccatgtcgcgccgctgggcggagatgatggcgttcgcctcggcgtggacgctgcggcagagctcgtagcgctcgccgcgcgggaccttgagctgctcgcgcgtgcagtagccgaggtcgacgcagttcttgcgtccgcgcggcgcgccgttgtagccggtggagatgatctcgtcgtttttgacgatgatcgcgccgtagacgcggcgcaggcacgtcgcgcgctcaagcaccgtctgcgcgatgtctaagtagtaattccgcttgctgacacgctccatatcgagtcctccttgtattgatgagaaagaatattacaatttgctatcagaattcgtgctcacagtacgggcagcggccatagtcaaagtcgagcaccgccccgcagacgggacactttttgcgcggcagaccgcccggcgcgtcgggcgggagatagccgaagccggtctttgcctcgtccgccgtacctgcgaatttgtcgctgccgggctggaagaattcgagctttccgcacttgggacagacgtaaatttcgatctccatcgcgcccgcgaagagattcggcaggtcgccgagcacccagccggtctggccgagctggaatttttcacgcctgataaattgcatccccgtgccgcagcgcaggcagttgagcgaattcgccatcctataccccctgtaggtcgaaaacgggcgtgtattcctctttggcgctcgagagctcctgacaaaagccgtcggtcaggccgcagtcgcgcatgtattgcaccgccgtgcggtactcgcgctcatttaagcgccgcgcgagcgcgccggtcgaaccgggctgcggcgtatactggctcatgagcgaaaagagcaccgtctttggcggaaaatgcgtcgagacatagtcgatgacacgcttggtgttctccatctgccccggcaggacgaggtggcgcaaaatgacgccggagcgcatcaggccgtcgtccccaatctgatacgccccgacctgacgcaccatctcgtcgatggccgcggcggcagcttcaaagtagtccggcgcggcggaaagctcgcgcgcggggcgttccatggcgtattttaagtcgggcagatagatctgcaccttaccctcaagcgttctgagcgtttccacgcgctcgtagccgccgctgttccacacaacggggacgggaagcggctgatccagcgcttcgagcacccagggggtgaagtgcgtgggcgtgacaagatcgatgcagtgcgcgccctgcgaaacgaggtcttccatgatctcgcgcagatgtgccggcgtaatgaccttgccgaaattctcgtggctgatgcgcccgttctggcagaacacgcagcccaaattgcagcccgaaaagaagatgcagcccgcgccgtttttcccgctgagcacgggctcttcccacatgtgcagcattgcgcgcgcgacaacgagccccgcgggcatgcggcagacgccgcccgctttctccgccgtgcgctcagcattgcagcgacggggacagatctcgcagcgcatcagtcgcccgtgccctgaccgttgaagtcggggccgaggtcgccgagcatccagtgcttgcggcacaggccgatgtactggtcgttcgcgccgatgacgacctgcgcaccctgcttgacgacatggccctgcgcgtcaaagcgcgcgttgaacgcggcctttttgccgcaccagcagatggttttgacctcttctaacttgtcggccatgacaagcagctcgtagctgccggggaaaaggtcgcccttgaagtcggcgcgcagcccgtagcagaggacggggatgccgcagtcgtcgacgagatggacgaggtataagacctcctcctttgtcaaaaactgcgcctcgtcgacgatgatgcaggcgtttttcttgagctcctcctcgtccatctgccgcatctcgtggaagtagacgcagggatattcgaggccgatgcgcgagtgcaccatgtggtcgccgtcgcgcgtgtcgagctggggcttgcagaggagcgtcttctgcccgcgctcttcgtagttgaagcgcgccatcagcgcgttggccgtcttgctcgagcccatcgcgccgtatttgaagtaaagctgtgccatggtcgttgttctccctctcttattgcagccgcgcgcgaacgagcgcggcaaatttcctgaatgcagtgggaatggcggcggcgtcgaacgccgcggcgtccgcccagaatagatcgtcgttttcgcccgtcacgtcggcgaaatatcccttcatgtcccattcgatatgggtgaagatgtgcttggcactgcccgcgggttcgacagcttgcgccgaaagccccatctgcgcaagcgcaagcgaaacgcccgcctcgtcgaggttctccaaaacgctcgggaattcccagagcgaggcgagaagtcccgtgtccgcgcgctttcgcagcgcggccttgccgttttgaaagagcagcagcaccgtgcgctcttcgatcttgcgcgcctttttcttcgcgcgcacgggtaaaatttccgtgagaccgtttttatacgcctcgcacatcattcgcgcggggcagatctcgcacttcggcgcgccgttcggcaggcataccgtcgcgccgaggtccatcatcgcctgattgtacgcgccggggcgggctaagtcgatggcgtcgttgagatgcgcggtgaattgctttcgcaccttcgcgtccatgatgtcgtcggcgcagccgctgacgcgcgcggcgacgcgcagcagattcccatccaccgcggcgaccggctcgccgaagttgatcgaggcgatggcggcggcggtgtagtcgccgatgccggggagcgttttgagacttgcacaagtgcgcggcaactcgccgccaaagtccgagacgatgacctttgccgccttttgcagattccgcgcccgcgagtagtagccgagcccctcccagagcttcaagagccgttcctccggcacggtggctaacgccgcggcgtcgggcagctctgccataaagcgctcaaagtacgggatgaccgcgctcacgcgcgtctgctggagcatgatctccgagacccacgtgcggtacggcgtgacgacgctgcgccatggcagcgtgcggccgtttaagtcataccatgtgagcagcggcgcggtcagggcagttaagttttcccaatgttctgtcatcatatcatttgttgaagcgcgcggcgaagccgcagcggcggcagagctcttcggcgggcttccgccgggagaaaccctcgcgcagagtgcacgcgcgcggggaggtcagaatttcggtaagcggctgggtgaagaggttccccagcgccacatcgccctcatgatcgaggcagcagggcacgaccgtgccgtcgacaagcacgccgagctggtcgcgcaggccgtagcagaactgtgcgccggattcgccggcgctcagatcaggccagtcgaatttgcccgcgcgctccaaatacaggtggtcgcgcagaagaaagctgccgtttcgcatctcgggccagtgatcgcctgtgcgggagcgcagaaagtcgagaatttcgccgttgcgctcgtccgcgccgccgtcgttccagaggcgcagcgcgacgatgacgccctttttcgcggccttttcagcaaagttccagacctgtgtcaggtaagaaagctcctgctcgtccgcgccgtcgttgccctcaaaactgtggagcgagacgctgatcttgtgcaggctctcggcggcaagcagctcatcggaacgcttttggagcagcgtgccgttcgtcgtgatgcagatcttcatatcccgcgctttggcgagggcgaagagcgtcgtaagctcagggtgcagcagcggctcgcccatcacatgcaggtagacgtactgcacatacccctcaagccgcgagaggacgaggccaaattcctgtgcgctcatcgtgcgcggctcgcgcctcgtcttggggcagaaggagcaggcgaggttgcagcggtttgtgatctcgacataggcttttttcagcatcgcgcggctcctttcgtgaggtcgggggatagattcaaatattttaacatatccgcgcgattttgcaaagccttttcccttgcgccgcgccgcggcgtctgctataatcctacaagcaaacttccatcctccagagcgaaaggagaaaccgcatgaccgtcacgtttatcgcccacagcgcgtatcttgtcgaatgggacaagttttacacgctctttgactatacctacgagcccgactacacgggcgcgctgccggaattaaaccccgaaaagcccttgctcgtcttcgcgagccacagccacgaggaccacttcgacgccaaggtgttcacacttttggaaaaatatcccgacacgcgctttttcgtctcgcgcgatacgcgcctcaccgagcgcaagcggcaatggctgaacatctccgacgaggcctttgcccgcacgaccgtcctgcggcccgacagcatcctgctcaccgacgtcgcgggcgaggatttaagcatccgcgccattaagtcgacggacatcggcaacgcttaccttctgcgcgctgaggggaagatggtctaccacgggggcgacctcaactggtggaactgggagagcgagggcaaggcttactgcaacaacatgaccgtccactaccatgcggccattgaaaagctcgcctccgccgtgcgcaacgaggcgacggacaacaacatcgcgcccgagatcacggcggcgatggcgccgcttgacccgcgccttggtgaaggcagcgagggcctcggcatcgagtatctgctgaagaatgtgacggtgcagcacatcttcccgatgcacatgtggaaaaagtatgaggtcatcgaccgctgcatcgccgcgcacccggacgaaaagggcatcatcgcgcgcatcacgcgcgacggtcagcaattcgagatttgaaaataaaaaggaaagcgccttccgcatcgcggaaggcgctttcccgttcgaaggggatttgcggagaaaaaacactgacgtattttttactggctcactgccgtgagaggcattttgaggatctgaccgacgaaaatgaccgagggggacttgacggtgtccttattcaggtcatagatctcagtccagcggctgccattgccgagctgcttgctggcgatcttccacaggctgtcgccggagacgacggtgtaggtatcgctgctcgcgggctgggagggcttctcaggctgcgtgggctgggtgggctcggcggaggtgccgttgctcacaagtgtcgtgcgcgggtcgttgcccgtgtagcggtagagcgggaagttcatggtcgacttgtcgtagtcgatctgcttgtactgatagagcgtgccgtcgtagccgttggagtcggtgacgtcgggctcgcaaagcatggcgatgacgttgctggcgacctgatccatcgggaagacataagcgccgctggcgaaggtcacgtcggcggtgtcgcgcaggccggcctcaatgcccttggccttgccgttcaccatgtagtcgccgacatagtagtattgctggaggcttgcggtggtaccggcgttgagcttgtagtactcagcaccctgattgtccatgatgtagaggatcttctcaatgttggcagtgtccgcgggaatgacataggcggtcgggcggacgcggctgcgggtcagagtgtcgttcagggaaaggggagacgccttgctgaccttctcactaccgtcggcgacgctgtactgcacggtcgcggcggtgtagtcggtcagagtcttgccggacttggtctgatagagggcgagaacgtcgctttcctcataggtcttgcccttggcgacaacatcggcacgggcggcggcgaccgccttcataatctcgtcggcgtgctcggcggcataggtgatgtaagaggtggcggcaacttcctgagagaagacgcggcgctcaaaggtctggcggccggcgccgatgccgcgcgtctcaatgaggaaggaaaccgcattgaacaggccgaagtaggcgcggccgatggggttattgacggtggtgccgtagtgattgacgcgcaggccggcgttcgtagcgtcggagaaggcgcgcttggccatgtcgagaccgatcttcgtcacggcggggttgttgttcaggctggtggcgggggtggtctcaagatcgtccgcattctccatgtattcaccggcgctcgtccagtcgtcgttgtaagcgccgtagaaggtgaactcatgcgtgtcgaggacaacctcgctcatgaacaggcggtaggcggtgtgcagttgggcaagctcggctgccttgagggacatatggtcgcggttcatatcaaagccgtcgtaggtggcgcggctgaagagataggagccgtcgggattgatgcgggggacgatgacaatgttgaccttgtcgagcagcgccttgtaggcgggatcgttgacaaagttgtcgatcatcacgagcgcgccttcaccggcggcaggctcgttggggtgaatctgcgcctgataccagacgttcagcttgccgttgcccttgacgatcttggcggcctcggcgagcgtggcgttcgcgggaatctcggaggtggtgaagagtgccagggggaggtcatacttgtagttcggggtcgtaccggcagagtagaggtgcatggtgccggaagcggcgtccatcttcttgaggaaggccatcagttcttcctgagaggtgaactcgttggcggcgtgcttgccgtcgaaggcgggggtggtgtagttctgcggctcgagggcgaagtgcttgttgatctcctcaggccagaagataagcatactgtcgcgggcatccatcttgtaagaatcgggggccttttcgggcttgatggtcggctcgaagccgttgccgccgagcttgccgccgatgacggaaagcttcttcacgccggcggtgaggtcggcctcggtcacgttgaagagctggagaatgttgtagtagccggtgccgtgcacatggtaggcataggtgccgggagcggtgacgacgtagctgccgtcagcctgcggggtgatcgcttcgagctgggagaagatctcttcttccttggcatagctgtctgcggggtagcccttgtagacttcgagactgacgaccttggaggagtcgtagttggcggaatagtcaaattccagttttgcgcttttctctgctgcgagcgtgctggtcatcagcatcgtgacgaccatcgcgagagtcagcagacagctcagggatcgctgcatcatttttctcatagcttctttctccttcttaaaaactgtcggcatcggaacatcatgcacaaacggaagaaaatttacccgttgattcctgttgacaataccgatttggataagtaaactgtaactattaaagtcgcctttaagtcaataggttttcgcgcggtcatcttaacagttttttaaggagattttcgtatgccttatacaatcggagaagtggcacgcatgatgaatattgccccatcgaccctgcgctactatgaaaaggaggggctgctgtctctcggtgtgcgcgccagcaatgggcagcgaacgtacacagacgacgatattgcaacgctttcaatcatcgagtacctgaaattctgcggtcttccgctcaaggagattcgctcgttcctgccgctcatccggcccggcggagagacactcagcgcccgccgcgacatccttgccaaagagcgcgacaacgtccgcgcgcagatcgcggcgctgcaaacgaagctcgaacgtctggaattcggctgctggttctacgagaccgcgcagcagtacggttcggttctgccgctgtatgaattttcagaggagcactttcctccggaacatcgcaacgccctgcgggagagctttcacctgccattgacgcacgtgcgcacaaagctcgaatggtgataaaaaagggagccctgagacataccgtctcagggctccctatatgtcgatccttatttctttttgtccgctgtgccccacgggtggcactggtaggactgctcctcgctcatgccgaagtagcgcaggtccgtgcgcccgtactggtcgccccaggtgacgtcgatgtggtactgcgtgccgtccagcgtcgcgagcgtccagatgtggctgtcgttaaaaagcgaggtacactcgatgccctcgagcttcaagagcagattgtaagcgcccgtgtagccgtcgcacacggcatggccgctgacaagcgcgccgtaggcaagatggctcgcggaatcgtctgcggcggcgttatcgtagcggcagtggtcgcacagccattgaaaatacgtgcgcgcgatctcatactggctcatgtcgtagctcagcgtgccgctctcccaaagggagtcgtggaccttgatcgcggcggcgagcgccttggcgcggtacgattcgagcgttttgtccgtacaggcggtggacgaaaacgtgagtacgaccttgcccgtcgaatacgagcggcaggagacggcgttgtacatctgctcgcagtatgttttgacgcaggaggtgaacgcctgcgtcagcgcgctggcggtggcggtggtgagggccttggagtagttcagcgtgatcgtgtgctcgccgcgcgcgagcatattgcgaaccaaaccgtcgatgacggcggtgtccttggcagacgtcgggagcgacgtgcttgccggcgctttgacaaggctcgcgagcgtcgcgtttttcacggagtgatacggtgcgaccgtccacgtgagcgtcaggcgcgtttcaggtttgacaacgcgcgtcagaagcgccgcgatctccgcgcggctgacgctgcggtcgggataaaagctgccctttgcgtccatgccggagagcagcccgcggcggtacatcagcagtatttcgctgcggtagggcgttttgtccgtcacgtcggcgatgtagtcgcggctcgagtaggccgaggtgacgagcgaggcgttgggctcggtgtaccattcctccggcacggcgaaggcgaaaatgcccgccatctgcgcgcgcgacgcgggcaggaggtagaagccctcaaagctgttgtcgagcaaattctggctcttcaaatacgagacatacggcgcataccacgcctcgttttccttcgcggcggggatgactgcgtcgctgccggtcgtgtagatggcgcgcagccgcgcggcgatggtcaaaagctcggcgatcgtcacgttgccgcttggcgcaaaggaactctcgccgcggccgttgagtaagccgtattcataggccgagacgaccgagggggcgaaccagtcgccgtctttcacgtcggcaaactggccttcgtagacgcgaagcagcacgaacggggcgctgtcgtctgtcgtcgtttcctcctgtgcgggagcggcagtgtcctgcgcgggctcctcgctgtaagcaaaggcgctgatgctcagcgcaagcgcgagcgccgcgacaagcagcgcaaagcggaacttcatggcgtttgctctctctttctcacattctcaaaatttcacggggatcacgggactaaaatgttctgttcgtctgcggtgatgtcggcgacataggggttgagcatcgaattcgtcatctcgagcacctgctcgggatagagcgtgtagaaggacttgccattgtaccagcccgcgccgtcgccggggagcgtggcaaagctgatggcgtccgtcccgcccatggagagcgcctggttggcgagccacacgaggttgccgagcgtcaggtcggtcttgacatattttaagaacgtttccgccatcgcggggacattttcgagcttcatcagcttctgcgccacggtcttcaaaaacgcctgctgcgtgccgatgcggccgatatcctgccgcccgccgtagccggggttatccttgtcggagttgtggcggaagcgcacgacctccatagactgctgaccgctgagatgctgcaatccctttttgaagtgaatgtgcagatcctgataggggtcgtcgtagtccatgtcctcgggcacgtcgaagtcgacgccgccgatctggtcgatgagcgcgatgaaccccttcaggtcgacggagacgtagaagtccacgggaacgccgagcatatcttcaatgttgctgcgcagcttttccgtgccgccgttattgtaggaggaattgagcttgtggccgttgctcatcagcgtgtcgcgcggcaggctgacgacgtcgatcttcttgttctccgcgtcaaagcgcacgagcatgttcgtgtcgctgccgccggcgtcgttgtccacaccgtaggcgaggatcgtatagcagtattttttgcgctctttgccgttagaaatggtttgaatggcgtcgctgtcctccgccgtgccgtcctgctgcgtctgctggtcttcaccgtccgtgacgggctcgggcgcgcgcacgacgtacttgaccgtcgccacgacggccacggtcaggaaaagaagcgacagaagcgtcacgaccgcgcgctcgccgcggctgccggactttttctttttctgctttttggtatttttgctgcggcgcggcacgtcgtcaaagtcgggctcgtaatagtcctgttttctcatcttgttgctccgatcatttttcttttggtttacaataatgcattctaccctgcgcggcggaattgtgcaagagaaattttgccgcgcggagggcgcactcttatgttagacgcaaaaagtcgaaaaaagtttcaaaatcccttgtatttttttcgcgtggccatgccgccgcggatgtgacgctgggccttgttgacctccagcacctccttgacctgcaagtataggctgcggttgaactgcggcaggcggtcctgtaagtccttgtgcacggtggacttgctcacgccgaacttttttgccgcggcgcgcacggtggcgcggttttcgatgatgtaggcggccagcgcgcaggcgcgctcttccatgttacccttcatgcagcacactcctgactcatgttgctccatctatatgcgtgtagagagggaatatgcgcatcgggaatgaatacgcggcaaaaacgttgtgcaaagcggttcaggcatgttataatttctctgtctgcaccgaagacggcacaaacgaaacgacagggaggtcctgcatggaaaataaactcatccgcagcaaatactttttatacctgaccgaattttttgccggtatgtccgtcatggcggtcgagctcggtgcgagcaggctcatggccccgtatttcagctcgtcgcagatcgtgtggaccgttatcatcggcgtcattatgatcgcgatggccatcggcaacgtctggggcggcaagctcgccgacaggagcgcgacgcccgataagctctaccgccgcctcatcatcgcggccatctggatcgcgctcatcccgtttgtgggacggtacctgatcgcgggcatctcgctgctgctggcgctttttgtgacgaaaaacttcctcgtctgggcggcgctcgcggcgtgccttgtgatcttcgcgttcccgtgcgtgctgctcggcaccgtcacgccgtcgctcacgcgcttcacggtcgacaatctcgacgacacaggcaagaccgtgggcaggctcaacgcgctcaacaccatcggcagcatcatcggaaccttcgtgccgacgtttgtgacgatccccgccgtcggcacggcggcaacgtttttgatcttctccggtgtgctcgcggccatcggcatcgcgtacttcgtgttcgagaagaaaaagagcgtgccggggatcgtctccgtccttttgatcgctggactgtgctttgccctgccgtcttacagcttcgccttctggcagagcgacatcacgcttgaggacgagtccatctacaactatttgcaggtgcaggacgacgcgaagcgcacgacgctctcgacgaacgtgctcttcggtgtgcagagcgtgcaggtcaagggcgacgcgctgacgggcatgtactatgactacgcgctcgccgcgccctgcatggcgggcatggacggcacggacaacgaaaaccgcagcgtgatgatcctcggcatgggctctggcacgtacgcgagctactgcacgcgctatttccccggcgcgagtgtgcagggcgcggagatcgacaaaaaaattgccggcatcgcgacggactacttcggacttccaggcagcgtgaccgtcgcggtcgaggacgggcgcgcgtaccttgccgcgtcgaaggagaagtttgacgtcatcatggtggacgcctatcaggatatcaccatcccgttccagctctcgagcgtcgagtttttcaatgaagtgcgctctcatttgaagccgaacggcgtgatggtcgtgaacctcaacatgacgtccgcggaggacggctcgatcaacgaatacctctgcgacacgatggcgagtgtcttccggcacaccgtcaccgcgccggtgaggggcaacacgaataccgaggtcttctgcacgaacgcggatgactgggagaagacgttcctgtgcagcatcgcaaagctcaaggacagcgactatgccgatatgatgcgcacggtctgctcgaagctcacgccctatgagggcggaagctgcatcctgacggacgacaaggcccctgtcgaggtgctgggcatgcgcgtgctcgacgagctcatcggcgatgagctcaactactacaaagacgaactgagaaccggcggcctgtccgcactgatcggaaattgaaaacaaaaagaatcccgcgcccgcggcgcggaattcttttcagggtagagagcctcgcagagtttttacccgcaaggggtacgcagcatccgtaaggcagcaaagctgccaacggctgcccaggtgccgcgcacggcacgaaacaaattcaaatcggttttccgccgcgacatgtgcgccctccagaggggcttctcttgcccgctgcggggcaattcaccttctggcagaaagctctttgcgcaaagtggaaaccggcgaagtgccgccagcggcggaaacagcaagtcggtttcgaggaagcggcacgattggcgcgcctgcaagggcgcgggaatcgtagtgccgcaacggtgtaa

SEQ ID NO: 10130 - DNA, 36921 bp, Unknown
  gut microbiota DNA sequence
cgcatgttttcttatgcggagtcggccaaaggcggcgctttttcgcgcccttttttttcaacgttcacaatttgtttattgacattgcaaaggaaacaactataatgatgacgttctaaaattagaagattatcattggatgacgatgaacgatcgcgtcgccgtccgagggtaacggaaaggagccgacatgataccgaaagggcccgtaccgggaagaacgatcttcagccacgccaacaagatgacacaggcatatcacattatgttaactccactgtgcaaggagaccggcctgccgccgttagcgatggatattctgctctttctcgccaacaatcccgagcacaacacggcgaaggacatctgccgcatgcgcgggcacaaatcgggtatcgtctccgtgcacgtggaaagactggtgaatgacggccttcttgagcggcgggagatgccgggcgaccggcggcagacgcggcttatctgcaccgaacaggcgcaagcgctcattgagcgcggacggcaggtgcagtggcagttcggaagacgtctgctcgagggcatcccggaggaggatctggcgacgatgcgccgctgccttgaaagaatggatggcaatctgaacggcatctgcaaggaaaagcgctgagggcccaaagaagaaatcaggagaacaacaatgctgaaattactcaaaaacatgcgccgtaaagaggtgctcatggtgctgctgtgcaccgtgcttgtggcggtgcaggtctactttgacctgcggctgccggattacatgaccgatctgacgacgctcatcaaaacgtcgggggcgacggcggatatcctgtccgtcggcgtgaaaatgcttggctgcacgctcgcaagcgccgtgctggccgtgggctgcgggtatctcgcggctaaggcggcgtcgggcttcagcttcacggtgcgcgaaaagctcttccgccacgtgatggacatcggcagcgaggagatgcaggacttttccgtcgccagcctcatcacgagaacgacgaacgacatcacgcaaattcagatgatcgtggcgatgggcctgcagatgatgatcaaatcgccgatcatggccgtgtgggccatcatcaaaattctcggcaagagctgggagctctccgccgtgacagcggcattcgtcgtggtcatctgcgtgacggtgataacggtgatgagcatctgcatcccgcgtttccgcatcgtgcagaagctgaccgaccagatcaaccgtgtggcgcgcgaaaacctgacgggcatcaacgtggtgcacgcgttcaacgccgagcagtaccagaacgacaagttcaacaagccgagccttgacatgatgaatgtgcaggtaaagaaccagaagctcttcgccctcgtccagccgacgatgatgctcggcatgaacggcctggcgctcacgatctactggctgggtgcggcgctcgtcaacaacatcgcgctgaccgattccgcagcgcgcctcacgatgttcagcgacgtgctggtgttcagcacgtatgcaacctacgtggtgatgtcttttatgatgctcgtgatgatcttcatgctgctgccgcaggcgcaggtctcggccgagcgtatcaacgaggtgctcgagcgcaaggcgaatatccgtgagggcagcgtgagcgaatgcaaagagcacggcacagtggagttcaaaaacgtttcgttccgctatccgcacacttcggaggatgagctttcgaacatcagcttccgtgtgaacaagggcgagacgcttgccgtcatcggcgcgacgggcagcggcaagacgacacttgtgagcctgatcccgcgcttttacgacgcgacggagggcgaggtgcttgtcgacggcgtgaacgtcagggattacacgttcaacacactctacaacaagctcggctacgtgacgcagaaggcggtgctcttcgccggcagcatccgcgacaatgtctactttggcgagagcgaagcgccggcggacgatgagggccttgcgcaggccgtcgagctttcgcaggcgaaggagtttgtcgacaagctcccagacggcacgcagcaccatgtggcgcagatgggccgcaacatgtccggcggccagaagcagcgcctttccatcgctcgcgcgctggcgagaaaaccggagatcctcgtcttcgacgattcgttctccgctctggactaccgcacggatgcgaagctgcgcgaggggctatccaagcagctgcacgacacgacgaagatcatcgtcgcgcagcgcatcagcaccatccgccacgcggacaagatcgtcgtgctcgaccgcggcgaggccgtgggcatcggcacgcacgaagagctgatgcggaattgtgacgtttaccgcgagatcgcgacctcccagctcagcgccgcggaactcgcgtaaaggaggtgagagaagatgaaaaagaaaaacagcaatcccgtcggcgcgctcaagcgcacgggtgtctatatgaaatcgagccttggcgtcatcgctcttgcgctcgtgctggcggcgctgagcgccgtaatgacgatcatcggccccgacaagatcggcaaaatggcgaccatcatgtccgacggcctcttcaccggcattgacctcgccgccattgcgaagatcggcgtgttccttgccattatttactgcctgagcgcgctgtttggcttcatccaacactatatcatggcggtcgtgacgctggaaatgtcctaccgcatgagaggtgagctctcggaaaagatcaaccgcgtgccgcagaagtatttcaacaccacctcgcagggcgacattttgagccgcatcacaaacgatgtgtcaacgctccagcagggacttaccaacagcctgccgaccatcatcagcgccgcgacacagtttgtcggctgccttattatgatgttcgtgaccgaatggcgcatggcgctcgtcgcactgtgcatcacgctccttggcatggtgctgatcgtcgccatcatgtcgaagtcgcagcgctacttcaccgcgcggcagaagagcctcggcgagctcaacggctatgtcgaggagatgtattccggccatgaggtcgtgcgcatcagccgcgcagtcgataaggtcctcgaccacttcgacggcctgaacgcggcggtctatgacgcaaactggcgctcgcagttcctctccggtgtgatgcagccgctcatgaacgtgatcggcaacctctcgtatgttgccgtgtgcgtgttcggctcggtgctggccatcaatggcacgatcgaattcggcgtcatcgtctcgttcatcctgtatgtgcgcctcttcaccacgcctctgacgcagatcgcacagggcatgacgaatttgcagacggcctccgcctccgcgcatcgtattttcgacttcctcgaaagtgaagagctcggcgacgagagcgacaagaccgagaagctcgacgccgtgcgcggcgcggtgacgttcgaccacgtgcgcttcagctaccctgattcgcccgacaagatcatcatcaagaatttctccgctgaggtccatccgggccagaaggtcgccatcgtcggccccaccggcgcgggcaagaccacgatggtgaacctcctgatgcgatttttcgaggtcaacagcggccgcatcacgatcgacggcgtggcgacgaccgacctgcgccgcgaggatgtgcacgagctctttggtatggtcctgcaggacacgtggctctttgagggcacgatccgcgagaacctggtctataacatggagggtatcacggacgagcagctcgaaacggtctgcaaggcctgcggcctcgacaaatttgtccactcgctgccacagggctttgacaccgtgctcagcgagagcacgaccatctcggcgggacagaagcagcttttgaccatcgcccgcgcgatgctccagaatgcgccgatgctgatcctcgacgaggcaacgtcctcggtcgatacgcgcacggaacttctcattcagcgcgcgatggacgagctgacgaagggccggacgagctttgtcatcgcccaccgcctgtcgaccatcaagaacgccgacctcatcctcgtgatgcgcgacggcgacgtcatcgagagcggcacgcacgagcagctgatggagcaaaacggcttctacgccgagctctacaacagccagttcgcacaggcgtcgtaaagaaaaaccagcgcaggtgagcctgcgctggtttatattttctgcggaagaagttaaaagaaagtttattgccgaactggaaaacggtggtataataaggaacattcaagggctgacaaagcccgcaccgcgaaaggaagcggaaacatatgaattggtttcaggaattgctgtcgaatccctttttgctcatcggtctctcgtcgtggttctgggcgcagctcatcaagacgatcatccatgccattgtgacgaagagcatcgactttacgcgcctgatcggcgacggcgggatgccgagcggccattcggccacggtctcgtcgctcgcgaccgcggcggcgctcgtctacgggctcggttcgtttgaatttgcgatggcgttcatcttcgccatcgtcgtctgcaaggacgcgatgggcgtccggctcgaaacggggcggcaggccgttatcattaacgacatcgtcgaggcgttcaactcgctcgcgtcggaaaagcttccggaggcgaagctcaaggagttcgtcggtcacacgccgctgcaagtcatcgccggtattctgctcggcgtggcgaacacatttatcatgtactaccgcgtactgtgagggaaaggacatgacgctttttattaactgctgtccgcgcggagagtcgcgcacggaaagactggcccgcgcactgctcaggacgctcggcgaatacgaggagctgcgcctttatgacgagccgctgcacccgctggggcgcgcggacatcgcaaagcgcgacgcgctgctcgcggaaaagaagtatgacgatgaaatgttccgttacgcccgtcagttcgccgcggcggacagaattgtcatcgctgcgccgctgtgggacctgtcgtttcccgcgcagctcaaggtgtatttggagaatatctatgtcacgggcatcgtgacgaagtacagcgaggcgggcgagcccgtcggcctgtgccgcgcaagcgagctctactatgtcacgaccagcggcggaccgtttgacggccgctttggctacgactactggaagaccatcgcgcaggactgcttcggcattccgaccgtcaagctcatggaagccgaaaacctcgacatcgtgggcgcagacgcggaaaagatcgtcgacgatgccatcaaggcctacggccctgcgtaaaatcaaacttgtatagcaaaaaagctccgtgccttggcacggagcttttttatcgggaaaaatcagttagcgctgctctgctcgctttcgggcaggaggttcgtcatgctcttgaggccgatggcgagtgtggacatgttgtgcagcagcgccgaggtcgtcggcggcaggataccaagcacgccgagcacgatgagcgagaagttgaagcccacgatgaaacggtagttgcggtggatgcgggccatgagctcctggctgagagagcgcagcgtgacgagcgcaaacagatcttcggacgagatggtaatatccgcgatctcgcgcgcgatggcggcgccggtcgaaatggcgatgccggcgtcggcctcggacagggcgggggagtcgttcacgccgtcgccgatcatgatgaccttgcggcccgcggccttttcgctgcggacgaacgcggccttgtcctcgggcagcacttcggcgtagacggcgtcgacgccgacctcagcggcgacggcttcggcagtcttgcggctgtcgccggtcatcatcacgaccttgtcgataccgagctcgtgcagcgcgcgcacggcggctttcgcctccttgcgcagggggtcatgaatgcagatgaccgcggcgagctcgcccgcgatacagaggtacaggtgcgaatactcgggcgggagcgattcaaacttctcatcttcgccctccggcacgcggcagccctcgtcctcgaagacgaagtgtgcgctgccgatgagcactgttttctcgtccaccctgctcgaaatgccgtgcgccacgacgtactggacctgagagtgatactcctcgtgcgtcaatccgcggtccctggcctcggccacgacggcgttggcgatggaatggggatagtgctcttcgaggcacgcggcgaggcggagcatctcgctttcctcattgccgccgaaggtgacgattctcgcgaccttgggcgtggcgtaggtgagcgtgccggttttgtcgaagacgatggtgttcgcctgggcgacggcttcgaggaagcgcccgcccttgacggagatgtgatggctgctgctctcgcgcatggcagagagcaccgcgatgggcatggagagcttgagcgcgcaggagaagtcgaccatcagcacagccagcatctttgtgacgttgcgcgtgagaagataggtcagaatcgtgccgccgagcgtgtagggcacaagtttatcggcaaggcgcgaggccttgtcctcggccgtggatttgagcttttccgactcttcgatcatgcgcacgatgcggtcatagcggccgccgccgagcgccttttctacgcgcacgacgcactcgccctcttcggcaacggtgcctgcgtagacatagctgccctcgcgcttgggcacgggcatggattcgcccgtcatggatgcctgattgaccatcgcctcgccggagacgaccttgccgtcgagcgggatgaggctgccggtgcggacaacgacgcagtcgcccgcctgaatatcgccgatgggaacgagcgtttccgtctcgcccgtcttgagccagacgtggtcaacgttgagcgacatcgcgcccgcgaggtccgcgacggacttcttgtgtgtccagtcctcaagaatttcgccgaggcggagcatgaacatcacagagctcgccgttgagaagtcgccgcgcaccatcgacacggtgacggcggtggcgtcgagcacggcgacggagagtttgccgtgcagcagtgcggaaagaccctcgcggatgtacttgatcgagtgatagatggcgagcgccgtggtgacggggagcgggaagaagagcttcgagatcacgcggcggatcaccgtccacgagagtttgtcttcaaattcacggttgagtttgcgcgtcgtatggtcggggacaaggtccattgtttcggccttgtcgaacgagaacgccgcgagcgcgtgcacgagcgcggcgcggtccgcgcggtaaacgatcacggcgtcctgcgtgcggtcaaagaccgagacctcgctcacgccgtccacactgcgcagataatattccagaacgtccgcctgatgcagcgtcatgcggcggcaattcagatgcacgcgtatgcgcccggcggattcgtgcagaattttgcatttcatagtgtatcaattcctccgaaagtgaaagagagccgcgcgtcgcggctctcctgcgatttattcctcgtccgctttttcctcggacgcgtcctcaatgacttcggcgtcctcttccgctgcgcggcgctcgttgatgtccttggcgtcggcgtagacgtcctcagcatcctcacggacgttcgtgacggcctgcatcacgcagtccttggcacgcagcaccgcggcggtggtgtgagagtagacctttttggcatccttgctggaaaggatcttgaggccggcggtgccgaacagcacgcctgctgcaaataaaccgagatgtttcattgaaaaaacctcctgttagtatgaattagagctctttaacatagtgggaatataacataacgccttttcaaatgcaagtagcgaaatgttaaaatttgacggagaatggaaaccgcggatttgttatgttttcctcagatgttcgcgcgctcgtcccagagcgtcagcgtacctgattgcagcgttttcggaacgtcgatgatgcgctggttcgacgagccgcgaaagcgcagcgagatatcgtgcagcgcgtccacatagcgcccgtcgacgagcacatcgagcagtgacagcagttcgtccgtcacctcgcagtgcgaatacgcggcggggtcgtgcagctcctcccacgtaaagcctgtgaacgaccagatcgtcttttgcggcagctcacgcctcacgcggcggagaaacggcagcagcgcacgctgatttttaggctcgaacggctcgccgccgagcagcgtgagaccgttgatatagtcgggggagagcaggcggatgagctcgtcctccgtttcactcgtgaagggcttgccgtagcagaagtcccacgtctgcggctgaaagcagttttcgcagtggttcgtacagccggagacgaacagcgtcacgcgcacgccaaggccgttggcgatgtcgcagtttttgatctcgccatagtgcatgggaaatgacctccttatcagaaaaaggtgggagcgcggtgcgctcccacctaaacagcaattttatggcgcagccttacagatgcagcacgcgctctttgatctcctgcgtgcggccctggttccagaactgggtgccgatgtagccgcaggtgcggcgggcgacgttcatcttgtcctgatcggtgttgccgcacttcgggcagcgccagatgagcttgccgccctcctcgacgatgtcgatctcaccgtcccagccgcagacctgacagtagtcggacttcgtgttgagctcggcgtagatgatgttgtcgtagatgaacttcatcacctgcaaaaccgcttcaaggttctgctgcatgttgggcacttcgacatagctgatcgcgccgccgggggagaggtgctggaactgcgcctcgaacttgagcttggtgaacgcgtcgatcttttccgtcacgtggacgtggtaggagttcgtgatatagcccttgtccgtcacaccctcgatcacgccgaagcgcttttgcaggcacttggcgaacttgtaggtcgtggactcgagcggcgttccgtagagggagtagtcgatgttttcggcggttttccactccttgcacttgtcgttcatcttctgcatgatggagagggcgaagggcgttgcgctggggtcggtgtggctcttgccggtcatgtacttcacgcactcgtaaagtcccgcgtagccgagcgagatcgtggaatagccgtcgtagaggagcttgtcgatgggctcaccctttttgagtcttgcgcacgcgccgtactgccagagaatgggcgccgcgtcggagagcgtgcccttcaggcggtcgtgacggcagcgcagcgcgcggtggcagagctcaagacgctcttcaaagatcgtccagaacttttcaatgttgccgccggaggagagtgccacgtcgggcaggttgatcgtgacgacgccctgattgaagcggccgtaatacttgtgcttgccgggaacatagttgccggcattcgcgatgttgccgacgcccgcgtcggtgaagcggtcaggcgtcaggaagctgcggcagcccatgcagggatacacatcgcccttgagctcgagcatcttcttttcgctgatgtaatcgggcaccatgcggcgcgccgtgcacttggcggcgagctgtgtgaggtaataatacggcgagtcgtcgtgaatgttgtcctcttcgagcacgtagatgagcttggggaaggcgggcgtgacccacacgccctgctcgtttttgacgccctgatagcgctgctcgagcatttcctcgatgatgacggcaaggtcgcgcttttcctgctcgcttctcgcctcgttgaggtacatgaaaacggtgatgaacggcgcctgaccgttcgtggtcagaagcgtcacgacctgatactggatggtctgcacgccgcggcgaatctcctcgcgcaggcgcttttcgacgatttcggtgatcttgtcctccgtggggtcgacgccgagggcctcgacctcggcgagcacctgctttctgatcttctggcgcgatacgtcgacaaagggggcaaggtgcgtcagcgagatggactggccgccgtactggttcgaggcgacctgcgcgacgatctgcgtcgcgatgttgcacgcggtcgcgaacgaatgtgggcgctcgatgagggttcccgtgatgacggtgccgttttgcagcatgtcctccaggttcacaaggtcgcagttgtgcatgtgctgggcgtagtagtccgtgtcgtggaagtggatgatgccctcttcatgcgccttgacgatatcctcgggcaagagcagacggttcgtcagatcgcggctcacctcgccggccatatagtcgcgctgggtggagttgacgacggggttcttgttggaattctcctgcttggcctcttcattgttgcactcgatgagggagagaattttgtcgtccgtcgtgttgctcttgcgcacgagcgagcggttgtagcgataagtgatgtagcgcttagcgacctcgaacgcgccgtgcgccatgatctggtgctcgacaaagtcctggatctcctcgaccgtgggtgcgcggcccagactctggcaggagaactccacgctctcggcgatgcgctggatctggacgggcgtcatgcgagcctcctcgtccacaacgtcgttagccttagtcactgcggcgatgattttgacgatatcaaattctacttctgcgccgttgcgcttgataactctcatgtattcccgtctcctcttcttttggtgtgccctttacataacactatatcttgtggtgaccttcataactgcaaactaattattgcacatgagactcaacattgcaagtcctaagtgctgaaaaaaggaaacaatatcagagcctcaactttggacactattgacgaaacaccttgaatgaagcggaatagcgcattatttcaatttgacgcaaaaatcaacaagacataagtaatgctaataatagctatgcaaaattaactcttttcatgggcggaaaatgtgactataataactcggttgaaaaatttgagcaggactcgcagagcgggcccgctccggatcggaggatcaatacaatggcaaattgcgcgatcgtaggcatcaactggggcgatgaaggcaagggccgcatggtcgactacctcacggaccattatgacgtggtcgtccgctatcagggcggcggcaacgcgggccacactgtggtgaatgaaaagggcaagtttgccctgcacctgctgccgagcggcattttccgcgacggcgttgtcaacattctgggcaacggcgtggcgctggactgcgaaaacctgctcaaggagatggagacgctgcgcgccgcgggcgttatcatcacgccggagaatctgaaggtcagcgaccgcgcgtcgctgctgctgccctggcaccgcgagctcgacgcgctcgaggaagcgcgccttgccgacaagaagtacggctcgaccaagcaaggcatcgcgccgttctatggcgacaagtaccagaaaaagaccgtacaggcgggcgagctcctgcaccccgagcacttaaaggagcaccttgccgaccttcttgagtggaagaacctgatgctccagaagatctacggcgcaaagggctacacgatggacgagctcatggcgtgggtcaacacctactgcggcgccatcaagccctacatcaccgacaccggccgtttcctgagaaacgcgcagaaggagggcaagtccatcctctttgaagcccagctcggcgcgctgcgcgacctggactacggcatctatccctacaccacctcttcgaacgccgttgcggcgtatgcgcccgtcggctcgggccttcccacggcgaagctcgacgaggtcgtgggcgtggtgaaggcgtactcttcctgcgtgggcgagggcccgttcgtctgcgagtggttcggcgaaggagcgcagcagctgcgcgacgcgggcgcggagtacggcgcgaagaccggcagaccccgccgcgtcggccccatcgatctggtcgcgacgcgctacggcgtggagacgcagggcgcgacgaacatcgccctgacgaagctcgatgtcctgagctacatggacaagatccccgtctgcgcacactatgaattaaacggcgagcagaccgacgacttcccgttccccgtgctgctgcaggacgccaagcccgtcgtcgagtatctgcccggctggcagtgcgacatctccggcgcgcgtaattgggaggaccttcccgaagccgcccgcagctacgtcgaatacgttgaaaaggccatcggctgccacatcggcttcgtctccgtcggcgcggagcgcgagagcctcatcatccgctgacacaccaaagtaaagaggggacgaaggccccctctttacttttctattgcagctttgcttcattccatataaaatacgaacagcgaccgctgagaaagaaaaggagaaccctatgcgcaaggatatttacgagtccccgctttcgtcccgctatgcgtccgaatacatgctgcacctcttttcccccgatatgcgcttccagacgtggcgcagactgtgggtggcgcttgcccgcgccgagcacgagctgggcctgcccatcacgcaggagcaggtcgacgagctcgccgcgcacatcaccgacatcgactacgaggtcgccgaaaagcgcgagcacgaggtgcgccacgacgtgatggcgcatgtgtacgcgtacggcaaggcggcgccttccgctgccggcatcatccacctcggcgcgacgagctgctatgtgacggacaacgccgatttggtgctgtatcgcgacggcctcaaatacctgagagggcagcttctcagcgtgatggtgaatcttgcggcatttgcccgcgaatacgccgccgcgccgacgctcggctatacgcactatcagcccgcgcagcccgtgacgatcggcaagcgcgcgacgctgtggatgcaggacttccgctcggaccttgaagagcttgattttgtcatcggctcgatgcgcttcctcggctgccgcggcacgacgggcacggaggcgagctttgtcgacctcttcgagggcgacggtgacaaggtcgacgagatgaaccgccgcatcgccgcggagttcggctttgaaaagtgcttctctgtcagcggccagacctatccgagaaaggccgacagccgcattctgaatgtgctctcttccatcgcacagagcgcctaccgcatggcgaacgacattcgcctgctccagcacgaccgccaggtcgaagagccgtttgaaaagaaccagatcggctcgtccgcgatgccctataagcgaaaccccatgcgctccgagcgcatctgctcgctcagccgctacctgatggccgatgcggccaacgcgccgatgacggcctcgacccagtggctcgagcgcacgctcgacgactcggccaaccgccgcatctcgctgccggagggcttcctctgcgccgacgcggtgctgcgcctgtgccagagcgtgacgaacggcctgcatgtgaacgaaaagatcgtcgagcgcacgctgcgcgagtatctgccgttccttgcgaccgagaacatcatgatggaggccgtcaagcgcggcggcgaccgtcaggaactgcacgagaagatccgccagcactccatggccgcgaccgcccgcatgaaagagggcgagccgtgcgacctcttagaccgcctcgcgggcgaccccgcgttcggcatgacgcgcgaggagctcgatcaggtcatggagcccaagctctacatcggccgctgcgagcagcaagtgctgcgcttcctcgacgagtgcgcgccgcttttgcgcgacgccgccgcggaggacggcgcgatcgacctgtaagcgggcagaaattgagaatgatccctgagcgggagagatggacgagccatctctctcgcttctttttttcacctgaaaaaatgtgcggcggcgcgtgttgccttggcaaaagcgggcagaataccagtaagtgaacaaattgtaaagggtgtacgttcctatacaaaaggtagcgagtgtccatggattctggtatcgaagtgtgctataaagaagctgtaaagaaaaatgcacaaaacgatcactaaatcgcataacatatttgaagaataaatattgatttatttattgaaacaatctataatatggaaaagctgagcgggaaacattttcccgccgcagtgctaaaagaggtgaacgacaacatggcaatggaagaattacagcaggtgcaggagctcgaaaaagagcttgcagcgcagtatgccgccgcgcaggcggacgccaagcgccgcatcgccgttgagcagcgcgccgctgcccgagagatcgaggacagccgccgcaacgccgacgtggaggcgcggcagctgatggcggaggccgagcagcgcgccggtgaggagacggaaaagatcctcgccaaggcgcgcacggaatgcgaaaagatgcagagcgcggcgcgcgcaaaccttgagcgtgcggcgcagtggatcgcggaagaggttgtgaacgacaaatggcaatcgtagcaatgaagcatctccgcctcctcggcatggagagcgagcgcgaggcgctgctcaaggccatgcaggacatggagtgcgtggagatctcaagtatcgacggaagcgaagaggcactgaaatcaggctttgccaagcccgacgacaaggcgctgatgagcgcgcaggaagcgtcgcgtgcgtaccgcacggcgcttgcctcgctcgaccgctttgcgccggagaaaaaaggcatgttccgcaagcggcagggcgtttcccgcgcggcgtttttcagcgccgagagcgaggaaaatgcccgcaccgcggcggagacgatcaacaaggacacatgccgcctcggcgaaatcgagagcgagcgcacgaaaaatgaggcgctgcgagcgactcttgccccgtggctgacggtcgatgcgccgctcggcggcgcggacggcgcgcttgcggtgttctttggcacggcgggcctgaatgtgacggacgatgcgctcaaagcgctggccgattcgctggacgggcttctcacctggcagcaggcctcgagcgacaggtcgctgcgatatcttctcgtgatgtgtcacgggagcgtgaaggagcgggcgctgagcgcgctgcgcgacctcgggttttcgaccgtgagctttcgcggcatgaccggcacggcgaaggaaaacgacaaggcgcttgcggaaaatctcgctgcgctcgaaaaagagcggcaggagatcgaacagcgcatcgcgggccttggcggcaagcgggaggcgctcttggaagcgagcgaccgcgcggccatcgcgctgcggcgcgaggaggcgaagagccgacttgtcggcactgacaaggtctttttattggagggctggctgcccgccgaccgctgcgcggagatcgagaaaacgctcgagccgtttacctgtgcgatcgaaacgcgcgagccgacagaggacgagtacccgcaggtgccggtgcagctcaaaaacaacaagctgacgcggccgctcaatatggtcacggagatgtattcgctcccggcctacggcacgcttgacccgaacccgctgatggcgccgtttttcattttgttctacggcattatgatggcggatatgggctacggcttactcatgatgatcgcctcggtcatcatcagcaaaaaataccgacccaagggcacgagcggcgagctgttcagcctgctcggcctctgcggcatcagcacgttcatcatgggcgcgctgacaggcggatttttcggcgatttcctcacgcagctcgtcgccatcgtcagccccggcacggtcttcgcgctgccgaagctcttcgacccgctcgacgatctgacgatgatcctgatcggctcgatggcgctcggcatggtgcagatcgtcaccggcatggccatcagtttgatcgaaaagtgcaagcggaaaaagttcctcgacgcctttttcgaggagatcacatggtggatcgtgtttatcggcatcgcgcttttggcgctcggcaagggtgcggcggtgctgtatgtcggatgcgcgctggtgctgctcggccccatcgtgcagggcaaaggctggggcaagcttacgggcgtgttcggctcactctataaccacgtgacgggctacttcggcgacattttgtcctacacgcgactgatggccctgatgctcgcgggcagcgtgatcgcgcaggtgttcaacatgcttgcggcgatgccggggaacgtgatcgcgttcatcatcatctcgatgctcggcaacgcaatgaacttcgggctcaatctcctcggctgctacgtgcacgatctgagattgcagtgcttggaatttttcaacaagttctacgtcgacggcggaaagcccttccgtcccatgacgctggacacggaatatgtcgatttacagtaaattgcagaaaaaacggaaaaaccgtaaggaggataaaaaatgggtatctttgaactgacgacgggcggcgccatcggtatgctgggcgcgggtcttgctgtttgcctcgcgggcgcgggcagcgcacgcggcacgggtcttgccggcgaggccggcacgggtcttctctgcgaggatccgagcaaattcggtaaagtgatgatcctgcaggtcatccccggcacgcagggactgtacggcctcgtcatcggctttctgtgcctgatgcgcatgggcgtgttcaacgggacgtatgtggatatgtcccttcaggagggccttcgttactttgctgcctgtatgcccatcgccatcggcggcggcatttcggcggtcgcacagggccgcgtggcggcaggctcgatcaacattcttgcccgccagcccgagcactggacgaagggcatggtgctgtgcatcgtggtcgagttctacgccatcctttctatgctggcgtcgatcatgatgctgctcaacatcggctgacgcgcccacggaaaggcggaaacgcaatgaacggaatggaaaagatcaccgcgcgcatgaaagaggatgcggcgcgctcgctgagcgagctgaatgcgcagaccgagcaggagctccggcgcatccgcgaggagagtgctgcacgcgcggaaaaagagcgcgagacggcggacgagcgcgcgcatctcgccgcgcaggagcgctatgagcgcctctgctccgcggcggagatggagacacgcaagctgacgctcagcgccaagcagaaagtgctcgccgagacctacgaccgcgcgctggagattctctgctccatgccgcgcgaggagtacctttcgctgttggttcgcctgctgaaagcggcgggcggcaagggcgacgagaaaatcgccctgagcgcaaaggaccgcgatgagatgggcgaaacgctcgtcgagcgagcgaacaaggagctgaacgcgcactatacgcttgcgggcgaagcggcagatatccgcgcgggcctcgtgcttataagtaaagaatgcgacgtgaactgctcgtttgaaacgcttctcgccctttcgcgcgagaagaccgagcgcggcgcggcaaagctcctattcgcggaataaggaggggatcggatgcagcagtatcgggatacggactacgcagcggtctccgcggcgctgcatgcgcgcgaggcgaagctcctgacgcaggcgatggccgagcggatgatcgacgccgccgcgccggaagagagctacaagacgcttttggaatgcggctacgcgccgcttgagcgatgcatgctcgaaaatgtggaacacgcgctctcgcaggcgcgcagagagctctaccgcgaggtgagcgtgctggcaccggacaagcgcatcatcgagctttttcagatcaagtacgactatcacaacgcaaagctcgcactcaagagcaagcgcaccagcgaggatgtctcccgccttgcgatggactgcggccgcttcgacgcgcagaaggtgcttcgcggcgagacgagcgcggtttccgcggcgatgagccgcgcgatggcgcaggcggagagcgaagcgggccacagcggcgatgtccgcatggcggagctgctgctcgatcgcgcctgctacgaggagatgagcgcgctcgcaagcgagacgggcagcacgtttttgaaggactatgtcgccttgcagatcgacgcggtcaacctgcgtacgctcgtgcgcgcacggcgcatgggctgcgaggacgatgtgcttgctgcggcgatgctgccgggcggacacattccggcgggtcagctcaaaggcgcgcgcggcgatcatttatcgtcgctcacacacggcacgccgcttgacagcgcgggcgagctcgcggccaaactgcttgacagcggcggggccctgacggaatttgagcgcgcgtgcgacgatgcgctcatgtcctatttgcagcgggcgcggcgcacgccgttcggcccagaggtcgtggcgggctatcttggcgcgaaagaggcggagttcaccgccgtgcgcaccattttatccggcaagatcgcgggcatcgcggcggaggacatccgcgcgcggctgcgcatgagttatctctaagggaggcggcagcatgaataagatcggagtcatcggcgggcgcgacagcgttttgggcttccgcgccctcgggctcgacacctgcatcgcggaaaacggcgagcaggcgaaagccgccctccaccgcatggcgaaggagaactacgccatcatctatatcaccgaacacctcgccgcgcagatccccgcggagatcgagcgccggcgtgaggatgtttcccccgccgtcatcctcatcccgggcagggaggggagcctcggcatcggcacagcgggcgtgcacgcggctgcggaaaaggccgtcggcgcggacattttgtaaaaaaggagcaaaagccttatgggaaagatcgttaaggtctccggcccgctggtcgtggcgtcgggactttcggaagcgaatatggcggatgtcgtccgcgtgggcgagcagcacctcatcggcgaaattctgacgatgagcggcgattccgccgccattcaggtgtatgaagagacctcgggcctcggcccgggggcagaggtcgtgacgaccggcgcgccgctgtctgtcgagctcggccccggtttgatcgagaatatttacgacggcatccagcgcccgctggaggtcatccgccagaagacgggcggcaacttcctgccgcgcggcgaggaggtccccgcgctcgaccgcgagaagaagtgggacttcaccgctgtcgccaaggcgggagaccacctgatcggcggcgacgtgctcggcacggtgcaggagacgccgtcgatcctgcacaagatcatgatgccgcccaagatgagcggcactgtgaaggagatcaagtccggcagcttcactgtggaggacgtcgtcgctgttattgagaccgacaagggcgagacgaaggagctcacgatgatccagaaatggcctgttcgtgtgggccgtccctacacgaagaagtacccgcccgtcacgccgctccagtccggccagcgcattgtggatacgttctttcccgtagccaagggcggcacggcggcgatcccggggccgttcggcagcggcaagaccgtcatgcagcatgcgcttgccaagtgggcggacgtggatctcgtcgtttacatcggctgcggcgagcgcggcaacgagatgaccgacgttctgcgcgaattccccgagctcatcgacccgcgcacgggcgagagtctgatgaagcgcacggtgctcatcgccaacacctcggatatgccggtcgcggcgcgcgaagcgagcatctacaccggtatcaccatcgccgaatacttccgtgacatgggctatgccgtcgcggtcatcgcggactcgacctcccgctgggcggaggccctgcgcgaaatgtcgggccgtctcgaggagatgcccggtgaagagggctatcctgcgtacctgtcctcgcgcctcgcgcagttctatgagcgcgcgggcgtggtcgaatgcctcggcagcgacgagcggcagggcagcctgaccgccgtcggcgcggtctcgcctccgggcggcgacctctccgagcctgtctcgcaggcgacgatgcgcatcgtcaaggtcttctgggcactggattcgtcacttgcctaccgacgccacttcccggccatcaactggctgaattcctattcgctctatctcgattccctgcgcccgtggtacagcgagcacctgggacacgaattcctcgaaaaccgcgagtgggccatggcgatgctgcaggaggaatcgaacctcaacgagatcgtgcagctcgtcggcaaggattcgctcagcgcgaaggaccagatcacgcttgaggtcgcgcgtatgatccgcgaggactttttgcagcagaactcgtttgccgacaacgacgcctattccgagtacgaccgacaggcgcgcatgctggcgatgatccgccagtacgacacgcaatgcctgagcgccgctgagcgcggcgggaatttaagcgagctcttcgccatccccgcgcgcgagaagatcggacgcgccaagggcgtgcctgccgaccagtataaggacgcctacgcgaacctgctcgtcgagatggaagagcaaatcgccgcgatcgctgagaaaggagagaaagaagaatgatccgtgaatataagacgatccgcgaaatttccggccctctgatggtcgtggaccatgtgcagggcgtcacgtatgacgagctggcagagatcgtcctctccgacggcagcacgcgccgctgcaaggtgcttgaggtcaacggcgaccgcgcggtcgtgcagctgtttgaagcgtcggcgggcatcaacctcgccgattcgcgcatccgctttttgggccatccgctccagctcgccgtgtcgcgcgacatgctgggccgcgtcttcaacggcatgggtcagcccatcgacggcggccccgagatcatcgccgacgagcaccgcgacatcaacggccttgcgatgaaccccgcggcgcgcaactaccccaacgagttcatccagaccggcatttcaagcatcgacggcctcaatacccttgtccgcggacaaaagctgccgatcttctccggctcgggcctgccgcacgcgcagctggccgcgcagatcgcgcgacaggcgaaggtgctggacggcgagagcaactttgccgttgtctttgccgccatcggtatcacatttgaagaatctgagttcttcgtcaacgaattcaagcgcaccggcgccatcgaccgcacggtgctgttcacaaaccttgccaacgaccccgcggtcgagcgtatcgcgacgccgcgcatggcgctgaccgccgcagaatatctcgccttcgactgcggtatgcacgtgctcgtcattctgacggatatcacgaactacgcagaagccctgcgcgagatcagcgcggcgaaaaaggaggtccccggccgccgcggctatcccggctacctctacaccgaccttgcgacgatgtacgagcgcgcgggccgtcaggtgggcaaggacggctcgatcacgatgatccccatcctgacgatgcccgaagacgacaagacccaccccatccccgacctgacgggctatatcaccgaggggcagatcatcctttcgcgcgagctgtaccgccgcggtatcaatccgccggtcgacgtgctgccgagcctttcccgactcaaggacaagggcatcggcgcgggcaagacgcgcgaggaccattccggcacgatgaaccagctcttcgcggcctatgccaccggtaaagagaacaaggagcttatgtcgatcctcggcgaggcggcgctgagcccgactgatttactctacgccaagtttgccgacgagtttgaaaaacgctatgtcgcgcagggcacggacgagaaccgctccattgagcagacgctcgacctcggatgggagcttttatcccttctgccgcgcagcgagctcaagcgcatcaaaccggagtatatcgacaagtacctcaaaaaggaagagtaaggggggagaaaagtgcctacgaccactgttaatcccacccgcatggagctcacgcgcctcaaggggcggctgcgcaccgcccagcgtgggcacaaacttctcaaggacaagcgcgacgagttgatgaagcagttcatggaggtcgtgcgcgaggacttagcgctgcggcagaaggtggagcagtcgcttgcgcgcgcctacggctcgttcaccgtggcgagcgcgctgatgtcgccggaaatgcttgagcaggcgctattgtgccccaagcagagcgtttcgctcgaaacgggcacggagaacgtgatgagcgtcgaggtgccgcgctatgagttcaagctcgcgagcgaggacggcgggaatatttatccgtacggcttcgcccagacgagcggcgagctcgacgacgcggtgcgcgagctcggcgacattctgcccgacctgctccgccttgccgaggtcgagaaggccacgcagctgctcgccgccgagatcgagcgcacgagacggcgcgtcaacgcgctcgaatacgtcaaaattccgcagatgcagcaaaacatcaagtatatcacgatgaagctcgatgaaaacgagcgtgccaacacgatccggctgatgaaggtcaaggacatcatcctgaaagaggccatcgaagagcgccgcgagaccgacaaggccgagggcgcagacgtgtgaatggcgaaagctgtcaaaacacttgagcggagtaaagcaaaacccattcgttttgtataatttgtcggttgacattttcggttaaggatcctatactgagaccaacaaagttccacgaacggagaaacaacacaagatgaagagcattttcgtttttgcatactattattactttactatggattcgtagtaaggctaatttgtgatgcaaagatgcaaaaaggctctgaaaagagattgcttgatgcggcacaggttagacctgtgccgcattttttcgttgtggcgatatttcacggtcaataaggaggaaattattatgatcgtcgtactcaaacgtggcgcagaacaggacaagcgcgagcagcttatcaactggctcaaaaatcagggccttggcgtgcacatctccgagggcgagtaccagaccgtgctgggcctgatcggcgacacggcgcgcgtcgacatggacctgatcgagagtttgagcatcgtcgactccgtcaagcgcgtgacagagcccttcaagtgctgcaaccgcaagttccatcccgacgacatgatcgtgcaggtgggcgacgtcaaggtcggcggcggaaacttctgcatgatcgcgggcccgtgctcggtcgaatccgaagagcagatcgtcgcggtcgccaaggccgtgaaggcctcgggcgcgaacatgctgcgcggcggcgcattcaagccccgcacttctccttatgatttccagggcctcaaggcggagggcatcgagctgctgaagatcgcccgtcaggagaccggccttcccatcgtcaccgagatcatgggcacgaattacctgccgctctttgaggatgtggacgtcattcaggtcggcgcgcgcaatatgcagaacttcgacctgctgcgcgagctcggcaagctgagaaagcccatcctcttaaagcgcggcctcgccagcacgctcaaggagcttttaatgagcgcggagtacatcatggccggcggcaacgagcaggtcatcctctgcgagcgcggcattcgcacctacgacgactacacgagaaacacactcgaccttgcggctgtgccgatgctcaaagagctcacgcacctgccggtcatcgtcgaccccagccacgcgaccggcattgcgcgcctcgtgcgcccgatggcactggcagctgccgcctgcggctctgacggcctcatcatcgaggtgcacaacgaccccatccatgcgctgtgcgacggcgcgcaatccctgcgccccgagcagtacgatgacctcgccaaggctgtgcgccgcgtgagagaggcggtggcagaatgaccgccggcatcgtcggcctcggcctgatcggcggctcgctcgccaaggcataccacgaggcgggcgagcgtgtgctcgcccacgacatcgaccgcgatgtcttgtcgttcgccgtcatcagcggcgcggtggacgaggcgctgacggacgagacgatggcagagtgcgatgtcatcctgctggccgtccgacccgcggcggcggtcgaatggctcaaaaatcacgcggcaaagatcgacaagcacacggtcgtcatcgactgctgcggcaccaagcgcaaggtatgcgcggcgtgcttcccaatcgccgagcagtacggcattacgtaccttggcggtcacccaatggcgggcacgcagttttcgggcttcaagtacgccaaggcgaacctcttcgtgggcgcgccgatggtgctcgtgccgccgcgctttgacgacattgaattactcagccatgtgaaagacctgctctcgcccgcgggctttgggagctactccgtcacaaccgccgagcagcacgacgagatgatcgccttcacctcgcagctggcgcatgtggcgtccaacgcctacatcaagagccccacggcgaaaaagcacaagggcttttccgccggcagctacaaggatatgacgcgcgttgcctggctcgcgccgcacatgtgggcggagctcttcatggaaaacaaggaattcctgctcaaggagatcgactgctacatcgagcacctgagtgaatacaagaccgccatggaaaatgacgacgaagagacccttatccgacttctggacgagggcaagaagagaaaggaagaggtggacggctgatgcgaagcatccatatcaaggcctcgcgcgaatacgacgtgctggtcgagcgcggcttactcgaccgcgcgggcgagcttctccgggaggtcagcgcccccggcatggccgccatcgtgtcggacgacacggtctacgcgctctacggcgagcgcacggtcaaggcccttgaaaaggcgggctaccgtgtgcactctttcacattccctgcgggcgaggggagcaagaacctctcgacctacgccgatgtgctgcacttcctcggtgagcaccgcttcagccgcagcgacgtggtcgttgcgctcggcggcggcgtggtgggcgacctcgcgggctttgccgcggcgacgtatcagcgcggcatgggctttgcccagatcccgacgacgctgctggccgcggtcgattcgtccgtcggcggcaagaccgccgttgacctgcccacgggcaagaatcaggcgggcagcttctatcagccctgcatcgtgatctgcgatcccaacacgctcgaaacgctgcccgaggagcagtaccgctgcggctgcgccgagatcatcaagtattcgatgctcggcaatgcagcgttctttgaagaactctacaaaacgcccgtgcgtgagcagtacgagcacgtcatcgaggtctgcgtgcagatgaagcgcgacatcgtcggcgcggacgagtacgacctcggccgccgccgcacgctgaacttgggccacacgtttggtcacgcggtggagcagtgcagcgatttttctcttctgcacggcgaggcggtcgccatcggcatggcgacggtcacgcgcgcggcagtcaagcgcggcatttgcggcgaggagacgctggcgcgcctgctcgacattctgcaccgctatggtctgccgaccgagacgggctacgaactcgacaagctctatgaggccgagctcgtcgacaagaagatttccggcggcaagatgcacctcatcgtgccggaaaagatcggtcaggtgcgcatggagacgatccccgtcgaagccctgcgcgactggatgcaggacggtggcatccgatgaaaagaaccatcatacccggcgcgcgcacgggacgtgtgcgcatcccggcatccaaatcgcaggcgcaccggctgctgatctgcgcggcgctcggcgaggagaagaccgaggtcgtctgcgacggcatttccgccgatatcgcggccacggcgaagtgcctgagcgcgctcggcgcgaaaattgaagaaatggagacgggctttctcgtctctccaatcaaaaaagtgcccgaggggcgctgcgacctctactgcggcgagagcgggtcgacgctgcgcttcctgctgcccatcgtcggcgcgctcggcgcacaggcggtattccaccgcgaggggcggctgccccagcgcccgctcgccccgctggatagcgttttaaaagagcatggcatgacgctccgcgaggacggcgacctgctgtattgcagtggacagctgatcgggggaaactatacgatcgcaggcaatgtgtcctctcaatatatttcgggccttctcatggcgctgccgctgctgatcagagacagtcttcttatggtgtccggcccactggaatccgcggcttacgtcgccatgacggaggatgcacttcagctttccaagctgaccatccccaaaatgggggcgatgtgggcgattcccggtcagcagagatgtcatctgccgaagcgcacggtcgtcgagggcgactggtcgaacacggcgttcttcctctgcatgggtgcgctgtcgaaagagggcgtgaccgtcgaggggctgaatttgcagtcctcgcagggcgaccgcggcgtgctggacgttttgcgccggttcggcgcggaagtcacggagcacggcgacgccgtgacggtcaggcgcggtgcgctgcatggcgtgatgatcgatgccgcgcccatccccgacctcatccccgtgctgagtgtcgttgcgtcggtcgcagagggggagacgcgagtcgaaaacgcctaccggctgcggctcaaggagtctgaccgcctcaagagcacggcgaatctcctgcgcgcgctcggcggacgagttgaagagaaggaagacggccttgtcatcacgggcgttcccgcgctgcacggcggcgtggtcgaaacgcagaacgaccatcgcctcgcgatgtctgccgccacggcggcctgcgccgcgacgggcgagatcacagtcgacaacgacggctgcgtggcaaagtcctatccccgcttttgggaggattttagcagcttgaaaggagaaggtttatgagcagcacctacggcgaaaatctgcatttgaccatcttcggccagtcgcattcccctgccatcggcgtgacggtcgagggcatccccgcgggcgagaaagttgatctggacgagctccagcgctttctgaatcgccgcgcgccgggcaaaaacgtctggtcgacgccgcgcaaggaggccgacgcaccggagatcctctccggccttgtgaacggctatacctgcggcgcgccgctcacggccatcatccgcaatacgaacacccgctcgcaggattacgcgaatcttgctgtcacgccgcgccccggtcactcggactacaccgccgaggtcaaatacggcggctatcaggaccgcgcgggcggcggacacttttcaggccgcttgaccgcaccgttgtgcatcgcgggcggcatctgcctgcaaattctcgcgcgcgaaggaattacggtcgtgagccgcatcgcctccattgcgggcattactgacgaaggtgagctgacaggctcgcttgcaggcaaggagttccccgtcgtcagcgatgcgcgcggcgaggagatgcgcgaagccatcgcggcggcgcgcgaggctggtgacagcgtcggcggcgtcatcgaatgcgcggttttcggggcgcccgcgggccttggcgatccgatgttcggcggcatggaaaatcgcatcgcctcagcggttttcggcattccggcggtcaagggcatcgagttcggcgcgggctttggcgtggcgagccttcgcggcagcgaggataacgacgcctttacggtcgaaaacggcaagatcatcactgagacgaaccattgcggcggcattcttggcggtatctcgaacggcatgcccatcgtgttccgcgcggcgttcaagccgacgccatccattgcgcgcgagcagcagagcgtcaatttgcagacgatggtgccggagaagatggccgtcacgggccgccacgacccgtgcatcgtgccgcgcgccgtgccctgtgtggaggcggcggccgccatcgcggtctatgatgcgtatctatcgcgcaaaagggaaatgaggtaagggaacatggacttaaacgactatcgaaaagagatcgacagcatcgacgatcagctcatcgcgctctttgcccagcgcatggagaccgctgaaaagatcgcggaatataaaaaggccaacggcctgcgcgtgctcgatgcgcgccgcgagaaggagaaaatgcgcgagattctggacaaaacgccggacgacctgcgcgaatacgtctcctcgctctactccctcattttcgagctgagccgcagccgccagagctgtcttctcggcacgaagggtgatctgcccgcgaaaattgccgaggccatcgaaaagacgccgcagctctttcccgaggacgccgccgtcgcctgtcagggcgtggagggcgcgtattccgagcaggcgtgtgagcggctgttcaagcgcccgagcacgttctttttcagttccttcgaggcggtgttctccgccattgaaaagggcctctgccgctacggcgtgctgccgctggaaaacagcacggcgggcagcgtgaacgcggtctacgacttgatgacgcagcacaacttccgcatcgtgcgctcggtgcgcatcaaggttgaccataatcttctcgccaatcccggtgcgaagctcgaaaacatccgtgagatctactcacatgaacaggccatcagccagtgcgcacactttttacaggggcttcccaatgtgaaggtcatccgctgcgaaaataccgcggtggcggcgcgcatggtggccgagtccggccgcgacgatgtggcggcgctgtcgtcccgcgcatgcagagagctctacggccttgactgcctcgccgcctctgtgcaggatcagggcaataacttcacgcgcttcatctgcattgcgaaaaacctcgaaatttaccccggtgcagaccgcacgagcctgatgatggtgctgccgcaccaccccggttcgctctacaaggtgctctcgcgtttcaacgcgctcagcgtcaacatgaacaagctcgagagccgcccgatgccggaccgcaacttcgagttcatgttttacttcgaccttgaaacctcggtctatgccccgcagttcacccagctcatgggcgagctgcccgagctgtgcgaggagttcacgtatcttggctcttacagtgaggtggtttgaatgaagcgctgcggattactcggtgaaaagctcggccacagctattcgcccgctatccacgcggagctggcggactatgaataccggctctatgaggtcgcgcccgaaaagctcggcgaatttctgacgggcggcggctttgacggcatgaacgtcaccattccctataaaaaggccgtcatcccgtactgcgcagagctttcacccattgcgcaaaaactccagagtgtgaacgtgctggtcaggcgcgaggacggcacgctgtacggcgacaacgccgatgcctacggctttgccggtatggtcagggcgagcggcattcagatcgatggcaaaaagacgctcgtgctcggctccggcggcgcctcctcgacggtctgtgccgtgctcgaggagatgggcgcgcgcagcgtgaccatcatctcccgcaagggggaggacaactacaacaatctggatcgtcacgcggacgcggaggtcatcgtgaacaccacgcccgtcggcatgtacccgaactgcggcgtgtcgcccgtcgacctgtcgctcttcccgaagctcgagggtgtgctcgatatcgtctacaaccccgcgcgtacagcgtttgtcttgcaggcggaaaagctcggcattccttatatgagcgggctctacatgctcgtcgcgcaggccaagcgcacggcggaggtctttgaaaaccgcgacatccccgacagcgagaccgagcgcatctggaaaaagctgagccttgagatgcagaacatcgtgctcgtcggtatgcccggcagcggcaagagcaccgtggccgcgtgccttgctgagaagcttgaccgcatcgcgcttgacagcgacgccgagatcgaagagaaaaacggtatgagctgtgcccagctcatcgaaaagcacggcgaggcggaattccgagagctcgagagcgaggccattgccgcgctcggcaagcgctcgggagcggtcatcgctacgggcggcggctgcgtgacgagagaggaaaactacgatcttctgcaccagaacggcatcattttctggttgaagcgtgatatcgaccagctgccgcgcgaggggaggcctctttcggcgggcgaccttgcggcgatgtacgacaggcgcaaggcctgctacgaaagatttgccgaccacatcgtcgacaacaacggcacagtggaggataccgtgcaggcaattttggattgcctgaaataaaggacaaaacatcccgccgcaaattgcggcgggatgtttttgcgcgatggcggcagctacggctggggatggcgggtgcgctgcgcaagcgcttcgtcatagcatctcgcgcagcgccgccagtcgatcacctgcacacgcagggtgagggactcctcgctgcacggcaccactggcgcggtcaggtcgagcagcaccgcgccgaacgcgatgtcggggtccttcgtgccggtgagccggagtgagccgtccgccatcagcgagagcaggacgcgaccgccgcagccgcggcgtagcgcatgtgtgagcacgcgctcaaagtcctcccgctcgccgaaatcgcgcaaaatcgcggcctcaaatgtattcaaaacagaccacctcgccacaaggtatgcaaaaagtccatcagacagcacaaaaaagcggaaagtcctgtgactttccgcttttcatttcaatttggactaacttagatgtggacgaccttcagctcactcgcctcgaagagaccgaggcgcttgccgacgttgacatatacctgcgggtcgccgctcgtgcagatgacgaatttaccctttttctgcgggttgagcgcgttctgctcggtgaggtatgccttgacggcgtttgcctgctcgagcgcggggttgatgaggtgcatttcgggatagcactcgtggaagttctcttccacgatgggatagtgcgtgcagccgaggatcaggttttcgaccttttcgcgcgcgagaatgttgtcgacctgcgtacggatctcagtgttaatgtcgtgctggttgaagtcgccgcggtcaacgagtgccgcgagcaggggagagcccttgccgacgaccttgcactcgggatcaccctcatggatgagctcggcgtacttgccggaggcaacagtgaactccgtcgcgatgaggccgacgctcttgagatgctcgcgcaggacgtatttggcagcttcttccacgatgctgacgatcttgtagtcgaagcaggggcgcaggcggtcggccatggtggagatggtgttgcaggcgatggcagtgcacttgacaccgttgtcgccgaggaactggagcatgtggctgctcaactcgaaaatctggtcagaggtcttgttgccgtaggggcagttggcactgtcgccaaaatagatgatatcttcgccggggagaatgcgctgtaattcgcgcacgacggtaagaccgccgatgccgctgtccatcacgccgatggggttgcctgcgttcaacatggttgaaagcctcctttttttgtctataaatattgtaccacgcgcacacaaaaatgcaagggataaatcatttttgctgtttgtaacaaatcttgggaaaaggattgcaattttgccctcacctgataaaatagtatttggtgtgagttgggtattttacagcccgaaacctgcgccgcgcggcggcataatacagaagaagaggtttgaaacgcttatgacgattttcaacttgatcaccctctttggcggtctggcgctgttcctgtacggcatgcgcctgatgggcgacggactgaaaaaaggttcgtccgatgccttcaagcgcgcgatggaaaaggtgacgaacaatccgctcgtcggctttctgctgggccttgtggtcacggcggtcatccagagctctacggcgacgatcgtgctgacgtcgggccttgtcggcgcgggcgtgatgtcgctgcaccagtcgatcggcgtcattctgggcgcgaatgtcggtacgacgatcacgggccagatcattcgccttctcgatgtgaacgcatcggagacatcgctgctcaatttcttcaagccctcgacgctcgcgccccttgcggcgattatcggcatcctctttctaatggcggtcaagacccgccagtccgataccatcggctcgatcgcgatgggcttcggcatcctcttcaccggccttctcagcatgaccgcggcggtgagcccgctgtcggaatctgagacgtttgccaacatgttctaccagctctccggtaagccggtgctcggattcctgctcggcgcgggcgttgcgttcctgctgcagagttcgtcggcgaccatcggtattttgcaggccattgccacgaccggcgcgctgacgttctcgtccgtttacgccatcatcatcggcgtcaacatcggcgactgtgtgacgacggccatcgtctgctccatcggctcgaaggccgatgccaagcgcacgggcgtgatccatatcctcttcaacatcgccggttcgatcctcgtgatcgtggggctgatgctgctgcactcgttcggtgtgctcgatgccctgtgggacgaagcgctttcctccggcggcatcgcgaatgtgcacacggtgttccgtcttgcttcggccatcgtgctgctgccggtgtgctgccagtttgaaaagctctcgcgcaagctcgtcaaggacgatgtgcgccttggtgaaaatgtcgaccacgagctttcgctgctcgatgaaaagttcttcacctctcccgccatcgcgctctcgggcgcgggtgaggccatcaccaccatggcgcgccttgcgcgcacgggcgtgatgagcgcgatgggcgtgctcgagcagtacgatgcccacacgatcaaggtcatcaacgagaacgaggagcacatcgacaagctcgccgaccatgtggacaactacctcatccgcctgtcgccgcacatgccgagcggacacggaagcgacatgctcaactactatatccagtgcttcggcgagtttgagcgtatcggcgaccacgccgtgaacctgacggaaaatgcgcaggagttccttgaccgcagcgcgagcctgtcgcccacggcacatcaggagctcatggtgctgcgcgaggtgctcggcgagattttagattacacctacaaggcctttgccgccacggactacgaggccgcgcgccacatcgagccggtcgaggaggtcgtggacgaccttgtcgccacgctgcgcgccaatcacatccgccgcgtgcgcgacgggcagtgcacagtgtacgcgggcctcacgtttctcgatatcctcgtcaatgtggagcgcatcgccgaccagtgctcgaatgtcggcgttttcacgctctcgatgttcgacgagcacgtcatgaacaaccaccacgactatattcaggcgctgcaccagggcaaagacccggtcttcaaccgcgcctatcaggagacgcacgacaagtatttcggcgagctcaagcgcatcgagcgcagcaagtgagccgcgccagatatgcgcgcccctgatttaatggaaaataacgatcaatgcgacttttgtgcgccgcggcttgcgtttgccgcggcgctttgctataatgcagtgcataatagcagcgtgattctctgcaaaggagcatgaaaatatgaaagcgattcttgatgaaatgctcgcggccctttcgcgcggcgagcgtgtggtgctgagcagcattctggcgtcttcgggctctgtgccgcgcggcgcgggcgcgaagatggctgtctttgaagatgaccgcgtgctcggcacgattggcggcggcgcagtggagcggctgagcatccagcgcgcgcaggacgcgctcaaaaacggtggcagcaacgagctcaagtcctacaacctgcacccgagtgaagtggccagcacgggcatgatctgcggcggcgcggtgacggtctacttccagtttttcgcgcccgagcaggcggcggatatcgcggtgctcaagcgctggcgcgaaatgctcgataaagacgtcgacctctggctgctgctgtctcttgacggcgacggcgtgaacgagttccacgtcgtcaggcgcgaggagatcccgcaggacaaggcggactatttttctgccaaggccgtgtggaagaacggcatttatgtcgagccgctgtgccacgcgggcagcgtgtatatcttcggcggcggccatgtgggccgcgcgctcgtgccggtgctggcgacggtgggcttccgcgtggtgatgtacgacaaccgcgaggagcttgcgaagaaagaaaactatcccatggcgagcgaggtcatcttcggcagcttttccgatattttcggcaaggtggcgctcacggcgaacgactatgccgtcgtgatgacgccgggccatcaggcggactatgaaatcctctcccaggtgctggggagcgatgcgacctatatcggctgcatcggcagccgcacgaaggtcgccaagacgcgtgagcgcctcaagtgtgacggctataccgaagaggacatcgcgcgcgtccacgcgcccatcggccttccgattctggctgagacgccggaggagatcgccatcagcatcgcggcggagatgatcgagcaccgcgcgcgcctcgccggacagcggcactgagggtgcgtatatgcagatcgcaccgcttttgcacgtcggccgcggcgtgacggctatcatcggcggcggcggaaagacgacgctgatggaaacgctcgccggggagctttcgaaaaagggtaaggtcattatcacgaccacaacgcacatctgccgtccgaagcagtatgaaacgctgctggatgcggacgaggccgccgtttcggcggcattggagcggtcgggcatcgtctgtgttgcctcgcaggcggagagcggcaagctctgcgcgccgtggctctcaatgggcacgctggcgcagcttgcggattttgtgcttgtcgaggcggacggtgccaagcgcctgccgctcaaggcgcacgcttcccatgagccggtgatcccggaggaggcgcagcgtgtcatcatggtcatcggcatcgacggcgtcggcaaaaccatccgcgagacctgccaccgcagcgcgctctacgcgcagctcgcgggcgtggatgaggagacggtcgtcacgccgcagcttgccgcgcgcgtcgtcaacgccgagggttacggcgaccgcgtttatatcaacaaggtggagtctgccgccgattatgaagcggcgcaggccatggcaaatgaattttcctgcccggtcatcgcgggcagtctgcatcagggggtatatgtatgcttgcattgattcgcggcgcaggagacatcgcgagcggcgcggccatgagattgtggcgctgcgggatcgacgtggtgatgaccgacctcgcccgcccgacggccatccgccgcacggtggcgttttccgatgccatcgtccacggggaaacgacggtcgagggcctgcacgccgtgcgcgcggagaatgccgcggaggcgaagaagctgctgcgcgagggttcgctgcctgttttggccgaccctgagtgcgcctgccgcggggagctcgcgcccgacgcgctcgtggacgcgattcttgccaagtgcaatctcggcacgaagatcgacgacgcgccgatcgtcgtgggcgtcggccccggcttcacggcgggggaggactgccacgcggtcgtcgagacgatgcgcggccacacgctcgggcgcgtcatctactccggcagcgcgctgccgaacacgaacattcccggcctcatcggcggctttgcgggcgagcgcgtgctgcgcgcgccatgcgacggcatttttactgccgtccaccgcatcggcgacacggtcgaggagggcgagaccatcggctttgtcgagggtcagccgatgaagtgcaccatcagcggtgtgctgcgcggcgtgctggacgatggcgtgcccgttaagaagggaatgaagtccggcgatgtcgacccgcgctgcaagccggaatactgcacgacgatctcggacaaggccctcgccgtcggcgggggagtggtcgaagcggtgctgtatttgaacgcgaagcaacagggcagacgttgatatgccctgcactgcgcgggagatgtcccattggcatgggactgcgcggggcaaagggggccttctctcacgtgagagaaggccccctttgaatcccccaagagaacggcaggggcgtttcgatctcgcccctgcacccctaacgaccaaaagggaggggccttgcccctcctttttggattatccaccccgctgttgcttctgacggcgcgg

SEQ ID NO: 10131 - DNA, 16358 bp, Unknown
  gut microbiota DNA sequence
agaaacggcggcggcgcggccttgacggacgaggcgcggcaagtgatgcgcgcctacgacgaatactgcgcgaagctgcgcgcctacggcgagacgctttttgagcaaactttcgcgttttatgacgcgctccccaagcaggagcttcacagaaaggagaaacagcatggcggataagctctgcgtctgcgggcacgtgatggaaagccgggtcaccggaaagaagatcgaactgcacaccgcggataccgggtcgctttggagcgaatttctcgcggcggacctgtacatctgtccctggtgcggccgcatggcgtttttcgagccggaggaggcccgcgcgctgcgcttccgccgcgcctgcgaaaacaaaacgatcgaccagctgcgcgcgatcgtggacggcgagcagccggagcttttgaaaaaggcggcgggcgaggaacttgaagcgaaggaatcgctcgcgcgctggaaagagcagaagcgcagggaagaggaggagcgtcgcggggagcgcaaaaagatgttcgccaagcttctcggcaaggacgaggacgacgataagccgacgaagaaccgcccgccggagttttgatgaatttattgtaaaagtgcgcacactgtgcgcactttttgcttgacaaacgcgcgcggcgggtgtacactcccatcatcaaaatggcacggatagggaagaaaccgatatttccccgcgcagagagggatgcatttgctgcgagcatcctgcggaagagaccggcagtaccacccttgagccgcccgcgaaacaagcgggacgggatcgcccgttacagcggacacaagcggcgcaaaatgcgcaagcagggtggaaccgtggagtatttgaatgcttcacccctgatagacatcgggggtggagcttttttgcaccctcaaatgaaaatggaggtaaataacatgtccgaagaagtcaagatcagcgaagagaaccagttctcgtttgaaaatcccgagtaccgcaagatctattggcacacctgctcccatgtgctggcgcaggccgtcaagcgcctctggcccgaggtgaagctcgccatcggcccgagcatcgacaacgggttctactacgatatgctcgctccgttctccttcacgccggagaatttggctgagatcgaagccgaaatgcgcaagatctgcaaggaaaagctcaagctcgagcgctttgagctcccgcgcgccgaggccatcaagtttatggaagaaaaggaagagccgttcaaggtcgagctcatcaacgacctgcccgaggacgccgtcatcagcttctacaagcagggcgagttcaccgacctctgcgccggtccgcacctcgactccaccggccgcatcaagggcaacggcatcaagctgaccgcctgcaacgccgcctactggcgcggcgactcgaaccgcgaggtgctccagcgcatctacggcgtcgctttcccgaagaaggaagagctggacgcctacctcaaagagcgcgaggaggccgtcaagcgcgaccacaacaagctcggccgcgagctcgaatacttcaccaccgtcgactgcatcggtcagggccttccggtgctgctgcccaagggcgcgcgcgtcgtgcaggtgctccagcgctgggtcgaggataccgagcagaagcgcggctatcttctcaccaagaccccgctcatggccaagcgcgacctttacaagatctccggccactgggatcactatctcgacggcatgttcatcctcggcgacccgtatgacgagacgaaggagtgcttcgccctgcgcccgatgacctgcccgttccagtatcaggtctacctgaaccgccagcgctcctaccgcgacctgccgatgcgcctgggcgagacctcgacgctgttccgcaacgaggattccggcgagatgcacggcctcatccgcgtgcgtcagttcacgatctccgaaggccacctcgtcctgcgtcccgaccagctcgaagaggagttcaagggctgcctcgaccttgccaagtactgcctcggcaccgtcggccttcttgacaagtgcacgttccgcttctcccagtgggatcccgcgaacccgaacaacaagtacgagggcacgaaggagcagtgggatcacgcccagagcgtgatggagcgcatcctcaaggacctcgacgtcgactacaccgtcggcatcgacgaggccgcattctacggcccgaagctcgacatccagtataagaacgtctacggcaaggaagacaccctcgtcaccatccagatcgacatgttgctcgccgagcgcttcggcatgtactacatcgacgaaaacggcgagaagaagctgccgtacatcatccaccgcacgtctctcggctgctacgagcgcacgctcgcctacctcatcgaggagtacgccggcgcgctgccgacgtggatggcgcccgagcaggtgcgcttcctgcccgttaccgaccgcgccgccgactactgcgccgagcaggccaagaagctcgaagacatgggcttccgcgtcgaggtcgactaccgcaacgagaagatcggccgcaagatccgcgacgcgcagatggagaaggtcccctacatggtggtcgtcggcgaccgcgacatggagaacggcaccgtttccccgcgccaccgcgcggacggcgacctcggcgcgatgagcatggacgagttctccgcgcttctcaagcaggtcgtggacaacaaggaaaagaaataatagcatactgattttgcataattagcatttgagcctttcatagaatcagggcggcaaagcgccgccctgattttttatacctaaagaaaaatttgaaaacctgataaatgtttaacgaaataatcggtcgaatgatgacggaattcaacgataatttggcgaaatatccaaaaaagtaaaaacgtcttgcaatagacctgtcattcggttataatgagatcgcctgaaagaggcaagtaaatttcggaattcaacgcttctccaacgtaggtgctccgaagcgcccccacgcggcggagcatgtgccggtgaagcggtgaatgccggaagaatcaaaaaggagattgcgtatgaaaaagtttttagctctgatcctctctctcgcgatggtcttcgcgctggtcgcctgcggcggtgagaagacggacgacagccagaacaacgacggcgattccagctcccccgttgcgatcactctggcgaccggcggtacctccggtacctactacgctgtcggcggcgttctcaagaccgtcctcgactccaagctgaccctttccaagctctctgttgagtccaccggcgcttccgtcgcgaacgtcaacatgatcaccgacggagatgctcagatggccattctgcagtccgacgttatcaactacgcgcacgagggcaccaactccttcgacggcgctcccgagaccaacgctctttgggtcgccggtatctacaacgagaccgttcagatccttgccaagcccggtatcaacaccgtgtccgacctcaagggcaagaccatctgcgtcggtgacgttggttccggtaccgagatcaacgcctggcaggtgctcggcgctgcgggtctgaccaaggacgacgtcaatgcggtgaacggctccttccaggatggcgttgaccagctcaaggacggcaagatcgatgccgccttcaccgtcgccggtgctcccaccactgctatcgtcgactacgccaccaccaacaccctcaacctcatctccctcactgacgaagagctcgccgccattcaggaggcctatccgttcctgatccgtgacgacctgccctccaccacctataccggcatgaccggcgatgtcacctgcgtcgctatccaggctactctcgttgcctccgaagagctgagcgaagatgtcgtttatgagttcgtcaaggccatgttcgacaacaaggacgctctgaccgaaggccacgccaagttcggcttcctcgatcccgaggctgcctctgccggtgctaccgtcaccatgcatcccggtgctgagaagtactacaaggaaatcggcgtcctgtaagcaggatcgctaccgtgtattgacgtgaattctcatctgcggaaatacataattgcggccgctgcaataataacgattattgcagcggccgccgtgcttcttcctcgctccggctactatctgaccctgcgcaaccgcgacaccggcgaggtctacgcccggtacaaaatgggcgagggagaccgcttttccgtgacctttatccattccgtgaacaaataccccctgaccgatacctacgagatcgaaaacaaaacgatctatgtggaggagacgacctattgctcctttggcgcaggcgtgcagacggagctcaaccccggcgaaacgcttgacaaggtctatgtggaccgccccgattacaagggctgggcaatggtcatccgaaacatccatcaggacaggacagacgtcggctacattgtcggtacggtctctgaccatgtactcaatgtaaacggcgaggatgtcagtctgcgtgatttgtgtggaaaaaacgcgcctgtgcgttttaattacgaattctggctcgtttgagcgcacggacgctctcaaatagaattaggaggaaattgcatcatggctgaaaacgaaaagctcaacaatgttgcagtcgacaacgacgtcggcaccatggaagacgtcgatgcgatcatgaaaaagtacgaccgtgagtcgaacacgcgcgtctgggaggggactccccgcaagattctgcgtgtccttacggcactgttcggcattttcctgatcgtgatgaacatgtggatcaagatggacgagcgtgcgcgccgtccgctcttcctcggcctggtcatcattctcgtgtttatctactaccccatcaagaagggctctcagaaggtcaactacatgccttggtacgatatcgtcatggcggcagtcggcgcgttctgcttcctcttctaccccttaaatcttgaaaaaatcgtgtctgccggtacgcgaatccagaaggtctttgtcgtgcagatcggcggcgtttcgattccccttctgatcgtttttgcgatcatcggcactttgatcctcgttgagtgctgccgccgcgtggtcggtatgccgatcatctgcgtgtcggcggtgttcgtgctctacgccttcttcggcgcgggcaaggacctaaagaccgtcatgtataacctcttctacaccacgaccggtatcctcggcaccccgatcggcgtctgctcgacctacattgcgctgttcgtcatcttcggcgccttcctggaggccacgggtgtcgcaaacttcttcatcgactgcgcgaacgcgctggtcggttgggcgagcggcggcccggcgaaggtcgcggtcgtttcctctgccctctgcggcatggtctccggttcctccgtcggtaacaccgttaccaccggttccgtcaccatcccgatgatgaagaagaccggttatcccccggagtttgccggcgcggtcgaggctgcgtcttccaccggcggtcagatcatgcccccgatcatgggcgctgcggcgttcctgatggcggaaatggtcggcgttccctatgcaaagatcatcgtgcgtgcgatcctgcccgcattcctgtacttcctcggcatcttccttggcgtgcacttcaaggccaagaagctcggcctcaagggtcttccccgcgaggaactgcccaagtggaagctcctgctcccgcagatctacctcatcctcccgctggtcgttctggtctacatgatcatgatcggctttacgatggccaccgccgccgtgtatgcaacgctgtactgcgttgtcgtttcgatgatcagccgtgaagagggcaagaagaagctcatcatggcggttcccctgatcccgcttctgttcatgaccctcatgagccgcagcttccagcccggcactttcatgggtgagaatggcagcacgctctgcatcgtcattgcccttgtgctcatggtcatcaactatgtcatcagcaagcccaacgtcaagagcctgcccaccatcatcgacgcgtttgaaaacggcggcaagaactgcctgagcgtcggtatcgcctgcggtatggctggtatcatcgccggcgtcgtcaccatgaccggtctcggccaggtgctcatcggcgcgatcgtcggtctgtccaacggtcacctgatcatcgctctcgtgctgacgatgctctgctgcatcgtgctcggtatgggcgttcccaccaccgcgaactacatcatcatggccaccacctgcgcgccgatccttgcctccggcatgggtctcaacctgatggctgcccacatgttctgcttctacttcggtatcgtcgcagacatcaccccgcccgttgcgctggctgcctacgccggttccgccatcgccaaggctcccccgatgaagaccgcctggaacgcgacccgtctcgcaatcgcggcgttcatcatcccctacatctttgcttacaataacgccctgatcttcgttggcagcgacgtcaacttcctgagcgttgcctccatcgtcatctccgcgaccctcggtatggcgtctatcgcctccggcctgatgggctacctgatccgcgatatgaagtggatcagccgcatcgcgctggtcgccggcggcctgctgatggtcatccccggcacggtcactgaccttgcgggtcttgcggtgctggtcgccgtcctcgttctccagcgtatcgagaacaagaaggacaaggcggctgcgtccgtgtaacgcaaagcatcctgctaatgaaaaagagaccgcttcggcggtctctttttttgcatgtgcgccgctttttcaagcatagactggaaacgacgggaggttttgcacatgcccagaatttatttgagtccctccacgcaggattggaacccgtatgtcgacggcagcggcagcgaggaatactggatgaatctgctggccgacacgctcgagccgtacctttacgcaaacaccatctcctttgtgcgcaacacgccggagatgaccgcggcctcgtccatcgcgcaggcgaacagcctcggcggctttgacttttaccttgccctgcactccaacgcctcgggggaggagcaggcggggaagaaccgcggcatcatcgtcttttactatcccacgagcagcgacggaaagcgtgctgccgaactcttcgccgcgcagctgcgcatggtctacccgctgcctgcaaaggtgacgacgcaggcgaccacaacgctcggcgaggtgcggcggcccagataccccgcaaatcttatcgagctcggctatcacgacaattacgacgatgcgcgctggatcgaaaataacctcgacgccgcggcgcaggccatcgcgcggggactgacggagtatttcggtctgccgttcatttacccgcagctcgtgcgcaccggcgtcgtcacgacggagggctcggcgctgcgcctacgaagctatcccggcatcgacggggaagtggtcggcagcatcccgaacggcgagagcgtgcaggtctacgggagctatcagggctggtactccgtgggctacaacgaccagctcggctacgcggcgcaggcctacatcgcggtgtgatcttcgcccgtttccgatattttccgggcgcgacttttccttgacagctggttataaaaagtttacaatgttttttggatttatggaggggagagaaggggaatctcccgtttatgattcaaaaacccaacgatagatcaatcgcatcgatcaaaaaacagcacacaggaggaatcgcatgatcagctatctctacgctgcgcttatcgcggtggggacgctcgtcattggcattcttcttggtatttggattcgcaagagagccgctaaacgcgccgaggagaagatctccaacgccgatgaagaggcgcttcgtattgtcaacgaagcgatcaagagcgctgaaaacaagaaacgcgaagtcatgttggaggcaaaggaagatatcctgcgctccagaaacgaatacgagaaggaagtcaaggaacgccgcgccgagcagcagaagcaggagcgccggctccagcagaaggaggagaacctcgaccgcaagaccgacgcgctggaaaagcgcgaggaggccctcaaccagaagcatgccgctctggacaaggaaaacgaagaaatcaagatcatcaagcgcagccagaccgaaatgctcgaacgtatttccggttttactgccgaagacgccaagaagtacctgatcgagcaggtcgagagcgaagtgacgcacgagaccgcgctcaagatcaaggagctggagcagcgcgccaaggacgaggccgattcccgcgcccgcgagatcgtcgcctctgccatccagcgctgcgctgccgaccatgttgccgagatcaccgtcagtgtggtgcccctgcccaatgacgagatgaaaggccgcatcatcggccgcgaaggccgcaacatccgcacgatcgaaacgctcacgggcgtcgacctcatcatcgacgacacgcccgaggcgatcaccgtctcgtgcttcgagcccgtgcgccgcgaagttgcgcgcctggcgctcgaaaagctcatcgccgacggccgcatccatcccacgcacattgaagagatggtcaacaaggcccgccgcgaggtggacgccatcatcaagtctgagggcgagcgcgccgtgctggagaccggcatccgcggcctgcaccccgagcttgtgaagatgctcggccgcctgcattaccgcacgagctacggccagaacgtcctgcagcactccatcgaggtctcgcaccttgcgggcatgatggctgccgagctgggcgcggatgtttacgccgccaagcgcgcaggcctgctgcacgatatcggcaaggccgtcgaccacgagatggagggtacgcacgtcgccctcggcgtcgaatttttgcgcaagtaccacgaaaaggacgacatcatccatgccgtgcaggcgcaccacaacgacgtggagccgcagaccatcgttgcctgcctcgtgcaggcggcggatgcgatctctgccgcccgtcccggcgcccgccgcgagaatctggagaactacatcaagcgcctcgagcagcttgaggagatcaccggcagctatcccggcgtcgacaaggcctatgccattcaggccggccgcgaggtgcgcgtgatggtcaagcccgaccaggtcagcgaggaccagatggtcattctggcgcgcgagcttgccaaaaagatcgaggaagagatggaatatcccggccagatcaaggtgcacgtcctgcgcgagacgaccaccatcgaatacgcgaaataagaaaaaggctccgcttttgcggggccttttttcatgcctttcttgcgttttgtcccgcgccttgctatactggggaaaacgcaaagcggaggaacgccatgctctacaatattctggccatcggcgatgtggtgggcggctgcggtgtcagctgcctcgagcaccatctgcgcgccgtgaaaaaactcaagaacatccacttcaccgtggtcaacggcgagaatgccgcgatggtcggcctgacgccgaacgacgccgagcgcatcttctccgcgggagcggacgtcatcacgcttggcaaccacacattcggcaagatgcagatcaccgactaccttgacgactgcccgtatattctgcggccgcacaatctcggcgcgcgcgtgccggggaggggctacggcgttttcgactgcgggcgcgcccgtatcgcggtgatgaacctcatcggccgctgcgacctcgcgttccatgcggacaatccgttcaaaacggcggacgagctgctcaaaagcggcgaaaagccgacgttcacgctgcttgacttccacgccgaggcgacgagcgaaaagctcgccatggcctattacctcgatggccgcgtcagtgccatctggggcacgcacacccacgtgccgacggcggacgaagaggtcttccccaaggggacgggctacctcacggacctcggcatgacgggggcggtgcgcagcgtgctcggtatcaagcccgagcagtcggtcgagacgtttctcggcggtctcccgggccgctaccgcgagccggagaagagcgccggcaagatgcagggagcgatttttacattagatgacgcgacggggctctgcgtgagcgtcgagcgcgtcgatgtgcgctgaaaaagcgcaaaatagaaaggaacaacgcaaatgtccatcgaaaaagtgagagcctattttgaacacttcggcatcgccgaccgcatccgcgagttcgacgtgtcgagcgcgacggtcgagctggccgccgtcgccgtcggcgtggagggcgcgcgcatcgcgaagtccatgagcttcaagctcgcggacgacgagcccattatcatcgtgacggcgggagatatgaaaattgacaacgccaagtacaaggcgtatttccacgtgaaagcaaagatgctgacctttgatgaggcctgcgcattcaccggccacgcgccgggcggcgtgtgctcgtttgctctgccggagaatgtgaagacctatctcgatgtgtcgctcaaacgcttcgatacggttttccctgcggcgggcagcgcgaacagcgccatcgagatgacctgcgacgagcttgagaagtattcctcaaactttgtcgcctgggtcgacgtgtgcaaggagaaagcgcccgccccgcaggcatgagaggagagaacacatgagcgtgaagatcgtccacgcggcggacttccatttggacagcgcgttcggcgcgctgagcgccgagcaggcgcgccagcgccgccgcgagagccgcgagctgctgacgagactatcgaattacgtgaatcagaacggcgtcgatctcgtgctgctcgcgggcgacctgttcgacagcgacacgacctatcgcgagacgctggaagcgctctctgaggcgctgggcgcaatgcaggcgcgagtgttcatcgcccccggcaaccacgacccgtacagcgcgaagtcgccctacgcgacgctttcctggccggagaacgtgcacgtcttcacgtcgaagacggtcgagcgcgtggagctgccggagcttcagtgcgccgtgtacggcgcggcgtttaccgcgccggtgcaggatgagagcctgcttgcgggcttccgcgcaccggaggacgatttcatccatctgatggtgctgcacggtgatatctccgccacggaatcgcgctacgatcccctcacgaaagagcagatcaaggagagcgggatcgactatcttgcgctcggccacacacaccagttcggcggtttcctgcgcgaagggcagacgacctacgcctactccgcctgcccggagggccgcggtttcgacgagctgggcgaaaagggcatccttacgggcacggtggagcgcgggaaggccgaactttcgtttgtgccgttcgcgcgcagacggtatgaggtcctgaacgtcgatgtgacgggaagatcggcagaggacgcgctgcgcgcggccctgccggatgcgactgtgcgcgatatttaccgcattattttcaccggagagacggatgagcgcgggcttgatctcaagtcgatcgaagagcagtttgcgcccgacttcttccacttggagctgcgcgatgagacgcgcattggcgaggacgtctgggcgcgagcgcaggaggattcgctgcgcggcctgttcctgcgtgagctgcgcacgaaattcgatgttgcatcctcggacgacgagcgcgcgaagatcagcctcgccgcgcgcttcggccttgctgcgctcgacgggtgtgatttgtgaggaggagaactatgtcgatctggtacagccggcggaaaaaggaagaaaaatccctgcgcctcgcggcggcggggaagtccgcgttctgctttgcagagcttcattacaacgcgcgcagccttacgcacgccgcgggcgtcgcggcggagagagcgctccgcctttatcgcaaaattgaccgaaaaagataagaaaacaaccgagaaaggccgaaaggaagcccctttcggccttttttgagaggatattaagtaagaattaagaaacaatcgctgtttttgtttgaaaacggctgatacaatgaccaacatgaggtgagaaaatgtacaacattctgatttgtgacgacgaacaggacattgtcaacgcgctcaagatctatctctccggcggggactactgcctgtttgaggcgagcaacgggcgcgaggcgctggaggtcgtggagaagaacgacatccatctgatcctgatggacatcatgatgccccagctcgacggcatcgccgcgacggcgaagctgcgcgaaaagagcaacgtgcccatcatcctgctcacggccaagagcgagagcagcgacaaggtcctgggcctgaacatcggcgcggatgactacatcacaaagccctttgaccccgtggaggtgctggcgcgcgtcaggtctcagctccgccgctatacgcagttgggcgcgaagaaggaagaggagaagccgaacgtctacaccgtcggccccatcgtgctcgacgaggagaaaaaaagcgtgacggtcgacggtgacgaggtcgcgctcacgcccatcgagttcaacatcctgcggctgctgatgaagaacccgggacgcatctattcctccgcccagatctacgagcttgtgtggaaggaggattcgctgggggcggagacgtcggtgagcgtgcacatccgccacctgcggcaaaaattagagatcaacccctccgagccgcgctacctgaaggtcgtgtgggggctggggtataaaatggaggacaagaaatgaaggctgcgtggatacgcaatttctggacaaagacggtcgcttttttgctggcggcggtgctcgtgccggtcatcctcacctatgttgtaggacttgcctactcctacggcggtatgggtcgggacttttacacgagcgacctctgcctgaatgcggtcggcaaaaagacgtgggagatctgcgacgactatatcgccatggaaggcggaaactatgatctcgacaagatctactccaagggagacagctacagcaacattcgcttccgtgtgacggacgagcaggacaaggtggagttcagcaacgtcagcgacggtgataccttctgctacagcaccgtttatgttgacaagacctttgatgtctaccttgtgaagggccttcccgcgcaggatgatatctactgggcaaaggttttttacgacaaggcagaaaactgggggcagaacgccctggagatgctcatcctctttggcgcgatggagctgttcctgctcatcttcctcgcccgcacggcggcgcggcgcgaggacggcgagctgcagggcggctggcaggaaaagatccccttcgacctctatcttctcgttgacggcacgatcgttgcgctgctgtgcgtggcggtggaggaggtctactcctatgtgagcttctataccccgccctacgatgtgctgctgctggcgataagctttgcgctggcggtgctcgtctttgccgcgtgggtgacattctgtgcgcgcgtcaaggtgggcagactgtggaagggaacgattatctacaagctcctgtgcctgtgctggaagatcgtcaagtggtgctggagagtgctctgcgccttctgccgcggcgttgtgggtttgctgcacgccatcccgctcgtctggcgcacggcggtgggctgctttgtggtcagcatgatgctcggtatatttgcggcaaatcgcgcgggaggggcgatgctgctgacgatgcttgtgctgtccgtcgccgcgtgcctcttctcgctccagcttcgaaagctccagaaggagggcgaagccctcgccgccggcaatcttgacgcgcaggtggacacaaagtggatgtattgggacgttaagcgccacgccgagaacttgaattccatcggcgacggcatggctgcggccatcgacaagcagctcaagagcgagcggctcaaaacggaacttatcacaaacgtttcgcacgacatcaagacgccgctcacgagcatcatcaactacgttgatcttttgcagcatgagcacactcccgagcaggaggaagaatacctcgccgtcctcaagcggcaggcgttcaagctcaaaaagctcacggaggacttggtcgaggccagcaaggccacgacgggtaacctgcccgtgaacgccgtgcggtgcagcatgaacgagcttctatcgcaggtcgagggcgagtacggcgacaagctgagcgcggcggacctgacgctcgtgagcgtgatgccggacaaggagctcttctgcaatgtggacggcgcgttgatgtggcgcgtgatcgacaatctgctctcgaacatctgcaaatacgcgcagaatggcacgcgcgtttatctgacgcttgaaaagaccggcggcgacgcggtcgtgaccttcaagaacacctcgcgcgcggcgctgaacattcccgccgaggaattgatggagcgctttgtgcgcggcgacagctcgcgctcgaccgagggaaacggcctcggcctctccatcgcgcagagcttgacggagttgcagggtgggaagatgtcgctcgccatcgatggcgacctcttcaaggccatcctccgtttcccgacggtggtgtgagaaaaatacagaaaggtgcggaaaggcgttgccgttccgcaccttttccgcgcctgtgcttgacaattcggcgcaaaaacaatacaataacaattcagaactctatcctgaaactgagggagaacataaacatggcaaaagataaaaaggtagaacagatcacgaatctggaagacgattttgcccaatggtataccgacatctgccgcaaggcggagcttgttgagtatgccagcgtcaagggctttaccatcctgcgcccctatggcttcgccatctgggagaacatgcagcgtttgatggacgcggagttcaaaaagaccggacacgagaatgtggcgatgcccgttctgatccctgagagcctgctcaagaaagagggcgagctcgtcaacggcttcgcgcccgaggtcgcgtgggtcacgatgggcggcagcgagaagctcgaagagcgccttgccttccgccccacgtccgagacgatgttctgcgaccactggtcccgcgtattgcagacctaccgccagctgccgatgctctacaaccagtggtgctccgtcatccgctgggagaagaccacccgcccgttcctgcgttcgcgcgagttctggtggcaggagggccacaccatccacgagaccgccgaggaggcgcaggcagagacgatgcagcagctcaactgctatgccgacttcttccgccacgtgctcgccatccccgtcgtccccggccgcaagaccgagaaggagaagttcgcgggcgccgaggcgacctataccgtcgagtgcatgatgaaggaccgcaaggcgcttcagggcgcgacgagccactattttggcgacaagttctcccgcgcctatgacgtgaccttcaccggccgcgacaacaagctccagtacccgttccagacgtcctggggctccaccacgcgcatgatcggcgcggtcatcatgacccacggcgacaacaacggccttgtcctgcccccgcgcatcgcgcccacgcaggtcgtcatcgtgcccatcgccgcgcacaagaatcccgaggtgctcgagacagccaagagcgtgatggcggacctcatcgccgcgggcgtccgcgtcaagctggacgactcggatcagtccatgggctggaagtgcgctgagtacgagatgcgcggcgtgcccatccgcatggagcttggaccccgcgacctggccgagggcaactgctgcctcgtccgccgcgacaacggcgaaaaggtcacggccaagatcgaggggatcgttgatgagatcaaggcgctgcttgacgccatccatgacaacatgtacaccgtggcggaaaagaatctcgaagacaacacgttcgacttaaagaccatcgacgaggtgaaggagatggcctccggccgcggcggcttcgcccgcaccaagtggtgcggcagcctcaagtgtgagctcaagatgaaggaacaggcgggcgtttcctcccgctgcatgcccctcaagcagagcggcaccaccggcaagtgcgtctgctgcggcaaagagtgcactactgatatttattggggcgttgcctattaagtatca

SEQ ID NO: 10132 - DNA, 1173 bp, Unknown
  gut microbiota DNA sequence
agtcacgctttttgttctaaaaacgcaccgctgtaaacctgctaaaaagtcaagccctaattaaaaaaagttatcggcagaaaaagagtatagcaaagcagagacggcaaaacggaacacttggccgcctcaaataaagcattggagatctcagctcattctattgccggcaagctgcggtagagctctgtgaccttgccataatagactcggaggaacttattcaggcccgctaccatagcgagtttaccactctttccctcgccgcgttttttctcaatgaatgtaaagatcgggtcgtttgccggcttgtgcatcacatagctctgcatgacttcgtacccggtcttacgcagatagcgatttccccgcttggagatatgccggttattcgcgcagaatttgccggactggtacggcggcgcatcgatgccggcgtatgcgatgagagcccgcttgctgtgaaagcgtcggacatctccgatctccgcgatcagacgcggagccaatgtatccccgatgcatggcatttcgcgcacgagagaatattccggcagagtcttggcgagagcttgcatctgtgttaaaatagcgtcacgggacgcctccactgtgtggaggacccgtatcgcttccgtaatgacgatctgcgtggatggtgcattgggaagcacagggataccgttttgagctgtggcaaagatgagtgctgccatacgttcgcaattgcggtatccctttttttccgcccatttgcaataatccttccgaaagcgcgtttctcccatttcgaggatgtgagtggtgtgacaataccgcaggacaaagtccgaaagcttgtgccgtccggcatggtcgctcatgagctcctgcataccgggcaaaacctggtcacagatggcgttaaaaccgacctttgccttgataaggagggaggtcatctggtaatactgccgcgccagaagctgaagctcccgatatgtatcctccggcagtctggtcggttgaagctcctgccaataggccaggccgtacaaagcgatttgcatagcgtcgatccgatcggtcttcaccttgcggatactttgtgagcaaaaccgcttcatccgcagcgaattgatgacggagacgaatattccgttctccaacaaagcagccaccaccgggcaatgg

SEQ ID NO: 10133 - DNA, 10186 bp, Unknown
  gut microbiota DNA sequence
aaaaaagcgccgcgtcccgtattttcttcgggacgcggcgctttctgtttcgccggatttacttgaattttttgccgtcctcgaacgcgctggcgaccttctcgcccaagacataatagccgtggttggcgtagtcaaaggtgatgatgtgcagcttttcgacagcgagcttgccgttttcgtcgagcgcgcgctcgtccacgctaacgttcacgatctcgccggtcaggagtcttgtctcctcgccgtagctcacgagcttgcactcgagcgcgagcgggagctcgtcgatcaccggcgcgtccacacgctcgctcttcgtcacgtggaagcccgcgcgcgccaccttgtcgggcacgccgttgccggactcgatgcccacatagtcacaggccgccgcatgctctgcgtcgcccatgctcacggtgaacgcaccgcgctttaagatgttcttcacggtcttgtggccgccgcttaaatacattgcgatgatgagcacgggctgcggatagacccagggctgtgcgcaaaaatactttctcatgtcgaaatccctccaaaataaatctgtcaattgattttatggcccgatcttttcgagcttcgcgcgcagcgaaatgctgcgcggcgttcccatgccgtcaaactggatgacgtgcgcgcccttgttcaagtccacgtccagcaccgttccctcgccgaacactgcgtggcgcacgcgctgcccgatgggcagcgtgccgtcgccgtcgtcctcgcgcagatacttgtctcgccgcgcgacgtcatccgccgtttcacgcagaagcgtctcgtcgacctcgtgcgtgaacgacagaagctcgcggtcgatatccagcagaaagcgcgagggatagcgcggcgagccgtcaaaattccacccgtcggcctcggagaggtaaagccccttctccgcgcgcgtcagcgcaacgaaagcgagccgccgctcctcctccatgccggggagcgttcgcaccttgcgcgaggggaaaatgccctcgttcatgccgcagaggaacacatacgggaattcgaggcccttcgccgcgtggacggtcatcagcttcaccttgtcgccctgctcggcgacatcgccgttgctgaaaagcgcgatgtgggcgaggtaatgctccatcgtgctctcctcgccgcagctcgtctcgtattcgtagatggactgcttgagctcggccagatcgtccaggcgctcctgactgccctcggtgcgcagcgccttttcatacccgctcttgtccagaatatccgagagcacctcagagatgggccgaccctgatacgagtgcgaaaagcgctcgatcagatcgacgaactgctttgccttcgtgccgctgaacacgctgtcttcgaggtggtttttgagcgttacatagaggctcgtcccctctttttccgccgtctcctgtaaaaaggccatgcgccgcttgccgaggttccgcttcggcgcgttggcaatgcgccggaacgacagatcgtcctgataggcgatcatccgcaaatatgaaagtgcgtccttgatctccatgcggtcgaaaaactgcacgccggagtagatcgtatagggaattttttcgtgcatcaacgcctcttccaccgcgcgcgtcacatagtgcgcgcggtaaaggacggtcatatcccgcagcggcacgccgcgatcatgcagccgctgcatctcgcccgccatccaatgcgcctccgcctcctgcgtgtcggcaaagtggcagacgaccttctcgcccgagggcttcgtcgggagcaggttctttttgatgcggtggccgttttttgcgatcagcgagttcgccgccgccaaaatctccggcgtggaacggtagttttccatcatcatgatggtctgcacgtttggaaagaccttgtcgaaatccagcagatacttgacgttcgcgccgcgccaggtgtagatcgtctggtccgggtcgcccacgatgaagaggttgccgtgatagccgcacagcacctccatcagctcgtattgcagcgcgtcgatatcctgaaattcgtcgatcatgatgtattcgagccgctgctgccacttgagcctgatgtcctcgtgctgctcgaaaatatagagcgagaacttgatgaggtcgttgtagtcgaggccgaagcactttttctcctgatagagatagccgtagaagatgatgtcccccgccgtgtcggcgcgctcgtacttttcgcgcagcgtgtcgagcgacatcgtgatcatgtccttgtaatactccggctccttaaagagctttcggatctcgatcatgtcccgtgcggcggaataggtcatgtcgcgcagtgtgaggccgcgctcttcgtagatgatgccgagcatcgcgtcgatgtcggaattatccagcaccagaaagctcttcgggtactgcacggcgtggctgtcctcctgcaaaacggagacacagaagccgtggaacgtgttgatatagcccgtgtcgttgtcgccggtcaaggcgtggatacgctggcgcatctcgttggctgacttgttcgtaaacgtcacgcacaggatgttccccggcaggatgccgagctcgttgacaagatacgcaaagcggtgcgacagcgcacgcgtcttacccgagcccgcgcccgcgatgacgcggacatacccctccgtcgccgtgacggcctcgtgctgcgcgcggttcagtcccgcaagcagatgctccatgcgctgtcccctctcctctgcaaatttctcaatggcggtattatagcacggttttgatagtcaaacaagtgttcgcttgaaaacttcttctctattgcactgcgagcttgccgcttcaagcttcattccaccgcaaaatgtgcggcaggagcttttcaagaagcgcgtcacggttctgctcgtcaatgaagacaagctccgcgttctcatgcccgcgcacggcgcgcaaaaatggtgtgtccttcggcttgaccgcggccagcaccggcgtgtcgccgtccagtgcgcacagcaccgcggactggaacaccctggcgtcattttcgagaaagccgagttcgtccatcaaaatgatgccgccttccggcgcggactcgatgagctgtgcgccgagcgtgtcgaacacctccggatggcggatgctcgagcggctgtcgcacgttccgacgagattcgccgcttcattgtgccgctcgtcctctttctgcgatgcgggatagaggtaaatcggaaaaaagccgttttcgtccgcgattggcagccgctttgtcacaaagccgccgacctcccgcgtgctatgcttcagcaggcggcggatcagcgtcgacttgccgacgccgcgctccccgcagatcaaaagatgccgtttcatactgcttcctccttcgaaatagccgccgtctcaatggtgaacaggcacaacgcctttttgtgcggcaggtagtagggaaattccgccgacggccccgcggtcaggcgcgctttgatctcatccttggagagcgtttcacttctacttcggttatagagtgcaaaaaagcgctccgccgcctcaagcgaacggaacggctggccgaacttcgccgtgaaacgctccaccgtgtatgggacgcccttttcgtgcaggacagcctccgtgctccccgccgtgtactcgccgaggctcacctttcccgcgctgaagcggtgatgcgaatagtcccgcttgacgaggaaaattctcccgcggcactgctttctcgcgatgcgcagcgtgtcctccgtgcggccaaagagacagaactccattgcgtcgtagggctctttcggcgtgagcgcctccacatcgccgcagatcgcggtgacgccctctatcaggtgggctttcagcgttttgatggccagcgcatccgcgtccaccgccgtgacatgatggcagtacggcttcagagcaaggctcagctcgccgatgccgcagcccgcgtcgcagatgtgcgcgttttctgtgagctgcggcgcgttcctctccgcgacggtctcataatagcggttcatcgccgccgcatcacgcaaaaacgcaatgctctcgtccgtccaccgcatgccacattctccttttcccattcaacctgtttcacgggcaaaccgataccagcgcaaagcaccgctttcacgcaagacatagccgctgaatatcaatacacctttatagaatcactataattcgccgtgccgtctgttgtcaagctacagcgagtgccagcgccattcgaaagcgccgttggtattttaatcgctgggtcaaagagaatatttaagaaaaaacagcaggaagttggcgcgacacgccggcttcctgctgtttctgattttttagagactcagccctttttgaagaatgcgaccgccaccacgccggggccagtgtgcgtgccgatcacgctgcaaatgagcgtggagtcgagcgagtccgccttgtcctgccagatgtcgcggctgtcctcgacatattttttgaggtacgaatcgctcaggccgctgtagccgaggataattggctcgtcgaagtcgatgccgccgctctcgtggattttctgcacgagcaggttgttgccctgcttcgaccctctcgccttgccgataacctgaatctcgccgtcgacgacggtgatgaccggcttgatgttgagaagtccgcccgcaaaggcgacagtcttcgagatgcgcccgccctttttgaggtattcgagcgtgtcgagcagcgcgatgaggcaaatttcgtcgcgctttttctccagcgtttcggcgatggtcttcgcgtccatgcccttgtccgcgcactcgagcgcgtactcggcaaggatgcccgagccgatagccgcgctcttgctgtccacaacgtagatgttgtcgtactccgccgcagcgatgcacgcgctctgatacgtgccggagaacttcgacgcgagcgtcacaacgaccgcgctgtcgcccaccgacgcaacgtcggagaagatcgcgtcgaatgccgcgggcgacgcctgactggtcgtcggcagctcgtcgctctcgacaagccgctcataaaagcggtgcttgtcgatggtcacgccgtcgatgaactcctccgcgccaaaatgcaccgtgagcggtacgatgcgaaaacggtccttcatgcgctcgggcatgtcgaccgtcgaatccacaatgatctgaacactcatgcttttcctccgttattgttcgtcgcgggcggctctgtcgcccgcggtcttcttatgggtataaatccgttccaaattctcgctcacgagcgcgagcgcgcggtacatcgtctgccgctcggcctcgctcaggccctcagatgccgcctcgacgatgcgcatgatcttctccccgatcgcgcggccgaccgccttgccccgctccgtcaggcgcagtgggctcttatagcgcttgcccgcgccgcttgcgcaggtgatgtaaccgtttttctcgaggtcgtccagcgagcgggagatggccgccttgtcctcgtcgcagcgctcgcagagctcggcggctgtcatgccatcctgctgggagaggtagtagaggcaggacacatgcggccctttcagttcgaagtccgccatttcgtccgccttgatgcgcttgatgctgcggctgatacgcgtgatcaggacggtaaaggtctcaaagcgctcctccattgctaattctcctttttcctatttgttgacaaatcaacaggctcgtttatcatagcgcattaatgttgatttgtcaacaagtttatttaaaaaagaagtgcccttacgataggcacttccttttttatgtcgattttacgcgattctaccgccgctcaaattgtactccgcggtgatgtcgttcccgtctttgtcgtaaaaccgcagcgtgctgcggtcgaagtcataatcgccgagctgtggagaaagctctgtgcagaacaggaaatgcgtctttccctccgcattttccatcgtgcaggtctcgccattctgcgtcatggtaatcctggcgatgcggccggtcacatcgcgcccgccaaagaggtagtaggctttgtcgccgctaaacataacgccgtcacggaagctcccgccgccgtagccgaggcgcacaaggccaatatcagcactgaaagtatggtaatgctcactttcttgcctgttttcatattgttcttcttttttgttcagggggaactcagaatgccacgtgcatgaacagtgctacgcagcacaggatgaccgcgagcggcacgtagacgaagcggcccacgttgtaccacagcgcaccgcgctctttcttgctgccggtgttcacggcggcgagcagctcgtcctttttcatcacgtagaaccacgagatcgcgccgagcgtcgcgccgatggggataatatagatggaaacaaggtccatccacgggccccacttgctgatgggctccatgaaaatgccgatgccgaggcacagcacacacaggatcgccagcaccgccgtgcggctgagcttggggaacttgtgcagcagcgattccgccacggcctcgaacatgttctgcagcgagctcacgcccgcgaagatcatcgcaaggtagaggatgatggcgaacagccgccccatcgggatatcctgtaaaatggtcggcaacgtaacgaacagcaggctcgggcccgcgccgacgtccagcccgtaggagaagcatgcggggatgatgacgagcgccgcaacgacggcggcgatcgtgtcaaacagcgccgtgtgctgcgcgacgccgacgacgtcctcgtccttcgagaggtacgcgccgtacacgatcatgccgctgcccgtgacggagagggagaagaacgcctgtcccatcgcccagatccagatcatcgggtccttgagcgcctcccagcgcggagtgaacatgaagcggtagccctcgcttacgcccggcagcatcgccacgcgcaccgcgaggatcaggaagatgatgaaaaacagcggcatcatgatcttgttggttttttcgatgctgtgcgcgcccaaatagagcgtcagcagcgtccccacgaccacgatgatgtggtacggaatgacggaatacggtgtggaggagaacgtgccgaaccacgacgcggtgtccgtcgtcatcagcgtgccgacgagcgaatccaccaacgcctttaagatatatgtcacgatgacggcgtagccgaacgcaatgcacagcgagcccgcgagcggcagccagccaagaaggcctccggccttgcctgcgcccttgccgcgcgtcgaccatgccttttcatacgcgccgagtgtgcccgtcgccgcgtggcggcccatggcgaattccgcgggcagacccacgtagctgaaaatgaaaataaacagcagataaatgagcaaaaatgccccgccgccgttgctgccaagcttgttgggaaagccccagacgttcgccatgccgaccgctgaaccgacggacgccagaataaagccccaccggctcgcaaagtttttggtgttcttcatgttttctcccatccaggtgaaaaaataaccgcgtaagcattcctcggctcacgcgggcatcagcctgtctctcatcagaatttgtacgcaggatacacaacgcatgaaaattcctgctcttatgttttatacattttaatgccgctgcacaaaaaagtcaagcgctcgagcggtttatattatggctgttccagccttttcctcaccggcgcgcgttcttcccgcaccgcggcgcaagggtctcgtaacagcatcgcagcagatttgttcatatcttttatgatatgatcgccgtaccaaaaggaaaatgaggcattacaggaggatcatgatgagcgcctgcatctttttcgcttccgacgcgccgctgccggaggtctttcctccaccggagtacgactacctcgccatcaatgtggacgacggtacgatcgacgacggcggcgcggacgacaacttcgcgctgcgcacttacccagacagttttctctataccgacaaagcctttgccgtctgcctcgactgggcctactataccgagggccgcgcgcggcagctgatcgactacattggctctgccctcgaatctgcaccctgcgtggaactctggcacgtctggcagggcggcttctacttgttcgaggagcgtcccgtcgttcaccgcgctgctgtgcgattcgatgaattcgtcgaggacgatctgcgcgagctcggcgaaactgacctctggaacaacaaggagacaaaccggttatcattttactgcctgaccgtcacacggtgagcagtattttccatactttacaaaacgaggtgactcccatgtctcattgcaccacattcgccgaagcaggccgccttgtggacgccggccgccgtgcaccgtttctcctgacgctgtgtgaggaggatgaaaacgagctgcacatcaccatctgctgcgttaaagcggagccaaatgcacagactccgtccacaggaaatgccgccctcgacgacattctcgcgcactgtacgccgctgtgccccgatgaaaatgccaagattgagctcatctttgaaaattacctgctctatcaggtgcgcaacgaatcctactgcgtatttgacgcagacgaagtccgcagcggcacctatctttgcacgttcgaatggtccaaactgctcgactatcttccccgtgccattgatgtccatcttacacccgatggaacggacgctcccgcatcgtggaagcactacggcatttacacgcagaatcagatcatcgacatcgttgccccgtccgagcccacggtgcgcacgtccttttgacgtacacgcgcatatattatgtcaacagatgttctattccataagacagtcaaaaagaaaaagcccgtgtcttgtgacacgggctttttgaacctcgtaaaggggtgagattacttgatctcgaccttcgcgccagcctcttcgagctgcttcttgaagttctcggcatcctccttggacacgccctccttcagagccttcggagcggactcgacgaaagccttggcctcggccaaacccagaccagcgatctcgcggacagccttgatgaccttgatcttggcagcagcgtcgaaaccggcgaggacgacgtcgaactcggtcttctcctcggcagcgggggcagcaccgccggcagcgggagcagccatagcagcggcggaaacgccgaactcttcctcgagagcgtggacaagctcagagagctccaggacggtaaggcccttgatttcttcgatcatagcggtaactttctcgctcattgtaatgatcctccaattttaagatatttgttttagtttttgagttgggtgcagacgattactctgcggatgcttcctcggcgggagcaccgttcttctcggcgatctgcttgaggacgcaagccaggcccgaaatgggagccagcatggtgccaagcacctgtgcctgcaggacaggcagtgcggggatcgcggccagagcattgacggtggccatgtcgacgaccttgccgtccatgaagccgcccttgatctcgaacttaccgttgagcttcttggcaaagtcggcgatcacgcgcgcgggggcgacgggatcggcagcgatggcaagagacgtggtaccgttcagctgatcatcgagctcattgaggccgacgttgttgaaagcaaagcggagcagggtgttcttgacaactgcatactcgacatcgttcttacggcactcagcgcggagctcggtgtcttccgcgacggtgatgcccttgtagtcaacgataacgccggcagctgcgccctgcagcttctcggtcagagaggccacgatcgcctgcttttcagacagaacttttgcgttaggcatttcttgagttcacctccattggattttgcggcacgcctcgcgtgccaggggaaagaggcgttctaaaaaggaaaccgtcctcatgcaggacatgaggacggtaaagcaatcaataaatgtttgccatcctcggcaggacttacgagacgaatctcacctgctgtctttggaacgctctaatagtatatccagagttggcagcattgtcaaccccaaatatcgttttttccgcaaaataccccatatttgcgccgc

SEQ ID NO: 10134 - DNA, 3532 bp, Unknown
  gut microbiota DNA sequence
gtcctcctgttatctctattttcgcagccggtcgcgccccgcaaggggcgcgtgggttgaaatatccacgacaatggggccagcatgacggacaaggtcgcgccccgcaaggggcgcgtgggttgaaatctttccggctttgggtttggtctggtaacttgggtcgcgccccgcaaggggcgcgtgggttgaaatctcgtcgcgcgtcctggtctatataggctctatgtcgcgccccgcaaggggcgcgtgggttgaaatccctttcccactacaagaccgaggctgtgaactacgtcgcgccccgcaaggggcgcgtgggttgaaacgctcccggattctcattgccgtatccctccataaaaaggaagtctctgccaaccggcagagacttcctttttctattttactgatcaaaacttgggtttacgtagtagacgtttttctcgtccaggcggtccttggcgaggcgcaggccttcaccgaagcgtacaagatggaaataacaagcctttaaatgcgccattcgatcttgatggaatcgctggtcgcatagatgacacggatgagctgatctaccgtctgtcgcttatcgtcaaagctcagttcatcccacatggtcagatgattgctgatctccgtgtagtctgcctccttgtgcagcttcagttcagagatgcgtttcatcagctcttgctttttcccgtccagctccttgatgcgtccgctgatatagcggaacatggtatcgtctgcagcagacaagcgctccatcaatgcggcgatctcactttcagcttgcgtgagttggatgctcaacgcagtcaattcagggttaatgcgatttcctttacaccgtctgagttttctgaattgtgtcaacttttttcgcatctcatcatagatgagttgctcaaactcgtccgtgtagatcgttccgggacccgcacaggccttggcgttcattttgttggagcagaggaggtatctggagcgtgtagtcgaatagtgcttatccaccagcgcgtatccgcagatgccacatttgatctttcccgccagccatgtgttcttggctttctgatacggcttgatctgctgtgcttccagacacttggcacggcatttcagccacaggtcggcgggaatgatcccctcgtgcggcgccagcaccagatgattgccctccagattcatctgcttgcgtccggtggaatccttgcccttgtagtagtagcacccgttcgtcccgatgaaatcggcagggtcgtttgccataatcgcgccttggttctgatagaactcatagacggatagatccgagcgaacatagatgggatttcgcagaacgtctgcaaggcgcgtgcgtccccacggctttccgtttttgagaataccgtggctctggaagtagcggatgatgtcgccgtaggagcattccggcttggaataaagctcatagatcagccgcacctgctctgcttcttccgtgttgatctcatacatggaagtcttgacaccatcaatggttgtcgggatcagccggaagccatacggaactctgccgcccatatagaaactcttttggctgcgggagtagtaggcatcagccacgcgcttttgaatggtttcccgttccagctgcgcaaacacgatgcagatattgagcatggcgcgtcccatcggggaagatgtatcgaatttctctgttgtggacacaaactcgaccttgtgtgttccaaactgctccatcatattggagaagtcgagaatggaacgactgatgcggtccagcttgtaaacaacgaccttgccgatcactccgttttcgatgtcgttcatcatttccgcaaaggcggggcggtctgtattcttcccgctgtagcctctgtcggtataaaccttgtactgttcacctctcatttcgtattggcagaactcaatctggctttcgatggaaatgctatcggctctgtcaacggattgtcttgcgtatattgcattcattttgtagctcctttctcatagaaaagagctgctgacaggtacatcataccgcagcagctcctaaatagctatcattttcctgttgtttctcgtatttgataaaaatctcgaaaaggccctcttcaatacatcgccgctgctccatgcactcttcagcggtaagttgaggggagaggttttcaattcgaatcatggcttttctgccggaaacgatatgcgcatcactgtcgtaagtgaaggggcggacaataataacgatcacctcccatgggtgctatcactctatttataaaaaacttgtcctatgcaaaagagacagacccaatcggtctgtctctttcaccggtataattcatggcagggaagtatggatcacctacatacctcccatcgtttgctcatgctgttgctttttctgttcttcccgcgcggcgtgttcatccaatttttctttcatcgccagagccgcgcctgcggcgaagccaatcgccgcaccgaagttttcggcggcgattttcgcctccatgcgccgtcgcttttcctcggcgtcctcatcttcatccagtagtgtccctgcggcagctagcccagccgcggcgggcatcaggggaacaggctgcggatcgctaccacgccataccacccggccatcgccgctgcgccgatcaccaaaagcagcgcgatccacttgagggtcaccagcagactgaaatccggcagccaccgaatccatttgcaggaataccgctcgctcagattcccaacccgttccagcagtctgttcatctccgtcaacgatttctgcatctccgtgagcgaccgctgcaccggcgtcaggtcgatgcgcggtttcaactccggcagggtcttccgaatttcccccagctcccagtttattccgtctgcctgctccgtcagcttgttcatcgcctgcggcagatcgcactggatcacgatgggctgcatcggctgcggcgcagccggcggcgcgttgctcggctgattcatccgcttcaattcctccatcggtttccgctgctcgacggaattttctctggacgagctttgcccgtattctgaattcatgctccatgacctccttgcaatacttttcctcgtgtagtttgttgtcacggcattttagcccgtccggcgtggtgtaggtgatgtacttgcggttgttttcccaacgcacctgatagccctcggattccatcagagaaacgaaggcgtccttgtcggcggcgtatttcatgcacgcatcaatggtgttcatgagccgcagcttccagctttggccttttagtgccgtgtggtattccgcgccgctcatgccgcgggcctgctgcgttggcgcgtcaaagacaggaagacccatttcctgacagatcatgtcattgcgccgcatcagttcctggatctgttcctttgccatgtgcagctttttgccggtttcaaagttgacggagttgatgatgcagtgggagtggatatgctcccggtctacatgggtgcagaccagcac

SEQ ID NO: 10135 - DNA, 22947 bp, Unknown
  gut microbiota DNA sequence
aacgatctgattttatttcgtgcctgcgggcatgaaactctgcgaggctttccccaataggagaaaggttccgcacagcgatgctgtgcggaacctttctcgtttttctttcagttgttgaattcgttgggcaggatgtactttgtcgtgctcgttgcgtagccgttgccgcgcttgatggtcatgtagatcgtcttctcgccgccctcaagctgcacgtagcagatgccgtcctcgtcgaacttgtccgtaacgtcgagcttctggtcgaggtagtagaccgtgaccgtgccgtcatcccgataggttacctcggggcaattgatatctgcgagcagttcctcctcggtcagtgcccgctccgtgccatccggctcgaaggcgacgcctccgccgctccgctcgcgctcgtttccttcgctgtcggtatagttgacggtatagtgaccgtttttcaccgtcagcgttgcatccgtcatctcaccgttgagccagagctgcaccgtacgctgaatgccaccgaggtccgaggcataggcgacgctgccgagcgccagcacgagcgcggccgcaaggccgatggtcgcggcgcggcgcagtgcgggccgtttcgttttccgttctgtcatcttcattacctccgtcatcatgtccggggaggcgtgcagcggcgcgaatgcgcgttgaaatctctctttttctgtcattgctttactcctcctccaaaatcgttctgagcttcgcccttgcgcggtaaagtcttgtgctgacggtcttctccgcaatggatagcatcgaggcgatctccgccgtcgagtatccttcgtagtaaaaaagcagcagcggcacgcggtattttttgtcgagcgccatcacggctttgaagagctcgccgtcccgcggctgctcgaaagaaagcgtttcggcgtagtcgtcgatgtcctcgtgccggcgccacggcgagcggaagagcatcttgcagcgattgacggtgacgcggatgagccagtttttcaaatgggcgtccgactcgaacgctttatctgctttgtacagctctatcaatacgtcctgtgtcacatcgttggcgtcgtccgggtttttgagccagccgtaggccacgcgaaagaccgtgtccatgtacttttctgcattttgggcaaacgcttcgtttgaaaacatatatgtttctctcctcaaaggccttacaccatacatgtgcgcgggcagggcgttttctttcacgggttcggaaaatatttcaaaaaatttcgccgctgcggcggcacaactgccgcgtccctctcatatactgccttgaaagacaggaaacggaggcacagctatggatcacagcacgcagcagctcatcgacaagttcaagcgcaatcctgccatagcgcagtcgctcctgcaatcgggcgacgggcaaaggctcatgcagatgctcacctctcaggatggcggcgcggcgctcaatcacgcggcgcagaatgccgcggcgggcaacacgaaagagttggccacaatgctctcgaacctgatgaaaagtcccgagggcatggccattatgaaccgcatcaacgacaacgcaaaaaaataaaaaccgcgggagggcgtcacgatgagcgagtgggaggaaaaactgaataccctgctctccgatccggacgccatggcgcaggtgatgaacatggcgcaaaatctgtcgcagcagatggggcagtccggcggcagcgcgccgcctcccccgcccgcgggcggtgcggccggtcctgcgccgtctgctcccacgccgccaccgccgcagggcgatccgatgggtgatctttcgtcgctgctcggcggcattgaccccggcatgatcgccaagctgctgcccgtgctctcgcagctcaatcggcccgagagcggcgagaccgccgcgtttttgcgcgcgctgcgcccatttttgaagccggagcggcaggacaaggtcgagcgcgcggcacagctcgcgcgcttcatccacctggggaagacgctgctcctcagcgaaggggggccacgcaatgtataaccgctatctgcgcaacgacgacggcgtctacacccgcatgccgatgcaggacgcgccgcgcggcgaaccgccgcgtgatggccggccgcctcccccgccgccctccggtggaaacgcaccgccgccaaggccgccgcaggggggcgctccccctccgccgccgatcagtcaggaggcgtcgcagtttttctcgcgcatcctcgacaaattaccgctcaagggcgtggacacggcggacattttgctgctgctcattctctttttcctctttgaggaaaaggcggacgacgagcttttagtcgcgctggggctgctgctcattttatgacatattttgacaaaaaggccgtccgaagaacgatcttcggacggccttttcagtttcttttaccggtttgcgccgtcgagcgcaccttcgtggagcactgtgccgtccggcagcgtaaaggcgtcctccgccacgttcccgctgtcgacgctcatgcccgccatgcggtagacgacatcctcgccctgcaatttttccgccgcgcagagaaggccgttgctcacgctgacccagtagcgctcaatatagccgccgtcatcggcggcagtttccacaaagatgcagtccacggtgtcgagcaggcggtaatccgccgcggcgatgcgctttttgtcaaggcgcaggatgtcctcatacgtcgggatgccctgctcctcgtcggcggtgaaggctgcggcgctctcgtaatagagctcgctgccgccgtaccagacccacgttctttccccgttggagatcgtgtggctctgcgcgccgctcgcctgctcggtgtcgacgcgcatccacgctccgtcgacgctgacactgctgcggtcgacgccgctgccgccggaatagtagcgctcgatcgtgatggcgcgcgagtagcgcgcgggacgttcaagcgtcgcgatggcggactgcaccgtgtcgggccgcacggcgatgcggcccacggcgctgtcgtcgagcgacgcgtcgctcacatcgctactgctcgcatcctgcggcagcacgacgtgcgcgggacggtgcagcgcgccgcgcaccacaaacaggagcaccagcaaaacgagcgcgacgaaagcagcgccaatgggcgtcaccctccgctttctcattccgctccactcccttctttcattccgtcaaaatcaggcgttaaaatccgcggggcgctcgctccggcggccaaagtgccacaaaatcgcgtcggcgatgcgtgcgcaggcgtggccgtcgccataggggttgacggcgtgcgccatcgcgtcgtacgcctccctgctgcgaagaagctcgttgcccatgcgcagcacgtcgtcgtactcgacgccgcagagcttcaccgtgccggcggcgaccgcctcggggcgctctgtctctttgcgcatgacaaggacgggcttgccgagcgcaggagcctcctcctggagtccgccgctgtcggtcatcaccatgtagcagcgcgccataagattgtgcatctcgtccgcgctcagcgggtcgatcaaatgcacgcgcggcgtaccggcaaggaacttctgcgcgttctcgcgcacgacggggctgaggtgcacgggatagacgagctcgcagtcctcattctggagggcgatgtcgcgcagcgcggtcatgatgttctccatgggctggccgtaattctcgcggcggtggcacgtcacgagcacgacctttcttgaatagtccagctcgttgagcagttctgttgtaaagcggtaatccttgcgcaccgttgttttcagtgcgtcaatgaccgtattgcccgtgatgaaaaggccctcggtcacgccctctttgagtaagttctcgcggttatttttcgtcgggcagaaatagaggtcggcgatggccgtgacgagcttacggttcatctcctcggggaacggggagtatttgtcgtaggtgcgaaggcccgcctccacatgtccgacgggcaccttgtggtaaaaggccgagagcgcaccggcaaacgtcgtgctcgtgtcgccgtggactaagatcatgtcaggctttaattgctcaatggcgtcgtccataccgagcagacacttgctcgtgatggtcgagagcgtctgccgcggggtcataatatcaaggtcgcagtcggccttgaggtcgaagacctccatcacgctatcgagcatttcgcggtgctgcgccgtcacgcagcaaaggctctcgatctcgtcgcgcgaggcaagctccttgacaagcggagccatcttgatggcctcgggccgcgtgccgaacacgctcataatgcgcagtttttccatttatgcttcctcttttttcttttcgttggattcttcttcaggttccgcaggcacggtttccgccggtgtggcggtctctgtgctcttctcctctgccgcggccttttccgcctgcaatgccttgtcgatatcgcggcggaagatgacgcgcgaggcgaggaacgccgccaccgccagcgccatcagaaagagcatcgccttgatcgcgccgctcgacgtcagcaccacggcggagaggccgaggatactgctgatgacgtacagcgccgcgacggcctgcttctggttgaggcccatgtcgatgaggcggtggtggatgtgtccgcggtcaggcgccatcgggttctgcccgtgggcaaggcggcggatgatggcaaagagcgtgtcgaacatcggcaggcccaggatcaggaacggcaccgcgaacgacacgatggcgtaatacttgaaaaggccctggatcgagatcgtcgcaaggatgtagccaaggaacgtcgagcccgtgtcgcccataaacatcttggccggattcttgttgtacggcatgaaaccgaggcacgcacccacaagcgcggccatcacgagcgccacatcgctttcagagacgagcagcgcgatgacgagcatcgaaatggcgctgatggtcgaaacgccgcaggcaaggccgtcgaggccgtcgatgaggttgacggcgttcgtgataccgacgatccacaagactgtgatggggatggacagccagccgaggtcccaatacgggctttcagcaaagacgttcgggttggagagcatctggatcacgacgccgtggaacacggcgacgagcgccgcgaagatctgcacacagaacttaaaatacgcgcgcagcggggacatatcgtccactacgcccaaaacaacgatgatggacgcgcccagcaaaatgccctgtaactgatggtcgaccttgacgaacagcagcatgctcacgataaagccgaggaaaatcgcgaggccgccgaggcgcggtacgggctttttgtgcatgcggcggttgtccttcggcacgtcgatcgcgccgatcttataggcaaacgacttgacgagcgggcacatcagaaagctgacggcaaacgcgcacagcagcgcgccgccgacgctcagcaataactctttcggaattccgttcatgttctccaccctttaatcagcgcgcgacaaagccgaccttcttgtagaccttgcgcagcgttttttctgccacgtaagacgccttctgtgcgcccgcgcgatacacggactcgagatacgccttgtcgcccaaaatgcgcgtggcctcctcgcggatggggcgcagggtttcaacgacggcctcgcccacggcgggcttgaacgcgccgtagcccttaccggcgaactcctgctcgatctcgtcaaagctcttgcccgtcacggcggagtagatggtcatcaggttcgcaacgccgggcttgttcgtgggatcatagcgcacgcagttttccgtgtcgctgtcggtcacggcgcgcttgaacttgcgcaggatatcctcgggcttttccatcaggtaaatggagccgttggggtccttatcggacttcgacatcttggctcccgggtcgctcaggctcatcacgcgcgcaccgaccttgggaatgtacggctcgggcatcttgaagacgtcgccatagatgccgttgaagcgctggacgatgttgcggcagagctcgacatgctgcttctgatcctcgcccacagggacatagtcgggctgatagagcaggatatccgccgccatcagcgcaggataggtgaagagaccgccgttgatgttctcgctgttcttggcggacttgtccttaaactgcgtcatgcgcgagagctcgccgaacatcgtatagcagttcaggacccagccgagctcggcgtgctgcggcacgtgggactggatgaacagcgtgttcttctcggggtccaagccgcaggcgatgtactgcgccagctgctcgagcgtgcggcggcgcagcgccgcagggtcctgacgcacggtgatcgagtgcatatcggccatgaagtagtagttgtcaaattcctcgtcgcgctccgcccagttcttgatcgcgccgaggtaggacccgagggtcagatcgccgctgggctgaatgccggacagcatcactttcttgcgcgccgcattttccatgttttccatcgttttttctccgatctgtttgtttttctcattttatctcgaattgcgccgttttggcgcagctatcgacccaatttgttatgttaccataccccttttcaaaatacaagcatattccggtgaaaaagagcgtcgtgcgttcgttgacttttcggtcaaaatatggtgtaataagctatctttattttgatttcacttcaggaggtcatctatgtccatcgacatgaagtattttgaggaaatggaagcgaagatcccgcacggtaaggtgcgcacgcgcttcgctccctcccccacgggctatatgcacgtgggcaacctgcgcaccgcgctctacacctatctgatcgcccgccacgcaaacggcacgttcattctccgcatcgaggataccgaccaggggcgtctcgtcgagggcgcaacggacgtcatctaccgcacgatggcggaatgcggcctttcgcacgatgaaggccccgacgtcggcggccccgtcgccccgtatatccagagcgagcgccgcgacacctacggcaggtacgccgagcttttagtcgagcgcggccacgcctactactgcttctgcgaaaaggccgagagcgaggaggacagcggcgaatttgaccgcgcggacgatccctgccgcggcctgccgctcgaagaggccaaggcgcgcgtcgccgcgggcgagccctacgtcattcgccagcgtatcccgaaggacggcaccacgaccttccacgatgcaagctttggcgacatcacggtggagaataagacgctcgacgatcaggtgctcttgaagcgcgacggtctgccgacctacaactttgccaacgtcatcgacgaccacctcatgggcatcacccatgtcgtgcgcggcagcgaatatctctcctccgccccgaagtacaacctcctctacgagggcttcggctgggaggtgccgacctacgtgcactgctcccccgtcatgcgcgacgcgcagcataagatgagtaaacgcaacggcgacccgagctatgaagacctcaaggcgcagggctacctgacgcccgccatcctcaactatgtggcgctgctcggctggtcgccgcgcggcgagcagagcgagcaggagttcttcacgctcgacgagctggtgggggcattcgacatcggcggcatctcaaagtcccctgccattttcgatatcgaaaagctgacgtatttcaacgcaaattatctgcgcaatctcccgcccgaggaattctgtaaagttgccgagccttacatccgtcaggccgtcaagaacgaagcgtactccgtcggtgagatcgcagcactcttacaggcccgctgcgaaaagctcaccgatattcccgaaaaggtcgacttcttcgatgctcttcccgagtacggcgttgagttctacacgaacaagaagtccaagaccaacagcgaggtctcgctcgacatgctcaataaggtcctgcccaagctcgagagccttcccgagtggacgaacgacgccatccatgacatgctcgtctcattcgccgaggagctcggcgtgaagaacgcgacgctcatgtggccgctgcgcatcgccgttgcgggcaagctcgtcacgcccggcggcgctgtcgaaatttgccatatcctcggccgtgaggagacgatcaagcgcgtcaaggccggtatcgccaagctggcatgatcttcgaactttgccctacgctctcgcgcgatctcatcaagcgggaatttttgaacaccgccgccgcgttcggcgtgctggtgcttcttggcttcgccgccggaatgatcttccccgacatggcgcagcagacgcttcaaaacttcgccgcacagatcgagcagctgggacttaccgacgatgttccccagtcgcagatgatggcgacgctgtttttcaacaacatcacggcgtccctcctctcgatgctctacgggctcatcccgttcctgccgctcagtgcgctcgcgctcggcacgaatgcgctgatgctcggcgcgttcgccgccatctatcagcagcagggcatcggtctcagtgtgtatgttctcggcgttttgccccacggcatttttgagctgtccgcgctgatcttatcctgcgcgctgggccttctcatctgccgcacggggacggaacggatcctcaaaaagagcgatacgccctttttccgccgtgtgctggactgcatccgcgtctttttgacattctctgtgccgctgctgctggtggccgcgctcatcgagacgtacgtcacgcctgcacttttgaaccttgtgctgtaaacggcaaggttgactttcgttccacgcaactatataatggacccgtcaagattttgtagaattttcatctgctgtttcttcagggattgaggaaaagcaccgctcctgcggcgcttttcctttttcgtcaaaaaatgagagattcgtcccgccgcgggacagagaaagagaggtgcgcatggcgcagacagttccggcaaggcaaaccgtgcagaacatgacggagggcagccccgtctcgctgattttgcgttttgcgctgccgatcttcatcagtcaggtcttccagcagctatacagcacggcggacgcgttcattgtgggcaaatacctcggcacgaacgcctttgccgctgtcagctcgtccggcacgctcatcatgctgctcacaagcctctttatcggcacggccatgggcgcgggcgtcgcgatctcaaagtacttcggcgcgggcgactatgaaaacgtctcgcgcgccgtccacacgaacctggcgttcggtatcgtgtcgggcacactgctgacgctcatcggcgtattcctcacgccgacgtttttggtctggatgaacaccgacgcgcaggtcatgccgcaggcggtcgaatacttccgctactacttcctcggcgtgctggcaacggtgctctacaacatgtgcacgagcattcttaacgccctcggcgacagtcggaggcccctgcactatctgatcatttcgtcgctcgtcaacatcgcgctcgacctgctgttcatcggcgcgttccgctggggcgtctggtccgccgcggtggcgactgtcctctcccaggggacgagctgcgtgctctgcctcatccacctgctcaaaaagggcgaggtctacaccgtcacgccgcgcaacatccgcttccacaccggcatgctcggcgagatcgtgcgatacggtctcccctccggcatccagaactgcgtcattggccttgccaatgtcatcgtccagtcgcagatcaactcgttcggcatgctcgcgatggcggcctacggcgcgcactgcaagatcgaaggcttcgcctttctgcccatcacgagcttcacgatggcctgcaccacgttcgtgggtcagaacctcggcgccaagcagtatgaccgcgccaagcgcggcgcgcggttctgtatcatcatcgccgtcgtgatggccgagctcatcggcctgtgctattacatctgggcaagtcagttcatttctcttttcgacagcacccccggcgttgtcgccctcggcgtgcaacaggcgcgcacggtggcactgttctactgcctgctggcgttttcgcactctatcgcggcggtctgccgcggcgcgggccgcgcggtcgtgccgatgatgatcatgctctccgtctggtgcgtcatccgcatcatctacatcatgctcgtcgtccacttcatcggcgagatcggctacatctactgggcgtatcccctcacctgggcgatcagctccaccatctatctcatttattacctgcgctctgactgggtgcacggatttgaaaggtgactctatgtcttctcctgcgttccgcttccgcctcgccacgcttgacgacgctcccgcgcttctgagcatctatgcgccgtacgtcgaaaagacggccatctcgtttgaatacgacgtaccgtcgctcgacgaattccgccgccgcatcgcggatatctcgcgcaaatacccttatctcgtcgcggaagatgaaaatggccagctcctcggctacgcctatacgcacacgttcatcgcgcgtaaggcctacgaccactgtgcagagtcgacgatctatctcgccctcgacgcgcgcaagcacggcctcggcaagcgcttctaccgcgcgattgaggagctgtcgctcgctcagaacatctacaatctctatgcctgcatcggcgagccgcaaggcgcgggcgatgaatatttgacggacaatagcatccgcttccacgagcacctgggcttccggcgcatcggcgtgttcacgcgcagcggctacaagttcggccgctggtacaacatgtcctgggcggaaaaactgctcatggagcatcccgagcatcccgaaccggtcatccccttcccgcagctcgacaaggcgcttgtcgccgacattcttcgccgcgccgcggaataaaaaaccgaaattttacaaaaaatcatgcacaccctattgacattgccgatggggtgtgctatatttccgctcaagttaataccgcaaaccgttgaagcggagataacggcagtgatgccttcacagagagcctgcgatgctgaaaatcaggcaagatacacattgtcaaatggaccgctgagggtgcagcgaaatgcgtttgatgcgcagagtatcctgcaacgtgttggcatacgtcagttgccgggagatatgatggtatctccgccaagcgcacgggtaaccgtgaattcaaggtggcaccgcggatcgttcgtttctctcgtatcgcattcgtccttgacagaccgttctgtcgggggcgcttttgtttgcgcaataagctcctttggcagaacgccaaaggagcttttctttttcaggaggtcactcatgcatatcctgccaccgctcgaaaccgtcaaagacatcgccgcgacgcagcagtacgacgtgctcccgctgagctgcgaaattctttccgacttcatcacctccatcgaagcgatgcgcatcctcaagaacgtgtccacccactgttacatgctcgaatccgcgcaggcggacgaccgctggggccgctacacgtttttgggcttcgacccaaagctcgagatcacgtgcattgacggcaaaatgaaggctggcggcctcaccgtccgcacggacgatccgtcccaatacctgcgtgagctgctatcaagctacagaagcccccgcttcgactacctcccctccttcaccggcgggctcgtggggtatttttcttacgattatctcaaatacagcgagccgagcgtccgctgcggcgagcaggacgaggacagcttcaaggatgtcgatctgatgctctttgacaaggtcatcgccttcgatcatgtgcggcagaagatcgtgctcatcgtcaacatggcgctcagcgacgtcgaggtcggctacaacaaggcaaagcttgagcttgagcagctcgtctcgctcctcaaaaccggcaaaaagaagcaggaagcgccggggcggctcctcggcgaagccacgccgctcttctccaaagagcatttctgcgcgatggtcgaaaccgccaagcaccacatccgcgagggcgatatctttcagatcgtattccacggcatgaagtcctacttctcccaggacgagtacggtcagatcgcgccggtgtattccatctccgccggtctcgactaccccggcgtcggccctgagcatgcgtacctgcacgacatcggccgcgcagagtatgttgccatcaccgatgaggaggccgtgcaggcgttcgaatacctcgcccgcacggagggcatcattcccgccatcgaatcggcccacgccgtcgcctacgcgcgaaagctcgcacccacgatggggagcgatcagcttcttgtcgtcacgatctccggccgcggcgacaaggactgcgccgccatcgcccgctacagaggggaggatcttcatgagtgatcttgcaagagcatttgaccacggcaaggcgttcatcgcctttctgacctgcggcgaccccgatcttgaaacgaccgcggctgccgtccgcgctgccgcgcaaaacggtgccgacctcatcgagctcggcattcccttctctgaccccacggcggaggggcccgtgattcaggcggcaaacctgcgcgccctgcaaagcggcgtaacgaccgacaagattttcgatctcgtgcgcgagctgcggcgcggcgtgacgatccccatggtttttatgacgtatgcgaatgtcgtcttttcctacggcacagagcgctttttgtccaactgccgcgatgttggcatcgacgggctcatcctgccggacgtgccgtatgaggaaaaggaagaatttctccccgcgtgccgcaagtacggcgtcgactttatctccctcatcgcgccgacgtcggagaaccgcatcgtgatgatcgcgcgcgaggccgagggcttcctctatatcgtctcgtcgctcggtgtcacgggcgagcgcagcgagatcaagaccgacctcgcctccatcgtctccctcgtgcgggaaaacacagatattccctgcgccatcggctttggcatctccacgcccgagcaggcgaagaagatggccgacctctccgacggcgcgatcgtcggctccgccatcgtcaagctccttgcccagttcggcaaggacgcgcccgagcacatcggtgcgtatgtaaaggaaatgaaggacgcgctgcggtgaaaacaggaaaaaggggcctctgccttgatgcagaggtcccttttttgcataaatacgatttgtcgtcccgtcattcgatggagaacgtctctccgaagacggaaacactgctcaccgtttccgggtcaagaatttcatccatccggaagcagtagcgcccgcgcttatcggcataattcgttataaggaacaaccagtccgccgcgccgaccgtttcgccgttttgcagcgtcacctcgggagcgatgctctccttcccgtcgtcgctgtagatgggctcaaccgtttctttcagatcatccgttccctgcttgatctcgcaggtcagcgagagcggcgagacatagagcgtcgtcagcacagcgttctttccctcgatctcgatcggctcattcaccgtgcacaggcgtcccggatcggtctccggcagagtgaatgtgcagctccagcgcccgggaacaacaagttcttccccccagttgtcccgatacaggccatcgagcgtcaacttcaccttcgcaccgatgaagttgaattctcctttcagagaatggatcgtcatcaggatcgtggcatggcggcccgtctcatcctccgtgctgcttggcaatacctcccagccaatgccgtaggtctgcattttcactccgtccctggacgttgcggacacgctccgatcgaatgcgtagtagtcctgatccagcactgtcccctccggcgcggtaaagtcgatgaggacctccgcacaatagcggtcggcgatgacctgctcgatgcgcagcaccgcgccgctgtcccgttccacaatgttcattgggaccgccgcagtcgagagcagctcttcctgctccgcagttgctccaaagtactccgccaaccgctgatccagtccaagcgccgctgcagctgccgccatgcagcacaggatcgcgatgaccgccgcaagcaccgccgccgtgcgcaggcggcctcttctttttgtcttgtgcgtcatgttcattacctccgaaagtgtgtcttcggaggcgtgaagcgcagagactgtctcctgatataggttttcgtcaaacatcgttgttcgcctcctgaagatcggttttgagctgttcccgcccgcgccgcaatcgggtgcggacggtcgcgttgggaacgccaaggaattgggagatctcctcgcaggagtagccctcataatagtgcagaaagatcggcacacggtatttctgcggcagcgccatcacagcatgaaaaagttcgctgtgctccggcgttttgaacgcaagctgttcggcataatcatcgatcgcctccgtccgcttccacggagagaggaacgcccgcttgcactcgttgaccgtaacacggatgagccagtgcctgacgtggtcctcgctctcaaacggtttgtccgtgcggtagagcttgagcagcacctcctgcgtgatgtcgtccgattccgagcggcttttggtgtagtggagcgccagacggaacaccatgtccatatacttttttgcaagatacgcaaactgttcttctgtcagcatggaatactccttgaaaagcctttcacctactatatcattcaggctgcggaaatgtttcacatttgaaaagattttttgaaacggccctgcattctgacgcaagcgaaaaaagaggggaatttttattaggaaggctgttcgtaaagtgcaaaaaataacactgctttctgatctctaaaaaatccagttctctaccaccccaaagaatctaatgtaaaagaaaaaacccaagggaaaagacccttgagtttcaacactttggtgcgcgaggcgggacttgaacccgcacgtgcgtaatgcacactagaacctgaatctagcgagtctgccaattccaccactcgcgcatatttgatttttaaaaagatggtgcggatggcgggacttgaacccgcacgtccatacgaacactagcacctcaagctagcctgtctgccaattccagcacacccgcatgttcatctttcaaacggctgtctctcaacgaccgcttggctattataagcccaaaataggccaaatgtcaacctttttttgagagaaataataaaaaaatttgctgtaagagaaatggcggaaaagctcagattttccaaacttttccggcatctttttcgtgttaaagctgcgcgagcgtctcccccaccgcgcccgtgatgacaaggtcggcaccaagtccgcggtcgagcggcgtcttgttgatgacaacgagcttgtgtccgcgatagtagcgcacgaggcccgccgccggatagaccgcgagcgatgtgcccgcgatgatgagcacgtcggcctcctgaatgtactccaccgcgcgatagagtgtcttttcgtccaggccctcttcgtagagcaccacgtcgggcttgatgcgcccgccgcaggtgcagcgcggcacgccctgcgaatgcttgatgtaggacacgtcgtagaacttgccgcacttctcgcagtagttgcgcaaggtgcttccgtgcagctcgaggacattcttgctgcccgccgcctgatgcagcccgtcgatattctgcgtgatgacggccttgagcttcccttccttttcccactcggcgagctttaagtgcgcggcgttgggctttgcgccttcgcagaggagcttcgcgcggtaaaaggcgaaaaacttctcgggatagcgctcataatacgtgtgactcaggatcgtctccggcgggtcgtcccactgctgatgatacaggccatccacactgcgaaaatccgggataccgctctcggtcgaaacacctgccccgccgaaaaacacgatgttgtccgttccgtcgatgagttcttttaatttcttgacttcgtccgtcatagcttctcctttgcgcgcgtgcgcttatctcacatagctcttgtcgatctgcacgatggcaaaatagcgcggatcaagctcgtgtaccgcccgcttgatcttctcctccgcttccctgtcgctcagcgcgcagccatacggcaccacggcatcgaagatgacgttcgtgtgcgtcggccccgtgaccatgcgaaagtcgtggatggagatattctcgtcgatgccgcgcacgagcgaggcgatcttctgatgcgcggcgttggtggtctcgtcgtccgtcacgatggggtccatgtggatgaccgcctcgcagccgagcctgtcatgcagtttcttttccacgttgtcgatctcgtcgtgcagagcgaggatatcgccgtgcgcggggacctcagcatgcagcgagatcatcacgcgtccggggccgtagtcgtgcaccacaaggtcgtggatgccgcagacaacctgactttccatcacgatgtcgcggatctcctgcacgaactcctccgatggcggctggccgagcagcggcgagagggtgtcccttgccgcctgcacgcccgcccacaggatgagcagcgacacgaccaagccgcaccagccgtcgatctgccaatgcaggaaatagcccgcgagtgtcgcaagcagcaccgccgcggtcgccgcgcagtcggacaggctgtccgccgcggtcgcctgcatggcggcggcgctgatcttcttccccacgccgcggttgtagcagtacatgtagaacttggcgcagatggagacaagcaggatcgccaccgtcagcacgctgcactccacagcctcggggtgcaggatcgcgcccacggcgtcacgcagcagttcaaagcccatcagcaaaatgacgatcgagacgatgaggcccgagatatactccagccgcccgtggccgaacggatgctcggggtcgggcttctgcccggccaaacgaaagcccagcagcgtcacgatggacgcgcccgcgtcggacaggttgttaaaggcgtccgccgtgacggcgacagagcccgcaagcgtccccgcaaacagcttgagcgcgaagagcagcaaattgatgacaatgcccaccgctccgcaaagcacaccgtaagcgcgccgcactgcggcatcagacgtgttctgatagtctttgatgaaccgactcgcaagaaaaccgatcatagtcttccctcactcgcttttgatctgtaatttcatgcggcagcagaggcggtcaaggtcctcatccgttgccgcagggatgcgcagcttcgcgccgcagcttttgcacacaaggtcgacgtaggtgctgtggatctccatgccgtagcttttgctgccgcaggagcaggtgataccgtccttgcgtgcggcgatctccttgagctcggagaggatctcgtacatgatgacgctgtcggcaaaggcggcggggtcgtcgccctgctcgcgctccttggccgccgcgagcgagagctgctccatctcgtgctcgacggcgtagtcctcgccgataaagcagcagagcattttcgtatcggggcaggcaaggccgatgccgcgcccgtgcaggagcttgtcggcgctgcactccgccagatgctcctcaccgcacacgccgcacggcacgctcaggcgaaatttattttcctccgcctcgatggtcaggcttgactcgccgcactcacagctcacgaccgcgcccgaggcgctcagggcaaacacgcttctctgctggatgacgcgcttgtggcacgcggggcagagatagccgatggtacgcatttcttctttcattccatttcctcccggaaagtaaaatatcatatggtaatctgaatattataccgcgtccgtgcgcaaaaagaaagggagaaacacgctgtttctcccttttctttttggttttcgcgctttacggcttgaccgcgatggcctcgatctcgaccagcgcgcccttgggcagggcggccgcctgcatcgcacagcgcgcggggcactcgccggagaaatacttgccgtacacctcgttgacaacgccgaaatcgccgatatcgatcataaacacggtcgtcttgacaacgtcctcagccttgcagccagccgcctcgagcaccgcgagcagattcttgatgctctgctccgcctgctcggacgtgccgccgggaacaaatgcgccggtcgccgggtccagcggaagctggccggagacaaatacaaaaccgtttgcttcgatcgcctgggagtaggggccgacggcgccgggggcagtggtcgtagaaatcacatgcttcacggaaaaatcctcctatatcaatgtattttcatcataacatcttgcgcaatatgcgtcaagtactcatattcttggaaaaacggcagaaactaatgccgcttttgagcgattcccctaaatccatcggaaaggaagagcgtgatggaacaaaaaaccgtcggcgcgcagacgcgccgcctgcgcacatgtccctccgtcctctcgttcgccgccgtcggcgggcggttcgagggtgaaggcccgctgcgcgaatactttgacgaattgagcgaggatcacttcttcggcgagaagacctgggaaaagggtgagagtaccatgcagcgccacgcgctctcccgcgcgctggaaaagggggggctcaaggtgagtgaccttggcctcatctttgcgggtgatcttttgaaccagtgcgtcggctcgtcgttcgctctgcgagagagccgcatcccattctatggactctacggtgcgtgctccacgatgggcgagagcctgtcgctcgccgcattgatgctcgacggcgggtatgcctcttgcgccgcagcgctgacctcctcgcacttctgcaccgccgagcggcagtaccgcatgccggtgccctacggctcgcagcgcacgccgaccgcgcagtggacggccacaggcagcggttgctgcctcctcgcgtgcgagggcgaggggccctatatcacacacgtgacaaccgggaaaatcgtcgacaagggcgtcaccgacgcaaacaacatgggcgcggcgatggcccccgccgcctatgacacgctgtgcgcgctctttcgcgacacgaggacaaaacccgaagactatgacctcatcgtgacgggcgatctcggcaggctcgggcatcagatcgtctcggactttttcgcgcgcgatgggctccctctcggtgagcgctacaccgactgcgggcttctgctctacgacattgaatcgcaggatatgcactgcggcggcagcggttgcggctgctcggcaagcgttttgtgcgggtatctgctgcgcgggatgcgcgagggcaaatggaaccgcatcatcttcgcgccgacgggcgcgctgctctcccccacgacgacatttcagggcgagagcatccccggcatctgccacgcggtcgtattctcgaatcacaaggagggataagcggtggattatctgaacgcctttctctgcggcggcatcctctgcgccatcggacagattctcatcgacaaaacgcccctcacgcccgcgcgtatcctgacgggctatgtcgtctgcggcgttttactgacagccatcggcgtctacgagcccatcgtcaaatggggcggcgcgggcgcgaccgtgccgctgctcggctttggctactcgctcgctaagggcgtcgaaaaagcggtcagcgagcagggctggctcggcgtgatgaccggcggcctcagcgccacggcgggcggcatcgccgcagcggtcgtctttgctgtgctgatggcgctcatttttaagcccggcgacaaacggtaataataaaaaacgaggagagggttttcaccctctccccttttatggaaaatcgctttttacgatgcgcgcaggccgggctcttcgatctgctcaagcgtcatcactctggtgtggcagattggcttccactcgaccttcgtaaagagcgacgcaatgcagatcggcacgtaggtgagcatgaagagcgggaacgtgaaggcgtagagcacctttttccacgccgcgcagcggatattcttccactccgtcacggtcgtgatcgcgccgagcacaaagagcgttaagtacaggctcatcagcgtttgcagcacggagaccgccagcaccgccatcgaaccgcctgacgtcgcgttcgcgatcgccgcgccgatgttcacgaccacgctcaaacccgtgagcaccgccgcgggcatgatgttcatggtcatgtcatagcaggaaaagctgccgcgcgcaatgccggagaagagctcggaggcgtacttgcggaacacctgcaggtagcccttcgaccagcgcatgcgctggcgccaggactgggcaaagctcgtgggctgctcgtcatagagcaccgcgcccgccgcgtagccgaccttttccccgcgcacgacgttgtcaatggtaaactcgatgtcctcggtcagcaggaagaagttccagccgccgcacgcttccagcacaccgtcggaaaacagaaagcctgtgccggacacggcgcagctgcttccaaggcgcatgcgcgcgttattgagatactgcgcctcgcgcaggaaccacagcgcatagcccgcggagatccagttgtcgccgtagtttttggagttgcggtagcacgtcacgatctcatagccgctggagtagaccttctcgatctcggagatgaagttcgggtcgaggatattgtcggcgtccaacacgagataggcatcgtagtgcttgcggcccgggcgcttgatgcgcttgagcatttcattgagcacatagcccttgccgacatgcaccgtatcgtggcgctcaaagacgatcgcgccgcgctcgcgcgccacacgggccgtgtcatccgtgcagttgtccgcgccgacgtagatgtccacgtggtccatcggatagttcttctgcgcgtggatgctgtcgagcagctggccgatgacgttttcctcgttgcgcgcggcgatgaggacggcaatgcggtggttttcattgcggcaggtgaattttttccgcttcagcagcgccaccgccacatagaagaattgataggaatagcatacgaaaaatagcgccatgatgacggcgttgatcgtgatgacagtctgcataatatgttcctccattgccggaagctccggcccattttggtttctttcccgcctgtgggaaaagttatatcatgcaaaccttgtgattccactgtgaaaattcttaacaaattccgaacatccacggtagaaattattaagccctgaaatgagtaacaggcagtgccgctggcgctgcctgttcactcttttataatgtaatcgcgcccggtttgacatcggaatcgtggttggcgatgcacgcaacgcagttccgctcccgactctgtgccctgatccacgcgagcgactttttctgcgccgcgcggtcgtcggcgatgccggagagcagcaccgcgtcccaatcgacaggcgcgacgccccgcgccgcgagctgctcgtcgacggccgcactgctttcgacaacaacctgattcgtaaaatacagcggcagcgagccgagcgagcggatctgcgccctgcgctcaaagatgccgtgcgggctcatatcgcggtgccagccgcagtcgaacagaacgttcccgtgcgcgcactcgatgagataggccgaaaccggcagccagagccggactttctatccagcacgccagacgccttgagcgcgctgtaatgctcgccgccgaacggcagctccggcgcgacgcacaccttgccgatgtggaaaatatgaatcttgatctcgctcatcgtctgcctcccgtcttgaaatgccatcaaatcccgtcaaatcccgcttttttcggtctctgccaaaaggcacttgcagccctctgagacatcccgccacgtcgcttcaaaatcgcctgtataccacgggtcggcgacgtcgcccgggcggtcggtgtagtcgagcagccggtgcatcttccccgccggatcaccgccgcagatgcgctgcatgtttttgaggttcgcgccctccatgccgatgagcagatcgtactcctcgtagtcctgcgccgtgagctggcgcgcagcgtgtccctcgcaggaaatgccgtgctcggcgagcttgcgccgcgcgggcggatagacgggattgccgatctcatcacggcacgtcgccgcggagtcgatctgaaattcgtcggcaagtcctgccttttcgaccaggtccttcatcacaaattccgccatcgggctgcggcagatattgcccaagcagataaataagattttcgtcatagtctttctccgtaagttttgataaccgtaatgtaacagaaaaatggaaaatcgtcgagaagaaatgctgtcttttcgttcagaacttgtttgtaaattcgatactgcctttccagtccatagaaggcgtgctatgattttatgggagcgcagaacacactaaagaaatacggaggtgtcacatgactgcagatcaaggagaatatgagaaatttatggcaaaactttctaaatcaggattggaactccaaaaggactttagccgcctctcgctggaaaatcaaaagcgttttatgcaagaggtcaaccaaaggctaaagtgttttggacatgcagtaaccattaccgatattctacagagtctatttcgtgggacgagctgctatct

SEQ ID NO: 10136 - DNA, 26798 bp, Unknown
  gut microbiota DNA sequence
cttttttcggcaaactacgaggaaaacacccgcgcgctggatgatctgcttggcgtggggcggtgctttgatatgatctcgcgcgacttgtatgtcggcggcaggcgggcgcggatgtgggtggtggacggttacggcgacgacgcggttattgagcggatgctgagcttctggctgccgctcagagacgttagcgacgcgcagacgatgcagcagttcatcgaccgatacatcacattcaacgaggtaaacgccgagcaaaacgtcaaaaacacggtgacaagcgtatttttgggcaagatggcgctgctggtcgagggctatgacgagtgcgcgctgatcgacgcgaagcagtatcccgcgcgcggggtggaggagccgtcgtcgggcaaggtgctgcgcggcgcgcacgacggcttcatcgaaacgcttgtcgccaacgcggcgctgctgcgccgccgcattcgcgacccgcagcttacgctcgaaggtcacaaggtgtcggactgctcgcgcgcggacgtggtgctctgctatttggaaaacaaggtcgacagaaagctgctcgacgaggtgcggcagaagcttgcaaagatcgacgtgcgctcggtttcgatgagccaggagagcatcgctgaggcgatgatggggaagaagcaatggtggacgccgtttcctaaagtccgctactccgagcggcccgacgccgcgacggcctgcgtcatggaaggtgacatcgtcgtgctcgtggacaactcgcccgcggcgatgatcctgccgacgcactttttcgactttgtgcaggaggcaaacgacttctactttccgccgctgatcgggacgtatctgcgcatcctgcgcatcgtggtgttcctgctcacgatgttcatcacgcccgtgtggttcctgcttttgaaggacccgtcgcgcacgcaggcagggcttgagtttttagccatcgacagcgactattccgtgccgttgctcgtgcagcttctgctggcggagttcattgtcgacctattgaagctcgcctcgctcaacacgccggatgtgttctcaaactcgttcagcatgctcggcgcgctcgtgctcggcgattttgccgtgcaggcgcactggctcgtgccggaggtgctggcctacatggccttcgtcgccattgcgaacttcgcccagccgagctatgagctcggctatgccttcaagctgctgcggctgatgctgctgctgtttgtcggcgcgctggactggatcgggctggtgctcgggtgcatcgtgatcgtcgtgctgctcgcgacgacgaagccgatcgtggggaaggggtatctctatccgctctgtccgctcgacaaaaaggcgctgcttgcgctgctggttcgaaagcccatcagccgcgacaacacctgaggacaacaaaaaaggcaccctgcaaaagcaggatgcctttttcttgttggttcatgcgcacagatgtgcggcacgagaaagtcgtgagggattttcgattagaaaataccctgagccatcatggcgtcggcgaccttctggaagccagcgatgttagcaccggcgaccaggttgtagcccaggccatagcgctcggcagcctcaacagaagcatcatagatgttcttcatgatggactccatcttggcgtcgacttcctcagcgctccagtagatgcgctgagcgttctgagccatttcgagctcggagacggaaacgccgcaggcgttaacagccttggaaggagcgacggtgaggtgcttctgctccatcaggaaagcgagagcatcgttggtggtgggcatgttgccgacctcgatgtagtagggaacaccggactcagcgatcttcttcgcccactccatgttgacgtcgttctgggtagcggcgggcatgtaaacgtcaacatccttgacgccccagcacttctgaccctcaacgaactcaacgccgaacttgtcagcgtagggcttgcagtgcatcggatccttggcgcgcatctcgaggatgaagttgagcttctcttcgccgcagacaccgtcggggtcgtggatgtagccgtcggggccagcgaagtaggtgaccttaccgccgagctcgtcgatcttcttcatgatgccccagcccacgttgccgtagccggacatggcgacacggatgcccttgacttccttgccgtcgtgcttcaggacttcgcgcagataatagacagcgccgaaaccggtagcctcgggacggaggatggaaccgccggtgcagatggccttgccggacatagcgccgaactcggcagcgccgacgatgcggcgatactggccgtacagataaccgacctcgcggccgccgacaccaacgtcaccagcggggcagtcgatgtcctgaccgatgtgacgatggaactcggtcatgaaagcctggcagaagcgcatgacttcgccgtcgctgcggccgatgggggagaagtcggaaccgcccttggcaccgccgatgggcaggcaggtcagagcatccttgaaggtctgctcgaagccgaggaacttgatgatggaaaggttaacgttggaagcgaaacgcaggccgcccttgtaggggccgagggccgcgttgtactgcacgcggtaaccacggttgacgtgatactgaaggttatcgtccatccagacaacacggaactcgatggtgcgctcgggctcgaccatgcgttcaagcaggcaggccttctcgtactcggggtgggcgttgatgaccggctcgagggaagacaggacttcttcgacggtctgcaggaattcgggctcattcgcgttcttggccttggtctcggcaagaactctctcaatgtaagcgttcatgataagtagcctcctctaaaattaccctgaaaatcagggcttgatggttcagccatcttgtctatgagtttatcaccaaaggaaaaaattctcaagcaaaacgctattggcgctgtgcaagaaattctttctgactttttgtgcatttggcagaaaatttggcaaaaaactttaacttttttaataaaacatattagattgatgcaagccaactttcaaagtggtgatcttatcgagaaaaactgctcataatcttgcatttttgtgcaatgcattccaaaaagagataggggtgtcgccacccctatcaaaatttgtaatagaaagtgctttgccgccgctttacggcatttcctgtgcgttttcgacgggatccgcgctgtcctcagtcgaaacgctcgtttctacgggcggtgcgctctgggcgctgccatccagcagctcgacgtcggacgcttcgatccagttttccgtgacgtagccgtcgcggaaatagacgcacacatggtcgccgacattcagaagcggtgcataggcgacctcagccgcgctcatgcgcacggagaaggcgctttcgccctcaaagcgcaggaagtagatgctgttgccatctacgaccgccgtgcggatctcggcgatcgtgccctcgacgctcttataatcgctcggcgtgacgtcgatggagccctgatcgtcggagatgaggttatttttgagcagcatttgacggtagttcgcctcgcagtcggcgaccgtcgcgccgatggcgacgatctggtactggttgacattgaccatcgcgtacatcttgacgagctcgctcgcgtccttgagcgccatgaagtacgtcggctgctcggcgatgttcagcagcagcgggaacgtcgcgttgtagcgcaggttctgcacctgaccctcggcgctgtccatggcgctgtactctgtcgcgcctgcgcagggatagtactttgtctcctttgtgcgctggttggagagcaggaagccgatgttgctctcgtcgccgccgacgctcgtgacacccgtgtagagatagacgtcgtcgccctcggcaaggtagttgtagccgtcggtcgtgacggtcacgtcacgctggccgaagatcgaattccagaagccattgtgatactggccatagtagtcatactgctcgatgatgagctcggcggagtagacgtggtcgacccacgcgggcggctcttcatagtattcgctctcgcccgtgatggcgttgacgagcaccgcgccgtggttgtccgtgccgccgaacaggccgatggtcttttccttcttggcgcagacccagtagggcgtgccgtcctcgttgatctcgaagaccggttcttcaaacatataggtcgggtacgcgaagcgcagatgacggtagaggttgcgggagaagtgctcggcggtcgtgtacttcatgccctcgtcaaggcgcacgacctcgacgttctgcgtgaccatgtcgatgataaggtaggcgggcagcccctccgagcggttgttgaaccacttgatgatgtcgccgtagcgcagcggcgtgacgcgcacggggcggccatggtagttgatctgcgtgtagttttccgcgacctcgaactgcgagaccatgtcggccagctcgccgagcttgcggtcgccgagcttttcggcgctgtcgcggtcgagcatcgggatgcggtcatacgagacctcttcaatttcgcttgcaaagctgccgctgtcgatcggcagcagcgcttgatagtccttggcccgcagcacgacccacgatgtcagcgcgccgacgagcgccgtgacgatcatcagcgccatgacgataaagggcacggtgcactgctttttgacgaacgtgaagtagcccttggcccccgtgccctgaaagccggaggtgaagagcgcgcagatgcagtacgtgacgcaaagcagcagcacgaaaccgtagaactcttcggcatgcaggttgatggcgggcatctgcacgtagaagaagactgcgccgacaagcagcgtgacgagcgtgttgaccgcgatgcggccgcccttgctgccgatcgacttgcggggcttgcgctcgcgtttgggcttgggcgcggcgttcgggtcgaactgaaagccgccggcgtccgagccggaaaatttgatatccatagaatatttcctttctgatgaaatgggaacggtgcttatttttatagtataccgtgattgccccataaaaacaagggcggggcaaaaatcgtacaccggcggcttgaatagtgaaaatacaagagcggaaaagtgattgtgcatgtcgtacgggaaaaggagtcgatatgttgtatacagtggctaaaaatgcagtttgtttaaactttaacttgctattttcactttgcctcgttatcatggcggtagagcggcatgcgcgtgccgcccaatatcgaacgaaggagaatttgtatgaaaagattgtctctgaaagcaacgtccctgatcctggcacttgttctcgcgctcagtctctccgtcaccgccttcgcagatgataacgccgcttcgatgacccgcgccgaagtgacgcaggaggtcatcaagaacatgggcctcgccgcacaggcggaagcgagcgccaaggatgcgagcgcattcaaggatgttgccgagggcagcaagtttgaaggcgcgatcaacctcgcctgctccaagggcattgtcaacggcgtcagcaaggacgcatttgcgcccgacgcagccgttacgcagttggaagcggccgcgatgatcctgcgcagcaccgttctggacaaggcgctgctgaaggattggcccgcggactatgacgatatggccgtctggtccggcctgatggacggcctgacctacgaggcgtccaagcccgtgacgacagcgatgctcgagcagatgctcaagaatgccgcggcgatcgcggacaagccggtcatcggcatcagctggtcctataatggacagaattacgactcccacaagacgatcttcaagaccgtcggcgctatccccgtcgagctcgatcaggtgacgagcacggccgtgaagtacgatgccgagggcgagatcgagtccgcgtatctcgaagagagcggcatgctcaagcaggaatacgctgacaaggtgaaggaaaaggatctcacggccagcaacgtcggcgctgtgatgcaggccatcgacggcgtcttcttcaccggcggcgaggatgtgagcccgtcactgttcaaggtccccgagaaggaaaagaacgagggcgaagagatcaacgccacgcgcgatatctccgactacatgctcatggcctactgccttgaaaaagacgtgccgacgttcgcggtctgccgcggcgagcaggtgatgtccatcgtctccggctgcacgttcatccaggatatccccaactactataaggagcagggcgcgacctacaacgactcgcacagaatgcccgtcggcgcgcctgaccgcacctatgcccgccacgatgtggtcatcaataaggacgcctccaagtggctctataagatcgtcggctccacggagctgaagaacgtttcctcctggcaccaccaggcggtcggcggcgttgagggcacgaacctcaccgtcgtcagcacggcgacgatcgacggtgtggagatcatcgaggcggtcgagcgtcaggataagacgttctgcctcggcgtgcagttccaccccgagaatgactgcaagttcgtgctctacaccaagacccccgaaaaggccctgtgcgactatgagacctgcctgaacttcttcgagatgctggtcgagtacgcgggcaagtaaggacacgtaccgtacaacagaatgcatagaaaaaaggtcccgtcttcggacgggacctttttgatgtattgtaattgtttacgacgccttctgcactttcaggatcttcaccgcctcacgggcggaggcaccggcgtcctcgccgtagaaatctgcgccgatttcgtcgcagaagctctggctgatgggcgcgccgccgatgatgaccttgatctggtcctgcaggccgcgctcgtggacgagcttgacgacctcgcgcatttcctccattgtggtggtcagcagcgacgagcaggcaatcacgccgcagtgattttccacggcggtgctgacgaactgctccgccgacgtgtctacgccgaggtcaaagacctcgatgccgctgccctccatcatgatgcggacgagattcttgccgatgtcgtgcatgtcgcccttcacggtgccgaggcacacgcggccgacgggctcggtgccctcgccgaccatcaggggcttcagaagctccgtggcggcggacatgcagcgcgcggccatgagcatttcgggaacgaacgcgcggttggcggagaacgcctcgccgaggcggttcatgccgatgatcatacccttggagagaatgtcgcccggctcgtggccttcgtcgagtgcctgctggcagagggtgagcagctttttctgctggccgcgctcgagcgcgcgggcgatgttcccgaacacatcggcggactcctgcgcggaggttgcggcttgcaccagctcggcctttgcggcaccgatctcacgcctcggcacggcggggagcggcgtgacgggaatgtgcagccccgcgttgtactcgttcacggcctgatcgaggtactgatccacgtgcgggaagaccgtaccggcaaggccgtaggtgatcgaggggatgaagtgcccgccggggcaatagcgcgcgagcgcgtcccttgcgtaggcgagaatttcatcgggctgcgcgtctgcacggtcgatggccgcgccaaagccacccataagcgtgagcttgccgcttaagtggcgctggagggcgggaatgtcgttttccggcagtgtaccctgccagacctgaatgccgatctcggccatgtcgtccacgatggggacgaggtacgagtcggcgtggtggatggcgatgacgccgcgcgagcggatgtagccataaaagcggcggtagggctccttgaaaaactcgcgccacatgtcgggcttcataaagagggcatttttcgtgccccagtcatcgtgggagaagatgacatcgggctgcaagccgtcgatcagacggcggacatagtcgagacggtactgcgtgatcgtctcgatgagctcgtgcatctcgtcgggatgctcgtagagcgcggtcagcgtatcttcaaagcccatgaggaagtggcactgctcaaaaatgcctgtgcccatgaagccggcgaggagcttgccctcggcgtccgcggcggcgcgcgagcgcgtgcggcactcctcccagccctcggagcagacactcaggtcgggcacgtggatggtctctttccagcatgtgacatccgtgcagactgacagctccggcgtgtggacggggatggggccgggcgcgtcctcgggaaaactgatggtcgtgccccaacggtccttgctcacggaaccgcgtttgcggtttccgcgaagataggtgttgatggggtccgtgaggcacatgtgcagcgcttcatactggcagagctgacgcgcgggctggccgtcgggcttgatgagttcaagaaaaatttctttcggggtagacacggggaagatctcctttatcaatacagcacgcaggctgtgtaggtcaaagtgcggggaccatagttgtaggcgaggtttgagcggacgcagacgtcactgacgaatagtccgtaggcctccatcgaagaaagcctctgcttgggatgtcgacagggacggtccggataggtgcaggtatggcagagcgtgcatgtgcccgccgtcaacggcagacagtgagggaataagagccgcgcctggcgggcgaaggtcgaaaagcgctttttatgcgcctccaagagcgacgtcataccagtgtaatcaaattcatcctcgagctgcgcggtgctctgcaccaaaatcccctgtgaatagcgcttgatttgcgcccttgcctgctcgagcgtgctgcaggcgggcgggcagctccagcttttgccgtagcggccgcagcggtcagctttgcacatgtcgcgaacggcttcgagcggatcgagtgcatccatattcaccggtgcgcactgggagaagccgacctcgtgggtgagggtgagaaggtctgtcataagcaatgcctcttgacaagggaatttatttctgcataaaatactatttatacattatttatctattatatgggtgggggaagctcgtgtcaagcattcaagttcagcagggggcgaaaatcacgccggtcccgttcgaagcaggggagacgctgctctccgcgctgcggcgggcgggatattccatccccgcagcctgcggcggcaagggccgctgcggcaaatgccgcgtgaaggtgaacggtgtgccgcgccttgcctgcaagacgaaagcgcaggacggcgattggatcgacctgcccgagacgatgcgcggcgtcatcctgacggacacgctcacactgccgaaggcgcaggcgggccgctcgggccttggcgcggcagtcgacctcggtacgacgacggtggcgctgcggcttttcgaccgcgcagacggaaagctgctcgcgcaggctcgggactggaacgcgcaggcgccctacggcgcggacgttatcagccgcatccagcacacgatggaagcgtccgacgggctcggcgagctgtcgcgctgtatccgcgcgcagaccgagacgcttttaggacagacactttccgccgccggacggaagacggatgaagtcaaggagctcatcattgcgggcaataccgtgatgcagcaccttttcgacgggcgcgaggtcgcgtccatcgcccgcgcgccgtttcagccggagacgctgtttgaagacggcgcgggtgagctgctttcgggcattcccgtgcaatttgccccgtgcgtcgcgggctatgtcggcggcgatatcacggcgggactgttggcagacggcctttttgtgcagccggaattgcggctgtttctcgatatcggcacgaacggcgaaatggcgctgggaaatgagagtggcgcgctctgctgcgcggtcgcctcgggcccagcgtttgagggcgcgggcatcagctgcggcatgccgggcatcacgggcgcggtgagccatgtgagctatgacaggggcttcctctgcgacatcgtcggtgggggcgaggcaaagggcatctgcggctcgggactggttgacctcgtcgccgtgcttttggagcgaggtgtgatcgacgaaagcgggcggctgctgccgccgcaggacgcgccggaggacatgcgccgctatctgaccgaggacggtcagggcaacggcgtcttccacctgacgaaggccgttagcctgacggcgcgcgacgtgcgcaacctgcagcttgccaaggcggcggtggcaggcggtattcgggtgctgctcgagcagcgcggcgtgacggcggacgacattgcgggtgtggagctcgcgggcgggttcggcaactatctctcgcccgagaatgtagtgcgcatcggcatgctgccgcgcgcgtgccttagtaaaatcagaccccttggcaacgcggcgctcgcgggcgcttcgatgctggcgcttgacggggaaaactggcgaaagctcgcggagattcccgaaaagtgccgctatctcgagctttccgggcgcgacgacttttcccgcgcgttcaccgacagtttgacattttgaaaatcgttccgaacaggaatttttaatggaggaaagccctatggaaatgcagtttcccgtgattttggacggcgcgaccggcaccgagctccaaaagcgcggcttcaccggcgacatgagcgccgagcagtgggtgctcgaacatcccgagagcatccttgaaattcagcgcaagtatgtggcgagcggctcgaatgtgctctacgcgccgacgttcggcggcaaccgccagaagctcgaagagcgcggcatcttcaaccgcacggaggagatgaacaaagcgctcgcgcagctctcgaagcaggcggcggacggaaaagcatgggtcgcgggcgatatcgcgcccacgggccgctttttagcccccctcggcgacgcgccgtttgaagagctcgtcgacatttacaccgagcaggcggcgggccttgagcaggcgggcgttgacctctacgtcatcgagacgatgatgacgctgaccgacgcgcgtgcggcggttctggcgatccgcagcatgagcaaaaagcccatccttgtgtcctttacctgcgatgagagcggcaagatcctctccggtacggacgtggtcgcggcgctttccgtgatggagggcatgggcgtgagcgcattcggcctgaactgctcggcaggccccgagcagatgttgccgcagctccaacgcctgcataaatacgcgcgcgtgccgctgatcgccaagcccaacgccggcatgccggagatcgtgaacggcgaggccgtgtacaactgcccgccggaggaatttgtcgcgctggtgcccgagatgctcaaggcaggtgtggccctcttcggcggctgctgcggcacgacggaggagcacatcgccgcgctgaaagcagcgctcaaggacgcggaatacgttcgccccgcaccggaatgcctcgaccttcttcccgcggcaacggagaaggaagccttcttcctgcccgccgatgcgacgcacggcgcggtgctgaccgcggacggcgatttggaggacaagctctccgacgcgatgaatgacgaatggccgatggtcgcgctgaagctcgcgtcctgggcggacgtcgacgcgctggcggactaccagtacatgcttagaaagccgctgtgccttatctgcgacgacgcggagcttttggaagcgggcctgcgcgcctatcagggaagagccttgtacgagggaaatctcaccgaagatgcccttgcgccgctggtcgaaaaatacggtctgctggtgtaaaaagagaaaaagaagaacgggacggaaatgaacatttccgtcccgttctctatatagtaaagcgcgtcacgccgcggcgccgccagtgctgacgatgcggaaatacgcattcgacgtcaggcggtacatcgcgcagtagagcagcgcgaaaagaagcagcgctgcgccggtcacgccgagaaacagcgtgaggttctggatgccgaacagctgcatgatctgccagaccatcggctgggcgaaggcgaggtgcagcgccgccgcggcaagcggcagcaggaaaatgagcagcatttgcgcgttcacgctctcacggatgtcgcgcttggtcatgcccacgcgctgcatgatggcaaagcgcgaggcatcctcatacccctccacgacctgtttgtagtagagcatcagaagcgttgcgaacagaaacagcacacttaaaagaatgccgaggaaaaagagactgccgtagagggagaaaaattccgcacggacgtccgccatttccgtgggatgccagtgattctggacggcaagcgtgttgatcgcgtcctccgcgccaaaatagaggctcgccgtcgaagcaagcatcaccagcaccatcgtcgagagaatgcaaatggaggcgaggcccgcgccgtttcgcttcatgcggtaggtgagcgacgagagggaaacaaagttgcgctttttgtagtagaagttttcatccttctggagtgttttgcagagcgtcacgctgccggagatgaagagaagatacgtcgatagaatgaccatgatgaccgcgaggaagaagagcagcatcgcctgtacggggtcgttgatggtcgcggcgatgtagtacgcgccgagcagcagcgcaaggccggggatgacgagcagccattgcgacttcggcggcttttcgccgacgttttcgctcttcaaaagcgccgcgccctgtgcgtggcgcagcgacagcacaccgcgcacatagagcagcgcgaagatggcgatgaacgtgatggcgcactgcttgatggcggcaaggctcacggtgaaagccgcggcggggagagataaaagccgcagcagtgcagactgcgagacataggagagcagcaggccgaggccaagccccgcgatcagcgtgaacgccgcggccagaagtgtctcccagaagagaatggcgctgagtgcgccgcggtccatgccgagcacgctgtaaaggccgaattccttcttgcggcggcgcaggagaaagctgttcgtgtagaagagaaacagcgcgatgaacaccgatacgacgaacgagccgaggctcatcgtcatcgcgaccgcagaggtgccggagccgttcaccttgccattgaccgtatagagcgcgggggtgacggcgaggtacgcaatgacatacagcatcgctgccatgaacgcgcaggagagaagatagggcacatagagccttgcgttctttttgatacccatccacgcaaggcgggggtaaaaggtgggcttcatgcgcattcgcctcccgtctgctgctgcgtgagcgcatcggtgatacgctggtagaactgggaatccgtgtccttgccgcgctttaactcgagcgagacctcgccgtcgcgcaggaacagcacgcgcgaggcgcagctcgccgcgcgcacagagtgcgtgaccatcacgatggtctggccagaggtgttgatctcgccgaagagcttcaagagctcgtcggtcgagcgggagtcgagcgcgccggtcggctcgtcggccagcaggatctgcggacgggtgatgagtgcgcgggcgacggcggcgcgctgcttctgtccgccggagacctcgtaggggtactttttgagcagcgtctcgatgccgaggtcgtaggcgagcggtgagagccggtcgcgcatctccgtgcgggacttgcccgcgagcacgagcggcaggcagatgttgtcctcgagcgagaacgtgtcgagcaggctgaagtcctgaaacacaaagcccagattgtcgcggcggaaggctgcggcggtttcttcgggaatctcggagaggttcttgccgccgagcagcactgtgccgccggtgggcttgtcgagcgcggcgaggatattgagaagcgtcgttttgccgctgccgctctcgcccatgatggcgacatactcgccggattcgacggtgaagttgacatttttgagcgcctggaccttgctgccgccaaagcgcgtggtgtaggtcttttgaagaccggaaacagtcaggatttgcatgagatgactcctttcaaacgagtgagttagaagctgacggttgacataatattttgttttcggaaaattctgccaaaaaaagggcgcaaaaaagcagccggaaaagcggagacctttcgcggctgctttttcgaaaacgcgttattcgagattcagttttttcgttgtgaagaaccacgttgcggcgtagcctgccgcggcgaagagcagttcgccgagcatgccccagaggagcagcagctcgatgctcgcgggcgcgctgtaaacgtccagatacatccagcgtgtgggatcggcgttgaagaacgcgccgatcatggcgatggcggtgaactgcgcaagctggaagaacacgagcacaaggatggtcgtccagagcgtcttgtgcttattgaagctgtaaccgatggagaaggcggcgtagaccacgagctcggcggcagaaacggcaaagacgaaattgcagaaaagctcaaagacgatcagcagcgcgtgactgcgcagcgaggcctccatttcgaagaacgctgtgaaaacatcattgaaaaaatcggggacatactggagagtgctccagccggagacagcaatcatcagcgagagaagtcccacgatgaacgccgcagcataccacacggcggaaacgatgagcttggagatgagcagctgatggaggctcaccggcagcgtcagcgtgagatagccctcgtccttgagcacatggtcgcgccagcggacggcggagagcaccagcggcacaaacgccagcgcaccaaggcccatcataaagccgatgaccagcagtacgccgatgagctgtaagagccagggaatgtgcccgccgttcaggagcagttgagaaaaacgcatcagcgccgtcagagccagcattccaagaaagaccggccacatgatgcggctcgttgcgcggaattcatgtttgatcagtttgctcagcatctgaatacctcccggaagagctcgtcaacgctcttgcccttttcatctcgaatggtctccacgctctcgtggagcatgacctgcccctcgcgcaggaacacgacctcgtcaaggatctgctcgacgtcggcgatcaggtgtgtggagatgatgaccgctgcgtcctcgctgtagttgccgatgatcgtgcgcaggatgtagtcgcgcgtcgcggggtccacaccgccgatgggctcgtcaaggagatagagcttggcgtcgcggctcatcgtcaggatgagctgcgtcttctcgcgcatgcctttggagagcgtcttgatcttctgtgtgcggtcaagaccgaggttcatcagcatcgcttcggccacgccgcggcggaagtccgaataaaagtcaccgtagtagtcaagcgcctgcgcgatcgtcatccagccgggcagcgtgtttcggtcgggcaggtacgagacaatggccttcgttgcgcggcagggggccttgcctgcgatcagaatttcgcccgacgtcggcgtcagaaggccgttggcgagcttgatgagcgtcgtcttgccgctgccgttggggccgagcaggcccacgatgcgcccgggttcgatcgtgagatcgatgctgtcgagcaccgttttggcgccgtaatttttcgtgagcgccttgcattcaaaaatactcattcttcctcctccttagctccctgaatgagagctatgacttcgtctctcgtgcagccgagcgttttcatcgagtggagaaattctcccacgcgctcgtccgcaatgcggagcttggcatttgcgatcatgttttcattttccgtgacgaaccgtcccgccgtgcgctgggaaaacaccagaccgtcgcgttcgagctcggatagcgcgcgctggaccgtgttggggttgacgcccgcctccaccgcaagctctcgcacggaggggagcttttctcccggcgcgtagatgccggagacgatggcctccgtcaaccgctgtgtcagctgggagtagatcggctggtcattgcggaagttccagtccatagtgatcctccttgtgtatcactgtattaagtaattagtacaataatacatcaagcgccatttgtcaatagccggacgcaaaaaagatcaaaaaatttcgcggcagaaaaaagccgcgaaattgacataaaatcctaaaacagatgttgcatttcgggaaaaatgtggtatcataaattcgaacaaatgttggaaggggcgcacaagatggaaaaactgtccagaatgcagcagcgcgtatacgattatatagcagagagcatcgccgaacacggctatgccccctctgtgcgcgaagtcggtgaggcgctgggactcaagtcaccctccacggtccacttccatatcaagcacctgcaggagatggggctcattgagaagagcgcgggcaagggccgtgccatcacgctcaaaaagcagctgcaggccgttcccgttgcgccgcagcccgtcgagatcgacgagcttgccccgcgccgccgtcaggtgccgatcctcggcaatgttgccgccggtaacccgattttggcgcaggagtgcatcgaagactacctgacgttcgacaccggcgggcacgatgacgagtatttcgccctgcgtgtgcgcggcgagtcgatgctcggcgtcggcatcctgccggacgaccttgtcgtcgtccaccgccagaacctcgcgcagaacgggcagatcgtggtcgcgctgcttggtgacgaggcgacggtcaaaacgctcaagcgcaagggcagcgaggtctggctcatgcccgcgaaccccgactaccagcccatcgacggccgcgagtgcacgatcttgggccgcgtcgttgccgtggtgcggcagtattaagcgagaaaagcaaacgctcctccgcgaatgcggaggagcgttttttgttgttatgggggaaagcgtagggttagagggagcgctgcggcaaactgaacgttatcaattggtgaatcttaaataatagtaggtagtcatttccttccataacatccattttcttaaacccgtgtcgtaaataaaagcgttctgcctgaatattatccttatgacaccctaaggcaatggggcgcttaccaaagtcacgataaacaagctgtatcgtcttttccaatatttctccgccaatgccgcaaccacgatatcctttatcaactacaaatcccgcttgttacgccctcatcccttgtcaaagtgcaccgtccagccctcgatcccgtagaacggggaggagacggtggggttcagtccgtcgatgaggccgctcggcgtcaggaccgacgcggtcttgaacgcgatgggcgcgatgggcgcgctctgggcaaggtagcggtacagcgcgcgggcggtctgatccgtctcattgagcgagaacgcatcgagcagcgtgttgcactgctcgtccgcgtagcggccgtagttcagcgcgccgccggtgcgcgcgagggatgaaatgtcccagttcgccgtcaggcgcacctcgccgagatacaggtcaaaattcccgttttgcagcgcggtcagatagtcgctccacgggagtgagcgcacgctgaccgtcagaacgtcggtcgagagcgtgcggctcagatagccggcgatggagaccttgaacgagtcgctctcgctgaccaggatcgtcaccgtgcgggggcggctttccgtcacgcccgcgctttcgagcgcagcggcgaggtcaggcgaagcgagcgtcgacgccatctccgtcggatagaggctggagtgcggcgagagcgggaagcgcgccgcctcggcgtgaccagcgaggtagcccgtcgtgatggtcgcgcggtcgatcgcacccgcgagggcgctgcgaagcgatgcatcggagagcggcgcgcgctgtgcgttgaagccgaggtagatcatgttcgccgtcgcgtagtcggtgagcaccgtgtccgcgctgcgcagatcgcccgtgctgctcgtcaggtcagccgagagcagatgcacctcgcgcgaggagaaaaggtacgacgccgtgtccgcgtccttgacggcgcgcagctcgatacgctcgaacggcagcgtgccgtcgctgcgccagtcggggttctgcttgaggcatgcgccgtcgctgtccgtaacgaagagatacggccccgtgccgagcggcacggtgttcttctccgaaccggatttgacgatggggatgtcaagcagcgcggggaacgcgctgtccgcgcgcgtgagattgacaatgagcgcgccgttgcttgcgcgcattgaggcgacgttggcaaagcgcgcgctgtagcgctcgctctcctgcgcgcggcgaagcgtcgcgagcacatcgcttgccgtcaggctgctgccgtctgaaaagctgacgccgtcgcggaggtaaaaggtgtagctcgtgcagtcgtcgttgtgctcatagcggctgcacagcacattttgcggcgcaaacgactcgtccagcacgaaaagcccctcgtagagcagcgcgccaagcgtctgctgcatgccgtcggggcaggtgatggggtcgagcgtcacgccctgcaaatacggcagtgcgaacgacgtgatcggcgtcagggtggaggaggtgtccgcttccaccggcggcgtttcctcccagaagtcgccgctgctgtcgtcgctcacatcgccgctccagcagcccgaaagcgaaagcgcgagcgtcagcgcgcacaaaagcgcagagaggcggcgcttcacagcgcatcctccgtaaggcagatcatcgccgccatgccgccgcgccggtcgcccatcgcgcggtgcgaccagtagcgctcggggtggcacttcgtgcagtcggggtgtacgtcgatgcgcgaggggtcgatgcccgcgcgcagcagccacaggcggttgatcgccttcaggtcgatgtggtatttgtcgccgcgcttttcgatgcgctcgtccatcgcggggtcgagcagggcgaaaaaggcgtcggccacgtcgctgtcggtctcaaagcagcacttgccgatgctcgggctgatggcggcgcgcagtgtgtagggatcggcgccgtagcagctcatcatcgacacggcggccttgagcgcgatgccgctcgccgtaccgcgccagccagcgtgcaccgcaccgatcgaacgcgaagtcgggtcgtagagcgtgatgacgcaacagtccgtcccataggcgaacagcggcaggttcggcacgttcgtgatgagcccgtcggcgtcgtagggacggtcatcccagagaattttgcccgcgtcctcttccgatgcaatgcggacaaggtcagagtggatctggcggcagccgacggcgcggctcgcgtcaaagcctacggcctcgccgagacggcggtagttttcgagtaagttttcgctcgtgtcgcccttgttgtcggcaaagttgagtgaatcgtagggcgcagggctcacgccgccgtgccgcgtcgtgaacgcgtgcaccgcgccgctccccacggcggtgatgacatcggacgtgtcgtagatgagaccgtttacgttatgttcggtgaaagacatcaaaagtgcctcctttttctgcaccaaagggtgcggagatgtcgccgcctgtctcaggcggcgggggaaatgcggcgtgtgcgccgcagcaccacactcccccattttctttcccgggaaagaaaacgggcggtgtgaccgtccaaaagaaaggcgtttgcattgcaagcgggcagctcgaagagctgcaacgcttgccgattgcactgcccatagcgcggcggagccgcgtttgaagctgctatacgatttgcctctgctcctactacccgctgttgcgcagccgttggcggctctgctgccttacggatgcggcacaccccttgcgggtgccgctctgcccatcttgcagaagtacagactaatttccttctatcgccagtcttcacaatgcggcgagcgcagcaatgccgcattcggcaagcagtctgccgccgggcaaacgtcactcgcgcctcacggcagtaaggcgcggttgcaagcggtcacgaatcgcagggattcatggcgaagccatgtacaccgcacttacattgcgcagcgcgtgcagcccttcaagctgcaaacccgcaatgtgcggggtcaaggggcggcgccccttgcgttctcttgggggtccaagggggccattctctcacgtgagagaatggccccctttcccgtatcccccacgggtgtgggggaaatgttccaccacttacaagtggtcaatcagcgcccacagcactgtttatatttcttcccgctgccgcaggggcagggatcgttgcggccgatcttttggaccttgcggggctgctttttcaccgtgccgtcgccggaggtggaggcgacgatgccgtcggccacgcgctcgcgcttgacctcgccctcggtcttgacgcgggcggagaagatgcggcgcaccgtgtcgccctgaatggcggagatcatgtcctcaaacatcgtgagggattcctgcttgtagacgtcgatgggcttgttgttgccgtaggattgtaaacggatggcctgacgcagctcgctcatcgcgtcgatgtggtccatccagtattcgtcgaccacgcgcagcagcaccacgcgctcgagttcgcgcatgatgggcgaggtgacggcggcctccttggcctcgtaatacttctcagcggcttcatagaagcgatcggtcaaatcgtcggcggaaaggccggagagagagtttgcatccacggcgctgcgcgggaagtacgtgccctcgcagctcttgagcgcgtcggcgcggtgctcgtcgtcggtcttgtcgtgctcgccgaaggcgaaggcgacctgactttcgatgctgcttctcagcatgttcaaaacggtctgcttgatgtccatgccgtcgagcacctgcttgcgctggccgtagatgatctcgcgctgcttgttcatcacgtcgtcgtattcgagtgtgctcttgcggtactggaagttgcgggactcgacgctcgtctgcgcgttttcaatcgccttggagagcgtcttgttttcaatcggcgtatcctcgtcgaggttgaagcgctccatcaggttcgtgatgcgctcgccgccaaacaggcgcagcagatcgtcttcaagcgagaggtagaagcgcgtctcgcccgggtcgccctgacggccggcacggccgcgcagctggttgtcgatacggcgggaatcgtggcgctccgtgccgatgatgaacaggccccctgcctcgcggaccttgtccgcctcaccgctgatctcttcgcggtgcttttcaagggccttggcgaacatatcgcgcgcgtcgaggatctccttgttgtcggtctcggcgtagccggtcgcctcggcgatgagctcgtcgctgagacccgccttgcgcagatcggtctttgccatgtactcggcgttgccgccgagcatgatatcggtaccacggccggccatgttcgtcgcgaccgtgactgcgccgagcttaccggcctgcgcgacgatctcggcttccttttcgtggttcttcgcgtttaagaggttgtgcttgatgccctcgcgggagagcaggtatgagagcttttcgttcttttcgatcgacaccgtaccgaccagcacgggttggcccttggcatggcaggccttgacctgctcgataacagcgcggtattttgctgcctcggttttgtagacgacgtcggggtcatcgatacgggcgatggggcggttcgtcggaatttcaatgatgtcgaggttgtagatcgtgccgaattcctcttcctcggtgagcgccgtaccggtcataccggagagcttgccgtacaggcggaagtaattctggaacgtgatggtcgcaagcgtcttgctttctcgcgcgacctcgacatgctccttggcctcgatggcctggtgcagaccgtcgctgtagcggcggccgaacatcagtcggccggtgaactcgtcgacgatgacgacctgaccgtccttgatgacatagtcgatatcgcgcttcatcgtgccgtgggccttgatggcctggttgatgtggtgcgcgatggtggagttttcgggatcggagaggttttcaaggccgaagtattcctcggccttcttcacgccgcgggcggtgagcgtcgcggtcttggccttttcgtcgacgatgtagtcggcgtcgatgttgacgtcttcctcctccttgtcgtcgctctcggcaatgaccttcttgcggaagccgcgtacaaggttttccgtgcgggaatacatctccgtggacttttcgcccatgccggagatgatgagcggcgtgcgcgcctcatcgatcaaaatggagtcgacctcgtcgacgatggcgaaggcatgtccgcgctggacgagttcgcttgcgtagatggccatgttatcgcgcagatagtcaaagcccatctcgttgttcgtgccgtaggtgatgtccgcggcgtaggccttgcggcgctcttcacttgtgaggtcgtggacgatcaggccgaccgtgaggcctaagaagcggtggaccttgcccatccactcgctgtctcgcttggcgaggtagtcgttcacggtgacgatgtggacgccgttgccgttcagggcgtttaggtacgcgggcagcgttgccaccaacgttttgccttcaccggtcttcatctcggcgatgcggccctgatggagcaccacgccgccgacgagctgcacgcggtaggggtacagccccagcacgcggcgggacgcctcgcgcacggtggcaaacgcctcaggcaggatgtcgtcgagcgtttcgccgctttgcagacgcgtcttgaactccggcgttttggcctgcagctccgcgtcgctcatcgccttgtattcgtccgccatcgcttcgatcttgtcgacgatggggtagatgctcttgagctcacggtcgctgtaggaaccgaacattttactaaagaaacccatattcaaaacttcctttcgtgggagcataatgacacgcttacaagtatagcatccctctgcgcgatatgcaaaggaaaatttgctgtataatatgaatggattgtaaataaattccgccgctgcgtcaggcatggcttgcactctatatagctgctgtggtaaaatacaaagcaagatagtacaaagcgacgaaatgccctccgacggcggaggacagaagcataaggaagaagttttttctcatctaaggaggatattcgcatgaaactgcacttttacggggccgaccgctgcgtgaccggctcctgccactgcctggagataaacggtaagaagatcctcgtcgactgcggcttacagcagggccgcgacgagctcgacaaccgttatctcgctttcgctcccggcaatatcgatattctgctcgtcacccacgcgcacatcgaccacacgggccgtatcccgctgctggtgaaaaacggcttccacggccgcatcctgacgacacgcctgacagcagatttgatgaagatcatgttgctcgactccgctcacattcaggagagcgacgctgagtacgaaaaccgcaagggcgagcgcgcgggccgcgagcatgtcgatccgctctacaccgagcaggacgcgctggacgtcttcaagtacgtgacgacctgcgagtataaagaaaaggtcgacctctgcgagggtgtgagcgcggtgttcaccgacgcgggccatctgctcggttccgcgtccatcacgcttgagctggaagaaaacggcgtgcacaagacgatcgtcttctccggcgatatcggcaacgtcgaccagcccattatccgcgacccgcagcttctcaaaaaggccgactacgtcgtgatggagtcgacctacggcgaccgcaaccacaccgaggtctggagctataccgacgagcttgccgagatcatcgacgaaacgctcggcaagggcggcaacgttgtgattccgtcgttcgccgtgggccgcacgcaggagcttttgtactttatccgcgagatcaaggatcaaaagctcgtcaagtcgacgccgaacttccccgtgtacatcgactcgccccttgccaaggcggcgacgactgtgttctgcggcgacctgcacggctatctcgacgagcaggcgctcgagcttgtgaaggacggcacgcacatgttcaccttcccgaaccttaacctggtcgagtcgagcgaggagtccaagatgctcaacatggactcgacgcccaaggtcatcatctcggcttccggtatgtgcgacgccggccgtatccgccatcacctcaagcacaacctctggcgcgcgaacagcgcggtcgtgttcgtcggcttccaatcgcccggcacgctgggccgcagattgctcgacggcgttgaaaaggtcaagctcttcggcgaggagatcgccgtcaaggcgaaaatcgtcaacttccagggcctgtcgtcccacgccgatcacgatcatctcgtccagtggatcaaggcattcgacccgaagccgacgcacgtgtttgttgtccacggcgacgaggacgttgcgcccgtgtttgccgaagagctcaattccctcggcttccatgcgcacgcggccaagtttaccgagtgctacgaccttgctgcgaacgaaatggtcagcgagggctacatttccgagcgcaagcgcacggcgcagaagtcccgcgccgacaacctctacgctaagctcgtggcggcagcggagtcgctgcttgagtttgccaagcgctgcaagggcagacccaacaaggacatttctgcgctcaccggccagatcatcagcctgatcgagcgcttccgcgagtgatttgagatacacaacaaaaggtacttcgcgcgataaaagcgcgaagtaccttttctgagaggagaagacgatggagcttgccaaaaatcaggagcataccgtcaccatcgagggctatggcgagggcggcatgggcgttgcgcgcatcgacgggcgcgtcgtgttcgtccacggcgcgctgcgcggcgagaagtgccgcgtgctcatcttaaagacgctcaagagcgtcgcctttgccaaagtgctcgaggtgctcgagccgtcgagcgagcgcatcacgccggactgcccgtacttcccgcgctgcggcggctgcacgtaccgccacatccgctatgaagaagagctgcggctgaaaaagcagcgcgtgcaggacaatttgtcccgcatcggcggcagttatgtgaccgttgaggagatcttaggcgcgcgggacacgctgcgctaccgcaacaaggcgcagtatcccgtgtcgaaggacggcgcggtcggcttttaccgcgcccgcacgcacgaggtcatcgagtgcgagcactgcttattggtcaagcccgaggccgacgccgcggcggaggcgctgcgcgaatatatgcagtcctgccgcgtcgcgggctatgacgaaaagacgggccgcggccttgtccgccatctctacattcgctcgaacgcggcgggggagagccttgtctgcgtgctcgtgaacggagataaattgccgaaagaagaccggcttgtcacgctcctgcgcgatgcgtgcccgaagtgcaccggcatcgtgctgggcacgaacacgaaaaagggcaacgtcatccttggcgaccgctaccgcacgctctgggggagcgaccggcttgaggatacgctctgcggcaagacgttccggctgagtgtgccgtcgttttatcaggtcaaccgcatacaggccgagcggctctacgcgaaagccatcgaatttgcgggcctcacggggcaggagacggtgctcgacctctactgcggcgcgggcacgatcacgctcgcactgtcggatcacgcgaagaaagtcctcggtgcggagatcgtccccgaggccatcgacgacgcgcgcgaaaacgccgcgcgcaacggcgttaaaaacgcggagtttttctgcggcgatgcgtccgatgtggcaaaaaagctcgcgcgagaaaacctgcgccccgacgtcatcaccgtcgacccgccgcgcaagggcttggccgccgacgtggtggagagcatcgctgagatgcagccgggacgtgtcgtgtacgtctcgtgcgacagcgcgaccatggcgcgcgacgtgaagcgcttagcagacctcggctacaccgcccagcgcgcctgcgcagtggacatgttcccaagggcggatcatatcgagacggttgtcttgctttccaagggtgaggtcgactcgaaaaagattcgggttgagttctctttggaagatatggatatgtccgaatttcaggatggggcaacctatccgcagatcaaggagtatgtgttggagcataccgggttaaaggtgtccaacctctatatctcacagattaaacgaaaatgtgggattggggttggtaagaactataatctgccgaagtccgaggattccagacagccccagtgtccgccggaaaaagagaaagcaatccgagaagcattcaaatattttgggatgatctaacatcccgcaaaatggaggtttcttatggatagattgatttcttgtgagtttaacatggataccgcttgtgtggaactgaaatttttagatggca

SEQ ID NO: 10137 - DNA, 30827 bp, Unknown
  gut microbiota DNA sequence
tgtggtaaaaaatgaatagagattatagaaaagtctgatgaagcgcacgcagttgtgcagccccatcaggccttccaaatgatgttgacatggttgccgtcgagttcgatccgctcgataaattcagcagcgatcaatttttcctcgtcaaaagcagagcgggaaaaatccaaccgccggatctgagacgcagaatgcggggcggtatgtaagagctgttcccgctcggcgtgcagtttttcaatcatttttgagatatatacgaccgccacatcgctgctctcggcgagagcgttcaccagacgatcgattttctgctcgatttccaaaacagcttctgcctgcgcgcgttcttcgcctactgtgggaagctcggcgggacaggcatcgagaatgtgctggagctcattggcaatatgggcctccagctctctaaggtctacatcaatcgattcatcacagttgccgaagttggaccgaccggagcagaccagcttacagcgttgctctgattttatgtagttgaccttgacggcatagccgcacttgccacattttaagagaccggtcaaccaggagtattttcccgcgttggcgcgtggaagctgcatctgtccggagagcttgtcctgtacacgcagccagagggaagacggaatgattccctcatgcgtggacaggctgagcatctgctcatcctttttcgtgtacttaccgcggctgcggtcgcgcttcccaatcagaagacagccatggacgccgtcaaaaacttcgggcatctggcggatctggatgccctgcgcaaggtaatagcagtagaccgcttcgtcagcctgcgcgtagacggggttccgcagaatacgggacagagtcacgttatcccacgcctcgcgcttggggccgtgaatgccttgctcagtcagagctttggcaagggcgcgcagcgatgtttcagaccggacatattcttcaaaaatgtggagaacagtctttgcgttttcatcggctatcagagatgagaccttgcgcccgtcaagctcagctttggaaagcgcatacccgtacggtgcgggcccacccggccatgcaccgagggaaacgcggtgatggtagttgtcgcgcacacgctccgcggtcgtttcacgctcaagctgggcaaaggtcatcacaatgttgagcatggcccgtcccatcgacgaagaagtgtcgaactgctcgttgacggacagaaattcgacatcgtttttacgcagaagctcccagatctggctgaaatccgcgagggagcggctgaagcggtccagccggtacacgacgatttttttgacgcggcccgcctccaccgcctccatgagctcgccgaaagcaggccgcttggtgtttttgccggaaaatcccttgtccgaaaaaacaagggcatcgtccacagtaaactttcggcaaagttcgatctgcccttcaatcgaaaggctgccctttttatcgatggactgacgcgcataaatggcatccatcggcctcacctctgcgcgcgggcagccagcagcagaaggcagcggcggcagatcgccgcctgacgcgcagagcgctctatagggtcaacggttgaataagtgtttttgataatcataagggtttcctccttcgagaatgtatgagccaggaccgaaagttattccggacggctttaccaccctgttgaaggctgtgtaaaaatgtattattttttagcaaatcttgaaacccttgaaaatcctggaaaatccagacgacgcatggcttccgctgcgctgatggtacccgcacgccagagtttttccaccgcatcaaaattgcttcgctcaatcggcttgcgaccggtgtatttcccttgtgctttggcgatggcgatgccttcgcgctgacgctgcaaaatatactcgcgctctaattctgcaacagcgccgaaaacggtcagcataaatttttccgttggtgtcgtggtatcgattgcctcttttctgctgacgaactccacgcctttttcggttagcttttctatcagcaccagcaggtctcgtgtgttgcgggcaaagcggctgatggattcgacaatgacggtgtcgcccttgcgtacgtagtccatcatctttttcagctccggacggtcagtgttcttaccgctcaagcggtcgatgtagacctcatcaacactgagctcctgcatcaacacctcctgccgcatggtattttgctcctgtgtgctgacgcgaatatatccgattttcacaaaatcaccgccttttaatcaatctgaaactaatatgtcccaatgaagctgccaaacaatttggcgcgtgccaaaatacggaaagcagctgcattgggacacttttttactgtttttatagggtacaccctattccaacaacgccttgaagcgagtgatcaaggctccgagaatgtattttctggacacagggctctgcgcgcatcttaccagatggaccagtgcagaaacgttagagcggggagctatggacggcgcgttctttgaaacatgggtggtatctgagatctacaagagctacctcagtcagggaaaatcccagccgccgctgtatttctaccgcgacagcaataagaaggagatcgaccttatcatttatcaggatggtatcgtttcaccgatagagatcaaaaaaaactctgcgccaaaggatgccacaaagaatttcagcgtgctgaatcctattgagaaagaaccagatgctgacagcatctcggttggagcagcgcatctgaaaacgaagatcggaaccggcgcagtggtctgcatgccgccggatctgatcccggtcgatccgaaaaactggtatgttcctgcttggctgatttgagcaaaatgcagtcctgattatgtaaaaaagtgctgccgcagttctgcggcagcagttcctgctgtgtgtctggtgaacacactttactaatatggaattgattctgggcatgttcggcggtgggctatgaataggcggaaagaagacagtcagcggaggccatgaagcgaggcacgacaggcgtttccaagtgctgccagtgtggattccctcgactggaagggcatctcggcgggtgagatcacgaggcgtgtgacgggcaaggtgcagagcgggtcgatcgtgttgttccacaatgcgggcgagcatacgcccgaggcgctgccggatatcctcgactacctgctcgccgaggggtataagatcgtaccgatttcgaagatcttgctcacctgtgactataccatcgaccacgaaggccgacagtgcccagcagtgcagtgagcgtccgataccgcacttgcctgaccgtgtgtaaagacgcgaaaaggggagccctctatcacaagagaactcccctttatgatttcttccgtgcattgcggggtgattttttacgcgccgatgatgatcggcaccagcgctgcggaggtgatgcacatcagcatgccggtacagaacgagtaggcgaccgtttccgagttgcacacctgctcgacgatcggcaggcacacgtcagtcgaggcggtgccagggatggtgatggcctcgatatagccgatcttgcccgcgatgacgggcagcagaatgataccgagcatctcgcgcagcacattgtgcagaaacgagaccgcgctcgccatcgtgtgccccgcgcttgcgatgacgctcggggccatcgtgtaccagccgaagcctgcgctgatggccagtccctcgcgcagcgtcatgggtgagagcgcggcatagaccgcgccgccgagcaacgtgccgagcacggcgaagatggggactaaaatgacgccgagccccgcgttgcgcagaatgcgggcaatgctgccgtccagccccatggaaaagccgatgagccccagcatgatacacagaccgactacaagatagtcgcccgagcgggactgaaaggcgggcaggtcggtgcacacgcggcggatgacaagatcaccgagcagcatcccgacaacgaccatcagcaggatgataaaagacattttcgcgcccgagacgtcggccttttcgtgcacagcctccgcttcgttgacgactgcaccggcggggtgggcgtggcggtcgatgtgcagcagctttcgcacggcgaacgcgccgagcatgctgcccgcagcagtcagcaccgtgacaaaaagcgcctgaatgccgatgctgccgaggctcgacgtgacctcctcatctgcgcccatgcgcaggcccatcaaaagcaccagcgcataaacgggaagcgacatgagcttgtccacaaatttgaatttttctgcgtactttcgcaggcgcgaggccaggaggtagcaggcgatcataatggaccagtagagagcgagcagagccataaagtgtcgtcatcctttcgccgcggtgcggctaaaattgaatgagggcggcgcgtgatccgcgccgccctctgctgctttggcagaattggggaatatcaggcgagggtgttgacccaggcggagtatttgacaaggttcgcgtcgcgctcttgcgcatccgcgcccttggtgaggatgtagaccttgatcttcggctcggtgccgctcgggcgcacgacgatgtgcgtgccgtcgcagagctcgaagcgcagcacgttcgagcccgagagcgcgatcttcgtgacctcgccgcttgcggcgtcgcgcgcggtgccatccgaataatctttgtacgtcgcgaccttgacgcccgcgatctcgctcggcggcgtctcgcgcagggacttcataagagcggccatcttctccgcaccatctaagcccggcatgacgaggttgtgcgtcttttcaccgtaccagccgtacttttcaaagagcgcgttgagcgcgtcgaagagcgtcatgccctgggagtagtaccacgcggccatttcggtgagcagcagcgaggccgtaactgcgtccttgtcgcgcacgtagtggccgatcatgtagccatagctctcctcgtaggagaagatgacggtgtttttgcccgcgccctcaagctcattcatcttctcggccatgaacttaaagcccgtgaacgtgtcgtagcagtcgaggccgttcgcctccgccacggcgcgcgccatctcggtcgtgacgatagtcttgagcgcggcggcattcgcgggcagcttgcccgcgcgcttcatcgcgccgatcagatagtcgagcagcagcacgcccgtctggttgccggtgacaggctcgaactcgccctgcttgttgcgcaccatgataccgacgcggtcgctgtcggggtcggtgccgaggatgaagtcgacgtcgttcttcttggcgagatcaatggcgaggtagaagccctcgggattctcggggttcggggacacgacggtcgggaaattgccgtcgatgaccatctgctcgggcacgcataaaaggtgcttgatgccaagacgcgtcagcgcctcgggcacgagcttgtggccgcagccatggaagggcgtgtagacgagcttgaagtcgtcggcgacctttttgacggtctcgtagtcgttgaccatgctcatgacatttgccatgaagcgcttgtcacagtcctcaccgagcatcgtgatgaggcccttgttgacggcttcgtcaaagtccatcgacgtgacgccggtgaaaatgtcgatgtgctcaagctccctggcgatcgccgcggcgtgctggggcggcagctgcgcgccgtccgaccagtagaccttgtagccgttgtactccttgggattgtgcgacgcggtgacgttgatgcccgcctcgcagccgtattcgcgcacggcgaacgagagctcaggcgtcgggcgcagggactcaaagagcttgacggtgatgccgttgcccgccatgacacaggccgcggcacgtgcaaactccatcgagtggttgcggcagtccatgcagatggcgacgccctttttcatggcctcttcgccctcagcgcggatgacgttggcaaagccctgcgtcgcccagcggatgacgtggcggttcatgttgtgaaggccaacgtacatcgtgccgcgaaggccggccgtgccgaattcgagcggaccgtagaagcggttttcaatctccttttcgtcgtttgcgatggccttgagctcatttctctcgtcctcgctcagcgcgggggaggcgagccacttttcatattcctgacggtaattcattgcatgtcctcctgttccggaatttcatcaatggggcggatcagatttttcgcgtcctcgagcatcgaggacggcacatagagccacgtgccgctgccgggcatgccgagcacgatcttgccgaacgagccctcgccctcgtacttgcgcagcacggggatgtcatacgagcggagcatggcgcagagcatgtccgtctcggcattcgtgtccattgcgacggtcaaaagcgcgggctcctccggcgtgccgtcggcggatttgggccagcgctgcaaaaggtcgttttctgtcttgccccaggtgagcttcacttcatccgacatgggtggtgtcctcctttatattgatgatgggtcatttgtggtatttggttccggcctcgatctggtaggcgcggtagatttgctcgagcagcatcacgcgtgctaagtggtgcggaaatgtcatcggcgacatcgagagccgcaggtcggcttttttctttaagtcctcgtcaaggccgaagctcgacccgatgagaaacgtcagctgcgacgcgccgcgcgcggcgagctgctgcattttctgcgaaagcgccacgctgctcatctcctgcccctcaatgcacatggcgatgagcgcgccgcccttggacagcctctgctcgacgagtgcggcctcttttttgagcgcctgacggatctccgcctcgctcggctcgtcgccgaggcgctgctcgggcagctccaaaagctctaacttgcagcagcgcgaaaggcgcttttcgtattccttgacggcctgctcgtagaaggcctccttcagttttccgacgcaaaggacggtgatcttctgcatacgtgtacctcgctgatggtgtcgcgcggcgcggtggcaaggcggacgctcagcccgctcgattgcagcgcgcggccgacggtgtattcggcaagctcgggggagttgttctcgtcgctcaggtgcgcgagcagaatgtcgctcgtgcccgcgcggacgcattcgatggcgaattccgccgcggcgtcgttcgacaggtgcccgtattcgctcaggatgcgctgcttgagataataggggtagccgccgtttttgagcatcacgacatcgtgattcgattcgagcagcagcatgtccgcgccgagggcggcatcgtgcgcctcatcggtgacaaagcccgtgtccgtcagcacggcgagcgagcctgcgtcgctctcgatgcggtagccgacgctttctttcgcgtcgtgcgacgtgcggaacgagcggacgtgcaggtccttgatcgtaaactctttgcccgcggcaaaggcacgcaggcgcggctcggggtattggatggccgccgcggtgccgaacgtcgcatacagcggggcggggcattttttggcgagcgtcacaagtccgcggacgtggtcgatgtgctcgtgcgtgatgagaatgccgtcgaggtcgtcgagcgtgaggttcagcaccgcgagcgactgcgtgatgcggcggcaggagatgcccgcgtcgatgagaaggcgggtatcgttgtgacagacgagcgcggcgttgccggcgctcgaactggcgagggtgtaaaattccatgggatgattcctttatatcgattcaccgaaatcataccacagccgcgcgcaatagtcaaaaagaaaaagcccccgcacgggggctgtgagagggagaagaaagcgctgtcaaccggcggggaaagcgagccctgccatgaagccgttttcgccggtgcagacgatgtcgcccgcggcgagcgcgccgtcgcagacgtacaggtcggcctgacaggggagcgaggcgtcaggatagttggtcacaacataggtgtaacgcgagagcgtctgcccgcaatagcgtgtgaggtcaaagccctgcgagagctggaggtcgttgtagctcaaatacggctcttcgagcgtttcgcccagcgtgacgctcagcgtttcgatcggctggtcgttcacctcccagccgagggaggcaagatacgcaatgcgctcttcatttgttccggcggcgatgacgggcggcggagacgaatgccggcacgcgcgcagcgccagaaagagcgagagcagcagcgcgaagatgagcagaatttttacaacgcggcgtttggagcacttggcggtgatgatgaacatgaagcgaccacaccctttcgataaaagctattccaccgaaagaaaaagtatgctacactgatacttcagaatgcagaaaggcgggaaccaccatggcacagcagagactcgacaagatcatcgcctcgaccgggcgctattcgcgccgcgaggtcaagaccctcgtgcgcgagggtcgcgtgctcgtcgacgggcgcatcgcggccagcgcggaggataagtgcgaccccttgaccgcgcgcatcagcgtgaacggcgaagagcttttttatcgcgagcacacgtatgtgatgctccacaagcctgcgggcgtgctctcagcgaccgaggacggacgcggggagacggtgctagacctgcttgcgcccgagtaccgcaagatcggccttttccccgtcgggcggctcgataaggacacggaggggctgctgcttctgaccgacgacggcgcgctcgcgcacgacctgctcgcgccgaaaaagcatgtcgacaaggtctacttcgcccgcaccgacggcgcgctcgacgacgctgactgtaaagccttcgagcagggcatcacgctcggcgacgggctcgaatgccttccggcaaagcttgagattttaaagagcgacgcgcagagcgaggcgctcatcaccatccgcgagggcaagttccaccagatcaagcggatgctggcctcgcgcggaaagccggtcgtttacttaaagcggctgagcatgggctcactcacgcttgacgaggggctttccaagggcgaataccgcctgctcacggcggaagagatcaaaaacctgcgggaaagtgggcaatttgcccaaggaaaagcgggcgcggacaagtaagcgtttgtccttcctttacggaatgcctaaaaaagaagaaaaaaattgttgaaaagagaaaaaagttcttgcaatcgtcagacggagaaagtataatagtcctatcaagttggcagaatgcacaaactccctaataaatcaaggaggcacggaatatgtccggtaggatttttcagaacatcgttttacagtttaaggaaacgaccgatacggtcattggcgtgatcgactccgagggcacggtcatcgcctgcaccgacctgccggagatcggccagcgctggccgcatctggtgcagcccatcaatgaggccgagggcgcctgcaccgcgctcgagggcaagaccttcaaggcgctcgagggctggggcggtcagttcgactttgcggccttcacccgcggcgaggacgcgctcagctcgaccgtctgcagcatggcgaccgtcgcgctcaacaccgccaagagctattacgaggaaaagcacgacaagacgtcgtttgtcaagagcatcctctccgataacattcttttaagcgatatctacgtccgcgccaaggagctgcacgtcgaggccgagctcaaccgcggcgtgttcgtcgtccgccgcacggacgaaaaggccgacgctatccccgtcgagaccgtgcagaacatcttccccgaccggcagacgagctttgtcctttccatgggcgaggacgatgtggtgctcgtgcagcagcttggcgacaatgtggagatgagcgaccttgaaaagaccgccgcgcagatcgaagagacgctgcgcgtgaacggtgagagcaccgtggtcgtcggtatcggcacggtggcgacgcacctgcgcgacctcgcgaagtcctataaggaagcgcagatggcgatcgaggtcggcaaggtcttcgacaccgagaagtacatcatcagctatgaaaacctcggcatcggccgcctcatttatcagctgccgacgacactgtgcgaaatgttcctgcaggaggtcttcaagaagaaccccatcgacgcgctcgacaaggagacgctctttacgatcaacaagttcttcgagaacaacctcatcctctccgaaacggcgagaaagctgttcgtccacagaaatacgctcgtctaccgtctcgagaagatcaagaagctcacgggcctcgacctgcgcgagttcgacgacgccatcaccttcaaggtcgcgctcatggtcaaaaagtaccttgcctcccgcggcatcgaagcgtaaagaaaaagaatttgacaagggctgtctttggacagcccttgttttttcgccattttgcggcaaaaaagttgaaagtttacataattacctgttgccatcgcgtgcgcttcgcgctataataaagactgataatttgcgggatcgagtcaaaacctgctggaaactgagggaagagcatgatacgcctaagcgatgtagtaaaggaatacgagagcggcacgacggccttaaagggcatttcgcttcgcatcgaggatggggagttcgtctttttggtcggcccgagcggcagcggcaagtcgacgatcatcaagctgctcaccggcgagatcgtgccgacgtctggtcagatcgccgtcaacggcttcagcctgacgaacattgccgagcggcagatcccactgctgcgccgctccgtcggcgtcatcttccaggacttccgcctgatcgagaagaaaacggtctacgagaacctgggcttcgccatgcgcgccgtcggttcttcgccgcgcgagatcaaaaagcgcatcccctatgtgcttgagctcgtcggacttgaggaaaagaccgaccgttatcccaacgagctctccggcggcgaacagcagcgcgtggccattgcgcgtgcgctcatcaacaaccccagcaccatcatcgccgacgagccgacgggcaacctggaccccgcgcgctcgctggagatcatgcgcctgctcgagcgcatcaaccagctcggcacgacgatggtcgtcgtcacgcacgagaaagatcttgtcaatcagttcaaaaaacgcgtcgtcacgctcgaacagggcgtcatcacgagcgatggcgacggcgtcggctataatgcgaggtaagctatgcgcaaacacgatttttcttactttttcggcgagggcatgcgcaacatgttctcgcacggattcatgtcctttgcggccgtgggcatcacggtcgcctgccttgtcgtcatgggtacattttcgctcgtggcgtacaatgcgcaggtgcagctccagcagctcgagagcgagtatgaaattctcgccttcgtggacatgagctgcgacgatgcgcagaccaaggccgtgggccgcgccattgagcagcgcgccaacgtgaaggaatgcgtcttcatcagcaaggaagaggcgatgaagtcctttgaggcgcgttacgagggggacaacatgttccagaaccttgaccccgagattttgcgcgaccgctacgctgtctatgttgacaatctgagcatttccggaaagactgcgcaggatatcctcgacaatgtcgaaggcgttgccaatgtccgcgtggacgaagacatcgcgggcggctttatcacgctgcgaaatgttgcgagcgtagtgtgcatcgcgctcattgccattttgctgctcgtgtcggtcttcatcatctcgaataccatcaagctcacgacattcgaccgccgcgacgagatcgccattatgaagatggtcggcgcgacgaacggcttcatccgctggccgttcgtgtacgagggctttatgatcggccttctcagcgcggtgcttggctttggcttgcagtggctgctgtatgaatcggtcgcaaagagccttgcgatgtccgaccggctgcagctgttgacgatcgtcgactttacgtcgatctggcagcccgtggctgcgatctttgccgccgccggtatcctgatcggtgtgggtggcagcctgacggctatccgcaagttcctgcacgtgtgagggaggcggacgatgagcagaaaaaagatcgcacgcatcctcctggtgctggctgtcgttgcgtcgctgacgctggcggagttgacgccgctttccctggtgcaggatgcctccgccgtcacgcaggcggatatcgacaagctcaaggacgagctcagcggcatgaactcggaaaagtcgcagcttgaaaaggagctcaagtccatccagaatgacaagagcgccgcgcttgcgcagaaggagaacatcgacaagcagatcaacttgcttcagtcggagatcaagggcgttgagtcgctcatcagcgagtatgagacgctgatcacgcagaccgagcaggagatccgcgagaacgaagaggaagaggcacgccagtacgaaaagttctgtgagcgcgtgcgctcaatggaggagcgcggcacggtgtcgtactggtcggtactgttcgactcggcgagcttttccgacttgctgagcgccatggacttcatcagcgagatcatggacagcgaccagaaggtcatcgacgatctgcgtgccctgcgcgagcagatcgagcagaagaaggcctcgctcgaaacgtcccttgccgagcagcagagcgccaaggagacgctcgtcgccaaaaagagcgagctgaacacccagcgcgctgaggcggaaaaggtgcttgccgagctcaaggcgaacgaagcgcagtacaagcaggtcctttcggaaaaggacgccgcgatggagcgccagcaggcggagatcgtgcgcctttcccgtgagcttgccgaaaagaacggcaacaccactgtgacctatggcggctacatctggccgtgctcgagcaagtatgtcacctcgccgctcggcgcgcgctacacgggcatcgcgggcgcgtcgacgaatcacgcgggcattgacatcggccgcgtgggctacacgacgcaggccgtcgccgccaaggcgggcacggtcatcatctcggcctacaacaagtaccgcggcaactatgtggtcgtcagccacggcagcggcaacacgacgacgtatcagcatttgtcatcccgttcggtcagcgtgggcacgtatgtcgcgcagggtcaggtcgtcggcattaccggtacgaccggcgtgagcagcggcccgcacctgcactttgagatcaccgagaatggaaagatcatcaacccgctcaagtacctcaccgactatatcaagggttggtaaaccgcataacgcacaagctccccgccatatactggcggggagcttttttgcggggaggggtcattttgcagggattggtctgctatcgggacacgggggagaaaaacggcgcgcgcacgctctgcggcgtgcgctttggcgcggcctacgcatcgcgcggcgagggaatgcttgctgcactttcggccaagcgcgcagcaaaatacctgcaaaagcgccgtgtgagttatgccgtgtttcccaaggattatccatatgcggaggtatttgcgcgctgtggtgtcctgccgccgcccgagcagccgctgcgcatggcaaaggcggcggagatcatccgccgcgcgatggcgcggctcggccttgcgccggagcgggcgcgtatcgcgctgtgcgcaccctcgcagagtgcggcgctcgaagcggcggcgcgcgaactctctaaagatgtgcgctatcttgcactctgcgcgccgaatggcgagcgccttgcgcgcacgctgcgctgggactgcggcgcgagtgtccatacattgcagacggacgagaggatcgccgccgacctgagcgtctgcttcgacgatttcccgctgcccgacggccttgtgctgccgctggggagcggtgcggtttctgtcgcctatgggacggaaaacctgggcgatgcagcgatgatctggaatgaagatcagctcatctgcgcactctacgcctcgcttgcgcgccgtgcggacgaaatttgggtaaaagatgtgaaaatgccgcccgatgggggagaaaacgcaaacttaccttgacaacacggggcaaaatcactataattatttcgctaaaatggtattcgtgtgcgcgccgcgcaattttgcgggcgtgaaagaaaggaacgatctcaatatggcgaacatgaaaaaagagtacaagatgagcgcggagcgcaaggaagagctgcaaaaggagctcacctacctcaagaccgtgcgtgaaaaggaagtggcggacctcatcaaagaggcgcgcggcttcggcgacctgagcgaaaacagcgaatatgatgaagcgaaaaacgagcagggcaagctgtactcccgtatcgctgaggtcgaggagatcttgctgcacaccgtcatcgtcgacgaaaacgacgcgggcacgaacggcatcagcatcggctgccgtgtgaccgtgcaggatgtgaagtccggccgcgagctgcccgagtataaggtcgtcggctcgcaggaggccgaccccatgcaccgcgccatctccgaggattcccccttcggcaaggcgctcatgggcgcaaaagagggcgacgaggtcatggtggaggcccctgtcggcaccatcgtctaccgcatcgtcaagatcgaacgttaagctgtattatatagagtaggagtaaagaaatatcatggctgaagaaaatatccagaccaacgctcccgagcaggacctcagcgagatcctgaaggtccgccgcgaaaagctcgcagcgctgcgcgccgagggccgcgatcccttcaaggagacgcgcttcgacgtgacgcaccatgctcaggacatcaaggacaactttgacgcgcttgagggcagcgaggtccgcgtcgcgggccgcctgatgagcaaacgcggcatgggcaaggtcagcttttgcgatctgcaggacaagtccggccgcatccagctctacgcccgcaaggacgagatggatgaggaggagtacaaccgcttcaagaagtacgacatcggcgatatcgtcggcgtcgagggcgaggtgttccgcacccagcgcggcgagatgagcgtgcgcgccaagaagatcacgctgctcagtaagtctctgcgtcccctgccggagaagtaccacggcctgaccgataaggaagcacgctaccgtcagcgctatgtggacctgatcatcaaccccgagtccaagcgcaacttcgaaattcgttcgaagtttgtcgcgtatctgcgccgctacctcgactccatcggctttatggaggtcgagacgccggttttgagccccattgcgggcggcgcgaacgcgcgccccttcatcacgcaccacaataccctcgatatcgacatgtacatgcgcatcgccaccgagctgcacttaaagcgcctgatcgtcggcggcatggagcgcgtgtacgaggtcggccgcatcttccgcaacgagggtatggacaccaagcataaccccgagttcaccacctgcgagctctatcaggcctacacgaacctcgacggcatgatggacatcctcgaggccatcctctccggcgccgcgaaggagatcctcggcacctatcagatccagtggctcggcaaggacattgacctgaccccgtcgtggaagcgcgtcacgatggctgacgccgtcaaggaagtgaccggcgcggactttatggcgatcgagggcgacgccgaggccgccgtcgcgctcgccaagagcgtcggcgtcgacatggacggcgtggacaagacctggggcaacgccctgtacgagaccttcgaccagaaggtcgaggagaccctcgtccagccgacgttcatcaccatgtaccccgtcgaagtgagcccgcttgccaagcgcagcccgtctgacccgtacctcaccgagcgctacgagatgttcgtctgcggctgcgagatgggcaacgctttcactgagctcaacgacccgatggatcagtacgagcgcttcaaggcgcaggtcgaaaagcgcgccaacggcgacgacgaggccgagatgatggacgaggattacgtcatggccctcgaatacggtctgcccccgacgggcggcctgggcttcggcatcgaccgctgcgcgatgatgctctgcggtaccgactccatccgcgacgtcatcctcttcccgacgatgaagccgctggacatgcccaagaaggccgacaaggcggaagccgctcccgccgaagtgaagaaggaggaggtcatcgacttctccaaggtcgagatcgagccgctgttcgctgaccaggtcgactttgacaccttctccaagtctgacttccgcgccgtcaagatcaaggcgtgcgaggcggtgaagaagtccaagaagctgctgcagtttgtgctcgacgacggcacaggcgaggatcgcatcatcctctccggcatccacgagtattacgagcccgaggagctcgtcggcaagaccgctatcgccatcgtcaacctgcccccgcgcaagatgatgggcatcgactcctgcggcatgctcatctccgccgtgcatcacgaaaacggcgaagaaaagctccatttgctgatggttgatccccacattcccgccggcgcaaagctgtattaaaaaataacgaaaaagagttctctcggcagagagagctcttttttgtgccaaaggcacggggaagcagcgccgtaggcgctgcacgggataagggggccattctctcacgagagagaatggccccctttgacccccaagagaacggcaggggcgtttcgacttcgcccctgcacccctaacgaccaaaagggaggggctttgcccctcccttttggattatccacccctcggcacttccagtgagcactacgcctactttggatgattccatttcgagagtgcctgccaaggcggcgttgctgcgctcgccacattttaatagaaaaaacgaccgcgtcagcggtcgttttcgttctttttatcagttcgttccagaagataatcgacgctgacgccataaaaatcagcgagcgcgcacaaaacgtgcggcggcagcattctttcgccgctttcataatatgcgtatgtgcgctgcggaacgttgatcgcttcgccgacctgacgctgtgtcaaatcggcatcctcccgcaaatcgcggatgcgccggtatctcttcacgtttatcaccaaacacagtatacgtagaacaaattattctattgaatttttgaatattttgttctaaactataaatgaggtgatgaagatgacgacgtataagacactatatcatttgatggtccaaaatatgagcgaggccatcgacctttatgatgcgggcaaaggcatccttgcccgcgaagtcctgaaaaaagccttgttagacgcagaagagcaagtcatttcacaagacatcatccccgatgaacctattggcaatggcgatccagcagaaagctaaaaaagcggcaccccaaagcggcgagcgcagcaatgccgcaccgtcagaagcacggggtggataatccaaaaaggaggggctgcgcccctcccttttggtcgttagggggtgcagggggcgaagtcgaaacgccccctgcctttctcttgggggattcaaagggggaggttctcttttgaaagagaatctccccctttgccccgtgcagcgccatcggcgctgccttttcccttcggtttagccgaacaaaaccggcttagtaacctccttgagccactccagctcatccccactcagatacggcgagatcgccgcaaagaccttagcgtgataagcattcaaaagctccacatcgcgcgacgagagcagcgacagatcgatcgcatcgcggtcatacggcacgagcgtcagcggttcgagcgcaaggaagcggccgtactcattgacctcagcctcgcgtacaacgacgaggttctcaatgcgcacgccgaacttgccggcaaggtaaatgcccggctcgttcgagaagatcatgccctcttcaatgacgcagtggcgcttctggcgcttcacatcccagtgtacgcgctcagggccctcatgcacgccgaggacgaagcccacgccgtggcccgtgccgtggttgaagtcgaggcccgcttcccacagcggcgtgcgggccagcatgtcaaggttttcgcccatgcagccgtgcaggaacttggccgcgccgagctgcaaatgcccacgcaggacaagtgtatagacgcgcttttcctcatctgtgagcgggccgagcgcgacggtgcgggtgatgtcggtcgtgccctccaaatactgcgcgcccgtgtcggcgagacagaggccgcgcggctccatgggaatgtcggtctcctcggtcggctcgtagtggacgatcgcgccgtgcgcgccgtaggcgaggatggggtcgaagctctgctcaagatagtgctcaccctcggcgcgaagagattcgagctttttcgacgcgctgagctcggtgatcggctctttgccgatcgtgtgcttgagccagtagatgaagcgcgtgacggccacgccgtccttgatgtgggcaaggcgctcgttctcctgctcggcgggcgttttcatcgccttcatcagctgaatggggctcgtgcggtcgaggacttcagcgctctccggcacgctttgcagaatgcggtagttggcgcgctcgccgtcgagcagtacgcgggtgcccgtgggcagcgccgcgacgagacggtagatgtcgtcatagggagcgagcgttacgccgtcagatttcaaatgtgcttcgatctctgcactcacagcctctctctgcacgcagagcgtggccttgtcctgctcaagcagcagatacgagaggaacacgggcgtgaagagcacatcgtttccgcgcaggttcaaaagccacgcgacctcgtcgagagaggggatgacgaacacgcttgcgcccatctccttcatcttgccgcgcaccattgcgagcttttccctgcgcgtcaggcctgcatactttacgtccagctcccacaccggctcgcacgagagtgcggggcggtccgcccacacgaggtcgacaaggtcctcgtcgcccgcaaagcggatgtgcttctcgcgcgtcttttcgccgatcgaacgagcgaagtcgttgctgatcgtgcgcgagtcgaagccgatccagccgttttcaggaacgtggtcgcgcaggaacgcggggatctcaggcacgccgggctggcccatgcgcatgagctcaataccgctgccctctaactgctgcgaggcctgcaaaaagtagcggccatccgtccacagtgcggcggcgtccggcagcacgacgagcgtaccggcagagccggtgaagccggagagaaattcgcgcgccttaaagtgcgcgccgacatattcggatgcgtgaaagtcatcggtcacgacgacgtaggcgtccaagtggcgctttttcatctccgcgcgcaaaagtgcgagcttttcgacaggattcatcacaaaatcactccaattctttgttacgataacgattgcctcattcggcaaagctttccgtcagcgtgacgagcacgttcgtcatggcctcaaggctgtccgcggggatccactcgcgcacgccgtggtaattgtagccgccggtggagaggttggggcagggcagcccgtcccaggacaggcgcgcgccgtccgtgccgccgcggatgggtacgcactgcggctcgacaccgttggcgcggaaggcgttttccgcgcgctcaatgaggtggaagtgggggaggagcttctccttcatgttgtagtagctgtcattgatctgggcctcggctgtgccgttgccgtaaatttcgtcgaggcgcgcggcgcagtcggcaaagagcgcctttttctcttcaaagcgctcgcggtcgtggtcgcggatgatatagcggagcgtcgcctcggtcacgctgccgctcatctcggtcaggtggaaaaagccctcgtagccgtcggttttctccggcacttcgtcctcaggcagcatcgcgtggaaggccatcgctgcggtcgcggcgttgatcatgacatttttggcgctgccggggtggacgccgacgccgtgcaccgtcagaacggcggacgcggcgttgaagttttcaaattcgatctcaccgagcgggccgccgtccacggtgtagccgtagtcacagccgagctcctgcacgtcgagcccgtccacgccgttgccgatctcctcgtcggtcgtgaagatgacgcgcacttcgccgtgtttgacgtttttctcaatcatcgtctcgaccgcggccatgatctcggcgacgccggccttgtcgtccgcgccgaggagcgtcgtgccgtcggtgacgatgagctcttcgccgacatggctttcaaggccggggcagagcgcctcggtgagggagacagtgtcgttgagcttcagctcgccgccctcgtagcgcacgaggcggggcttgacgttttcgcccgaagcgtcgggagcggtgtccatgtgcgcgatgagcgcgatgacgggcgcgtccacgccctcgctcgcggggagcgttgcaagcacattgccgcagtcgtccatgtggacgtcctcgagcttcagcgcttcaagctcctgcatcagcgcgcggccgaggcccttctgccgctccgtagagggcgaggtgccggtgaattcatccgaggtggtgtaataggtcacatagcgcagaaaacgcgatttggcagattccatttgggggtacctccttgcagtcatgctgcgtgatatttcacactcagtgtaccacaaaagggggcgaactgtaaagccgcggcgcaccgatccgcgcaaaagtgaaacggtgcaaaagattcttttgcttgacaaagggcggcagttgataatatagtgtgatacatattaaataagaaactgggagggaagaggaaaaatgaacgtggaaaccatcacgagccggcagaatccgctgatgacgcacctgcgcaagctcgcttcctcccggtcttaccgcaaaaagagcggcgaatatctctgcgacgggacaaagctcttggacgaagcgctcaagtggggcgcgccggtccaaacggcggtgttctctgacggtgtggagattccaacgcttcccgataccgtgcgcgccgtgtgcgtgagcgaagacctgatgcgctcggtgagcccgatggagacgccgcagggcgcactgtttacggtcgcgcttcccgagacgaagctgcccgaaacgcttgcgggtaagcactatctcgtgctggacggcgtgcaggaccccgggaacgtggggaccatcctgcgcacggcggacgcgtttgagtgcgacggcgtgtttttagtcaacgcctgcgccgacctcttcaatcccaagacggcgcgcgccacgatgggcgcgatcttccgccgcgaggcgtacagcgtcacgccggaggagcttttcgcgctgctcagtaaaagcggcgtcccgctctacggcacggcgctgcgtgaggacaccgtgccgctgtctgacgcgaacctgtccaaagccgctgtcgccatcggcagcgaggggcgcggactgtcgcagcaaatgctggatgagtgcgccaaaacgctcaaaattccaatgagcccgcgctgcgagtcgctcaacgcggccatcgcggcgacggtcgttctgtgggagatgtatcgctgaaacaaacaaggaggtgctcttcatggcgggcctcaaatactgggtgtggctctcggaggtcaagggactgacaaaccgctcaaagcttctgctgctcgactatttcggcacgccggagaacgtctactatgccgacggggacgagtaccgcctcgtcgagggcatcgagccgcggcagattgcactgctcgcggaaaaatcgttggaaaacgccgaccgtatcctcggcgcgtgttcgcggctgggactgcggcttctcacgatgcaggacgcggactatccgatgcgcctgcgcaatatctttgagccgccgtgcctgctttatatcaaaggccagctccccgttatcgacgaggaggtcgctgtcgccatggtcggcacgcgcaaggcctcgccctacggcatcgaagcggcggagaagatcgcctacggcctgtgcaggcagggcgcggtcgtgatctccggcgcggcggcgggcgtggacagcgcatctcaccgcggcgcgctgcgcgcgggcggaaagaccatcgccgtgctcggcaacgggctggacattgtctatcccgcggaaaatgaatggctgtaccgcgatatcgcggcctcgggcgcgctcatcagcgagtatccgcccgggacggcggctgaggcgtggcattttcccgtgcgaaaccgcatcatcagcggcttgagcctcgcgaccatcgtggtcgaagcgccggaaaagagcggcgcgctcatcacggcgaatactgcgcttgagcagggacgcgatgttttcgccgttcccggtccgatcgacgcgccgctcagccgcggctgcaaccgtttgatcgcggacggcgcggcgggcctcatcaccgacagctgggatgtgctgcgcgagtacgaggccatctatccgcataaaatactcggcgagcgcgtggagcttccgcgtacgctcggctatcaggcgcgcgaggagcaagcacgcgccaagcaggccgcggcggaggaaatactgtcgctgccgacactgaatttaaaaaccaacgacgcggggctgaccgacgaccagatcgccattctgcgcacgctgaaagacggcgcgctgcaggtggacgatttgatcgaaaagacgcagatccccacgcgccgtgttctttccgcgctgacgatgatggagcttgagggctacgtcgagcagggcagcggcaagcatttttctttgaccgtcacactactggaggaataacattcatggcaaaaaagcatctggtgatcgtcgagtctccggcaaaggcgaaaaccattggaaaatatctcggcaaagactacgaggtcaaggccagcatgggccatttgcgcgacctgccgaaaagcaagctgggcgttgatatcgagcacgacttcgagcctgtctatcagcccatccgcggaaaagaggagctcatcagcgagctcaaaaaggccgccaagagcagcgacaccgtgtatcttgcaacggacccggaccgcgagggcgaagccatctcgtggcacttaaaagcgcttttgaatctggacgatgaaaaggccaagcgcgtgactttcaacgagatcacgaaaaaggtcgtctccgagagcatcaaggagccgcgcgccatcgaccaggacctggtcgacgcgcagcaggcgcgccgcgtactcgaccgcatcgtgggctatcagctgagcccgcttctgtggaagaaggtccgccgcggcctctccgcgggccgcgtgcagtccgtcgctgtgcgcatggtcgacgaccgcgaaaaggaaattcaggccttcgaggcgcaggaatactggacacttgacgccgacctcaccgacgaggcgacgcacaagacctttgaggcgcactattacggcaaggacggtaaaaaggtcgagccggcctccggcgagcaggtggacggcatcattgccgacatcggcgacaagccctttaccgtgacgaatatcaagcgcacggacaagcagcgctccccgtcgctgccgttcaccacttccaccttacagcaggaggcctcgcgcaagctcaacatgacgccgcgccgcaccatggccatcgcccagcagctctatgagggcgtggacatcacgggcgagggcacggtgggtctcatcacctacatgcgtaccgactcgctgcgcatctccgaagaggccatcgccgcagcgaagacgtttatcctgagccgctacgggcagagctactatcccaagaccgcccgccactacaaggccaaggccggcgcgcaggacgcgcacgaggccatccgtccctcgaacgtcaacctgacgcccgagcagatcaagggcgatctgacgggcgagcaatatcgtctgtaccgcctgatctggagccgctttttggcctcccagatggcgaacgccgtgtatgacagcgtgagcgcgcagatcatggcgggcggacacgagttccacgcgagcgcgagcaacttgaaattctccggctacaccgccgtttacgaggaatcccgcgacgacgacagcaaggaggaaaaggagggcacgctgccgccgctcgtcgaggggcagggcttgacgctcgaggcatatacaccgctccagcatttcactcagccgcccgcgcgctacacggacgcgacgctcatccgcgcgatggagcagaacggcatcggccgcccgtcgacctacgcgccgacggtctcgacgatcttagaccgcgaatacgtcatcaaggacggaaaatacctgcgtcctacgccgctcggcgaggtggtgacgggcctgatggaagagcgcttccccgacatcgtggacatgaagttcaccgcccgcatggaggaaaagctcgataccgtcgaggagggcaagaccgcgtggaaggacgtcatccgcgacttttacggcggctttgagcgcgaccttgaaaacgccgagaaggcgcttgagggcatgagactcaaggtccccgatgaggtcagcgaggagaagtgcgacgtctgcggccgcaacatggtcatcaagagcgggcgctttggccgcttcctggcctgcccgggctaccctgagtgcacgttcaccaagccccttgtcatcgaaatgccgggccgctgccccaagtgcggcgggcgcatgatgaagcgcaccggcgtgagcaagaagacgaacaagcagtacacgtactatgcctgcgaattctccaccagcagcgatcccgagaagaagtgcgacttcatgacttgggatgtgccgacgaaggacgactgccccgagtgcggccagacgatgttcaaaaaggcgggcaagggctttaagcgcccgtactgcatcaaccccgcgtgttcgcgctttgtgccggaagaccagcgcggctatgtgaaaaagaagaccaccgagaccgcggaagagggcgcggagagcgccgaagccgccgatacggcggagaccgcggcaaagaagaccgccgccaggaagacgacggctaagaagagcaccaccgcaaagaaaacgagcacaaaagcggcgagcaccaagaagaccgcgacgaagaccgccgcagcgaagaaaacgacaaagaaggccgcagccgaggatggtgcggaaaaacccgcaaaaaagacggcggcaaagaagaccgcgaccacgaaaaaggcggccgctaagaagacgaccgccaagtccgcggccaaaaagaccgcggagaaagaagagaactgatgcaagtaactgtgatcggcgccggccttgccggctgcgaggctgcctggcagctcgcgcagcgcggcatcgccgtgacgctgcatgaaatgaaacccgaaaagaccacccccgcgcaccacacggcggattttgccgagctttgctgctcgaattcgctgcgctcggaccagatcgaaaacgcggtcggccttctcaaagaggagctgcgccgcctcgattcgctgatccttgcctgcgcggacgcgacgcgcgtggaggcgggcggcgcgctggcggtcgaccgctgcggcttttcaaagctcgtgacagagaagatccgttcgcatcccaatatcacggttgtccccggcgaggtgacggccatccccgaggggaacgtcatcatcgcctcgggtcccttgacgagcgacgcgctcgccgccgccatcgccgaaaagatcggcgacgggcacacgctgaactttttcgatgccgccgcgccgctcgtgacgtttgagagcgtcgacatggattcggcgtttttcgcctcacgctacgacaaggggacggcggattacatcaactgcccgatgacggaggaggagtacgatgccttctggcaggcgctcacgaccgccgaggaagcgagcgtacacggctttgaggataaaaacgtcttcgagggctgcatgcccgtcgaggtcatggcgcgccgcggacacgatacgctctgctacggccccctcaagccgcgcggtctgcgagacccgaagacggggaaagagccctatgccgtcgtccagctgcggcgcgacaacgcgcagggcagcgtctataaccttgtcggcttccagacgcatctgcgctttcccgagcagaagcgcgtgttttcgatgatccccgcgctgcatgatgcggagtttgtgcgctacggcgtgatgcaccgcaacacctatctccgctcgccggggatgctggaccgctactatcgcctgatcgcggatgaccgcatcgcctttgccgggcagatgaccggcgtggagggctatatcgagtccgcagcttcgggctttctggcgggcatcgagatggcaagaagactcgaaggcaaaccgctcgtcgatttcccacgcgagacggccatcggggcgctggggctttacatcagcgatacgacggtctcggactttcagccgatgaacgtgaactttggtatcatgccgccgctgggctaccgcatcaagggcggcaagcgcgtgaaaaatgcgcagctcgccgcgcgctcgcttgaaaagatcgacgcgatgcgcgaggacgtgctgagtgacaggaaaggagagtgaccccgtgaagatcatcgtcgacgccatgggcggcgatttcgccccgctcgcgcccgtcaagggcgcgctgatggcgcaggagaagtacggcgtggacatcgtcctgaccggaaaaacggaagagatcttgaaggccctgcagcagtgcggctgcaaggagctccccaagggcatggagatcgccaacgcgaccgaggtggtcgagatctgcgacgatccggcgacggcctttaagcacaagaaggattcgtccctcaccgtgggactcaatatgctgcacgcgggcgacgcggacggctttgtcagcgcgggcagcacgggcgcgctcctcgcgggcgcgacgcttctcgtcaagcgcatccgcggcctgcgccgcgcggcgctcgcgccgaccatcccgacggccaagggcaaggcggtactcatcgactgcggcgcgaacgccgagtgcacggtcgaatacctgctgcaatttgcgtatcttggcagctactacgcgcagaaggtgctcggcgtcgaaaatccgcgcatcggtcttttgaacatcggcgcggaggagagcaagggcgacacgctgcgccgcgaaacgtatcagaagctcaaggaagcgggcgaggcggggcatctcaacttcaccggcaacattgaggccaaggaagcgatgctcggtgagtgcgacgtcatcgtcgccgacggctacagcggcaacatcatgctcaagagcatcgagggcacgggcaagcttctttccatcaaattgaaggaaatgctgatgcacagcaccggcacgaagctggcggcgctgctgctcaagggacagctcggcgatttcaagaaaatgctcgacgcgaacgaggtcggcggtacggcgctgctgggcatctcgaagccggtcgtcaaggcgcacggcagcgcgagtgaggtcggtatctgcaatgcggtccgtcaggcgatggaggtcgcgcgcagcggtatcatcgacgacatcgcgcaaaatatcgacaagatgcgtattgaacagaaggcagaataacgcgaatgccaaaaagcggcaaaatgggtattgacagtacagtgcctttgccgtatcatttggaagaaccaaaaccgtgagaggaagtataagacttatgagccccgaagaaattttcaaaacgatgcagaagctgatcgtcgagcagttcgcgctcgaccccgatgaggtcacgatggatagctcttttgaggaagatcttggcgccgactccgtggatcttgtcgaactggtgatggccatggaggaagagtttgagctcgatgagatccccgaggaggagctcacctcgctcaagacggtgggcgactgcgtgcgctacctgagcacgaagctcggttaagaagaaaaaagccgccccgctttgcgcggggcgtccttttatcaggaggaaaaaccatgcaggccttggaagaaaagctgcaatatcatttcaaaaatctggcgctgctcgaagaggcgctgcgccacagctcgtatgccaacgagcaccgcggcgcaaactttttcagcaacgagcgcctggaattcctgggtgacagcgtgctcggctttgtgacggcggagtatctgtttgccaagcatcctaccgcgccggagggggagctgacgcgcatccgcgcgctgctcgtgtgcgaggacagcctgcacgaggtcgcgcagcgcctggagcttggaaaatacttaaagctcggcaacggcgaggagagctgcggcggccgcgcgcgtccgtctatcctggccgacgcgaccgaggcggtgtttgccgcggtgtatcttgacggcggcatcagcgcggccagcgcgctcatccaccgagtgttgctcgataccgagcgcgaggaggtcgccgaggaaaagcgccgcgactataagaccattttacaggaattcgtgcagcgcacgccgaaccagacgctttcctaccgcctgtttggtgagagcggccccgaccatgacaagacgttctattttgaagtgctgctcaacggcggcgctgtgggcaagggcgcgggccgcagcaagaaggaagccgagcagatggctgcaaaagacgcgctcgaaaaactgacggaccagcgctgaaaagatgatcaccgactgctttgacgataagactgaacccgtcatcagcctgcgggacttttacggcgagcagaagcaccttatcgaaacgtgcttgatcctgttttcgcagaagatctatcagcatctgctggacacctatcccagtgaaaagatcggcctgatcggtgcgtgcaacgggaatatccccatttaccgcatgaattacaagggaaaggacatcgcgttttacctctcgggcatcggctcggcgattgccgcatcggagtgctatgaggcgagctggatcgtcggtgcgtcgaagttcgtgatgttcggttcctgcgggagcttgaatcgggaggcgacgaggggcaaatttatcgtcccgacggagagttgccgcggcgagggctgctcgtactatttcgctgcgccgtccgactacatcacggtcgagaacgcgcggaagctctcggccatctttaccgagctgggcgtcccgcacgtgacggggcgggtttggacgacggacgccatgatccgcgagaccgcgggcctcgtcgcgcagcgaagaagcgagggctgtctcgccgtggagatggagctcgccggtgtgcaggcggtgtgcagtttttacggcttatcgctctataacttcctcgaggcgggggacgtgctggaggagagcggctacgatgtcgccaatcttcgcggcgcgaaccacgacctcggcaagctctatatcgcgctggaaacggcgctgcgcatctgaatagaatcgaaaacgccatgacgaaagtcacggcgtttcttttttgctgtttttcttcttttcaaagaggatcgacagccccgcgtagagcaggaacagcccgaacggcttgcggaagacgctgctgtcgaccattgtcgtcaaaaacgcggcggcgagcgcacagagcgtgccggtcgggatggccgcgcgcaggacggctttgtcgagatatccgtttttgcgatgcgcgaagagcgagatgcccgcggttggcagaaaatagagcaggttgatggcctgcgctgtgcgctgctccacgccgaaaaagagcgtcatgcataaaagaagcagtgtcccgccgccgacgccccaggacgagaggattcccgtcaaaagcccgcagagcgcgggaaagagccagtccgtcacagaaggtacctcaccgcgccatagagcagaaacagcgcgaaaatgcgcttgagccatgtgttcggcacgtccttgaagagcctgccgccgatccatccgcctgcaagcccgccgacaaggtaggggagcgcctctccgagcggcagcgcgccgcggaacgcgtacacgagcaccgacacaaggcagaacgggaagatgacagccacgcaggtcgcaagcgccgtcttgtcggagagctttgcccacgagcgcagcaaaaacgcgagcgggatgccgccgcccccgccgaataagccgttcaccgtgcctgcgagcgcgccgcagacgcggtatttgcccttttccgtcatgctgtcaccgcctttttgatgctatgtagcggccgcctgaggggcggctgcaaaaattactgcttcttgaagctctggcagtcggtgcactggtccatggtggggttggcctcgtgcgtaccgacctggatggcgttcagaccgcagtactgggcgtccttacagtggttggcgcagttggtcacggcgcagcgaatagaggtgttgggcgtgcaggagcagccgttattggtatgatcggtcatagattt

SEQ ID NO: 10138 - DNA, 9535 bp, Unknown
  gut microbiota DNA sequence
atcttttccttcaggaacaggttcatgagcttggccagcagcacgccgcccgcggtaccgaaaccgaacgcgacgatacccatagccatgatctcaagggtctgaacggaaaggaaggtggtggcggtggcggtagcaccgacggtgaagccgaggaagatggtgacgatgttcatcagctcgttaccggcggtcttctgcagacggtccacaacgccggactccttgaacaggttgccgagcatcaggcacgcgatcagaggcgcggcagaaggaacgagcagcgccacgaacacggtgatcatgatggggaagatgatcttctcgcgtttgctgacctgacgcagcgggcgcatgacaatgcggcgctcttccttggtggtcagagccttcatgatggggggctgaatgaccgggacgagggccatgtaggaataagcggcaacggcgataggaccgagcagctcgggagccagacgggaggtgacgaagatcgcggtcgggccgtcagcgccgccgatgataccgatggaggcggactgctggtaagtgaagcccatgaactgggtaccgacataggtcatgaagataccgagctgagcggcagcgccgagcagcagggacttggggttcgcgatcaggggaccgaagtcggtcatcgtgccgacgcccataaagatcaggcaggggtagatgccgagcttaacgccgaggtacagaacgtcgagcagaccgaggctaacggtgctgccgaccgcccacggggcaagcaccgcatcggctacgccggcttccgacatctctgtcaggaattcctgcgtgatgggcgctcctccgaagaggtcccaatggacatgtcctccggcgaacaggatctcgtggaacatgtccgcaccgggaaggttggtgcacagcataccgaacgcgatgggcaggagcagcagcggctcaaagcccttcacgatggccagatacagcaggacaaaggaaacggcgatcataatgaggcatttccagttgccctcctgaccgaacatatagaagccggtctgctgcatgaaattgataatagcaggcatttatgtttagattcctttcacagtttattgagcaagaggtgcctaacttagccgatgacgcacagaacgtcgccggggttgacagcagcgcccttggaaactgcaacggaggaaacggtgccggcgcagggagcgaagatctcgttctccatcttcatggcctcgaggatgaacagcagatcgccttccttgacggcctgaccggcggcgaccttcacatcgaggatggtgccgggcatggggctggagacagtgccggcgcctgcgggagcggcagccttgggagcagcagcgggagcggcggcaggagcagcagcgggagcgggagcggcagcgcgggcaacgggagccgcggcagcgcgggagacgggagcggaagccatacggctgccgccggcggcggactcgacggtgacttcgtaggtggtaccgttaacggtgacattgtactgcttgatcatgtttgttctctcctaaaaattaaattagatttttttgatgttcacgatgttcatgctgcgggacgagataccgacctcttccgagagagcggcagtgatcgcggccacgatctcaggctgcatgccctgcggcttgggagccggcgcgggggcggcagcaggagcagcggcagcaacggcaggcgttttttccttgcccttgagaattgcacccattgccatggtgaggaaaatgatgcaaatcaggccaaagaacaccgtgccgatacccatcagggtgacgaaaaggctactgtattccatttcttccttttacctttcaatattggattataacaaagcgattacatgaattgcaagcgcgtatgcactttttgcgcatttttaacagcttttccctcctgccttgtaaacgggcaggagggaaaaaagactttccttactgcacggagagcacgtcggcaaacgcctgaatggcggtcgccgcctggccgaagtcgcgcatctgctggtcgatgccgagcttgatgaaggggatcccagcggcgtcgagcgccttcttgaggtacgggaactccatctcctcgggatcgcagaactgctgcatgaagagcacaaggccctgcgcgccggactccttgaccatgttggccacgaactcgccgcggcggttcttgctggactgcggatcgtagagcaggacgtcgtagtcgatgttggtgaactgatcgacgagcgccatcatcgggtcgccctcttcgctcgcgtcggtgcggaaggcacgggactcgtgggcgacatcgtccgccgcgatggcaacgttgttgtccttgaagatcttgagcagcgtcgggttgtcgcagatgatgccggaggtgacgaccttcacgccgttccacttggcctcgggcagcgcggcgatctcggcgttgagagcctcgagcttctcggtgtactcggccttatccatgaaccaggcagcctttaagacggccgagcgcatgatcgggtcgataacgtcgcagtggtcgcttgcgagcttgacgaactcacggcgggcagcgcgggacttgttgtagaccttgatggccgcagcgatgtcctcgctcttgatctcgtgaccggcgatcttttcaagaccggccttgacgttgttgtactgatccaggcagaactgcttgccccagtcggcaaagcggttctgaggatgggcgaggaagatgcacggcagcttctcactcatggcgacgcggatgttctggctcatggggcgcagcgtgtcgcagatggtcggggtgatcacgccgtccagcagatccatcgtgccgtcgagcagcatctcgaggtcgagctgggcgatggtgcaatagaaggtcgcgcagtattccttggagcgctgctcggtcttgtcgttgctgccccacatgccgaacggcatcataccggcggcgtaaaccagctcttcgggggcgtaataaggcatcacgccgatgcactttttgcctgcgtccttataggccttgagctggcccttgggattggcggcaacagcggaaaattcattaacgatagcttcgatactcatttttgcacgcctccttagtctttcttgttggcttccatagcctcgaccagaccctgcacgcgggtcgcgtactgcgcttcgttgaagttgcgcgggtcagcctggtcgccgtcgaaaccggcgcagggcacgccgaggtcagcggtgaagcggcgctgcatttcagccatgtaaccggaccagggcttgcaggagcggttgtagtggacgagcacgccgtcgaccttgttgtcgcggcagatgccctcacgccaggcaacgccctgctcgatgcagacggagttcggagccttgtagtaagcgcgggccatttcgtccatgttgttgtaaacaaagccgaacgcgggcgcgtacacaactgcggtgacgttgataccgttctccttgaggggcttaaagaggttcgggagcttcggccagcaggggatgccctcgaacatgacgcggtactgctcggggaagggcagcgtggaggtgccttcctcaatgttcttctgcaggtccttggacaggagttcgaaggcgtcggcagcagcttccttgccgcgggcggtgacgacgtcggccatgtggttaaacaggtcgaagccgctcatcggggcgggcttgtactgcaggaagtcgcagaccttcagccagttctgcgcggtgcggttcgcgtgcttgcaggcaagctcgaacttcttctcgtcaaacttcttgccggtgagcttttcgagctcatggatggcgttgtcgaactgggcgcggacgtacttgacagcggaatcgctgacttccacggtgttgttgtaggggatatcgaccatgatgagggggatgttgcacatacgggcgatattctcgtaccacttggtcatgcagttgcagatgttgttgcagcacaggacgaagtccggctgggggatgcgcatctgcttgtagggcttgatggcctcgcggcggaagttcttataggcgatctccttctcggtggtctcgggcagagcctcgatctcgtggatatcgtccagaaccgtgtaggggacctgcgtcttggggtccttcttgggcttgccggtctcaggatcgatgacgaccttgccgttttcgtccttgaggggcttgccgctgttggggtcgatgatgaactcgagcgtttcggggtcgaacttgcggctggcgcgcttaccggcggcgtaagccagggagatacgtgcgtaaccgcagatatcgttgtcgaagccgagatcctcggcagcctggcacatgatctcaccgtcgcgctgggcggcaataccggcagcctggttctcgggatacatcacgttgaggtcaaaggcctcagcaagctcacagggaaacttggagctggaccaaccgaccagcttaccctgcttcttcgcttcacgggcgtcggcatagacgtcatcgacgaccttgcgcaaagcaagcacgccgggactgacttgtttagccatgattgattcctcctaatgcgatatagaataatttgataacgaatgatggggattatttgttcttcaaagccttctggtaggcaaacagagcggcgccgagcgcaccgttatactgcgtgaggggcgtggtgtggatctcgtggccgagctgctcctgaagggctttcacgatgccgtggttctgtgcgacaccgccggtcatcaccacgtcgtcgcgcacaccgatgcggtggcagaggccggaaacgcggcccgcgacggacttgtggatgccgtggatgatgtcgcacttgtttgtgcccatggcgagctgcgagatgacctcgctctcggcaaacaccgtgcaggtcgagctgataccgacctccttggtcgacttgtcgccaagatcgcccagttcttcgaccttcacctcaagcacgcgggccatgacatcgaggaagcggccggtaccggctgcgcacttgtcgttcatgacgaaatttttcatcatgccgttctcgatctcgatgaccttcacgtcctgcccgccgatatcgacgactgtgcgcacgttcggaaacaggaacgccgcgcccttggcgtggcaggaaagctcgctcatctgcatgtcggcaaggccgtcaaggctgttgcgcccgtagcccgtggcaaggacgaagtccatctgctcgcgcgtcatgcccgcgttttccaacacctgagcgatcgcgcgggatggacccgacgtgcccgtgccgacagcgacgagggacttggcaacgatctcgctgccgtcttttaagatcacacatttcgacgcggtggagccgacgtcgatacccatggtataaatgctcattgtactctccgtttgccttcccgtgcgctgcgcggttcttgcctccgcgcagcgccgggaaaagcattgttgtgatattttactgcgcgttcagggcgtcgtagtcgcggatgacgcgcggcagcagcatctgatggaccgggcagatgctctcggggttctgatagcaggcgttggcgaaggcctggatgtagggacggatgtcgttcatgtcgacgatctcgtcggtcaggcctgccttggcgcagaacttcgggctggacttcttggcgtagtcctggatcagcgcgttcatcttgtcgatggtgggctgcagatcctcgccggccttctcttccttcacgagacggcgggcatacatggcggccgcagcggtctcgccgtgcatgacgtagatctcggtggtagcggtgccgatggagaaggcgttgttgtcgttgccctgcgggccgccgaggacgtagtgcgccgcggcggtgcccttgcggagcgtgatctccatcatcggcagcttgctggactggatggagtagatcaggctctggccgaggccgaggagctcagcgcgctcagcgtcgttgccgacgtcgataccggtggtatcctggacccacagcatcgggatgcggtcacgcgcgcagagggtgacaaactcgttcatcttgatgaggccctgacggtacagcttgccgcccacgcccatcgcctggccgtaagtcgccatcttgtactcggggtagttcatcagcatgccctgatagttggcgacaacgccgacgagcagaccgtcgatcttggcaaggccggtgatcatctcggggccgtagccgtgcttgtactccatgaactcggagccgtcgaaaagacgcgccagaacttcgaccatgtcgtaggagcgcttctggttgaacggaacgatgctgtagaggtcgttggcgtcgaacaggggctccttgggatcgtcgacgcggaagaactcgggatcgtaagcgggcagcatgtcgatgtacttgcggataccggcgagcacgccctcttcatcggcgtagacctcgcggaagaagccggtctcgccatagtggatggcgacagtgccggggatgtcgctcttgaggttcttctgcgccttgatgagcgcctcagcagcctccttgtcgacatggcccttggggctcataccgccgacgataccggcgccgccgactgccatgttggcgtcctgatgcgcgatcaggatggtcggggagatggagtgatagccgccgccggcggggttcgtgccgtagatgccgacgatgacgggcacgcccatctggttgagctcgctgttgcgatagaacggcgtaccgccgccgcggcggttggggtacaccttctcctgctcgtcgagcttaacgccggagcagttcagcacgtacacgagggggatgcgcaggcgcttggccgtgtcgctgccgcgcagcaggctgtcggcctggccggggacccaggcgccggcgagcttcttgttgtcgctcgcgatgatgacggcccatttgccgtcgatacggccgaggcccttgacgatgccaacgctgccgttcttgttgtcctgggggttatagaggctgttgagggggcaccaggtgccttcgtcaacgagctccatgatgcgctgcatcgccgtccactggccggactcgttgagcgcctcggtgctcttaccggcttcgagggcagcctcgcggatctcatggatctcctgctccaccgcctggatctcagcggcgttgtcctcgtggaatgcgctcagatccttgccgatgaccggcatgctctggaaataagagggcatggaatattcgctcatattaagttctccttcttaaatcgaaataacaaattacttatccttgggaaccttgatgaatgcctgacccgggtcgatctcctcacggatgaggcggatgatctccggagagggaccttccatcagctcggcgcgggagacgtcgatctcgaagccggtgttctcctgaaccatctcgggagaggagaacggatagtagtaagcgaggtacatgcgcttggtctcttcatcaaacttcatgatgccgaggtcggtaacgaccatctgaggaccgcggttgccaggcaggcccgcgcgctcacggcctccggggccgtccatccagccgcaggaggtgatgtagtcgacatggtccatgaagcggcgcttctggtgctgcatcatgatgatggtgttgcagtaggtggcaatgccgttggcgccgccggaaccggtgaagcgggtggtgggctgcaggtagtcacccttgccgaaaatgcaggtggagttcacgttgccgtacgggtcgatctgcgcgccgccgatgaaggcgacgagacgatcctcgtcgtgcagccactcgttggcctcgaagccgacgaagcggatgttgggccactgcacggcgcagtgcgccatgaagcggttatcgccgacggagcgggggacctcaacggggtcgcagtccatcagacccgactcgacgatggggtggcagctggggcagaccgcgcgcttggcaagggacgcaccgatcagcggcaggcccgtaccaacgatgacgatctggttttccttgatattcttagcaatggcatacgcctgcatttcctgcttggtatacttcgtataatcagacatttctatttagcctcccaaaccttaatgtgtagtggaatagccgaggtgcggctcgttcttcaggcgcatcagacggctgccgccgagcttatcgagcagagcggactgatcttcgcagctgtagacccacttttcgaggaaatccttgaaggtctcgggaatcttctcaccgctcttggcgagctcgaaggccttctgggcgttttcggcggcgagcttgagcttctcgtcctcgggagccttctccagcgccttggcagccttggccgcagccttttcaagctgcttgacggcatcctcggcatcctgatacttggaggccttgtcgtattccttcaggccggcgtcgtcgtcgtcatagtaatcatagcactgagcgggccatgcgccatagggagccttgacgaccgcctgcacgcactcgccgaagatacgggtcttggtcgggtcgcggcggatgaactcgtcggagacgatctcctcgcaggtgacgatggtcttgcgcgcggcgatcgcgatgtcgatatcatggaactcatcgcccatgatgatgcaggtgccgtccggagaggcctgctggacgtggatgatggcggtgtcgatcttgggcacgggcacggctacgaccttctgccccggcaccatcgggttctcgatctcggcgcacttgagattttcgatcttgggcatggtcttgcgcttttcctcgctgatgccccagaacttcatcaggccgctgccctgcatcaggcggaccggcaggaacggaaggccgagagaagaggcgtgcagcatgagcatcagcacgtcctgagaatagtcctcatacgtgagcttgccctgctcgatggcagcgcggaagcggcgggaaacgttggtgtagccggagttagcggtgtagcagttgatgtaagcagccacgcggccctcgccgatgagcatatcgacttcgccgccgccggggccggcataaacgatgaagtccttctgaccctgacgcaggatctcactaaccgtggcatacggcttacggttggtggtgaaaccgccgatcgcaagagtatcgccattctcgacgtactttgcaacggcatcgtgcagtgacatgaccttattcaagataaaaccctccctgattttgataaacatttttatcgccgaagagctctctctgcttgcatggattccgtcaaaaattcttcgaaagatgctcatacaggcttcagtgtagattatagtggaacttcctcgcaaaatcaatgaaaacccgttcagaaagcgaaaaaaaactgaacaaattttagtggcgctttttgtcgtttccgtggagacgtttcacattctttttgtgcaaagcatgtaatttgcaagatttcctgcaagttttctgtcgtgacagtgcaaaaaagcgtcggagggg

SEQ ID NO: 10139 - DNA, 11287 bp, Unknown
  gut microbiota DNA sequence
ccgcgccgtcagaagcaacagcggggtggataatccaaaaaggaggggcaaggcccctcccttttggtcgttaggggtgcaggggcgagatcgaaacgcccctgccgttctcttaggggttcaaaaggggaccttctctcacgtgagagaaggtccccttttatccgcactcccgcgcggcgcgggagataatttcacgttttattaaaacgcgatcacacccaaatgctcgagcaagatcttgagcccgatcaaaatgagaatgacgccgccggtgagctcggcgcggctcttgtagcgcgagccgaacacattgccgacgtacacacccgcaatcgagatcacaaacgtcgtgcagccgatgatcgtgatggcaggcacaatattcacctgtaaaaaagcaaacgtcacgccgacggccagcgcgtcgatgctcgtggcgacggcgagaatcagcagctccttgaagttgacgcccgcgtagggcttttcctcttcttcctcctcttcgcggctctccttgatcatgttaaagccgatcagcgcgagcaggacgaaggcgatccagtggtcgaagcgctcgatataccctgaaaaccggctgccgagaaggtagcccgtcagcggcatcagcgcctggaagccgccgaaaaagaggccgatgcagagcgtatactttttgtcgatcttctgcatggaaaggcccttgcagatcgacacggcgaaggcgtccatcgaaagcccgatgccgatgaggaacagctcgaaaaatgtcatggtaagatcctccaaacaacaaaaaatcaggcgcggtaccgcacctgagcataagaaaagagacacaggtacagcgaagccatacttgagtctcgttgtttaagacaagccagaccgcaaagcggtcagtctgttgacttgccacgccatctaaagcagctgacgccatctactccctcaaagtaaagagcagtatatcatatccccgcagggccgtcaagcatcctttgactcgcattcagacatttttcattcaatgtatcattatttctgaatcgttcgataaaaatgtggaatcattgacaaaagttcccttgccattcccacgctgctgtgctaaactaaatatcaaatttaggaaaggatgtcctcataccgctatggaattcttatcgaacaagcctcttctcatcaccgacaccatcctgcgcgacgcgcaccagtcgcaggctgccacgcgcatgacgctcgaacagatgctccccgcctgcgaaattctcgactcgatcggctactactctctcgagtgctggggcggcgccacgttcgacgcctgcctgcgttttctggatgaggatccgtgggagcggctgcgccagctgcgcgcccacctgccgcacacgaagctccagatgctcttccgcggccagaacatcttaggatacaagcactatgctgacgacgtcgtcgacgagttctgcggcaagtccattgataacggcatcgacatcatccgcatcttcgacgcgctcaacgatgtgcgtaacttagagcaggccatcaagtccacgaagaaatacggcggtcaggtcgaggccactctctcctacaccatctcccccatccacaatgaggattatttcgtgaagctcgctaaggagctcgagcagatgggcgcggacgctctctgcatcaaggacatggcgaacctgctgctgccgatggatgcctactcccttgtcaagcgcctcaaggagaccgtcagcatccccatccacctgcacacgcacaacaccagcggcacgggcgacatggtcaacctgatggccgcgatggcgggcgtcgacattgtcgacaccgcgctctccccgctcgccaacggcacgtcccagcccgcgacggagtccctcgtcgccacgctcaagggcacgccgcgcgacacaggcctcgacctgaacaagatgagcgaggctgccgtccacttccgcaaggtcgcggatgagctcaaggcgagcggcgcgctcgacccgaaggtgctgaatgtcgacacgaacacgctcctctatcaggtccccggcggtatgctctctaacctcatctcccagctcaagcaggcgggcaaggaggacaagtactacgacgtgctcgccgagattccgcgcgtgcgcgaggacttcggctatcccccgctggtcacgccgtccagccagatcgtcggcacgcaggccgtgctgaacatcatcaccggcgagcgctacaagatggtccccaaggagtccaaggccatgctgcgcggcgaatacggcaagctgcccggaaccgtcaacgaagaggtccgcgccaaggcgggcatcaagcccgaggacgtcatcacctgccgccccgccgaccttctggagcccgagcttcccaagtaccgcgaggagtacaaggacctcgccaagagcgaggaggacgtgctctccctcgcgctgttcccgcaggtcgcgccccagttcatcaaccgccgcaacctgcgcacgccgaagccgcaccgcacgatggctcccatcgcgcaccgcgaagcgaaggagcgcgccgtcgcgcccttctcccgcaagtaaaacgcaacgaaaaatcgcccttccatttggaagggcgattttcttattttgtcaggtcgagctgcatctgcacgtgcgggataccatcctctaaaaattcctccgacgtctggcggaagccgaagtcctcgtacagtttcttcacatacgtctgcgcttcgatcgtgatcttatcggcgcgcagcttctctttcgccgtgtcgatggccgcggcgacgatttgcttccccagaccgcagcgccgcttcacggcgatcacgcggccgatggaaacctccggaaacgttgcgccgcgcggcagaacgcgcgcataggcctcgatgccgtccttgtcccgcagccagacgtgatacgcgttttcgtccgcgtcgtcgacctcctgatagcagcattcctgctccacgacgaagaccgacacgcgcagcctgtaaatttcatagagctcttgcgccgtgagctcggaaaagtgcttgacgaacagctccatgcactttccctcagcggatgaagtgcgtggcgatccgctcttccttttcaggcaggccgaactgctccttgccgagcgcgatactcttcatcaaaaacgtcatgttgcgcgcgagcgtgcgcatcgtctgccgaccctctccgtcctgctccgcctcgcccggtgcgcggccgtggatgctgttccagtactggctggacgcgaccggcatgccggagatggtgaaatacttgttgagctcatcgaacgtcgccgagcagccgccgcggcgcgcgcagacgacgctcgcgccgaccttcatcgtcttatcgaacgacgagatatagaaaagacggtcgaggcacgcgacaagcgtcgcgttcgcggacgcgtaatagacggggctcgccacgacgaggccgtccgcctcctcaaacttcggcttgagctcgttgaccacgtcgtcaaagacgcacttgccgagcttgccacaggctccgcaggccgtgcagccgcgcacggcctgattgccgatgagcacggtctcgacctccacgccgcttgccttgaagatctcctccatctcacgcagtgcgacggcggtgttgccgtttgcgtgcgggctgccgttgagcatcagtaccttcaaatttttcattgctgtctcctcctgcatcctccgcgcgccgctgagcgcttgccttgctcaacgcgcactgttttctattctctcgtcgatctcgcgaaaaagccgccggtagtcttcgttcgaccaaatccttttcggccgccagcagtcccgcagctgtcgcagcgcgggcgaatcgccgcaaaaggctttcacccgctgcgccgcgaattcattggcgtccacctcgtaaggaaagcccagataagcgtcgcgaaacctctcttctccgccgtccaagcggcactcctgccaggtttcgccgcgcaggcggaagcacgttccatcatagagcaccacgtagggaaggcttacgcggatcatcgcgtcgaagcgctcgggatgctggtactgctccgcgtgccgcagctcgtggacaagatagaacatcgcctcgtactccggcgcactttgcagcacggccggattgagaaaaagcgtttttgccaccggatcaaacgtgccgttggccgtctcgtatccctgcggcatgtcccacgaaagtacgacggacagtccgcgctctgcgcagatgctttcgaccagcgtgctccattccgtctgtcccatgggctggcctcctctcgattactcctcgcccgcgtcccctgacatacggtgggctttgcgctcttttttgtagcggtacatgttgtggtcggcgcggtccttgaccgtgacgacgttctcgcttgaaatctctgccgagccgaacgacaccgtcggcaggaagtcgagttccttgcgccgctcgtccagccgacgcacaaagtcccgtgcacaggcgtgttccctgtcgccgtcgcgcagcagcacgcagaattcatcgccgcccgtgcggtagcagtaaccgtggcgcgcataggccttcttgatgcacgcggcgatctcggcaaggcagatatcgcctttcacgtggccatatcggtcgttgacctgcttgaagtcgtccacgtcgaagacgacaagcacctcgccgctgcggcgcatctccgccgtgcgattgagatagctgttctgattcaaaaggcccgtgagcgcgtcgagctggttccacatctcgctgcaatagatgaaatacagcaccgaaagcagcgtgacgcacagccatgtcacgtgcagctgcggcagcgcgatctggatgatcgtcgccgccgccagaaagacgatgaacggatagatcagtacgcggctgcgattctggaatgcacgcgccgtgatggccgtacaggccgcaagataaacaagcgcggcaaagtacgccgtaacgtaaaacgcgaaaaagtcgccgcgcgaataaaggttctcctcgctcacggagaacaccatcccgcccggcagcatcagcgccagcgaaatgagatacgccgcctcgcacgcgaccgccgttttgaatccgcgccggacgccctgctttttgtccagcacatacacaaggcacagcgacaccgcgggcgacaggccgaaaccgaggtagttcgacaaaatattcagacagcgcagatgcaccggcgcaccgtcaaccagaatcgtgatgacctcgaggatcgagatcacgccgatgagcgcaaaggcgaggaaaaagccgcgcttctgcttgctgttgagcgtttcgctcagctttgtgaggatgcacatgaacgtcagcacgaagaggtcgatcgtcgttaaaaccaaaaaatactgatctatcataaaatcaaaaataccttctgccaaaataaaaggccgataatccggcccgacaaaaatctcctcatttgtcctctttgggacattttttagtatatcacaaagtttgacatttgcaaagcacagaatgtgacgcacaaaaattttgcatatcccgcgcagggccaaaacgcggtaaaaattcacatatcttacgattattcgccctgcgtatccccaaattacggaataattgtgcattgtgcaaggcatatatttcccgtataatgcaaccattccgcggtctttgcggaaaatcggaaaaaggggctccgccccgaaacaaaaaaggagatttgcaatgaaaaaaactgtcactctggcgctcaccctcgcgcttgtgctgggccttctgtccggctgcgccaacaatgacacaccggctgataacgccgagaacagcaaggcagcggagactgccgaaaactttaccgacgaaatgaagatcccctacgctgtcgacctgtcccccgaggacggcgcggactccgtggaacgcagcggcgaccatgaaaactcgccctacttcgcccaccccgacgtctacaacatggagtccacggacacgctgaccatgctgccccacttcaggaccatgcagcagacccgcgaatggtcctgcggcgtgacggcggcgctgatggtactcgactggtacgatgcgctcggcgactggaacgaagagtccctcgcggcgctgcgccactcgctcgacggcacggagcttgagggctatcccggcaccacactcaaccaggccattgacattttcaacggcgtaggcggttttgatataatatcctccaacgactatcccgacggcatctggctcgacgatattcagggctggctgagcgaaggcaagcccgttatgatctgctggaacgactggggcggccactggcagaccatcatcggctacgatacgatgggcacggaaaatgagaacgacgacgtcttcctcgtcgccgactcctacgacaccaccgaccacaatcaggacggctacggcatctatcccgccgagcgcctgatgtacaacttcacgatgtacggtgcgttccctgaaagcgagggtggcagcgacatgctgtttcttgtcgcctctcccagcgtgaaataacgatccaaacgcagcaaaaagcagcaggccgtcggtctgctgcttttttcgtttcacttactgtctgcaaattttgataagcaggagctttccatcccgcacggagattttcgcggtctttccgggcaggacctcgttgctcacgccgtactggtattcgcacgtgatctccgcgccgtcgagcgggtacttcgcatcgcggatcgtaatccccctcgcacagcccgtgatattgagcagcgagaaaaacgggtacttatcctcgatggagacttcgtccttcgagacgatctgcatctccgaatagtcgtccacgatctccgcctttttgccgagcgaatcgaggtagagcaggatcgacacgtttccgagcgtgtggtcgagccgcgcgccgatgacgccgatgagcaaaaagtcgtcatacccgcgctgtaccatcgtcttgacggcaaacaccgtgtcggtgtcgtccttttcacacgggagcacgatggtctctacatcgaggtgcggattgcagtgcgagtcaaagtcgccgacgatcagcgcgggcttcacccccagcgtctccatgtgcttgaggccgctgtcgcagaagacgatcgcatcgtccgctctcagatattgctttacgcgcgcatagtcgccgatgtccgcgccgccgacgatcacgcagcgttttttctcgctcacagtctcatctcccacgccatctgccagaaggccatctcgtagcgcgagcaggcgatgaaaatgtcctccaaatgccggagctgctcttccgtatagtgcgcggacaggcggtcgagcgtttcgatcaggatgacattgcccgcggcatacccgtctgaggcgtagccgcggatccagtcgccgtagaacgggtcgtcgaccgattcggggcggttcgcaacgatcttcttggcgatgacctcgtagctgtaagcgcacgagagcaccgccgccaagacctcgacctcgctctcatcataggcgacacgcaccatgtaggacgtataggacaggttatcgagcgagggcttcatcgcgtcgatctcctcctgcgtcactgcaaacttccccatgtaacccttgtgcacgtccagctcgccgttcatcacgttgatgtacttggcgaagaggttcgccgtctcgacgcttttcgccttggcgacgcccacggcgcaggtcttggcatagtccttgagatacaggaagtcctgcatgatgtagtagcggaacttatctcgctccagcgtgccgttctggatgccgagcacaaaggggtgctcgttgtaggcgtcccagatcgttttgctggcgttcagcagtctttcagatgttttcacttggtattctcctttgcaaactcgccccgcaggtcaaaattgtgctgcatgggccccgcccccttgccgaggtccagcattgccgacagcgcgccggagatgtactccttcgcccgcgcgacggactcgctgagcgagtagcccttggcgaggttcgacgcgatggcgctcgagagcgtgcagcccgtgccgtgcgtgttgggattgtcgatgcgcttgccctcgaaccactgcatctcgccgcctgcgtagagcaggtcgttggcgtcgttcacgcggtgaccgccctttaagagcacggcgcagccgtaggtgtcgccgatgcgcttggcggcgcgctccatgtcgtccttgctctcgatcttctcactggagaggatctcaccctcgggaatgttcggcgtgatgacggtcgagagcggcagaagctcgtcgatgagcgtctgcaccgcgtcggtcttcatcaggctcgagccgctcgtcgcgaccatcacggggtcgaccacgatgttctttgccccgtagtggcgcagccgctccgcgatcacgcggatcaggtcggaggacgagaccataccgatcttgaccgcgtcggggaagatatcttcaaataccgcgtccagctgctcttttaagaatgcaggcgttgcctcctgaattgccctcacgccggtcgtgttctgtgccgtgagcgcggtgatcgcggtcatggcataaacaccgttcatcgtcatcgttttgatgtctgcctgaataccggcgcctccgcaggaatcgcttcccgcgatggataatgctgttttcatcgtttttcgtcctttcgattcaaaatgcatctcttttgttatgcgacagagagtggtgcccccggtctgccgcccaaagccgcggctttagtccgccgcggtcattgcccagaattgctccaattgctcaaagctcgtgatatagcagtccgccagcgctctgacctcgtcctggcgcttttcgctctcgtcgaagaccgccgcgacggtaaagccgtcttttttcgcagtttcgatggcgtggatggcgtcctcgaagaccacggtgctgccgcgctgcgcgccaaaatgctccatcgcgcggcggaagatgacgggctcgtccttgccgtgcccgacctcgctgcacgtgaagatcgcgtcgaagaggttctcgatgccgcagcggcgcagcgccgattcgatgagatagcggtctgtcgccgtcgcgatgcagacgtcgacgccctttgcgcgcagctctttcaaaaacgagacaacgcccggctttggctgcacctcgtcgcggtaaaaatgctcgatgatgcggtcgatgcccgccatgatctcctcgggcgtctccgcaaggtcatactcttttttcaggtgctccgccgcctgcaagaggctcagcgcgcgcacctcctcgcgcacggtgggcttgggctctttgccgcgcgagcgcacatagctctccgccaccgtgtcccagaggtacatggagtcgaacagcgtgccgtcaaagtcaaagatcacgcacttgagcttcatgcgttcaccattttttccgacagcgcgcgcagctcacggcattcgctttcgatgtcctccgccgagaagatggcgctgaccagcgccacaccgtccacgcctgtgcccgaaagctcgaggatgttgctcttgttgagcccgccgatggccacgaccggaatatcgaccgcgtcacagatggccttgagcgtttccttcggaagcacgtcgacgtccgtctttgtcgaggtcgagaacatcgcgcccacgccgaggcagtctgccccgtcgcgcacggcctgcttcgcctcttcgaccgagtggacggaaacgccgatcatcatcttgttgccgaccttttcgcgcaccttcgccgcagccatgtcctcctgcccgacgtgcacgccctcggcaccgcaggcgatagcgacgtccacattgtcgttgatgaacagcggcacaccgtagcgcttgcacagcgccgcgatctgcttcgcctcttcgaggaaatcctcgtcgccgagcttcttttcgcgcacctgcacacaggtcgcgccgcccttgagcgcgcattcgacctgctcgtataagctctgtctgccgacccacgcgcggtctgtgacggcgtagagcagcatcgtcttcttatcgcacttcatactttgcgccttcctccagctgttcgggcgtcatgttgtagatggcgtcgatgatgtaattgcgataggtggagttgccgtcctgcgcggaaaggcgcgcgtgcgcgatctcgccggcaagacccatggcgcagaccgccgccgcggcagcctccagcggatgctcggggttcgccgtcacatacgccgccgtcatggcggagagctggcagcccgtgcccgtgatggaggacatcatggggtggccgtttcggatgcagtaggcctttttgccgtccgccacaatgtcgatcgcgccggtgatggcgatgaccgcgcccgtcttttcggcaaatgccttggcgaacgcgaccgcgctgtcaagattctcctcgctcaccttgtccgcgacgtcagcgtccacgcccttggtcgtgccgctgccggaggcaagggtcttgacctcggagatgttaccgcggatgacagtgaacttgacctcttcgaggagcttctgcgccgtctcggtgcgaagcttcgaagcacccgcgcccacggggtcgagcacggcggggtgattcagcgcgttcgcgcgcttgcccgcaaggaacatcgactcgatcgtgcgcttgttgagcgtaccgatgttgatgttcaatccaccgcagatcgtcgtgatttcctcgacctcgctctggtcgtccgacatgatgggcgacgcgccgcaggccagcacgatgttggcgcagtcgttcaccgtgacatagttcgtgatgttgtggatgagggggcacttgcctctcacgttttcgagcatttcctgaaacatatctgtttctcctttctgaataaaaaacaggaggcacccacaacgggcgtctcctgtaaaaagccatgaggtcaacttcctacggcggcattacccgcatcaggtgaaagggtcgaagttggagcacttcctctcagcccgcctgcacgagctcccctgttttttcttgaacgattgtattatacgctttttttcggcgtctgcaagggggaaatgattcaaatgccgcaactcgtcgatcaaagcgctttattcatcccgccgcagcagttttccggaacggtcagcgctgcaattcactctttggtgagcaggcagacggcctcga

SEQ ID NO: 10140 - DNA, 12585 bp, Unknown
  gut microbiota DNA sequence
cgcaagctctgtgcatttcgcacagtttttcatctggtgcttgtcaaagtttcgttgtttaatttacaaggtgcacgctccattcgcggaacaggtgttatcttagcacctacccgtccttttgtcaacaccttttttcacttttttcaaattatttttcagagtcaggtagagacaaatccatccattgatgttataataggaaaaccgtttcattttggaggtatttcccttggatttccaacatattgaggcaactttcgggaagctggagcaccgttcgctctcgttttcgaaaggtcttaatattatagaagcgccgaatgagtccggcaagtcgacacttctcgcgtttcttcgcgtgatgctctacggctttccgccgcgggagcgcggcgcgctggcggacaagaaccgctacgccccatggtcactatcgccgatgcgcggcacgctggctctcacatgtcaaaagggtgacattacgttgcagcgcgacaccgcgcgcgcgaatagtcccatgggccgcttttccgccgtctataccggcagcagtgaaacggtcgacggcctgaccgccgccgactgcggcgaaacgctgctcggtgtcccgtgcgaggtctacgagcgcagcgcgttcatccgccagagcagcctgacggtcgacgcgagcgccgagcttgagcgccgcatcgccgcgctcatcaccacgggcgaggagggccagtcgttcagcgaagcgtccgccgcgctcaaaaagcagctcaacgcccgcaaatacaacaagtccggccgcatccccgcgctcgaggccgagatcagcgcacaggagcgcgcgctcgaggaactgtcgcagctcacgcgcagcaagcgcaaggccgaggaagccctcgcctcattcgatgccgaggaagcctcgctgcgcgaacagctccgcgcacacgatctctgcgatgcgcaggacgcccgccgcgccgccgcggaagtgcagcaggcatggcagagcaccgaaagcaaagccgaatatcttcgccgcgcgctgattgaacagaatgtgcccgcgcgcgacgcgctggagcagggccgcgcaaggctcaacgcgctctcttccctcaaggttgaggccgcggacgcgcagcagtgctgtgacaccgccgaaaccgctctgtccgattttgacgcaaagcccgtcgaacgtccacgctcactattaccttatataatagtaagcgccgtgctattgctgctctttatatttgtttccgcattgccccgccctgtcgctctggccgggtgcatcgtctccggcgctgcgctggctgcacttcttgtcttaaactggaacaacgcacgcaaagttcgcgccgcacatgaggaaaagcgcggtgtcttagagcaagccctgcgcgatgcgcgttccgacgccgccgcacagcaaaagctgtatgatgccgccgcgcgcgagctgctcgtgctcatccccgcgggcgacatctcccgcgttggcgcatatctcgacgccgcgctgcaaaaatacgccgagctggacgccctgacgcgcgaggcgcgcgacctgtcgctgcgctgcgagctgctttccgcccgcgcgccgaagggtgacgttcccgacgagccagtcgtgcgccccgcacgctcccgtgcggagctgcaaactgcgctcgacgcgctcgcacggtgccgtcgtgaagcgcagagcacctttgactacacctccggccgctgccgcgccatcggcgacgccgccgagcttggagccgcactcacgcagaagcgcgacgagcttgcacaaaaacaagcggaatacgacgccatcgctctcgcgatggaatcgctgcaaagcgcgaacaccgcactgcaaaaccgcttttctcccgcgctcagccgccgcgccggcgagcttttctcccgcctgacgggcggcaaatacgaaagcgtcctgcttgaccgcacgttttccgcgcaggcgggcgaaacgggcgagagcgtttcccatgacgcacagcttttgagcctcggcacgctcgaccagctgtatcttgccgtgcgcctcgccatctgcgaaagcgccctgcccgcggacgatcccccgcccatcgtgctcgacgacgcacttgtccgcttcgacgacgagcgctgccgcgccgcgctcgagcttttattagaggaaagcaaatcccgtcaaattctgcttttcacctgccagcaccgcgagagcgcgtatctctccggccgcgacggcgtcacattcctgtccctataattccaaattgataaaggagaaattgaatgaccacactgcaagcccttcccctgccctctaattttgaagatgtgtgcgagctgtttttgctctacatcgcgtacagcaccctcggctggtgcggcgagatgctatactgctccatccccaagggtcacatctgcgaaaagagaggcttcctcaacggcttcctctgccccatttacggccatggcgcgctgctcgtactgtatcttctgcacggcggcttccagaatccggtgctcacgttcatcttcggtgcgatcgtcacgtcgatccttgaatacttcacgagctggatcatggaaaagctcttccacatgcgctggtgggactactcccattataaattccagatcaatggccgtgtgtgccttctgaactccacatgctttggccttgcgtgcgtgctactgtgccaccttgtccagccctggctgtgggagcatatcgtgaatctcggccctaccatcaccgtgccgctcgcgtccttcatcttcggcatctatctgatggacaccgtgctctccatccgcagcgccatccagctcagcgcccagatgggcaagctgcgcgagctgcaatcggagctcaaggactatgtcgccgaaaagcgtgaggagagccaggagcgcaaggccgagcgccgtgccgaggtacgcgagcgcgcccgcatgctgcgtgacggtgcggatatcttcgagcgccgcctgctccactcccaccccgacatccgcaagtcgcgtgaagacctgctcgccacgatccgcgcccgcctgaacgagagcgagaccgaggccaagaaagctgccgacgagctcttcggcgatgagcgcaaggcgtaatttgccaagccgcgcgcggttgacttccgcgcgcaaacggtataaactaagcgcgccgctggccaaccggcggcacaccacgcagcaaaggagaatactgatctatgagcgaatgcacccataattgctctacctgcggcgagagctgcgctgagcgtgcaacgccgcaatccctgcgcaaagcgccgcaccccgaaagccacatcggcaaggtgttcggcgttgtgtccggcaagggcggcgtcggcaagtccatggtcacgagccagcttgccgtcacgctgcaccgccgcggttacaaggtcggcgtcatggacgccgatatcaccggtccctccatcccgcaggccttcggcgtgcacgacaaggccgtcggcacgcagaccgcgctctacccctgcgtcagccacagcggcatcgaggtcatgtccatcaacctgcttttggaggatgagaccgatcccgtcatctggcgcggccccgtcatcggcggtgtcgtccagcagttctggacggatgttgcctgggatgtggactatctgttcgtcgatatgccccccggcacgggcgacgtgccactgagcgtcttccagtccatcgcgctcgacggcatcatcgtcgtcacctccccgcaggagcttgtctccatggtcgtggagaaggccgtgaagatggctgaaaagatggacgttcccatcgtcggcgtcgtggagaacatgagctatgtcgcctgccctgactgcggcaaaaagatctacctcttcggcgagggcaagagcgaagaggccgcaaagcgtcacaatcttcccctcctcgcccagatgcccatcgacccgaagctcgccgcccttgtggacgcgggcaagattgaagagttcgagggcacatggctgaacgccgccgccgatgcgctcgaaaaaacgcagaaacgtgccgaataaccaaaaacaagcacaaaaaatcgcacctcgttcgaggtgcgattttttatattctgtttgtggctcagtcgttggaatagttgtcgaagtagccctgaatgtagacgatgggcgtgcccttgtcgccgctgccgctcgtcaggtcgcagagcgagccgatcaggtcggtcaggcggcgtggcgtcgtgccctcggacaccatgttgccgaccaggctctcgctggtcttctcgcggatgcgctcttcgatggcttccttcagcgcctcgcccttgagatcgccgaagtcattgtcggcgaggtacttgagcttcagctcgttcggcgtgccgacaagacccttggtgtagccgggggagacgacggggtcagcgagctcccagatcttgccgacggggtctttgaacgcaccgtcgccgtagaccatggcctcgatgtgcttgccgctggccttgctgagtctctcgcccagctcttcggcaacggccatgcagtcgcgcgggaagagcttaacggtctcctcggtcgccttgttggagccgagcaggccgtattcggcgttgtagccgctgccgtcgacgcttctgttgagcagatcgtcgaggccgagcaccacgtgggcgccagcggccttgagcaggcgcttgctgcgcgcgcgggtgtggatgtcgcaggtgatgacggcgtcggtgtagtcgcacagcgtctgcacgcgattgccgaagatgacctcgacctcagcgccggcgtcggtgatgatgccggagtagaagtcgatgtagtcgacgcccgtgaacgggtgcaccgccgcgccgaatttcttgcggaattgttcgagcgtcagaacatcgctgtacgggtcgacgcccgcctcgtcgagcttgtcccagtcgacaaggccgttgcccacctcgtcagaggggtaggagagcagcagcacgatcttcttgcagcccatcgccatgccgcgcagcagcagggagaagcggttgcggctcaggattgggaacgcgacgcccacggtgccgccgccggtcttttcgcgcacgtctttcgcgatctgttcgagcgttgcgtagttgccctgcgcacgcgccacgacggattccgtcacggcgacaacgtcgcggtcgcgcggctcgatgcccgcttccttccacgcttccatcacggaagcggcagcgacctcagcaatgttatctccctcgcggatgatgggtgcgcgcacgccgcgcacgacagttccgatcgttctcatcttgatctcctttttattttatagtcagcgcacaaggtgctcttgcaaagtcatacagtctagtattataatcacgatatagggataagtaaagcatcgttttttgataataaatataaatcattcttatggtttaagatcaggagggtttgccaaatggtcaagctggagctttaccgcgtcttccgcgaggtcgccgaggccgggaatatttccctggcagcggagaatctttacctttcgcagtccgccgtcagccagagcgtcaagcagctcgagcagcagctcggcacgcgtcttttcctgcgctcgccgcgcggcgtcacgctcaccgaggacggccgcctcttattcgaatatgtgcgcagcgccatgggtcttctcgagaccggagaagataagctccagcagtcgcgcacgcttcaggccggcacgctcgtcatcggcgcgagcgacacggtgacaagtcaattcctgctgccgcatctcgacgccttccaccgccgctatcccaacatccacatccgcatcatcagcggccgcagctataaggtgctggggcttctccgcgccggaagggtcgatatcgcctttgcgagcgcccccggcgacgcggacgacttagagcacatcccctgctttgaaacgcattcctgctttgtcgccgcgccggactacccctgcgacttcacccgcgcctacacgaccgaggagatcgccgcattcccgctcattcttcttgaaaagaaggcctcctcgcgcacttaccttgaaaaatactttctccaaagcggcgtcaggctcacgccggagatcgagctcggcgcgcgcagccttcttgtcgacctggcgaagattggcttcggcgttgcgggcgtcacgcgcgaattcgtccagggcgagctcgccgcgggtgagatccgcgagctttccaccgctttttccatcccgccgcgcaccgtcgacctctgcatgctgcgcaacgtttcgcccagcgccgcaaccgaacgttttgcccgcgatgtgcttgaaaaattacagggcaaatccgtttccgtttaaattctgcaaggttttcgtcattttgcgcatcgggtctgcataatttttgtcattttcgccaaggcgattttcttgacaagatttttgcggcatgttaccctctttttcgctgcaacgagcgaagatacacggttttcaggatctttttgaaactgaaagcgctggaaaactttggaaaactcattcagttgggtgccgaaggggcaaggcctttgctaaaattgttaaggctgaatctctcaggcaaaaggacggagagcatcgcaccatgccggtttttccgtcctcactttttctctctattgttttttaggctgtcgatcttctgttggatcggcagctttttattttttgcattttcgactttacaatataaggagagcatcatggcttcatcattcgagaccacccttttctctatcgttcagaccatcaacgaatacctcagcaactacgttttggtcatcctgctgctcggcatcggcatctggtacacgatcaaaacgcgctgcgtgcaggtccgctgctttaaggagggctggaaccgcgtgttcggcaacatcaccctcaacggcaagaagggcggcgacggaatgagctcgtttcaggcgctcgccactgccatcgccgcccaggtcggcaccggcatcatcgtcggcgtcgcgggcgcgatcctcaccggcggcccgggcgcggtgttctggatgtgggtcatctcgtttttcggcatggccacgatctacgcggaagcgacgctcgcgcaggagacgcgcatcgtcgagctcgacggcacgatcaagggcggtcctgtctactacattacgacagccttcaaggggaaattcggcaagtttctcgcgggcttcttcgccgtcgccatcacgctggcgctcggcttcatgggctgcatggtgcagtccaactccatcggcgcaacgatggagaccgcgtttggcatcccgtcctgggtcgtcggcatcgtgctgatcgtcatctgcgccttcatcttcctcggcggcgtgcagcgccttgcgtccgtgacggaaaaggtcgtgccgctcatggcggcggtattcctcttcggcggcctcatcgtgcttgtcgttcgcatcaagtacattcccgagacctttgccatgatcttccgctacgcctttgagccgcaggccatcgtcggcggcggcttcggctacgccatcaagctcgccatctcccagggcgcgaagcgcggcctgttctccaacgaggccggtatgggctccacgccccacgcccacgcgctcgccaacgtcaaaaatccgcacgagcagggcaccgtcgccatcatcggcgtgttcatcgacatgttcgtcatcctgacgctcaacgccctcgtcatcatctccacactttacgcaggcgacggcccgctcgccggctgcggtgcagcagcgctgagcagcaccttcaataagacgaaccttgcccagtgcgcgttcggcacggtgtttggctacaaggcgggcagtatgttcgtcgcgatctgcctgttcttcttcgcgttctccacgatcctgagctggaacctgttcggcaagatcaacatggtctacctcttcggcaaaaagagcgccaacgtctacacgctgctcgcgctgattttcatcttcctcggcaccacgatgtccaacgacctcgtctgggagctgagcgacatgctcaaccagctcatggtcatccccaacgccatcgccctgctcgccctgacgagccacgtcgtcaagcattcccacacgcccgaccgcctgtccggccgggaaaatggctgatattccccaaaaaagcgcaaaagagcgcggcttttgataaaagctgcgctctttttttgcgcctcccgactacactttttaatgtcattgcgggcaattccttttcggaatggtattccattttctattcattaaaaaaataaaagttcatcatcaatttgcataatatttttgatgaatctttggcggttttgaagccgccgcttctcttgacttcttctttacggcatgttacgcttttactgctgaaacaaacgaatatctaccgatgacgctttcgggatctcgcaaaccggaagccgaggaaactctggagaactcattgaattgagtgccgaaggtgcaaggccatggtggtcgaatctctcaggcaaagggacagagaagcaggacgtttttacgtcgtcgcaccgtttctcctccccgctcaactgaatgctacttccggagttgctgattttcgtatcggcaacttcttttgtttttagaggagagagataaccatgtttgaatccatcgaaagcaccctgtatcccattgtatgcaacatcaacacctacctgagcaactacattctcgtgttcctgctgctcggcgtgggcctgtggtactccatcaagacccgcttcgtgcagctgcgctgcttcaaagagggctggaacagcgtgttcggcaacctgtcgctgcgcggcaagaagcatgacagcggcatgagctcgttccaggcgctcgccaccgccatcgccgctcaggtcggcacgggcaacatcgtcggcgcgtccggcgcgatcctgaccggcggccccggcgccatcttctggatgtggatcatcgccttcctcggcatggcgaccatctacgcggaagcgacgctcgcccaggagacccgcatcgtcgaaaaggacggcaacgtcaagggcggtcctgtctactacatcacgacggcctttaagggcggcttcggcaagttcctcgccggcttcttcgccgtcgccatcacgctggcactcggcttcttcggctgcatggtgcagtccaactccatcggctccacgatgcagaccgccttcggcattccctcctggatcgtcggtatcgtcctcgtcgcgatctgcgcgttcatcttccttggcggcgtacagcgcctcgcctccgtcacggagaaggtcgtccccatcatggcggctatcttcctgctcggcggcctgatcgtcctgatcgtccgcatcaagtacgtccccgccaccatcggcatgatcttcaagtatgccttccagccccaggccatcatcggcggcggcttcggctacgccatcaagaccgcgatttctcagggtgccaagcgcggcctgttctccaacgaggccggtatgggctccaccccgcacgcccacgccctcgcgaatgttgactgcccgcacgaccagggcgtcgtcgccatgatcggcgtgttcatcgacaccttcgtcgtcctgacgctcaacgcgctcgtcatcatctccaccctttacacggcggacggccctctcgcgagcggctatgtcggcgatgtcaccggcgtgctcggcaaggccaacctcgcccagaccgccttcggcgtcgtcttcggcgagagtgcgggcaacatgttcgtcgccgtctgcctgttcttcttcgccttctccacgatcctgagctggaacctcttcggcaagatcaacgtctcctacctcttcggcaagaagagcaccgtggtctacaccgtcctcgcgctcgtgttcatcttcctcggcacgatgatgtccaacgacctcgtctgggagttgagcgacatgttcaacaacctcatggtcatccccaacgccgttgcgctgttcgctctcaccagccttgttgtcaagcacgccgatgacccgaaccgcatccccggcaaaaagtgaacctttccatcctctgttaaaataggcaaaagcgcccccgattcgttcgggggcgcttttcctgtcttcacttctatcaaacaggccgccgaatcattcgatgcggcggccttgttcctctttgcctttttatacttccagcagctctcgaaacgcgaggcccagtccccgcgtcacgagctcccgcgggctcgcacaatacgcggtcatttcctgcgccagaagctctcccgcgcggccgtggagccacacgccgagcgccgcggcctctgccgcgcccatgccctggcacagaagcgacgcgatcaagcctgtcagcacgtccccgctcccgccctttgagagcgccgagcagccgctcgtgttgacgagcatccgcccgtccggcagcgcaatgcgcgtccggtgccccttgagcaccaagatacagccgtgctcgcaggcaaagcggctcgcaagctctgtccgttcgctcgacgcgatctcccggagcgtccggtccgtcaggcgcgcaaattcgccgtcgtgcggcgtcaaaatcgtcacgcgtccgcggcggacgtccagcttttccgtgcagccctgtaaggcgttcagaccgtcggcgtccagcaccagcggctctttcacctgccacaaaagcgcgtggacgagctgctctgtctcttttccgcggccaaggccgggaccgagcgctaaaacatcacagcctttgagcttgtcctgcatcttgtcgagcgcggcgagacagagccttccgtctgtctccggcagcgggaacggcattgcgctcacgcacttttgcgcctcaaccgcccagatgctctccggcacgccgagatacacgagcccgcagcccgaatgcaccgccgcgctcgccgccagatacggcgcgcccgtatagcccacgctgccgccgaggactaagagcttgccgaagtcgcccttgtgcccatcttctttgcgcggcggcaggagcgtcttggcatacgcgcggtcgacgatcgtttcacgcatcgcagttttcctccgtcagttcgagttttttcgcgcgcggcagcttcttgatggcggcctcgcgccgcagcgccgcgcccttgtcgctgcattgctcgcggtacacgaccgcgacaggcgggtgcgagcgagtgtacttcgccccgtgcccgctcttgtgcatggcaaagcgcttttccacgtctgaggcaatgccggtgtagagcgagccatcctcgcagcgcagcatgtagacgtaccagtccatctcaatacttgagcacgcccgtcgtgcgcagcgcgttatagagcgccgccgcagcctgctcgcgcaggacggggacctggggctcgatatcttcaaggctcatgcagtacatattcacagcatcgccgttttcatcgaacacggaattcgtcaaaagctccgcgctgcggatggcccagtgtgaaaagctcttatacttcggcagcggctgcaaaatggccagcgggttcttgtccaaaaattcatgcgcatccagattcacgaattccacgagcctgcccagcaccgtaatgaattcctcctgtgtcatcgtcgcgttcgggtcgaattttcccccgcccacgccggagacaaggccgatggccgccatcgcgttcacagagggcgcgtaccagctccccttggcaacgtcggtaaagtacccgttcgccgtggagtagaggtcaagcgcctgcgcgagcagcgcacagacctctgcgcgcgtcatcgtcgcgtcggggcggaacttgccgccatcgccaaagacgatgcggctcgccgcaagcgaatcgatctcctgcgcgtactcgctgtccgccacgtcggaaaagtcgagcgcggacgatgcggcaaagccgcacttttcgcgcgcctgcgcgagcgtgagcttcctttcgccgccgttttcgccccagtaaagcacggcgtccggcgtcagcgccgccaaaatggcctcaagcgcgacggaagagctctccttcgctgcgggaatgtcgatgtaaaagtcgcagccgttcagcaccaggcggagatacgcgctgtctttcgtcttctcgccgctcagcaggcgcgccgccgcaacggcctgatcctgcgggatgtagagcgtcggcaccacgccgatgcggtcggtcgtgttgccgcccgcgcagtagaagcggtacgccgtcaccttcacggcatcgccgtgcagatacgggcagttcgattcatcgtataggacctgcgccacgcccttgccgtagctgcgcgtgccgatgacgatgccgctgcccgtgccgagcacgccgcccgcaaagatctccgacgcgctggcactgccgctgtccatcagcacgatggcgggcttgtccgtcaggtccttgcccgaatagctctgcgcggtactctcgccatcctgatcgacaaagtagatgaggtctccctc

SEQ ID NO: 10141 - DNA, 895 bp, Unknown
  gut microbiota DNA sequence
cgattgacactgaccgtcgcacggtattgcgccgtgcggatatcctgcttgatcgactcgacgatattgaggtattcgttggaattcatcagcattttttgtttccctccattagttcatgcagcagcccatggcatcccgccagcacatcctgccacgttgcctcgaaatcgtcggtgtaccacgggtcggctacatcgcagagatggtcggtatagtccatcaggaggtgcagcttgccgtccggatcgccgccgcagatgcggtacatattccgcaggtttgcgctgtccatgccgatcagcaaatcgtagttcacgtagtcggcattggtgagctgccgtgccgcatgaccatcgcaggatatcccatgctctgccagcttgcgctgtgccggaggatagaccgggttgccgatctcctcccggctggttgctgcagactcgatatagaattgtgacgccagccccgccttcctgaccaaatccttcatcacgaactcggccattgggctgcgacagatattgccgtgacacacaaaaagtattttcatcatcgcactcgctctcctgagagatttctttttctccagtatagcaggaaaccgcctgcgcgtcgagagaagaatgcagccatgcctgagattctatggcttccagtagtttgcctttcttccatccgaagcgcagcacggcttggatgtaccacgcccgctcctcgttgctgccgcaccgctctaaaatcgccgcattccgcgtccagccgaggttcatcgccagctgcatgatttcaggggattcctcgcaggctgcgtaaaacgtgcgcatacggcgcacattgcggggagagaagccctcggctgcgggataggtcgcttgtaggtattcagaggctg

SEQ ID NO: 10142 - DNA, 4965 bp, Unknown
  gut microbiota DNA sequence
cgtgtgccagtcattcctccagctcttcttccagcgctttgcgcaatacctccatgccgcgctccagccgctcgcgcggctcgtaggagtagttgatgcggatatggtcgcgcccgccgttcttgcaggggtaaaaaacgtgtccggggatcagcgtgacgcccatgttgtaggccctgcggataaagcgcttgctgtccaccccgtccggcagtctgcaccagacatatacgccgcctctcggctttgtataactcacgccgagcggcgcaagctcgtcgagcttttggcataccaaatctcgattcgtgcggtagacgtcgcgaaattttaaaagcgacgtgtagtaaatgccgtcgtcaaggtacatgccgaggagcttttgcgtcatccagtccgaggccatcagccgcacggagacgaggtagctcagtgcgcggatcagatcgcggttgcccgtgacaaaggcaaggctcagccccgggatgaacgtgagcgagaacgaatagatgtaaataacatttcccgccgtgtcgaaggccttgatcggcgggagcttatcgccgtcgtagacgagttcgctcgccgcgtcctcctccacgatcggcacgcggtagcggttcgagagcgcaacgatcttcttgcgccgctcgatcgacaaaatgtttcccgtcgggtcgtggtagctcgaattgacgaagatgagccgcgggcgcgtctgcgtgagtaagctttcgagcacctcgcagttcatgccgttcccgtcgacgggaacggtcagtatcttcgcgcccgcaagctccatcacgcggtacatgtccgggtgcaccggctcttccatcaccacgctgtcgccgggcttgacgagcagcgtcacgataaagtcgagcgcctgattcgtctccgagaggatctgaatttcgcccgaggacgccttcacgcccttcgtgccgagaaaggccacgagcttctgccgcaggaatttatcgcccttataggggctgaaaaaatactggcacgggccgctgcccgtgagcagcgccgcgatatcgcccgcaacgcgctcggacgtgtacacctcgcgcgaggcgacgccgctgccgagggaatagtggctctcgtccgtaaagcgctggaacaggtcgtcaaatgttttttccatgtcgaggtacttttccgccacctcgctgacccagttgacgcggccgggctgcgcgccctcgccgcccctttcgtcccgcgcgtcattttcgtcgtttgccgcggccacgatgtagcccacgccctggcgcgactcgatccacgcgtcgctcttgagctcgctgtaggccttgaccacggtgttgcggtgcacatccaagatctgcgcgagcgcgcgctcgctcggcagcgcgctcccgcggggcagcgcgccgctgatgatctgcgacttgatctggtcggcgatctgcagatagaccggcaccttcgaaaacttgtcgatgctgactttcatgtacttctcttctccctctcgccggcaggccgcgctctcacccgcagccgtcggaatttgcgttggtctcgcagaggtctctctgttcgcattttaccacataaccgtgtgcgttgtacagtcatttttgtgcatatgacataaaattcaaaaagaaagagccaaggcatcccgatgagatgcctcgactctttcaggtcagcaacctgagtaagggaaaagaagcttttcctttttagaacagcagatgcgcgatggggcagacgatcagcaggctgatgatggtgcgctccaggaagatgacgaacagctcccagatgttgagaggaagcttggagccgaggatcagaccgccgacctcggagaggtagaggacctgcgtgacagagacgacagcgacgatgaatctggccatctcgctggtgcactccgcgatcaggatggcgggggtgagcatgtcggtgaagccgacgatcatcgtggaggcaacagcgtccgcttcgggcacctgaagaagctggagcagcgggcggaacgggatgccgagccactcaaagatgggggtgtagttggcaaggatgagggcgacggtgccgatggccatgacggagggcagaacgccgaaccacatgctgcaggcgttcttggcgccgctcttgaagaattcaccgatgcccttgtgctcggcaacgcgcttcatggcgaggtccatgccgtactcgacgttgctcttgtagccctcggggagggtgtcgggagccgccttgccttccactaagtacgtgtttggctttttgcgcagggggtagaggtacgggcacacgatcgcgcagacgataccgacgaagcagacgatcaggtagtagatgccgaacttgtcgagcatgccgaccgtgtcgagaacgacgagggtaaacgtgatggaaacggcggagaacagcgttgcgatgatgcttgcttccttggcggaatagtagccaccctcatactggttgcaggtgagcatgacgccgagcgtaccgtcgccgatccaggaggtgatgcagtcgaccgccgcgcggccggggaccttgaacaggggacgcatgaccttggtgagcagcgcgccgacgaactccagcaggccgaagtcgagcagcaacggcagcagcagggccgcgatgacgaagatgataacgagcgtggtgagcaggtcatagaggacgaagccgccctgaccgccgccggtgatcataccgatgagacccacgccgtcctcgccgacacccagataggtgagccacacgaagatgaccgcgagcacacggagcacgacccaaatgggcttgcaggcgaagcattctttcatgatgtcgctattcataatgaatttgggctttgccagcgcaatgagggacatcactgccgaaacggtgaggatcagcacgcacagcagcggcaggaagccaccgatgacaccagagatgatgtcggccaggatcttgaccacaacggtccattcacctgctgcgttcttgaccgggatcatgaacaggatgacgccgacgactgacgggatgataaacagagctttcagtttcgcgttacttttggtttccattctctctcctccttcatattggcaagtcgctccggaaggcggtctctctcatagccgcttccccggcagacagctcttgcctttactttatacgaattcagcagtaaagcaagtgccagcaacgttctcaatttgtataccagtaataaatttctccattttgtcattctcttttttgtcgaacctgtatgtatcttttttgctttttgggaaaaagcccatttccacttgccgtttcagggattttggagaagaaaaagggagacgcgatacgcgtctccctcccgtttgctttattgcaagttttcaacgtccttcttgccgaccgccatgcgcttccattgctcaggaaggcccggcgcgatgagcgggaacagattttccgtgtccgacgtcggctggatgttataggtgccgtacttgttgacaagatcggcacagtcgtccggctggccgaagcgcgccttgagcatcggtgccaggtcatacggcatgccggggtcttttcgcggcataaaaatcacctccggacttagtatgtccggaggcggcagattttttcgatttgtctcgctcacgcgcgcagcgttttggggtacacacccgcgtcgtgtaatttctgaagctcgcgctgcaccatttccttatcctcgtgatacgtcatgccgaaccagcgcgcgctcgagcgcagaacggagacactgagctcgccgcggtcgatgagctcgccgatcaggcttggcagcaggcactcttttttgagctcgccgtcgggcagcacgcggaggaaatccttaaaatacgcgtccagcttttcaaacagccatggcgtaaagccccagaagttcatcgagaccggtgtctcgggcgcgtagaccgggccgtcgccgttttcctgaatgtcgcggatcttgccgtcggcgcagggctttaggtggaacgtttcgaccacgcggtcgagcatcccctgttcgttcacgtggcacacgccgcgcgtgaccgtgccgtgctcgctcacggtgttgcagaggtcgtagccgaccatcgtgccctcgccgctttcggcgagctttgagagctcggcgtaaatggtcttgaacgcgtccacgccgtaatagtcatcggcgttgatgacgacgaacggctcgtgcacgaattcgcgcgcgcataaaagcgcgtgcaccgtgccgaacggcttgacgcgatcagacggcaccgtgtaaaaatcgggaacgctcgaaaaatcctgatacgcatagcagacctcgacattgtccccatccgccgttttgcgcgcggcaaggtgatgtccgaccatgttctccatcaagtcgcgcatgtcgggcttgatgatgaagaccaccttcgtaaagcccgcgcgcagcgcgtcgaaaatggagtattccatcaaaatttcaccgttcggaccgatgccgtccacctgcttattgccgccgtagcgcgagcccatgcccgccgccataatgaccagcgctgctttcataaaaacaaaactcctctcaaagttctcgatctctttttctccgggcgcgcactgcgcgctcatcttcgcccatcatagcgtatccgaaccggcattgcaaccgtctttttcgtctcttgtcttttgccgcaggcgtgttatactggtgtaactatttcttaacaccgaggtcacaccatggaaggatttctgcacgcggtctcttccgtcaccatcatcctgctgctgacggcgacgggctatttctgcgcggccatgggctggatgggcccgcaggccaagcgctttatcagcaagttcacgatgtccgtcgccatcccctgtatgtgcgtctacgggctgacgaagaatctgacgcgcgagctg

SEQ ID NO: 10143 - DNA, 2296 bp, Unknown
  gut microbiota DNA sequence
cggcccttcttgatgccggccttctgcatccgattggcgatgtactcgcttgcggtgcagttgaagaaagaggcgttgtcctgatttccatattttgtgttgaccacaaatcggaatgtgcagtagtctccattctttccgctcttgatctccggatcggtgaccagacggccctccataatgatggttgcgtgcataatccttttcctttctgccttacggcttaaaatattccaaacaccttacggtgcgtggttcaaaagttgccagctgttgcttggcatagaaaaagacagacgcaggttgaatctttcaatccgcaagtctgtctaatatgcctgcgtaaatgacacaggctcacatcttaaaaagctccctgaggagaagacatctaataaagaacactgtaagcatagcattcctatgatgcacattccagagtacctaaatctgcttgcttgtagaaaaagagagttcttcaaagccaaatacagtcgaggacggctgaagggcctccgggagattcgggagatcattggtcggttttttgaggtaaaatcgatataagcttccagctttgagtttatatcgtccatccagaacccgctgcacgtggcttccattctccagttccagaacgatggcgtggcgctttctatgaatattgacctgctcttggacaagcagtccctcgagacactcgtactgctgcctgctcacctgtcggtagaaagaacacgtcttcacaccgcccgtaatcgctacaccggcggacagaataagcaacttatggtcatgtgagatcatggcaaagatgactcccaaaaccgtgatcgacagaatcgagaatatcagcttggcaaaacgaatagcgataggggttggcattttcatggaatactcctttctctaccgatatggcaggacaaaatgagggccggaaagatactctcctttccggcccgtgatactatgcgtgttccagaatgacctggcgtgtcaaatacaagttcgtggttgcttccagcacatcctgcctatgatttgaaaggctgcatgcgttgtttagccgcgcctggttatcagattcttccgtataaatggcggaaatcactttgtcggccgagctgacatctcgaacatcgttttcaaagcatcgtaccagctcaggaacgctcagcggcgtctgggtaaccaacttcatgattcgctgttccgcttctgtacccttatctggctgcaggaggtagacggcctcaaagaagttgactttaccttgcttgagcagctttgcgatattcagcaagcgccgtgtaccctgaacaccccgcagcggtatgacataggtatcataaagcatgttgtagagcgcatccacaccggtgtatccaacacctttgatgatgagctttcgctttacgagcatctcgagtgccttctcaaatccggagggatccaatttcacttcctccatcttttcaaaatatttcttgcggagctcgtcgtgcgtcaggacatcccacagcaacatactccagatactgaactccggaatagaaactggctggagcttcccaagccgcataatataaggcatatctttgccgtcttcattgcgaatctgataactgccagcggcagcatagaatgtcatcataatgctctcctcctcagccattctgttctttcttacgaagatacgagacgaagaacaacaactcaatacaggatttccaataatgctggctcgttacggagcttgctgcgagcacgcgagatccatgcgttgacgttatttacgctcgtatcatagtgttttgcgatctccgtggcctcatagcccttcagcttcagctcgatggcttccacacctttccgagcaacgccattgtatttctccttacaggcagcaagcgcagacatagcggtggcatccgttacggtctcatcaaaatcaacagaagtgcaagtcagcatatcgagcagagaggcattttcatcttcgctgatctctacacttctttccagccggtagttcattgcgcggcagtgatccacgatggcattgtagatgtaccggcaagcgaaaggtgcaaaagctcccgtatccggctgatacttcagcgccgctctgcagatagcttcgcaaccaatggcgtaaaagtcatcataggtcaggagcggacggttcggaatggaaatgcgcgtgcggatgacccagttgaccaggtccaaattctccagcaccagggcgtcttgataatcagtcatgtcgagcacctcctttatgcgacac

SEQ ID NO: 10144 - DNA, 33903 bp, Unknown
  gut microbiota DNA sequence
agcattttacagcggtcatcgaattcgaatccttctcccgctgccactgagaagtctgaaaccgtaaggtttcggacttcttttttctgtttgaccctttatctgaccctttaaccgttttgcagcttctttccacagatggcgtgctgcatataggcttccatgcggtttgcactgtcctgtttcagcaccagtgaaaaaagggcaagggaaaagttcctcaacgcttttcccttgcccttttgcatctgtcatggtatacagcttagcaacggctatttgagtggctcctcgccgcggtgcagatcattccaatcgctgacgaattcgtcgggggtccagtcgatatcgtcatttccgggatgcgtgatgaggccgtcggctgcggcggcgatggcggcggcttcgctgcggggaagggaagagagatacctgacgcggatgtcgctgacgaaatcccagtaggcggcgcgggcaaaggcgtcgatattcgcggctttgatgccgagaaggccgacgagaggctcctgctcgtgggcgtcgtaccggtcctgaatcgtctcgaaaatatcgtccgcgtcgccgccatacttggtcagaagagaaatgaggttcgtttcgggaaaaagctcctgaaagcgcgcggaaacggaagtggtagccataattgttctccttgcaagatcattttgttgcctatagtgtcacacaacggggcgtaaaagtcaacatggatgaaatcacttactgcgcgggctgcgattctggtcatgcggcggttgacagtgctggtcaactcgtgctatgatacgaaaaccaacaatcatactatgtttgtggacgaaaaaagtgtaacgcagacatttttccaacgtcaggcgaaggatcggcgagagccgataagaatagcttgacgatcaatctgcttgaatttttcaaaatcggggagagagtatgctcaatcagttttcaagaacgcagctgctaataaaaagaggtatttgccgcatgctgcggcaaatacctctttttattagtttgatttgaaattcaacggagtgacagcgttacgacagctcgtccccgtccagcagggcctctttcagcgtgcgccagccgagcaccgcgcatttgacgcgcgcgggcatatgggcgatatcacggagagccgaggcctcttccaggctgttgatctcgtcttccgacgcctcgccctggatcattttcaggaagatctcgcccattttcagcgcgtcttccttctttttgccgacgatcatgccgagcatgatgtccgccgacgcctgcgagacggcgcagccgtcgccgacgaacgcgccgtccgcgatcacatcgccgtcaagcttcagcttgaggaagatgtcgtcgccgcagctcgggttgacgccctcgagcacgatgtcggcgtccggtaggtcgtgcttgaactccggatgcaggttgtgctcggtgagaatttcattgtaaaagcttctattttccataacccattcgctcccttagcgtggaaatgctgtcaagcagccgctcgacctcggattccgtgttataaaacgcgaggcttgcccgcgcggtggacggatgcttcaaataggccagaagcggctgcgcgcagtgatggcctgcgcggatggcgacgccgtcgctcgcgaggatctcactgatgtcgtgcgggtgaacaccgtccaccgtaaaggtgatgatgccgcaatgctcctcgggcttttccgagcccagcacgtggacgtgcggcatctcgccaatcgcgtccatcgtgcggcgtgtcagcgcgacctcttgctgatgcatcgctgtaaagccgatgctcttgacatagtcaatggccgcatgcaggcccacggcgtctgccgcgttgaccgtgccggcctcgaacttgtgcgggagctcggcgaagaccgcaccatcgcgggtgacagattcaatcatctcgccgccggtgaggaacggcggcatggcgttcagcaattcttcacgtccgtagagaacgccgatgcccatggggccgtagaccttgtggccggagaaggcgaagaaatccgcgtccaatgcttgcacgtccaccggaatgtgcggcgtgctctgcgcgccgtcgacgaccatcaccgcgccgacgcggtgcgccagcgccgcgagctcgcggatgggattcacgcggcctaagacgttcgaaacgtgcgtacaggcgacgatcttcgttttcggcgtgatgagggcttcgactttatttaagtccagcgtgccgtccatctcgcattccatgaatttgagcgtcgcgccggtctggcggcacaccatctgccagggcagcagatcgctgtggtgctccatgatggagacgagcacctcgtccccggccttcacgtgggagagaccgtagctgtaagccactaaattgatgctctcggtggtgttgcgggtgaagatgatctcgcggctgctcttcgcgttcagaaaggaccgaacggcctcgcgcgcgttttcgtaagcctccgtcgcggcgatgctcaggggatagaggccgcgcaaggggttggcgttcttacttttataaaactccgttacggcgtccagcacacactgcgggcgctgcgccgtcgcggcgttgtccagatacgcaacatcctgactcttgagcagggggaagtcgtcccgataggcatgcgccatcttacagcacctcctcaagctcggagaggatcgcggcctgcgccgcttcatcctcaatcgtgcgggccagccgctcgatggcggcgcgggccatgatgttttccgcctccgctgcggaaatgccgcggctttcaaagtagaacagcgtgtcctcgtccagctcgccgatggtcgcgccgtggttgccgacgacgttttcctcggcgcacaggatcagcggcaccgtcttgttgacgacgccgtcgcccagcatcaaaaccgtctcctgctcgctgccgacggagcccgcggagcccttcttaaagtcgatggtcccgcggaagatcttctgcgcgtcgtccttgagcgcaccggcggcattgatttcgctcgtggtcttctggccccagtggtttacgacaaggttcatgtccacggtctgctgtttctggcccagatacccgatgcccgccgtgaagcccgcgccattgccgttcagctcgaactggccgtcgctgtacacgtcgccgcggcccagcaggacctggatcagctctacctgaccgttttcggcgcactcgccgctcgtttccagacggagcagcgagtcccgtgccgcattctgaatctgcacgagccgcacctttgcgtccttttcaacgtggagcgccgtgcgcacgagcaggcccttttccgctctcagcgtttcaaacaccgtgacggtctggcccgcgggcgcgtggatgtcgaccgtcttctcgccgcgctcgccagagccagtgatctcaagccgctcggtctgaccggcggcggtgattttctcttcgcccaaatcgtcggcctgcccccaggcgatggccgtttcgttcacacccagccggttccaggtgcgggtcgggagccggttgatcaaaatcgtatcgttcatatccaaactcctttcagccaatgctgcccttcatctcgagccggatgaggttgttcatttccactgcgtactccaccggcagctccttggagacattgtcggcaaagccgctgacgatcatcgcgcgcgcgtcttcctcgctcatgccgcggctcatcagataaaagacggcttcgttgctgatcgcgccgatcttggcctcatggccgatggccgcgtccttcgtgcggatgtccattgcggggatggtgtcggaacgggactcggagtccagcatcagcgactggcacgacacggcggacttggcgcccttggcgcccttttccacgacaacgcttgagcggaatgtgctgatgccgccgctcttgctgatcgagcgcgtgttcatataggagctcgtatttttgcccacatggacgacctttgcgccggtatcgaggttctgccccgcaccggcgaacgtaacgccggtgaactccatgcgggaattgtcaccctttaagatgctcatggggtacaggcagccaacatgggagccgaaggagccggagatccactcgatcgtgccgccctcttccaccagcgcacgcttggtattcaggttgtacatgttcttcgaccagttttcaatcgtcgagtagcggagtttggcccccttcttgacgtacagctccacgcagccagcgtggaggtttgccacgttgtacttcggcgcggagcagccctcaatgaagtgcaggctcgcgccctcgtccacgatgatgagcgtgtgctcaaactggccggcacccttggcattcaggcggaagtaggactgcaggggaatggagaggtgtacgcccttgggcacgtacacgaacgagccgccggaccacaccgcgccgtggagcgccgcgaacttgtgatcgtggggcgtcacgagcttcatgaagtacttgcgcaccatgtcggcatattcgccctttatggcgctctccatatcggtgtaaaccacgccctcggccgccacggaatccttgacgttgtgatagacaagctcggagtcgtactgcgcacccacaccggcgagggattttctctccgcctgcgggatgccaaggcgctcgaaggtctccttgatgtcctccggcacgtccttccagtcgttgcgcatcttggtgttcgggcgaacgtaggtcgcgatatgatccatatcaaggccctcaatcgacgggccccagttggggatcttcatttcattgtagatctggagggattcgagccggaactgctgcatccacacgggatcgtccttctcagtggagagcttttcgacgatctccggcgtcaggccggattccattcggtacgcgtcgttttccgcgtcccgaatgtcgtagacactgcggtccacatcctccacgtaggttttttctttcaaatctgccatgtcaagagcctcccgattcagtcttccttcaggctgctgaatcccttttcgttgatctcatccaccagttcggcgccgccgctgcggacgatgacgccctcttccatcacgtgggccgcgtccacatggagcgcttccagaatgcgcgtggagtgggtgatgatgagaagcgagccgtgcgtccgctcgcggaacaggcgcacgccctcgctgacggtgcggaccgcgtcgacgtcgaggccggagtcggtctcatcgagaatcgcgagcttgggctcgagcatgagcatctgcaaaatttcggcctttttcttctcgccgccggagaagcccacgttcaggtcgcgctcggcatagctctcgtccatgttcaaaagcgccatggtctctttgagctttttcttgaagtcccacaggcgcaggcggtcgccggtcttctgctcgagcgcgctgcggatgaacgcgctcagcgttacgccggggacctccagcgggttctggaaggacaggaaaatgccctttttcgcgcgctcgttgacggggagctccgtgatgtcctcgccgttaaaaatgatcgaaccgccggttacgctgtaggtcggattgccggtgatggcatagcccagcgtcgacttgccggtgccgttggggcccatcagcacatgggtctcatcctgtcccacggccagatccacaccgtggagaatttccttttcctcgacccgcacgtgcaggttctgaatctctaaaagtgccttactcatattgaaccaccttatcttctttccgtgccgttcaggacggccggtgttttttcattgactcgcatgaattgcgccagtgtatgattgtcgacatagctgttgatctggtcttccagcccctgccagaaaagccgcgcgtcgcagtcgcaggaagcgccgcagccggagccgtcctcagactggcacgcgatcggcgacagattgccctccaccgcccgcagaatttcacctacggggtaatcctcgggggagcgggtcaggcggtagccgcccgatttgcccacggcgctctcgaccaagttcgcacggctcagcgcggccatgatggtctccaagtactttttagagagctgctggcgctgcgcgacatcgctcaggcgatgccattcgctgcctccgtgctcggccatatccagcatgacccgcaaagcgtagcgcccttttattgagatcatcatgcggcatgcctccttgctcataattgcctaccttgtagataggaattttaacgcttaattcctactgtgtcaataggtgtttacaaaaaatttgatttatgatgataaaaagcactgtgcagctgtgacaaatgtctgccgcgcagcgcttggacgaggtcttcggcctgccgcgcggctcggccgtgatcgtgcggaacgatcccgagaccaaggtacccattgccatcatggacggcacactcatcagtgcgatccgcaccggcgcagtaacgggcgtttgcgccaagtatatggcgccctcgcgctcgaagaccgtcggccttttcggcgcgggcccgcagtgcaagacgcagctgatggcgctcaaggtgtcgctgccgcagctggaaaaggcgtatgtctatgacctttcccgagagagagcggaaaaatttgcggcggagatgttgcaaaagctgaacatggacgtgcaggcggcggcgagcgaccgccttgccacgatcgaaagcggcgacatccttgtgaccgcgacgaccgcgaccgagccgatcatccacggcgcggagatcaaaaagggcgtttacgttgctcaccttggcaacaacgaggtcgacgaggagctgatcctgcgcgcggacaaggtcgtcatcgacgattgggagaccgacaagcaccgcatggacgacacgatggcctacatgttccgcgacggcaagatcgacgattcccgcatcgacgcgagcgtctccgacctggtggcggggcggaagtccggccgcgacaacgacgaccagctcacctacacctgcaacgtcggcctcggcctttacgacgtggcgatcgccgcgcgcgtctaccagtatgccaaggaaaacggcatcggccagaagctcaagctctgggacgagcccatcatggtgtgatcgatccaaactcgataggtacgacctctctttaccaaccttttggacaggtctgctttttagcgggcctgtccacattttttcgcggcagagcagcaggggagatgcacctgcaaggggattttgcctttacagaggacgattccgtgaatataatggatgcagataaaatttggcggcgctgcgaaaaagcggcgctgcggtgaaatcgacaggaaacggagatgtaattatgccctgcaccactgtactggccggtaagctggcgacgaatgaccgctcgacgatgatcgcccgtacggacgacggtcattttgatgagaaaaagctgatcgtggtcgagcccgaccagcagccgaagatttataaaagcgtagagtcccacgtggagatcacactgccggagaaccccatgcgctacacgtcctgcccgagcgtggacccgaagcacggcatttgggccgcgaccggcatcaacgccgcgaacgtcggcatgacggcgacggaaaccacgacctcgaacccgcgcgtgctcgcggccgacccgatggtcgagctgcgcgaggcgaaggatggggaagaggagcgctgcggcggcatcggcgaggaggacatcgttgtcctcgtcctgccctacatccgctccgcgcgcgagggcgtgctgcgcctcggtgcgcttctggagcaatacggcacctatgagtcgaacggcatcgccttcaacgatgaaaacgaagtctggtggctcgagaccatcggcgggcaccactggatcgcgaagaaaattcccgagaatcgcgtcatcatcaacccgaaccagttcggtatggactcgttcgaccttgaggacgccttcggtgcccgggaatcgcatctctgctcggcagacctcagagaattcatctcggaaaaccatctggatctgaatcaggatggcaagttcaacccgcgggatatcttcggctcgcaccgcgacatggaccacatctacaacacgccgcgcgcgtggttcatgggccgctgccttgcaccgcacacctaccgctgggacggcgaaaacgcggacttcacgcccgaaagcgatgacattccgtggtcctacgttccagagcgcaaggttgccgcggagaatatccaatacctgctctcgtcccactatcagggtacaccctacgatccctatgcgggccatgcggaaaaaggcggcatttaccgtcctatcggcatcaaccgcacgggcgtgacgacgatctgtcaaattagaagcgacgtccccgatgccattaagggtatcgagtgggtgtgcttcggctccacgacattttccgcgtggctgccggtgtacacaaatgtcccgcagatgccggactatttgagcaatgtgacgctcgacgccgagaccgacaatctctactgggtcagccgctttgtcggcgcgctggccgacaagtgctacggctcgtgcatccagaatgtctggggctatcaggacacggtgaatatccgcggcagacagatcgtccttaaatacgacaggctgatgcgcgagagcggcgacttcacgctcgccgcgcaggcgaacgacgagctctgcgcgatggcgaaagaggagagcgcgcagatcctcaacgaggtcctgcgcactgccagtgagcaaatgaaaaacggcttcagctttgctgatacctgcgtcaacaagtgaataaaaagcggctctctcccaagcgggagagagccgcttttttgttatcctttttcaatttgacccagccaaaacgagaaaggacgacaatcatggaagaaaaaagaatcgtaaagccctggcaggcagggctgatgctgctcgtcggcatcgccattatcatcgtggggcttcttgtgatgaagctcaacaaccgcatcgtgctggcgctcgacggcgtcatcatgtgcctgatggcgtggtgcttcggcattccgtgtgcagagctgcagcagggcatcaaggagacggtctcgtcgatgatcgtggccattttgatcctgctggcggttggcgtgctcgtcggcacgtggatggcgagcggcacggtgccggtcatgatctactacggcatgaaggtgctgacgccgggcttattcctgccagtcgtctgcatcctttgcacgctgatgtccaccatggcgggcacgtcgtggggcacgctcgcgacggtcggcatcgcctgcatgggcgctgcacagggtctcggtgtgccgctgcccgcggccgcgggtgcggtctgcaccggcgcgttcttcggtgacaaggtctcgccgctgtctgactcgcccgtcatcaccgccacggtgtgcgaggtgccgctgatggacggcattcgccacgcgctcatttccacggggcctgcgtatctcatttcgctcgttttctgctttgtttacggcctgcgctattccggcggcagcgtcggcgaggaagtgtatgaggatatcctttccaccgtttccgccgagttctcgctcagccccgtgctgcttctgcccgtgctggtcgtggtcgtgctgattttgatgaaaaagccgacgatcccgacttttatcgccggcatcgccgcgggcgcggtgatggcgatgctctgccaaggtgtcagcctgcacgatattctgacggtcatgtattccggcttttctgccgataccggctcggacgtcgtgaattcgatgctcaaccgcggtggctttacctcgatgctctcgatcatcggtcttctgatcgcggcgggcctgagcaagggcacctatcagcttgtggcggaggacgtcatccacgccgactacgccattatgggcgagtgccgctacgacaatgtggctgtcggcttccgcggccgctacagctttgaggtgaccgtccacggacagaccgcgcacgccagccactatcccgaggtcggtgaaaacgctctcatctccggcggacgcctggccgcggccatcgaggcgctgccgacgctccggcacccgcacctcaagcacggcacgtggtgcgtgcgctatatggagggcggcaatcccggcacgctcattgtgccggagaagtgctgtctcttcgttgaccgctacgtcgttccgggcgagacggacgagatctgcattgcgcagatcatggaggcggcggagcagctcggcctttccggcaaggtcgacgtgcgcctcaagccgagaaaatcgccctacatgcagtcgttcgcggtggaggaggatcatccgctcgtcaaaattttgcaggaggagttccactccgtcacgggcaaggaccttccgtgcgcatacgacgcctcggtctgcgattcgaatattttagccgtttcgctcggcattccggtcgtgacgttcggcccctcgggcggcaacatgcacggtgacaacgagtacggctatgcatggcaggtgaaaaactgcggcgaggtctaccgccgcactgtcgcgcgccttttaagcggcgaagtataaagagaaaaaagaggcagcctcggctgtctcttttccttttgcatttcacgcagattttacatttctttgctggtttttgacaaatccatctgctatactgtattcgatgaaatttggagagaagagaggagaagtgatacgaatggatacttacaatatgatcgattttaacgaaaagaagggcttcatctgcgatatggacggcgtcatctaccatggcaaccgcgtgctgccgggcgtggccgagttcatccagtggctgcacgatgaaaacaaggaatacttgtttctgacaaacaacagcggctacacgccgcgcgagctgagccagaagcttgcgcgcatgggcatcgacgtgacggaggagcacttttatacgagcgcgctcgcgacggcggcgttcctgcgcgatcaggcgcccggctgctcggtctttgccatcggcgaggcaggccttttgaacgcgctctacgacgcaggcatcacgatgaacgatgtgaaccccgactatgtcgtcgtgggcgagggacgctcctattcgctcgatacgctgacgaaggcgacgaacctcgtctggaagggcgcaaagctcatcggcgcgaactccgacgtttccggccccatcgaaaacggcattgtgcccgcctgccgcgcgctcgtcgcgcccatcgagatggcgaccggcacgcaggcgtacttctgcggcaagccgaacccgctgatgatgcgcacgggcctcagaatgctgcactgccactcagccgaggccgtcatggtcggcgaccggatggacaccgatgtgatctccggcatggagagcggcatgtccacggtgctggtgctctcaggcgtctcgacgcgcgagaccatcaagacctacgcgtatcgtccgagcatggtgttgaacggcgtgggcgacatcgtgagcctcgcccgcggggaaaagacggaagattgaaaattaaaaagggaagcgccgctgcgtgagcagcggcgctttgttgtattatggggacgcttagttatcctcccgtgcacgcaggcctgcgacggacgagatcggcagcgagaagcagatcgcacccgccttcgtgccgggaccggcctgctcgttgatcgagcgcatgatggcggccttttcgtccttgtgggcgatgatgtagatcatatccttttcgtcggcaaggctgacgctgaagaatttttctccgcgcgtgccgcccgtgcccttggcgtgcagcaccgtaccgccgcccgcgcccgcggcgcgcgccgcgtccatgacaaagtcggaatagccttcgtttaagatgacggtgatgagttcatgttcaaagttcatgttcggcgctcctcctgctttgagatcgtcggtgagataggacagtgtcttgccgccggccacgctcttgagaggcacggtcagcatgacgccgttgcccggaatgtcgataaagagcttgcgcttggcggaacggataagcgaatccgcctcctgcgcgctgccgacggcggcgataacgcacttttccgtcgcgtccagcccatagatggcgaggtgctcgctcgtggctgtgccgcgcgcgggcatgctcaaaataaggtgcagccccgccgcgtggtagagcgagcccatcgcttcgccgcggtcgtgatccgtgatggcaatgatgtaatagagttccatgtcagcaggcctcccacagttcgatgatctcgttgtcgccaaagtcggggagctggggctcctgcgaagcatgacgggatttgacaacgtagatggctcccatcacctgcacggtgatgagcggcatcatcgcaacgagcgcgacaaggccgaacgcgtccgtcatcacattgccgccgagcgcttcgcacgcgcctgtggcaaacggcagcatgaatgtcgccgtcaaaggacctgacgcgacgccgccggagtcgaacgcgatggccgtgaacgtgcgcggcacgaaaaagctcaaagccagcgcgataagatagccgggcacgaggaaatacatgatcgaaatgcccgtgatgacacgcagcatcgcaagcccgcctgcggcggagaccgcgatggataagctcatgcccatcgccttggcagagatcgcgcccgcgctcagctcttcgacctgtttgttgagcgtatggacggcgggctcggcgttgatgatgaaccagcccatcagcatcgcaaggggggcaaggagatagaccttccacccctcggccagcgcggcaccgagcgcgtagcccagcggcgaaaagccgacgttcacgcccgtgaggaacagcacgagacctaagtatgtatagaggataccaatcacgatgcgcatgaaaggcagcttgcggagcttgagcgaaatgacctgaaaaatcaggaagaagacaacgatcggcagcagcgccattgtcacttcccataaatactccggcagggcatgcagatagtccttgccgagctccaccgtggtggcggcgccagagacggcgctgctctcgccctgcgcgggctgcgttttgtagatcgcaccgagcagcagcaccgaaaggatcggcccgatcgagcacagaccgacgaggccgaagctgtccgccttggcattttcgtcgcttcgaatggacgcaacgccgacgccgagtgccatgatgaacggcacggtcatcggccccgttgtcacgccgccggagtcgaacgcgacggagaggatgctctcatccgacaaaaacgccgcggcaaagacgatggcgtaaaatacgatcagcatcgtgcgcagcgagatcgaaaagagaatgcgcaccatgcacagcatcagaaagaagccgacgccgaccgaaacggtcaagatcaacaccgttgtgtcgatctccggcacgttgcccgcgagcacctgcaaatccggctccgccaccgtgatggcgacgccgagggcgaagctcacggtcaggatgagcggcagcttgcgcgatttcgtcagcttggagcccatgtagttgccgatgcggctcatcgacatgtccgcgcccagcgtgaagagccccatgccgaggatcagcatggccgtggcgatcacgaacgagagcatcagtcccgcgtctaccggcacgagcacaaagctgatcgccataacgatcaggctgatgggcaggacggaggcggtggcttctttcagcttttccattaagatctgttcctgatacaaaacctcactcctttatcaattcaatacttccaaaaatatcatagcagagattcgccgcgatgaacagggaaaaagggtaaaggatgtgttaagcttgttcaccagacgtggacgaaaacagcggaatggtcaaaccatcccgccgctttcccatttttaatgcatattatttactgtgccgcgtgcgcacatccgcgctcgagagagcagcggatgttgccgtcgagcattccgccgagatcatcgatgaacgaatccggctcgcccttcatgccgctgccgatccattcaagcgtcagccctgcgagcgctgccgtgtagaagcgcgcgagcgccatgatctggctttcgctgacgttcaggccctcggcctccttgcggatgtaagaaagcattgtcgtcaggatcgttttatgataatatcttgccagaatatcgctgtgggcggagttgtgcaggtgcaggatcatgcgcttgttctccgcagcgaaggatgtggcggtcaaaaatgccttctgccacgattcatagccctccacgcgctcggagagcttttcaatctccgactcgaacacgtcctcggccagcgcgtagatgtcagtgtagtaataataaaaagtgttccgcgtgacctcgcttctctccgcgatgtcgcggacggagatcttgtcgaagggacgctctgccagaagctcgatgaagctgcggcggatggcgtttttggtgcgcagagccatgggtgggttcctccctttctcgattcgataaaattcattatatccgatatgggaaaaacttgcaagtgacaaaatcgtgaacatttaacgaaatctttacactatactcgccgcttcctgtcggaaacctggtcagcctcgcgggagtgtgaaaactttgtgcgccttgcggactttgccacttttcccgctttcatattcccgctatcatcagactgtcaaaaactgagacagcgctctttccccatgcgaacgagcagaaaggaagcgaaagagatgaaaacctatttcacctctgagtccgtcacgtgcggacatcccgataaagtctgcgaccagatcgccgacgcggtgctcgatgacatccttgccaacgatcccgacgcacacgtcgcctgcgaggtgacggcctgcaccggcgaagttcacctgatgggcgagatcacctcatcctatgtgccggactatgaagccattgcgcgcaaggtcatcgccgagatcggctataccgtgcccgtcgtcggctttgacgccgaaaacgtgcgcatccgcgtcagcatccacacccagtcgccggacatcgcgcgcggggttgaccgcggcgcgccggaagaagccggcgcgggcgatcagggtatgatgttcggctacgcctgctgcgagaccggcgcgctgatgccgctgccgatcacgcttgcgaaccgcctgacgagaagactcgaacaggtgcggcgcgaaaagctgctgccctatcttctgccggacggcaaggcgcaggtcagcgtcgaatacgaggacggcacgcccaaacgcatctccgccgtcgttgtctccgcgcagcacagcgcggaggtcggcatcgacgcgctgcgcgatgcgatcttagaacaggtcattttccctgtgctgccgccggaactgctcgacgagcacacagagtatttcatcaacccgacgggacgatttgtcgttggcgggcccgcgggcgacagcggccttaccggccgcaagatcatcgccgacacctatggcggcatggcgcgccacggcggcggggcgttctcgggcaaggacccgagcaaggtcgaccgcacgggcgcttacatggcgcgctatctcgccaagaacattgtggccgcggagctggccggccgctgcgagatcgagcttgcctatgccatcggcctcgccgaccctgtgagcgtgatggtcgacacgtttggcacggggcgcgtgagcgacgaaaagatcgcgagctggcttatggagcatatcgacatgcgcccaggcagcatcacgtcgcgctttgaactgcgccgcccgatctaccgccacgtctcctgcggcggacacttcggcgaaaatgccgtgggtcttccgtgggagtggaccgacatcgccgaggtgctgcaaaaggaaattttatcataacattatctgcgaaggcggggaggaacagcattgaaaagcaaacggagcagaacctatctcgtcagcggtctcacgctggcgctgatctttgctgccatcatccttgttttccgcgacgtgctgcccgatatcgtcaaggacctgagtactgtgccgttctggggtgtgctgctcctgctcgcactcggctttgcctacgaggcgatggaatccgtgctgtgcctcgtcatcatccaccacaaaaagccggactgcacgtttattgacgcgctgcgcgtgacattcctcggcgtgttcggcaatatcgcgacgctgggtgcgggcacgctgccgatgcaaagcttttacctttacaggcgaggcctggacgcaggcagcgggctcggcatcatggcgagcgaatacgtgctgcacaagatatccgtgctgatctacgcgacggtcgcgctgctgctcggcggcgactggctggagcagagcgccagcggccttgcacgctatcttctgatcggctatgtcatcggcgcgctcatcgtgatcgcgctcacgctgctctacacctgggataaggtgctgaagttagtgctgatgctgctcgacaagctcccgcacacgccgaagtgggacgaacgccgcgaagagtgggcgaatagtctcaccgagctcaaccgcgaggcgaaaaaggtgctgctcgttccgtcaatccgcgtcaaaggtatcgccgtgagccttgtgaagctcttcgtgctctattccatcccctatgccgcgctgcggctcgtgggctgcacggcgcttaactttgcgcaggcacagctgctcgcctcgctgatgctgctcatcacaagcgcgctgccgaacgtcgcgggcgtgggcccgatggagtttgcgtttttgctgctcttcgccccgtgggcagacacggcaatcgcctcgtcggcgctggtactttatcgcgtggcgacgtatttcttcccgttccttctgagcgtgatcgtgtttctccgcgaggagaagaaatctttgaaaggctttgatgcgcaaagcgcttgaaaattatgacggcctgaggccgtcgggggattcccgcaccgtgcgggagtgcgctaaagggggatactctctttctcgaaagagagtatcccccttaaacccccgagagaaaggacgaggggccttccccttcgaccccacacattggcagtttcaatcttgaagaactgcacacgctgcgcaatgtaggtgcggtgtacatggcttcgccatgaatccctgcaatttgtgaccgatttgcaaccgcgccttactatcgtgaggcgcgagtgacgttagattggcggcagactgcctgcggaatgcggcattgcttcgctcgccgcattgatgagtgctccggtagacggaaattaggctgtaccagcgcgagatgggcagagcggcagcggatgataggagtacgccaagtcgtatagcaggggtaaatgcggctttgccgcacgcaagaggtgcaatcggcaagcattgcagctcttcgagctgctcgcttgcaatgaaaaattttctctgggagggtgtaagggaggggtgtctcttttcaaaaaagagacacccctcccttatccgcgttcccacacggtgtggggaacaaggcggcagcactttgtgctgcattatccccgcgccttagcggcgcgctttaatttatagagctcttcggcagcaagccgtgtcttggcgaccacatccccgccgccttgcggaaagcagtaatacagcgctttgtggtcgccgatgcacagcatatcgccgatctcgtaccagaaatagtcggcgtacaggctgtacgaggcctcgggcttttggaaatagtccagtttcccgccgcagccggtcaggtggaagccgttttcatcgtggtgcagccggccttcgcccacgcggcagatctcgcgcatgttgaccatcatgcagatctgcacgggaatatcaagctgatatgcgccgctttccagctcctcgcgcacgcactgccgctcccaggtgtaccagtccggcacgtgggtgaacgcggcctcgccgttcaaacattccagcgtaccaatctctgtcaagcggtattccttgttacagcttcggcaaatgagtgatgtgcctttgccctccattttcccctcggcgaggcagtgcgggcacttgtagagcacgcggttgagtccgtcggcgcggaacggctcgctgacggagacgccgttttcctcctgccagcggaaattgtcgaagcggaaggcggaaaagatgcgctcattgatctcggcgacgttcctctctgcaacgtcgctggacgagagcaggcactgcatctgcgctgagaccttcgtgcgccgcttttgcagcccgttgtagagcgggtcacgcgcgaacgcgccgtaggtgcggatcatcacgaccggcacattcagtgccttgacgcacttgccgatgctctccggcagcggtgtggccgtgccgtcaaagctgtagctcgcctcggggtagagcagcacagacgttttgagcgtccgcacgcagtagagcatatcgcgcacgagcgtcgtgtccgagcagaacttgcgcgtggggatgcagccgacgctgcgcatcagccactccttgccgacaaagccgtccgacgtgcagacgatgttgaacgggcgcgggtacagcaccgcctccgcgattttgaggtcgagaaagcacgagtggttcatcaggacaaggcagggctcatcgcttttgatctgcgccatgccgatcttctcgcagtggaaatgcgtcgccagaaggtcgggcgcggaggctgcgcgcaggaccgtccggaacaggagcgacggctttttcggctttttgtgcacctgcggcggctgggcaagcgcctgttcatatgtcatatcgacgactttaattttcattctgtttctccggcacgacgtggatgttcagatgatcgtaggacatctccacgttgtgctttgcaaaggtgttgcgcaggcgctcgtacatcttaaaataagtgtcccagtaggcgtctgccgccgtccagcagcggatggtgtattcgatggagctggcaccgtaattcgagagatacaccgtcggcgtgggctctttcagcacggcggggaaggcgagaacggcgtccatgcaggcctgcttcacctcgtccgtcggcgcgtcgtaggatgctgtgaccttgtaaacgatgcggcggcggcccaggacggtgaagttgatgatcttcgagctggacatttcgcggttgggctggagcacgatctgtccgtccggcgtttcaatcttcgtgtgcgtcagtgaaatttcacgcaccgtgccggtcgtgccgccgacttcgatctcatcgccgagcgagaacggatgcgagaagagaatgacgagtccgccggcgacgttgctgagaatgtcctcggcggccagcgtgacgcccaacgtcagcaccgacatgatggcggtgagcgacgaggtgttgatgccgagcgcctcggctgtgatgatgatggtaagcagatacagaagcgttttgaggctcgtaaggatgaccttttgcagccgttcgttcaggcggttcgcgcgcgagagcagccgcgaacagagcttgagcacgagccgcacgacgatcaggcagatgaggaacgtcagcagcgcggaaaggatgctgccgatgctgtagccaccgatcgagcgggagatgatctgggaaatattgtccatggcgtttcgcccctttcgatgtccagtatatcagtgttgccgcgcctttgtaaagagcacgctaagaatcctcagaattccttaagctttgccggttgagaaacgggcggaaagagcgtataatgcagcgtgatcttttttgaaaaggaagtgctcgcatgcgcccttacgccctcatcgacctccactgcgacacgttgaccgactgcatgtacgcaggatcgaacatcatcgacacactcgacgatcccgcgcgcacgctgtcgctcacaagtattccgaaggacatccactggacgcagtttttcgccgtgttcgtgcccgatgagctgcgcggggagaaggccatccgcttttttgatgacgcctgcgcgaatttcgaccgccagatgcgaaaattcgcagatcgtgtgtcgccctgccgcaatgttgccgatatggagcgcgcgtgggcggcggggaagaccgcggcctttctgagcgtggaaaacggcagcgcgtttgctggcgacctgtcgcgcatcgggaagacgaagcgtcagggcgtctgcgccgtgacgctgacgtggaatggggaaaacgagctcggctcgggcaatgtgacggaccgcggcctgacgggctttggccgcgccgccgtgcgtgaaatggagcgctgcggcattttgatcgacgtctcgcacctgaacgacgcggggctcgcggacgtgttcgagacggcggaaaggccgtttctcgccacgcactccaacgcccgcgcaatttgcgcgcacaagcgcaacctgacggacgtgcagatcaaggagatggtgcgccgcggctgcctgatcggcctcaactactacgggccattcctgcgcgacgggggagcggtcaggagcttagacgacgtctatcgccatgtggcgcactttttcgacctcggcgcgcgcaaaaacctcgccctcggctcggacttcgacggcgcggtgctgccgccgtgccttgattcgccggagaaggcggcggatttttacgagtatctgctttcgcgcggcgtatcgcagcaggacgcggacggcattttctttgaaaatgctcgcacattcctgcggaaaaaccttgggtgagcgcaaaacgcttggcagcgggcggcgcactgtgatacaatcaataaaaacaggggaggggagcacatggcaaaaaaatcgagccgcaacaccaaggcgcgcatcgtctcggcggcgtggaagctcttttacgagcagggctatgaggagacgacggtggaggagatcatcttcgagtcggagacgtcgaagggctcgttctaccactattttgacggcaaggacgcgctgctctcgtccctctcggtgctgtttgacgagcggtatgaggagctgatgcagcagccacacgacgagatggactgcatcgagctcttatgctggctcaatcaggagctgttcacgacgatcgagaacacggtttccatcgagcttctggcgcggcttttttcctcccagctcgtgaccaagggagaaaagcacctgctcgaccgcaaacgcacgtactatcgtcttttgcgccaaatcgtctctcaggggcaggagcgcgaggagctgaccgacacgcgtaccgtgagcgagatcgtcaaggcctacgcgatgttcgagcgcgggctgatgtatgactggtgcctttcgggcggggaatattcgcttgtgcagtatgcgcgcgagatgatgccgctctttttagacggctttcgcaaaaaataaaattcgtttcaaaaacagtctactaaatcgtcttgcagaaaatgcagtaaaatcaatcaaaaattcagaattttgcagtgccgtacaggaattattctgtacggcgttctgtatttacgtctactttcttttgtgctatattgtgctcgttttaacgaaagctgaaggagaaattcacatgacaagcgcacagatcattattgtagtgaccatcgtgctctacctcgccgcgatggtgttggtgggcgtgtattttggcaagaagggcagcggcagcagctcggacgacttctacctcggcgggcgcaagatgggccccgtcgtcacggccatgagcgccgaggcgagcgatatgagcagctaccttttgatgggcctgcccggccttgcctatctgtttggcctgccggaggtgacgtggacgaccatcggtctggccatcggcacgtatctcaactggctgatcgtcgcgcgccgcctgcgccggtattcggccaaactcggcgccatcacgatccccgactttttcgcccgccgcttcggagataagaagcatttgctctcctgcatcgcggcggtcgtgatcctcattttctttatcccgtacacggcgtccggcttcaaggccatcggcacgctcttcaacagcctctttggtgtggagtatcatacggcaatgatcgtcggcggcatcgtggtcgtgctgtacacggtgatgggcggctttatggccgtttcgttcaccgacctgatccagtccatcttcatgaccattgcgctcatcgtcatcgtatgcttcggcgtgcagcaggcgggcggactggacacggtcatcgacaatgcccgtgcgctgccgggctaccttaacatgacgcagggctacgatgctgcgagcggcacagccgcctcgttcagcacgctgagcatcatttcgacgctcgcgtggggtcttggctacttcggcatgccgcacatcctgctgcgctttatggccatccgcgaggaaaaggagctcaaccagtcccgccgcatcgcgacgatctgggttgtgatctccatgttcatcgccgtgtgcatcggcatcatcggcaacagcgtgaccgccgcgggcaaagtgcccttcctggcgacgagcgcggaatctgagaccatcatcattaaattggcagacctgatgagccagcacggcgtgctgctcgccgtcatggcgggcatcatcctctcgggcattctggccgcaacgatgtcgaccgcggactcgcagcttttggccgcggcgtccagcgtgtcacaggatctcatgcagcattcgttcggtatcaagatgaaccagcgtacgacgatgctggccgcgcgcgccacggtcatctgcatcgccatcatcggcatggtgcttgcctgggaccccaacagctccgtgttccgtgtcgtttcgttcgcgtgggcgggctttggcgcggcgttcggccccgtgatgctcttctcgctcttctggaagcgcgcgaacaagcaaggcgcgctcgcgggcatgatcactggcggcgcggtggtcttcatctggaagtacctcatcgcgccgatgggcggcgcgtgggccatctacgagctgctccccgcgttccttgcggcgtgcattgcgatcgtgatcgtatcgctcgcgatgcccgcgccggagaaggctgtcaccgataccttcgacgagatctgcggcaaataaaagggaagaacaggcgagggctgcggccctcgcttttctttgttagccaaatggagtgaaatggaaaaatatgacaaaaaatccgcattgactattgaaaatggaatgactaacgtttattatagataacatctatttatggatgctgacatcaggcggcgggatacgtgcatttgtcctgccgaccgatactacactgatggcaagcagtgaaaggagaaaacagcagtgtcaagactcgatattatgacgccctcccatgcccagaccgtcatcgacgggctgtaccgcgatgtggagcggcgtatcgccgcaagccctccgggactgtgtccggtggacctggccaagagctttctggacctctgccatgcgcagacgtgcggcaagtgcgttccctgccgtatcggcctcggccaactctctgagctgatggagcaggtgctcgagggcgaagccacgatggagaccatctcgatcatcgagcgcgtggcgcgcgtgatcgtcaacagcgccgactgcgccattggccgcgatgcggcgcgcctggtgcttgacggcgtgcagggcttccgcgacgactacgaagagcatattctgcgccaccgctgccttggcggcatgcgcgagcccgttccctgtgtggcgctgtgccctgcgggcgtggatatcccgggctacctcgtgctcatcaagtacggccgctacgccgacgccgtgcgcctgatccgcaaggataacccattcccttcggcctgcgcgtacatctgcgagcatccgtgcgaggcgcgctgccgaagaaacatgatcgacgacgcggtcaacatccgcggcctcaagcgctacgcggtggataacgcgggctacgtgccgcagcccgactgtgccgagccctcaggcaagaaggtcgccgtcatcggcggcggcccgagcggcctttccgcggcgtattacttagctttgatgggccacaaggtcaccgtgtatgaaaagcgcgcgaagctcggcggcatgctgcgctacggcatccccaactaccgcctgccgcgcgaagtgctcgacgcggagattgcgtcgatgctggcgcttggcatcgatgtgcatgtcaacgtcaatgtcggcgacgatgtgacgttcgacgagctgcgccagcagaacgacgcgctttacatcgcgctcggcgcgcacacggataaaaagaccggcatcgagggcgaggacgctgagggcgtcatctccgcggtcgagatgctgcgcgagatcggcgacgattacatgccggacttccgcaacaaggacatcgtcgtcatcggcggcggcaacgtcgcgatggatgtctgccgcagcgccgttcgtctcggcgcgcgcaaagtgagctgcgtctaccgccgccgccaggaggacatgacggcccttcccgaggaagtggagggcgccgttgccgagggcgtggagctcgtgacgcttcaggcaccagtccgcatcgagaccgatgcgaacggtcacgccgtcgcgctgtggacacagccgcagatcatcggcgagatggataaaaagggccgccccgcgcccgaaaaggccaagcgcagcgaaaagcgcatcgcggcggacgttgtcgttgtcgccatcggtcagggcgtggagacccacggctttgagcagacgaagatcgccatcaagcgcggcgcgttcgtcgccgaggccagcggccagatcgacaatatggacggcgtcttcgccggcggcgactgcgtcaccggccctgcgaccgtcatccgcgccatcgcggccggcaaggtcgccgcggcgaatatcgacgaatacctcggcttccaccacgagatcgaccccggcgtcgagatccccacggcgcggctgaacaacaagccgccccacggccgcatcgacaccaccgagcgcgaggcaggcgaacgcaagcacgacttcaagtgcatcgagtgcggcctcacggatgaagaggcgtactccgaggcgtcgcgctgcctgcgctgcgaccacttcggctacggcatcttccgcggagggaggaaaggcaaatggtaagaaacgttacactgaccatcgaccacaagagcgtcaccgtgcccgagaataccacgatcttggaggcggcacgctcggtcaatatcaatatcccgacgctgtgctacttaaaggacatcaacgagatcggcgcgtgccgcatctgctgcgtggaggtcgagggcatggagcgccttgtccctgcgtgcgacaatgtggtggcggacggcatggtcgtcttcacgaacagcgccaaggcgcgcgaggcgcgccgcataaacctgcgcctcatcctctcgcaccacgatacgtcatgcacgaactgcacgcgaagcggcaactgcaccttgcagcagctggcgaacgacttcaacatgcgcggcacgcacttccccaaaaagctgcggcacgaggcggtggattattccacgccgctcattcgcgaaaacgacaagtgcgtgcaatgcctgcgctgcatccaggtgtgcgaaaacgtgcagagcgtgaagatctgggaccttctcggcacgggctcgcgcacggtcgtcgacgcgtcgtacaaccgccgcattcaggacaccgagtgtacgtactgcggccagtgcatcacccactgcccgacggcggcgctgcgcgagcgcgacgacacgggtctcgtcttcgacgcgatcgacgatccgaataccgtcaccgtggcgcaggtcgcgcccgcggtgcgcgcggcatgggccgagcagttcgggctcgacagcgagttcgcaacgcccaagcgcatggtcgcggcgctgcgcgagctgggcttcaactatgtgttcgacaccgactttgccgccgacctcacgatcatggaggagggcagcgagtttatcgagcgcttcacccacaaggaccagtatcagtggccgatgttcacgtcctgctgcccgggctgggttcgctttgtgaagtcccagtaccccgaactgacggacaatctctccacggccaagtcgccccagcagatgttcggtgcggtggcgaagagctactttgccgaaaaggtcggtatcgaccccaagcgccttttcgtcgtctcgatcatgccgtgcgtgtcgaaaaagagcgaatgcgcgctgccgacgatgaaaaacgacgcgggcgaccccgatgtcgacgtgagcatcacgacgcgcgagctgaacattatgatgcgcgcgaatcacattgaacccaagtacctgcccgaggaggagttcgacagcccgctcggctccgcgaccggcgcggcggtcgtcttcggcacgaccggcggcgtgatggacgcggcgctgcgttcggcgtactttctcatcacgggcaagaatcctgaccctgacgctttcaccgccgtgcgcggcatggacgggtggaaggaggcgacgttcaacatccccggcgcgggcgacgtgcgcgtcgcggtcgtgagctcgctcgggaaagcccgcaagctcattgaggctgtcaagcgcggcgacgcagcgtatgactttgtcgaggtcatggcctgtcccggcggctgcgcgggcggcggcggccagcccatccacgacggtaccgagcttgccgaggatcgcggcaacgtgctctggcggctcgatcagggtgagcttctgcgcttctcacacgagaatccggatgtcaaggcgctctacaaggactacctcggcgcgccgcttggcgaaaagtcgcaccacctgctgcacaccgaccacaacgcgtggcagatgccgcagaaaatgctgtaaggacgcaaaaactccgtatgagatttctcatacggagttttttattgctgaattttatcgggtgtacgcgccgtactcgctgatgacggcgcagagctcgctgaacacctgctgcgcgtcgccgtcgatcttgtaggcgacggcgcggtgggcgtcgtcgtagatgaagccctcgtcccagttgaggtacaggtcatgcttctgtccgtcttcggggatccaccagacggtgacatagttctcgttctgcgtgaagcgggagaggagcgacgtgggcaaacgataatagcgctgcaccgaaatttcagacatagcgctgcgcagagccgcggcggcctcgctgtccggatagccctctacccggcagtcgccggtgtcgaacgtgccgtagccgtccggcgtgggaacaatggtcgaaatgcagaagagtccgtcgacgcgggcggtctcaggcgcggggatcagctcgccgagcggctgcgcacggcgcggcagcaaaaagatagccacgacgagcagcatcgcggcgacggcgatgagcacggtttttctctttttgtccatggggttctcctttccaatatcaaacttgcttttgtcatccaacaggggagagggaatcgcttttcgatagtttacctgagaaagagctttttgacaagcccttcttcgggcgtgacatagagtgtgcggtaattgtcgtaggtcaccatgccggggcgtgcgcccgcgggctttttgacgaacttcacggggcagtagtcgacggggacgctgctgctctccttcgcctgcgagaagtaggatgcgagcattgcggcctcgcgcagatcatcgtcgctcggcgtgagtcccgcgcagcgcaggatgacgtgcgagccgtgaatgtgctgggtgtggaaccagtagtcgcgcttgtcggccttttttgtcagctggtcgttctgcacgttgctgcggccgacgaggacctcaagcccactcgaggttttgaatgtgcgcggggcgaaggcgcgcttgagctcctttttgccgctcgactttcggatatagttcgtctcctgcaattcgcggcggatctcattgaattcctgctcggtttccgcctgcgaaagctcctgcaggacgctttccaagtacgcgcgttcgttttccgccttttcgatctgctcgcgcaggtggaattcggcggtcttgagcttgttgtactgcttgtagtttttcgcggcgttctgctggggggagagcagcgggtcgagcgggatgtcgatggtcgggcagccgtcctcatagtagttttccgcatgcaagactttttctccgctcttcatgcggtacaggtttgcggtgatgaggtcgccgcgcaggcggaattcgtcgcgcttctgcgtcgcggcgtagtcgtgctttaagttctcggccttgcgcgccatgcggtcgcgcgcgaccgtgaccgcgtgcgtcagctcgcggccgcggcgggcggagagctcctgccgctcacgcgcgtcgtagaactcgtcgagcatttgcgagaagctctcacgcgtctcgacctgcgtttccacgccgtactgcgcgatgggacggtaggtgaaatccacgggcttgccgtcgcggtagaggatgacgggcatatagttatcttcctttacagcgttggctgtatcggaaaattcctgcaccagcgccccgcgctgcgcatcgttcagcgcgccgaagcgcacgtcggtctcgtgtcccgcgcggaaggcgaattcgcgcgcgatcagcggcgaaatgccggtgtaatggtcgagcacccacttgtcgacagcctgttccgcgtcgccgccgcgctgcgcgagggcgagggagtcctcctcctgcgaaaggagcgacagcttttcgagcggtgtcggcagatggtaaaaaaggccgggcagcagttggcgcgtggcggaaaggtccgcgtccacgcggcgcagacattcgacgatacgcccctgcgcgtcgagcaggacgaggttcgaccgccgccccatgcactcgagcacgagctgcttttggctgatctctccgaattcgtccgtgcactggagcgtcaggatcaccatgcgctcaagatccggctgctcgatggacagcacgcgcgcgccgactaagtgcttgcgcagcagcatgcagaacatcggcggctgggcagggttgtcgcgcagaatgtttgtgagctggatgcgcggctggtttgcgcccgcgttgagcagcaggcgcagattgccgcgcagcagcagaacgatttggtcgcgcgcgggctgctgcaccttgtcgatgcgcgcgccgatgagctgaggtctcagctcgtgtaaaactgcccgcaggcagatcgcgtcaagtggcattgtcgtcctccatcatccggttgaaaagctcgttgatgcgcgcgtgatcgtcgcgcagatacagccagccgaacagcgcctcgaggcctgtggccttctgatagtccgcgcggtcggcgtggtgggggatggaatggacattcgcgttgcgcccgcggcggaacacagaggcctcttcctccgtcaaaaggggtaagaggttttcggcaaagcgcgcctgctgcggcgcgcagacgagctcgaccgtcgcgcggtgaaggcccttgcccgtcgccttgccgtgcacgcacagatatgtgcgcacaagcagctcatacaccgcgtcgcccagatgggcgaggccgatggagctgatggcgcggatggcgtcgtcgttcattttggcttgtgtataatcgtacataaaaactcctgaggtttgaaagtacacatattctataaccttgtcggaattctgtcaatcggcgcgcgctgccgcgcgcgaaaagccgttgcgcttttgcaaaaatccgctataatggcagaaaagacaagacctttgagatcggagaagagaagcctatgaaaaaactgaccaccgcgctgctcacggcgcttttgctgctgaaccttgccgcctgcggcgaaaaggagccggacgacaccccgtccggctacgacgattcgctcatttccgagctttacagcgaggagggcgagtacacggacgccgagaacaacacgctcgcatacagctaccatgtgccaagaatcatgtcggaaacggcggtcgccgccgcgctgaacgacgagatcgccgatcaattcggcgcgctcgtgcaggagcagaagaacatgatggcctcccgcgtttcgctcacatgcctttccgtcacgtggacgagctactggaacgacagcctgctctgccttgtggtgcgcgcggagatggacggcgacacgagcatgacggagacgtacagctacgactttttcggcggcaaacgcctcatgagcgaggaactgctggcgcgctgcgagctttcaacgcaggacttcatcacggcggcgcgccgcaccgcggcaaactactttgatgagacgtaccgagatgcactcagcggcagcatgggcggcgcgggcttcatcgcgtcctatgccgagcgccgcgcgtggacgctctcggacgagaacatcaacgcggagatgcggctctatctcgacagcggcgcgctgcatatgatcgtgcccatcggctcgtttgccggggcggagagctacgacgctgacctcgcgctcgacctctctgcgcgcgagacggtcgagaagacggcgcaggacagctttgtcaaggccgcgctctcgggcggcgatttgaccgtcagctttgaaaagacggcggactccgcgtggtacgcggagaatttccgctttgactacgagaccatctaccccgtggaaggcctgtattccgactacacggatgtgttcgtcggcccggtggggcaggggtacttcccgtacatcttcctgctgacgagcgagggcacggtggagtacgtgaacctgctcgagggcctaacggcgggcttcctctgcgacggcggaccgctcggcggcgtgaagggcattgtttcgttcaagtccggcgaggtcgaggaggactacggcacgtatcagacggtgttcgccgtcgacgcatcaggggagaaacacgacctctccggcgcggtcagcgacgcggactacacgatcccgtcggaatttctcggcgagtggacggcgaccgtgacgcacgacaccgccgagcagggcagctatgacagcgattatattctgacgctcacggatggcggcggcctcacggtgcaggatatcaacagcgaggttgggatttactttgagtacaccggccagctcaactacctcggcacgaacggcgagggcatggtctttggctatcacttgaacgagaatgcgggcacggtgcgctacggcgcgttcacgttgctgcgcggcagcgacggcctgcacgtcaaatctgtcgcaggcgaaaacttcttcgacgcgccgagcggacgctacaccgtgtttgcgagagggtaaaaagaaaagcagggccttttttgagcgcggaagggccctgcttttttgcggctttgatgcgctaagcaaaattagaggggggtaccgctttgaccgcgctcctgatccatgcggtcacacccccttggcatctgacgggagaaagaggctttggcggcatccggagaccaaggagaaagcctctcaaatcgggggaaatgctctagtgaaaggagaacctttcaaaaaaacaaagatttcttcaaaaaagtgttgacaggttctactctctgtgctatattatcacttgttccgagccgaacggaacagtaaaaacaaaacggcatgggggtatagctcagctgggagcccgattgaagcggtaatcaacccccgcactaattgaataagaaattactcagcgcaccccttatacgggggtatagctcagctgggagagcgcttgactggcagtcaagaggtcagcggttcgatcccgcttatctccaccaatcgggtgcgctgagtattcttaataaatgcttgctttgaaaaaagcaagttttttgttttatgcccacttctcttttgaagcgggcttttcttatgcggcgattgccgaaatgtccagcccagcgctgaactgctcaaagtcaatgttgaagtcgatatgcagccgataatcccgatacacctccacacgccggatcaggcagctcacaatcattttctttgactccgtgctggcgctgtcgtacatatccgcccatgaaataatatcgtcatactgagcgtttaaggcgtccagcatggcctgtccctcgtcgtaggccgcctgcgctacctccatagtgtgctgaatggtaagacattttttctcattatccgcaatcaaggaactgagcaaatcctgcgaaaaagcactttcgccccggagggatttaatgacctctgcccggagcgtatcaagctcggcggcagccttggcgtagtccgattttgcacttttgagaagtgccttccgttcttccatcttttcacgatagcggatattgacgatctcgcttttggggatcgctttcatccgttcaaagatctgccgcaccaccttatcaatgataccgtcaagaatatgagccgtgtagccagtctgcccgtcacattcggtttgcttgcgtgttttgccgtagcagatataccgtacacgctttacaatgcggtgagcatcttccttgcatggataagccttgccgttggtggtgagcgccagccgggagccacaatgcccgcaaaagacattcccggccagcaaggactgaccacgggtattcagcggtacgcgccgttcctgttcggcggagttggcacgggaggtacgaatgtgttgtgcagcctcgaatagctccggcgttatgatctgcaagtggggcagcgtttgggagcggctttcaccgctacgaagcaccccagtatatgtcagattgcaaatgataccccggacgctggcgtgatgccacattttacccgttctcgctcgatagccgagattatttaagtaggtggcgatccgttgagcgccgaaaccctcatgcacatatttgtcaaagataatccgtaccacagcggcctcggcctcattgacagccagctcaaacacctcgtgtttgcgtttattgaagcgtccgctctttacaagatcatacccataaggagcaagaccgcccttgaaaccgccgtcctcgacgagctggccgagggcggtttttgtacggatcgaagtcttttcgctttcgccgtcggcttgccagaagcggatgtagttggtgagcttgtccgtgtgattatcaaaacgctgctcaccctcctgcgtactccagacccggatgccgttcttaacaaaccattccaccacaaaaggcgtttcgtcagcgatacgcccgatgcggtcaaacatgaacacaagcagaatatcgaattttccctgcttggcacgctccttgatgatttgcagcttgtcccggttttcggctctaaccttatgcccggacacgccgtcctcctgttcctcgtgaacgatcgtccagcccattttttcacagaagcgatggcactctctgcgctgcatgggaatgtcggcttggcttttgtcgttgtagtccacctgcttgtcggtggacacgcggtataggcaatcgactcgattacctgtcatcattctgttttccatcatattgatccgtcctttcatttgtcgatgggtcaatgaaaaaacgcaatcaatacgcggggaatatgaagttttcaaggtacatagggactacccccactattattatccc

SEQ ID NO: 10145 - DNA, 21599 bp, Unknown
  gut microbiota DNA sequence
gatctatgagccccagcaggtcgagggccgcatctatcagatgtggatggaccacgactgcttcaaggccgagcccgacccggacaaaaagccgttttccatcgtcatgccgcctccgaacgtcaccggccagctgcacatgggccatgcaatggactcgacccttcaggacatcctgacgcgctttaagcgcatgcagggctactccgccctgtggctccccggcaccgaccacgcgggcatcgccacgcagatcaaggtcgaagaggagctgcgcaccaaggagggcctgacgcgctacgacctcggccgcgagaagtttttacagcgcgtgtggcagtggaaggaaaagtacggcaaccgcatcgtcgagcagcagaagaagatgggcgcgagctgtgactggtcccgctcccgcttcacgatggacgagggctgctccaaggccgtgcgcgagacgttctgcgagctctacgataagggcctgatctacaagggcagccgcatcatcaactggtgcccgcactgcctgaccgcgctttccgacgcggaggtcgaatatgtcgacaagccgggccacctctggtatatccgctacccgctctccgacggcagcggcgatatcgtcgtcgccaccacccgtcctgagacgatgatgggcgatacgggcgttgcggtcaaccctgaggacgagaagttcaagcacctgatcggcaagacctgcatcctgcccattatgaaccgcgaaattcccatcgtgggcgacgaatactgcgagatcggcttcggcacgggcgctgttaagatgacccctgcacacgaccccaacgactttgaggtcggccttcgccacaacctcgaggtcatccgcgtcatcgccgacgacggcacgatcaacgaaaacggcggcaagtacaacggcatggaccgctatgagtgccgcaaggccatcgtcaaggatttagaagagcagggctacctcatcaagaccgagccctactcccacaacgtcggcacgtgctatcgctgccacaacgacgtcgagcccctcatctccgcgcagtggttcgtcaagatggagccgcttgccaaggaggccattcgcgtcgtgaacgacggcacgatcaagttcgtgcctgagcgcttcaccaagacctatatcaactggatggagaacgtgcacgactggtgcatctcccgtcaactctggtggggccatcagatccccgcgtggtactgcgacgagtgcggccatatcaacgtcaagcgcgaagacccgacggaatgcgaaaagtgcggctgcaagcacctgacgcgcgaggaggacgtgcttgatacatggttctcctccgcgctctggccgttctccacgatgggctggcccgacctcgattctcccgacctcaagtactggtatcccacgtccgtcatggtcacaggctacgatatcatcttcttctgggtcgcgcgcatgatcttctccggtatggagcagatgaagaaggagccgttcaagaccgtcttcatccacggcctcgtccgcgacgacaagggccgcaagatgtccaagtcgctcggcaacggcatcgacccgctggagatggccgagaagtacggcgcggacgcgctgcgcttcaacctcatcaccggcaactccccgggcaacgacatgcgcttctacgtcgaaaagtgcgaggcgatgcgcaacttctgcaacaagatatggaacgcgagccgcttcgtgatgatgaacctgacgatcgaccacgtggagctgcccaaaaagctcgagctcgaggacaagtggatcctctcgaagctcaatacgctcatccgcgaggtcacggacaatatggacgccttcgagctcggcgtcgcgtccgcaaaaatttatgacttcatctgggacaactactgcgactggttcatcgagctgacgaagaaccgcctcaacagcgacgatcagaccacgcgcgagaacgcacagaacgtcctctgctatgtcctcatcgagacgctcaagctcctgcacccgttcatgccgttcatcacggaggagatctggcaggcgcttccgcacgagggcgagttcctgatgctctccaagtggccggagtacaacgaaaagttcagcttccccgccgaggaggaggcgatgcagaccgtcatcgaggccatcaccgccatccgtgcccggcgcaacgagatgaacgttgcgccgtcgaagaaggtgcactacaccgtcgccaccgcgcacgccgatacattcagcgccggtatcccgttcttcacgcgtctggcctctgccagcgatgtgacgatcgtgcccgccgatgccgccatcgacgccgacggcaaggtcgaggtcgacacccacgccgcgcgaatcttcatgccgctcgccgaactcgtcgactttgaaaaggagctcgcacgcattgccaaagagaaggcaaacgccgaaaagcagctcgccggcatcgagaacaagctgaaaaacgagggcttcctcgccaaagcgccggaggcggtcatcaacggcgcccgcgccgatgcagagaagctcaaggcgctcattgagaagctcgatgcttccgcggcggcgatgaaaaaataattactttcctttaggaaacggatttggttccctgcgccgcgcaggggacggataaagggggaggttctcttttacaaaagagaacctcccccttttgatcccccaagagaaaggttttgacattgcaagcgagcagcttgaagagctgcgtcgcttgccgaatcgggtgcctgccaggtggtgttgctatacgacttggtttgcttctatcttcgctgtcgctttgcctgcgattcgttagtcttacgcaatctccgtctactggggatttgtgcaaatttgcttctgcctgccggggcgactttgctgcgctcaccgcaatatacgcactatcggtagtaggcgattacactgaacctgcgattagattcgagagcggcacccgcaaggggtgtgccgcatccgtaaggcagcagagccgccaacggctgcgcaacagcggataatagaagtgagtcaaatcgtatagcaacaccaaccgcagcaatgccgcgcgcaggcattcccattccggaggcataaaagtcattcaagcccgagactgccaatcagacctttctcttgggggtcaaagggggatattctctttccgaggaaagagaatatcccccttattcgctcccctgcgggtacgcagggaatgtggtgcagcgccggcggcgctgctatttctccgcgctacgcgcggattttaggcgttttcccatgtaaagcttacgcgcaaacgccgtctgggccgcaccggcccagcagcaacatccttgtcgcgtatgacgctgccgacgcgcagcgtggagagcagaaaaccgagctgtagcatgttgagcaggatcgtcttgatgccaaaggtgaaaaacgggaaggctacaccgccgctgatggggatcagcgtgaggtcgcagcaaagataggcggccgcctgcgtggtgaacgacagcagcacggaataggaaacgaggcgggcgagcgtactctcctgcctgcggcagcggcggaaggcgagaacaagcagcgccgtcagcagcgtgacgagtgcgatgagtgccagccagccgcagcggtggacgagcagtgtcagcgcgtgcgcctgtaagtcgaccatgccgaagccctccgagcgggcaaggtgctgtgcgctgtacggtcccacgccgccttgaccgatgaatttggcgttttgcagcagttcgcgcagtacaacggttcgatagccgtgtccgtcaatgtaggagtgaggatcaagcacaatggcgagctgacgcgcgaaccagtttgcaccgagaacaaggacccacacgatgtcggcggcaagcggcagggtggtgagcagcgtctccaactttttgccaaggccgaaccagccattgcgggcgcagaagatcagcagcgcgctgtcacagagaaacagaaagcccagatcgagcaggcacgggacgcgcaggcagaacatgcactgcaccgcgaggcagacgaaggcagcgaaaatgcccaagccgcgccgcccgcgcagcgcatagagcagcacggcaaacatcagcgggaacagcagcggcaggccgcgcaggagaatatgcctcgaaacgtagatgtagcggagccagaacccgccgatgggcaggagaccgagcaggatcaacgcagcgtggaacacaagcgcaagcggcagggcgaagcgcccgagcagcgtaaaatcaagaaaatacgccgcgagcagcgccgccgtgccgagcagcagcgccacgctctgatgcacagcaaaataggacaattcgtagtcacgaaagcttacaagcgcggtgaacgcaagccctgcaagcgcgatgagtgccgcgagcgcaaaaagaagctttggtgttttcggacggtggacgcggtcaagctccgtgccgatctcatacgggtcgcctgtcagacgaagggattctgcggtcgcgacggtctcgtccatgccacccgccatcagcgcgtcgcgctggtcgcagaggtgggtcaaaagctcgtcttcgacgagcggtcgcgcctttttccaccgcagctgctcagccgcggtgcgggcaaactgggtaaaggtttcaggcagagccaaggcagacgccccctttcagcacgcgatcgaccgcagtggtaaatgtcgcccattcgacttctttttcgcgcagcaaatgttgccccttgcgctccaaatggtagtagcggcgcgggcgcgccgcgccctcatctttttcataggagcggatgagctccttttcctcaagtgagtgcagcaggggatagagcgtgccggtcttgagcgcgaacgcgcgctcggagcggcgggagagctcttcgatcatctgatatccgtacatgtcctgcccgtcgagcagcttgagcacgagcatcgtcgtactgcccgcgagcagacttttgtcgaccgtcatacatacgcctcctgataagtagattgtctacatagtagattgcctacataatagcgggagtgcggcgcgttgtcaagcgggaaacaggatattgcaaaaaaagagcgattttgctatgctttgggtatccaagataggagggagaatttccatgaacaagatcacgcttggcaagacgaatcttgtcatcgagaaaaacggatttggctgcctgccgatccagcgcatcagagagcaggatgcggtcgacctgctgcacaaggcgtatgacggtggcatcaactttttcgacacggcgcgcgcgtattccgacagcgagcagaaggtcggcgcggcgttctcgtcgatgcgcgacaagatcgtgctggcgacaaagaccggcgcgcagacggcggagggcttccggaaggatctggagaccagtctccgcacgctgaaaaccgactacatcgacatctatcagttccacaatcccgccttctgcccgaagccgggtggagaagacggcctgtacgacgcggcgctcgaggcgaaaaagcagggcaaaattcgccacatttcgatcacaaaccaccgcctcgccgtggcgcacgaggccatcgactcgggcctctacgagaccttgcagtttccgttcagctacctcgcgggcgagcaggagatggagctcgtcagaaagtgccgcgaaacaaacatgggctttatcgccatgaagggcatggcgggcggcctgatccgcgacggcttcacggcggcggcgtggatggcgcagcaggatggcgtcgtgcccatctggggcgtgcagcgcgagagcgagcttgatcagtttttgcagtgtatccgcgagggcgttgagctgacggatgagcgcaaagcgactatcgagcgtgaccgcaaggagctatgcggcgaattctgccgcggctgcggctactgcatgccgtgccccgcgggcatcgagatcaaccagtgtgcgcgcatgtcgctcatgctgcgccgcgcccctgcagcggcgtggctcaccgaggaatggcagcagaagatgcaccagatcgaaaactgccgccactgcggccactgcatgtcgaagtgcccctacggcctgaacacgcccgagcttttgcaggcaaactacaaggactactgggaagtgctcgcggccagcaaggcggagaaatgaagctggatttttcacaaaaatacgccgtccggccgctgacggcgggggatgtagacaagattttagcgctctgcgcggagaacgagcagttctaccgctaccatccgccgcttgcgacgagggagagcgttttggaggacatgacggcgctgccgccggggaaatgcgcggcggacaagcattatctcggttttttcgacagagaaacgctcgtcgccgtgctggacctgatcgagcgctacccgcaagatgacaccgcctacatcggcttctttatgacgaaaaaggagcggcagggccgcggccttggcacggcgctgatcggcgagctgttggacgaactgcggagagagaggttccgcaaggtgcgccttgcggtcgacaggggcaatccgcagagtaaagcgttctgggaaaagaacggctttgcgctgatgggcgaggaattcccgcacggcgattcggcgtatctgccgatggaacgcgcgctgtaaaattgaaaagaaagcaccgctgtgcagagggtatctgcacagcggtgcttttcattttttgagattatttcaattcgtaagtccaatcttcaccgttctggcggtagaacagctcgctgagatcatcttcttcaaacacgcggagaaggtcgagcatgtcggaagatgcaagatcgagcgaggggagaccggcgagctccgcccaccagacctcgccctcgtcggaagagcgcagcgttccggtaaactgctccgcgcgatagagcagcacgacatgacgcacgccctcttcgcaccagtccttgatcccgcacaggcgcggagaggagattgtcagacctgtctcctcctgaacctcacgaatgacggcatctgtaaaggattcacccttttcaacatgaccgtccggaaaagcaacgcctggccagttgggatctgtgcggtcctgcaccaaaaccttgctgccgcggcggagcacgcacatactcatcagttcgacgggctcagagcgtttcctgtacaacacgtccttttgggtttgaaaacttgcttgctatccatgactactgcgcactgtgcggcacctttgccttggcgctgagcttgtcggcgcgaacggcaaagacctcgactgtgcgggcttgctgctcggtgaattgatcttcacggcccgccatgtggcgcatgagggaggtcagcgcgacgagcttttcttcaccgtccaaaaattcgacatggccgacgccggtgacggaggcgaagtagtatccgcactggcaggcgacatcgtgctcgtcgagcgcaccgcggcagtccatttcaaaggcgacggtcggatttttgtgcagaatgtcgagcttacggccttcgcgtgcgctgtggcagaagaacgagaacgcaccgccttcacaggcatagccgaaattcagcggcagaagatacggctctccatcgtctaccatggcaagatggatcactttacaatcgttgataatggagagaatttcgtccagatcggtgatctcgcggtcgtttcttcgcatgagagatcctcctttgatcgttttcctcattttacagggcggaagcgcaggtgtcaatgaggcgcggcaaagaaaaatcaaaataccggcggtcttcgacaaaaaaacggcaggaggacaggctatactttgagaaacgaaagggaaaacgcttgaaggaaacggagggagagcaatggaggtcatttcatcgggcgaagggcgtgaactgacgctcacgctgcgcggggagctcgaccatcacgcggcgaaggaggcgatgcggaagctcgaatgggagctggatgcggcgctgccgagcaaactgacgctggatttttcgggtgtgagctttatggattcgtcgggcatcgccgtcgtgatgcgcgcgctcaaacgtatgcgcgccatgggcggcagcgctgcgatcaaaaacgttccgccgcaggcgaaaaaagtgtttaccgccgcgggaattttccgcatcgtaccgcttgaggagggggaaaagagcgatgaaagtaaaaccgaataactacatagccattgaatttccgagccgcagcgtcaacgaagggctggcgcgcgccgcggtcgcggcgtttgccgcgcagctcgacccgacgctcgacgagctcggtgacatcaagaccgccgtgagcgaggcggtgacgaacgccatcgtccatgcctatccgcaggagatcggcaagatcgcgctgcgcgcatgcattttcgacggaaatctccttgagatcaccgtgcgcgactgggggtgcggcattgcggacgtcgaaaaagcgcgagagccgctctacacgactggcggtgaagagcgcagcggcatgggctttacgatcatggagagctttatggattcgctcgctgtgcgctcgaaaaacggcaagggcacggtcgtgacgatgaagcgcaggatcgcgctgcgcacggcgcgccgatgaacgccgcgccggaattgctcaaggctgcggcgcagggcgacgagcaggcctgcgagcaaatgctgcgcgagaacagcggcctcatctggagcatcgtgcggcgctattacggccgcggcgtggagccggacgacctctatcagctcggatgccttggattcatcaaagcaataaagggatttgactttgcattcggcacgcagttttcaacctacgctgtgccgaagatcgcgggcgagattcgacgctttctgcgcgatgacggcgcaatcaaggtgagccgcagcatgcgtgagcaggcggcgacgatcttcgccgcgcgcgaaaagctcaaaaatacactcgggcgcgaaccggcgctctccgagctttcggaggagacgggattcaatgccgaggagatcgcgcagtgtgagctggcggtcgctgcgccggacagcttgcagcgcgaaacgggcgacggcctgacgctcgaggggatgctcggcggtgagtcgccagaggacgggctcattgagcgcatcgcgctgcgcgaagccatcgacgagctccctgagcgcgagaaaatgacgatcctgctgcgctttttcaaggggctgacgcaggagcaggcggcgcgccttctgggcgtgtcgcaggtgcaggtatcgcggctggagcgccgggcgctggagaagctgagggcgtctctttcggacgggctttgaagtagctttcgtcctgaaactccgtcatcatgccccagtagcgcttgggcatgtgcgtcatgcgaagcttttcatttttgcgcgcctcgatggcgacggtgtcgtaaaagcggcgccagaggcggcgatagcccgcctcgacttcgtccggctgcgccatttcaaagtgattgagcggcacgatgcgcgacacgccgccgctatagagcagcgcctcgcggtgcgtgcggtcgtagaggaaaaacgcctcgttgtgatagcgttcgcagaagtggcggcgcaggacagggagcacacggtttttcggttcgatctccgcgccgagtacgccgtcaaagtcggaaaagcgggtgaagccgcggaattgctcgacctcgcccgaaagctgccgcacggccttgagcagcggcagataggtgtcgtcgctcaggcgcgagagcagcggcgcgccctcgcggtaaaatttgacgatgaagcggtaaatggccatctccttgtcgggaaggcaggtgagaaacgcgcggcgcaggaaggggccgacttccggacttcgcttgtagaggctgcggtagatgcgctgcgcgtgggcgcggtccgtcgtgaccgcgcgaatttcaaaaagggagggctcgtcgtccccatcgcgcaaaatcgcggtggggcgttctttttttgtgtagctttcaaacacgcagcagaggagcccttcaaagctgccgtcgtattgatagatgatctcgcgccatgccatagcggcctccttagccgacctgatcgaaaagggatagctgttgtgcctcggcctgtgggagcgcgcggcgctccacggccatcaggttttgcaaaatgccctcctgcgacagcttgagcggcgaggcataacgcccgccgcaggtgagaaagtattgcgcacgcttcatcacgacgccgagctttttgaggtcctccgcgcgcagcgcgcccgagcggcgcgcgaccaaaatgcgcttggcgctcacaacgccgatgcccggcacgcgcagcagcgcttcatagtccgcgcggttcacctcgacggggaagaactcgggatggcgcagcgcccagcagcacttggggtcaagggcaggatcaaagtccggcgcgttgtcgtcgagcagctcgtttgcgcgaaagccataaaaccgcagcagccagtcggcctgatagagccggtgctcgcgcagcagcggcggcttggtgtcgagcgcgggcagaagcgtgttctcgactaccggcacataggctgagtagaacacgcgctttaaccgataggaatcgtaaagcgcctgcgtgagattcagaatgtgcaggtcgctttcctttgtcgcgccgacgatgagctgtgtgctctgccccgcgggggcgaaacgaggtgcgtgcttgtatttgacaagctcctgcttgctctgctttgcgcggtcgcggatctgcgtcatcgggcgcaggatggcctgctttgttttattgggggcgagcagcttgagtcctgcttcgctcggcagctcgatgttcacgctcaggcggtctgaaagaaagccgagctgttcgacaagctccggcgatgtgccggggatggccttggcgtggatgtagccgttgaagcggtactcgctgcgcaaaatcgacagcgcgcggatcatcaactccgtcgtatagtccggcgagcgcagcacgccggaggagaggaacagcccttcgatataattgcggcggtagaattcgatcgtcagctcggcaagctcttcgggcgtaaaggtcgcgcgcggtgtgtcgttcgtgcagcggttgacgcagtatttgcagttgtagcagcagtcgttcgagagcagcaccttcaagagcgtcacgcagcggccgtcggacgaaaacgtgtggcagcagcccgcgacggacgtggacgtgcagccgatcttgccctcctgatagccgcgcttggccccgctcgaggtgcaggcggcgtcgtactttgccgcgtcggaaaggatcgtgagcttgtcgagaaggttcatgttctcagcgggcggatctcgcgctgcggcgcttgggctggtcgagcaggagcagcgtgttcatcaccttggtggtgacgacgctgacgccgatgaaaacgaaaataaatgtggaagcagccatggaaaattcctcctgacaaatagaatctttgttcgagtatgattataaatcgaacaaacgttcttgtcaacaaaaaatcgaacaaaaagtcgatttttgtcgaacggagttgaccggagcacgaaaaaagggtaagatgtggaaagatcaggaaaggtgaaaacaatatgagcgattttatcgcccgctatgccgctgcgagaaaagcggccattgcgcgggattttgcaaaactcaaccctgaacagcgccgcggcgtgctgacgaccgagggcgcgctgctgctgctcgcgggcgcaggcagcggcaagacgacggttctcatcaaccgcgtcgcaaatcttttgacctacgggcgggggagcgacagcgcggatgtgccggcgtgggcgacggaggacgaccttgcatttttggagagctatcccgagcatccgacgagcgacgagcgcagccgcatgatacacctctgcacgcttgaacccgccgcgccgtggtcggtgctggcggtgacattcacgaacaaggcggcaaacgagctgagagagagactctccgccttcggtatccagggcgcggagagtgtttgggcgatgacgttccactccgcctgcgtgcgcatcctgcgccgcgatatcgaccgcctcggcttttcgcgcgactttacgatctacgacacggatgactccaagcgcgtcatcaaggacattttgaaagagctgaacatcgacgagaagaagctcacgccgcgcgaggtgctttcggccatctcgaacgcaaaggacgcgatggagtcgcatcaggactactcccgccgctggaagggcagcggcgactggcgcaaagaggcaatcgccaagatctatacgcgctacgtgcaccgtctggccgaggcgaacgcgctcgacttcgacgacatcatcctccacgcggtcacgctgctgcagcaggagggcgaggtgcgcgactactaccgccgcaagttccgctatgtgctcatcgacgagtatcaggacacgaaccggctgcaataccttttgatgaagcagctcgtgggggagaagggaaacatctgcgtcgtcggcgacgatgaccagagcatctacaagttccgcggtgcggatatcacaaacatcctgaattttgaaaaggagtacaaaggctgccgcacgatccgcttggagcagaactaccgctcgacgcagaacatcctcgatgcggcgaatgcggtcattaagaataacacgggccgcaagggcaagaccctctggaccgatgcgggtgcgggcgatagggtgctcatcaagaccgtcttcaacgagcaggacgaggcgaactttgtcgtcagcagcattatgatggactataaccgcgggcggaactggaaggaaaatgccattttgtaccgcatgaacgcacagtcgaacgcgctcgaatacgcgttcaagcgcaacggcgtgccgtatcaggtcgtcggcgggacaaagttcttcgaacgcgcggaggtcaaggacatgctcgcgtacctcgcggtcatcaacaacccgagcgatgacttgaggcttcgccgcattatcaacaatccgccgcgcggtatcggcaatacgacgatcgagcgcgtgcaggatctcgcgagcgagcagggcgtgccgatgatggccgttttgcagcacgcaggggagtacgccgtgctcaagagcgcggcgggcaagctcgagcgcttcgcccagctcatcgccgcgctgcgcgagatggcggacacgatggagctcgcggagttctatgacgcggtctgcgagcagacgagctatgtacgcacgctgcaggaaaagggcgacgtggagagccgtgggcggcttgaaaacgtgcaggagctcaagtcgaacatcgtttcgttcctcgaaaacgattcggaggatgcgacgctctcgggctttttgaacgagatcgcactctataccgacctcgacagcgcgacgagcgacaactgcgtgacgatgatgacgatgcacagcgcaaagggtcttgagttcccgtgtgtgtatgtcgtcggcgtggaggagggcatcttccccggcgagcgcgtgcgctacaacgatgaagaggtcgaagaggagcgcagactgtgctatgtcgcgatgacgcgtgcaaaggagcgcctgacgatgacctgcacgcgccagcgcatgctgtttggccgcacgagcgtcagtgaaccctcgcgttttttggaggaggtcccgtcggagaatgccgactgggtcggccgtcaggcgcagggcgcgtccggctttggcgacacgagctttgacgagggaagctcgtattctacgcgcggctacggtagctacggtcagggcgcggcgcgctacgacagcgtcatgcagcgcagaccaaaatcgcaggcgtcgcaaaaactcgcggcgcagaagcccgccgcctccgcgccgctgcttcagctttcctccggcgaccagatccaccacaagacgttcggtgacggactggtcatctccgtcacccctatgggcggcgatgcgctgcttgaggtggcgtttgatacggtcggcaccaaaaagttaatgctgaaaacagcgggggtacatattactaagttgtgattgccccacaccgtgtggggatgcggataagggggccattctctcacgtgagagaatggccccctttgacccccaagagaacgcaaggggccttgccccttgaccccgcacattggcagtttgtggctcgaagagctgcacgcgctgcgcagtgtaggtgcggtgtacatggcttcgccatgaacccctactgctcgttaccactcgcaaccgcgccttactatcgtgaggcgcgagtgacggtagtttggcggcagagtgcctgcggaatgcggcattgctgcgctcgccgcattgtggagactggaggtagacgggaattactgcgcacttctacaagatgggcagagcggcagcggatgataggagcagaggcaaatcgtatagcaacactaaacgcggcaatgccgcgcgcagggaagtgcaatcggcaagcattgcagctcttcgagctgctcgcctgcaatgtcaagcctttctctgggggttccaaaggggggattctcttttgtgaaagagaataaccccctttgactcgtgcagcgctgcacgcgctgctatccccctcgcgcccaacgggcgcgactcaatccctccaaaccagtttggagaccgaatctccaaaaatccgaagagcttcctcttcgattcttttgcgctgcaaggattgtaaaggtattaaccatgtcaattcgacagctttcccgcggcgtttccaaacgccgacgatcttcccgtcgagcaggatgctcggtctaacgataccggcgagcgtgaacacgccgcgcagagcctcttcgggcaggaacgggtttgaccgcttcttatacccgagcatcagcggatcaaagccagcgaggaatcggcagcaggacaggtcgccgataatattgatatcgcataagctgtaaaatattttaccttcacagataaactcttgcggggagagcgattcgatgaccggcagcagctctcgctggggcagtccgaagaagtatgcggcgtcctgtactgttacggggccgtagtgtgtcagatagcgccgcatgagagcgcgcagggcggcggcttttgtcatcggtgcaaacggcgggcaggggcgaaaggcctttttctgctgcgcggtgtggccgagcgtgccgctttcacacagcgcgcggagcagcccgccccagggatcaaacgcgttttgttcttcattggcggtcatgccgtgctcgcggcagagaaggcgcagctcctcgcggccgccgcagccgctttgggcggcgtccagaatgattgcggccagctcgcgcttgcgcgcggcggagagctggtcgtcattttccattgtgtcgcacggacgcagaaaatgactgcgcccgtcatagaggaagagcggcaggtcatcgagtgcgatcagatgcagtgtgccgcgcagcgtccacattttgacggcggaggtgcgcaggatatcctcatccggcgctttcccgcagcggagacgcagcgcgtgcaggcagttgccgtaaaactgcgcctgcaagccgcagaggtcgcgcagcacggtgagctcgtctttcgcggggacaaaaagatactgacggttcatgcggagcaggagaatgtcgtcgatttgcatggggcgcctccgttcggtgcaaatttttccgccggaatacttgcgaaaaatgcagcattttgatatgctatgtcacattgtaacatgtgtgatatccgggaggcaactatgaaaagtccgaaagtccggcaggtggtgctgccgctgatcacagcgatgatctggggcagctcctttgtgacccagagtctcagcgcggggcatctcggatgcttcagcttcaacgcgctgcgttccattcctgcggcattggcgctgctgttgctgctgcttgttgtgcggcgcattcgcccgcgcgagaagtataccgcggaggaaaagcgcgcgctgctgcgcggcggcctgatctgcgggttcttccttacactcggcgtcaatttgcagcagttcggcattgaaacgacgaccgcgggcaaggcgggctttatcacgacgctctatatcatactcgtgccggtgttcagcatcatgctgggcaaaaaggcgaagaagagcacctggatctatgtgctctttgctgtggcggggctttatttcctctgctttgacggcggctccgtctcgttcagcagcggcgatttctatattttcctctgcgcctttgcctttaccgcgcagatcctcgcggtggatcattatgtgcagcgggtggacggcattgcgctgtcctgcgcgcagtttgcagtggtcatcatgctctcagccatcggcgcgcttgcattcggcgagcacaccacgctcgaggcggtgaagacctgcatcccgtatctgctctatgtcggcgtggtgtcgagcggcgtgggctacacgctgcagatcatcgcgcagaaggacggcgacccgacggtcgtgtcgctgctgctgagcctcgagtcgttttttgccgttgtctgcggcgcgatcgtcctgcacgagcgcatgagcctgcgtgagtatttcggctgcgcgctgatgcttgcggcggtcatcctctcgcagctgccggagaaaagcgccaaagcggttgaaagcggcaaaaaagagtgatataataaactgctttaataaaaatgtgaaagaaacggacagactatcatgcggatcaatattttaggcgttggctttgataatgtgacgatggacgaggcgcttgcgcgcggggaagagcttctgtgctccgagggtgcgcactatgttgtgacgcccaatcccgagattgtggagacctgccgcgcggatgccgcggcgaacgccgccgtcaacggtgcggacctcgtgctgccggacggcatcggcatcgtgtacggcgcaaaaattctgcaccagccgctcagaggccgcgtgcccggcatcgagttcggcacgggcatgatcgagcgctgcgccaagctcggcaagagcgtttacctgctcggcgcaaagccgggcgtcgccgagcaggcggcggaaaatctcaaaaaccgctttcccggccttgtcatcgccggcacgcacgacggctattttaaggaggatgcccccatcgccgcggagatcaaggcgagcggcgcggacatggcgctcgtgtgcctcggcgcgccgaagcaggagctcttcatggcgaaatacggcgaggcgacgggttgtcatctgctgatgggccttggcggctcgatggatatttttgcgggcgtcgcgcagcgcgcgccggagttctactgcaagcataatttggagtggttctaccgccttatcaaaaatccgtcccgtatcggccgtatgatgaagctgccgctcttccttgtccacgtttcgggggagaagcgcaaatgagcggcaagctgatcgtatttgaaggcacggacggctccggcaaggcgacgcagagcaagctgctcttcgagaggctgcagcgcgagggtgtcgactgccgcaagctcaactttccccgctatggggaaaagtccgccgcgctcgtcgagctgtacctcggcggcgcgttcggtacgcacccgagcgatgtgaacgcctacgcggcgtcgacgttttactccgtcgaccgctacgcgtcctacaagcaggactggggcaaatattacgaggcgggtggacttctgatcgctgaccgctacacgacctcgaacgccgtgcatcaggccggcaagctgccggacggcgaacgggagaaatatctcgactggcttttcggctttgaatacggccttctgggcctgcccgagccgtcgctcgtcttttatctcgatgtgccgaccgagctgaccgaaaagatgatgcgcgagcgcgaacaggcgacaaacacgaaggccgacatccacgagcaggacgaagcttacctgcgcgcgtgccgcgagaatgcgaaaaaggtcgccgagcgctgctcctggcagcgcattggctgctcgaaagacggcgcgatgcgcacggtcgaagacatacacgaggaaatttaccgccgcgtgacggaacttttgaaggcttgaccacatcaaaaacaagtgaaaaggggacgctcacgcgccccatcttcacaggaggagagtgccttagcagcagcaatcgttgctgttgccgcagccgcagttgttgctgcagccacagccgcacccgcagccattgccgcacccgccgcagccgaacagcaccagaatgatgatgaggatcagccacacgcagctattgttgttattgcacattttcgtttcacctcacttgtcatgccctatcctatgcgcgagcgcgcaaaggtgagcctgaccgatagaaaaaggtgagggaatttcaaatcagcaaggaggagctatgagctacgaggacaactacgatcaaaccgcccgctgggacgccgagagcgtccgcgaagcggaaatgcgcacgcagcagcgctccacgcgcagcagcgccgagcggcaaaaactgaagaagaaagggcagcgccgccgctttacgctgtggctcgcgttcgtgctcatcacgtcggcgatcctcgccggtgtgggctggctgctggcgaacgacatgtgctctttcaacaaggcaccggtcgagacgaccatcgagatcacgcgcgacgacaacctgaacaccatcgccacgaagctccacgacgaggggctcattaagtacaagtggttcttcaaggcgttcggcaggctccgccacgcggaaagccgcatcggcatcggcacctacgccgtcgacagcgacatggactacgacgcgctcatcaaccgcatgagcaacaagaacgcgtcgctcacggcgaataccgttaaaatttcgatccccgagggctataatgtccgccagatcatcgcgctgatggacaagtatggtgtcaacacggcggaaaagctcaccgacgcggcgatgaactcggacttcaactattcgttcatcgacaacaataaaaagggcgacctgacgcgccttgagggctatctcttccccgatacctacgaattcttcgtggacgaggacccgacgcacgcgctgtcgagactgctcgacaactttaatacaaagatgagcgatgagctcatgcagaaggtcgaggcctccggctattcgctcaaccagatcctgaccatcgcctcgctcatcgaaaaggagacggacggcacggatcgcgagaacatcgcgtcggtcatctataaccgtctcaacaacatcggcgagacgtatcacaagctacagatcgacgcctcgctcatttacggccttggtgacaactacaccggcacgctcacgagcagcgacctcaattacaacacgccctacaacctctcgatgtacgagggcttaccgcccacgcccatcgcgaacccaggccttgcctccattcaggcggcgctcgacccggcgcagacgaattattacttctacgccctcggcaaggacaaagtgcaccatttcttcaagacctacgcggagcatgcgagcttcgtcagttccagccagtacgcaggctaacataaaatgacgcggcagcgtggcttatgccacgctgccgctttgaaagaggacaacgatgagaagaaaacccgagatcctcgccccggcgggcgatatggaaaaattgcagatggccgtgctctacggcgcggacgcagtgtacttagccggtacgagcttcggcatgcgctcgttcgcgggcaacttcacgccggaggagcttcccaaagcggtgaagttcgcgcacgaccacggtgtgcgcgtccacgtgacggtgaatacgatgccgcgcaacgacgaggtcgcgcgcctgcccgagcacttggagcgtttgaacgacgcaggtgtcgacgcgcttattttggccgacctcggcgcgtttacgctcgcggggaagtatgcgcccaagtgcgagcgccatatctcgacccagcagtcgatcgcaaactacgagtgcgcccgcgcgtggtacgatttgggcgcgaaacgagtggtgctggcaagggaagtgtctttacaggagattcgcgaaatgcgcgcgaaaattccagaggagctggaggtcgagaccttctgtcatggcgcgatgtgcgtgagctattcgggccgctgccttctctcaaactatatgaccggccgcgactcgaaccgcggccagtgcgcccagccctgccgctaccagtatgcgctgatggaggagaaacgtccgggcgaatatttccccgtcttcgaggatgagaaggggacctacatcatgaactcgcgcgatatgtgcatgatcgaccatttagacgatatcatggacgcgggcatcgactgcatcaagatcgaggggcgcgcgaagtcggcctactacgccgccatcgtcacaggtgcgtaccgccatgtgctcgacgacgtcgccgcgggcagggaagtcgatcccgtatggcgcgatgaggtagagcatgtgagccaccgccattattcgacgggcttctactacggccagcccgggcagtattacgacaattcgcgctacatccgcgactggcaggtctgcgccgtcgtgacggactgcgatgcggacggcaacgcgacgctgtcgcttcgcaacaagtttgccgcgggcgacgagatcgagctcgtcggccccgacagccgcccgttcacgatgaccgcgcccgtgatgcacgacctcgagggcttcgagctctacgagccgcgcacaccgcagacggtgtttaagatgaagctgccgcgctatgtgccgccgatgagctttgtgcgccatgcggtttctttgagcgcaaaggattaaaacgctttttcgcgccttttcgggcacggggggataggcagcgccgaaggtgctgcaccacatttcctgctcctcctgcgcggccgcaggaaaaaaagcaaaaacttatttttgcgctttcaacgccttgcgttgagcaaggatccccggcaggatcgcgcacagcgatccaatcaggaagcagacgatgccgacgatcatattgagcggaatttcctccttgaggaaaagaagcgcgaagatcggcgccaagatgggctttaggaagaaaatgagcgacgcctcctgcgcggacgttttctccatcgccatcatgtggcagacgaagcccgccgcggagttgatgcagcagatgtacagcagtgccggaatggccgaggcagggatattttcaaagagcggcacgtcgataaagaggttcagccccaccgcgccatagagcgacgcgcccgcggccgtgcggccgaagagaagcagcagtacaagttccgacgcgccgaagagaaaactcaggcaggtgacggcgatgccgccgaagcgcggcgtgcgctttttgccgaacacgctg

SEQ ID NO: 10146 - DNA, 16878 bp, Unknown
  gut microbiota DNA sequence
tgttttggcgtttgccgcgcttagtttgcgcgcatttttgcccgctatgcaaaaggaagaacattccaataaaaaacgtccggctgatattcagccggacgttttttcacttgtcattttagaagctcgtcgatcgcgcggtaaagctcggagagcgtctcctcgtcattttgctggatggcggcggtgacgcaggtctccatgtggttgcgcaaaatctggcggctggtcgagcggatggcggactccaccgcggcgagctggatcagcacctcggagcagtcacggtcgtcctccaccatctttttgatggattcgaggtgcccgatggcgcgcgcaaggcggttgctgatctttttcgtctgctcggggtcatggacatgcccgtgcacatgggggtgcccgtggctgtgctcatggacgtgttcgtgctcgatcatggcattctcctttagaacttcagcgcgccgacgcttgcttccacggttcggatatacgcgcggtcgatgatctgctgggcgacagcctcgagatacggcgtgaggggcatgtcgttgtccatctcgggcaccttgctgcggagcaggtcgtagatagcctgcgtgcccttggcgcagcgcttgtcctcatagcagtcgagcgcctgaccgtcgcagatgagctcggcggcgaggatatacttggcgaggtgcatcgagtcataggccttcttggcggcgttgtagcccatgttgacatagtcctcctggttggcgcaggtggccggattgtcgaccacggcggggtgcgcgaggatacgcagctcgccctgaagacccgcggaggcgtactggatcatcatgagaccgttgttgaagtcggcgttcttgttgaggaacgccggcagctcgctcaccaagctgttgagcaggcggtcgatgcggctgttgctcattttgcacagatccgtgatcgcgatgcagaggttgtcggacgccataccggcataggtgccgtcggcgttgcagcccatcagcgcgaccgcgccgccgtcctcttcatcgaagatgagcgggttgtcgacggacgagttgagctcgatggcgagcgtcgcctgcgcgtccttgacggcctttttgaccgggccgtggagctgcggcatgcagcggatggacagcgcgtcctgcacgcggtggccacggtagcgttcaagcatggggctgtccttcaaaatggcgcggatgttggccgcggtgttgatctggtcggggtgcgggcgcacggccatcaggcgctcgtccatagccatcagcgtacccttgagcacctcgagcgtgaaagagcccgcaatgtctgccgtcaggctgagcgtctgcgcgtcatagatcgcaagcgacgcgaacgcggtgacggacgtggtgccggagagcaggataagaccttctttggaagaaagcacgacgggcttgagtcccgcgcgcttgagcgcctctgcgccgtcaagcgtttcgccctgatgggtggccctgccttcgccgatcatcaccatgccgatgtggccctcgagcgtcagatagccgacagagccgtggctggggacgacggggctgatgcccgcgttgagcatgtcacggatcagcgcgagcgtttcaagacggatgcccgtatggccggagccgaagtggcagagcatgacgaacatcattgcgcgcgtgcactcctcggcgatgggctcgccgacggcgcaggtgtgggcgtagatgttgttgcgctggatcgtctcgcggtccttttcggggatgaacttcttccagttgtcaccaaggcccgtggtcagaccatagatggccttgccctcgtggcgtgcagcatcagcggcatttccatttcatcctttttcgtgtggatgatcccgatggcattgctgacgcttctggcaatctaccttgtttacctgcgccgcgtgccgcgcacagtcggtgagacggggcgcagtaagaaagagtgcgtacgcctgctcttgcggagtttgtggtcgctgctgctggcaatcgcggtaatcatcgtgttttcactgccgacgtgggccgtcgtgacggtcgtcgcggccgtcaacgcgctggtcgaaaaattctctgtgcaggaggtgcgcgatgcggtcgtcaagggctttgacctgaaatcgctgcttggcatcacgatgacgtatgtcttcaaggaccttttggtcctcggcggcgtgatcgatgtgctgccgacatattttgagcatttacccattccggcatttctggtgcttgtgatcctgtacgcgttcggcacgctggtcgcgggctcaagcgccgcggcagcggcctttatcccgctggcctacaccatgattcttgacggcggcgcatttctgctggcgctgctgatgaacgtcagcttcgcctcgagccagctgagtcccacgcacatctgcacggcgatcatctcagactatttcggcgtcacatttttcgccacggtcaaaaagctcctgccgctgtttctgctcaccgtcctcatcgcctgcggctactacatgctgctgacggcggtattctgaagaaaacaaacaaggcctgtgccaagcagcacaggccttgatcgatttgctgtaaagggaaaatcaaagggaaaacagagcaaaaaatgcagaccctttcccctaaacggagatttcgggcgattttcagagaaaaccgggatttgtaaaacacaaaaatgcgactaatttaatataaaaagttaggattccaaacatttctgtttgaaatcctaacttctgtcaggcggcttccattcggatatttttctaaatcgatccttgataatcgtatcagtcttccaactccgcctcgtgcttgaggatcgtgccggaggccgcgtcgatctcgtagtcatattccatattgccggatttgaactcgatttcgtagacgagcgttccgtcctcgtcgtccagctcaatgtccatgtcatacgcctgattttcactcaagcccgcatggttcagggcgatggacttcgccttggcgtagccgatgtcctgcaccattccggacggcgcgggcttttgaccagagggcttcgtcgtttcattcgatgcggaaatggcggctaatagatctttctgcccgctgagcaccttgccggtataggcatccaccagatattcaaactcgccccatgccgtttgcagctctacttcgtagtgtgcaggggattcgtcgagttcgggatcgacctccgctgtaacggaatccaccgccgtcgttccggcatactcctccgcagcggtacgggctgcatccctgccgatcggcatggcaggtgcgcccgcttcggcgaggtccttgagctcttcgaccgagagcttcgccagcgcgtcaaacttcagggcagggttcagtacaagcacgcggttcaccagcgccgcctttccggtggaaatgctgttttcccgcgcctgctgcgtaagtcccgcgtcctgtgtaagcgtctgcgtcaggacggacgcccgcgattcgcttgtctgcaaaacgccgtccacggtgctcgtcagctcacgctggagtttttccgcgcgagcggtatccttgtcctccaccgagatcatgatggcagaggaaatgctgtcgagatagccgtttcgcacgaggctgcccacgatggcgttcacagccacgtcgagcttcgcgcccttgagatccgcgccgttgcccatatccgcaaggatagctttcgcgtcctcgttgagcggggtgcagacgagcaccttttcgcttcgattcaccttcaactcaatgctggggttcacgtccagcgacaccacggaggccaccgcgtttgcccgctggtagaacagccctccgccgagcagcatcaccgcaaggcaggcggcaatgagtgatgtccatcttctcttcgtcgttttctttgttgtcatgggaattaccgttcctttccgctcttcgcagcgagagagaacgccgttcgcatcgtttggcgcggtcttttcaagcgccgcagccagtctctgctccattttttcattggtcatcgggcgtcatctccttccagaaaaattcgcatctttttcaatgctctgtgatatttcgacaggacggtgggaagcggcagttccagcagtgccgcgatctcccggtgcttcatgcccgtgaccgcgtgaagcagcacaatgcgccgctcctcatcagcgagtcttgccaacgcgccttgcagcagtgcgcgctcgtcggcatccaaaccgcactcctgcgcgggaatagcgtcccattcctcctcgctgagcgcggcatggcgttcttcgcgccgcaggcgcatcagacagaggttgcggcataccgtcagcagccaccccatcggcgagccggtggggcggtactgcgccgcgcagtcccacacctgcacatagacgtcctgcgtcaggtcctgcgcgtcgtgcgcgtttttgaggtaggaaagcgcaagaccgtacaccgccgtccgcgtgcgccggtacagctccgcaagagcttcacgctcaccaccggcaatgcagatcagcaactgctgcagctcgtgccgatcctctaccggagcgtattcggttgtcatcagcaagctgagcataagcttccgtctcctgtcatccgtgtaatgcacgaaaaggacgatttattgcacgggattttttatttttatgattctgtttctttcgcctcattgaactgcagcattctgtgatcctccgtcagcaccttcatctgactgatggcaatggcgttgagtttcgccaggcgctccgtctgcgggattccttcgttgatgaacactgcatacaaatcacataatccctgagactggtataggtagacttgtccagtgaagcaagaaaggcttgcagcttgtccacgggaagaggcttgatgtttccatcgtcccgccgcttatggagcttatgaaccttgatgggattcttcccgatgagttcttgctcaagcgcccaattcagaaatgcgttgatggtctggaacggtttattatagcgggcaggggaggcgtcggggattgcggcaaaaaatgtcagcacatcgctttcgagcaggggatagtctaagctgttgtggctgtcggctaagaaccgagcgaggcaatttcggtagtccttcatcgtttcttcgcccgtgtgctgcgattccttgaccagtaagaatttttgcatcgcggtttccaaatccatcggtttcggcttcattttgaccattctcatagcatcctccaaagagcagaccctttcccctaaacggagatttcgggcaattttcagagaaagccgggatttgaaaaacacaaaaatgcgactaatttaatataaaaagaaaggattccgaacatttctgtttgaaatcctaacttctggaggtgacacccagatttgaactggggaatgagggttttgcagacccttgccttaccacttggctatgtcaccgtatagaaaaaggagcaaaatgtttgctcctttttcatttgtggagcgggcgacgaggctcgaactcgctacctccaccttggcaaggtggcgctctaccagatgagctacgcccgcaaatggtgcctcaggccagaatcgaactggcgacacgcggattttcagtccgctgctctaccaactgagctaccgaggcatatcaagccgctattgcagcctgatgaatggcgaccaggaaggggttcgaaccctcgacctccggcgtgacaggccggcgttctaaccagctgaactacctggccgaatttatggtgggaacaacagggctcgaacctgtgaccctctgcttgtaaggcagatgctctcccagctgagctatgctccccactcgaaataatcgcttcggcgaacgacaagggttattatacagaataacccctgccgtgtcaaccttatttttgattttttcaaaaaatttttggaaaagggaaatgcattactttccctgctttttcagatcggcgatcatggcggtcagatcccctttggtaaagttctgcaccctgtcacagaactggcaggtgagttcagcagagccctgctcgtccacgatcttttcaagctcctttgaccccagcgacagcagcgcgcgctccgtgcgctcgcgcgagcagtagcagcggtattcgatcggatcgacggagaggatctccatgtcaaaatcagacagcaccgttttgagcatggcggcggggtcgggattctccttgaggatgttcgtcacgctcggcgctgcgtagatgccgccctcgaccttggtgatcacgtcctcacccgcgccggggaggagctggatgagatagccgcccgcggtgagcacgctgcggtcgcggtcgatgagcacgccgaggccgcaggccgacgggatctgctcggattcgacatagtaggccgccacatcctcggcgatctcgccgccgagcaggtcgaccgtgccgacgtagggctcgcgcatgttgaggtccttgatgaccgtcagcgtgccgctgtggccgacggcggtgccgacgtccagcttgccgtcctcgcgcagggcgagatcgacggcggggttctgcacgtagccgcgcacattgccctcagagtccgaaacggtcaggatggtgccgagcgggccgtcgcccttgatctgcatcgtgacgcttgcgccgttatccttgagtgcgttgcccatcatcgaacaggcagcgagcgcgcggccaagcgccgccgtggcgacaggggagatgtggtggatctggcgggcgcgctcggtcagaccgcgcgtgtagaccgcgacagcgttgacaaagccatctttcgagatggcgcggaccagacagtccttctgtgcttccatatatggttcctcactttctgatacaactgaagtaaatgcggccgtcgcgctcgttcgcgcggcgcagcttgagctcgccgtgcgtgcggatggccgtgaaaccggcctcttcgagccacgcggtcaattcttcgaccgtgtaggcgcgctggtggtgctcttcaaagtcgcgctcccacgcgccatccggctggaggcggaagaggtcgacctcgtagtcgagcattttgacgtttttgcggtagcgcgtgcgccagaggcagaacacgtcctcgcgctcgtcgagcagcacctcgccgtcgagtttttccattttcgagacggcgtggatgtcgaacaccagcgacccgccgggggcgatggtgtcgtgcaggcggttgaatgtgcgctgcacgtcgcgcggacgcgtcaaatagttgatgctgtcgaggcagcagatcgcggcgtcgacgctgtcaagcagtcgcagctgcggcatcgactggcacaaaagcagcggcggggaattgatcgcggcgagcttctgctgtgcctgcgcgagcatctcgggcgaatagtcgacgcccgtgaccgtgtagccgcgtcgggcgaagagcacggtcatcgtacctgtgccgcaggcgaggtcgagcagcgacttgacaggacgctttgcgcgcagaaagagcttttcgacaaagtccgcgcgcttttcgtattccacgtcctcggtcagctcgtcgtaggacgcggcgagagcttcgtagctgtccatgcccgtcgccttcctttctgcaaatatcccatatagtttagcagagagtgcgaaattagtaaagtgccgcgcccgcattttctcgcgccgcaccgctttggccgcggcggcatagactgccctaaatgaaaaaacggggaggaagcgcatgaaggagcatccgcgtttgacgctgggagaagattttgcccaggaaaaaagctggcagtgggaggacatcaccgtcctgaccgcccgcttgacgctgccgcagacaaaaggggagagccggcgcgagaagcgcttcgaccgctattaccgcgcactcgctgatgcctattttgcccgctgcgagcagaaattgctgccagatgccgcaaagacctgccgtgcggcgatggcgcgctccgccccatggcagatgacggcggtgacgcttacctaccgcgtaagcgcgcagacggaggatgcggtcgtttttaccttcgaggtaaatgacggagaaggtgtcctgcgccgctgggaggaggggtgggaatgcagcgcgttcctgccgctttttaaagcggaacgtggttccgcgattgcaagataagcgcgcgagcgcggttttgggcacccggcgggcgcggaagggggagcagcgccgaaggcgcttcgtttttattccctgcaccgtgcaggggaacgggcaaaggggaccattctctcacgtgagagaatggccccctttagatcccccaagagaacgcaaggggctctgccccttgaccccgcacattggcagccccaatctcgaagagctgcacgcgctgcgcaatcaggtgcggtgtacatggcttcgccatgaatcttctgcgattcgtgactggtatcaaccgcgccttactatcgtgaggcgcgagtgacgattgcttggcggcagactgcttgccgaatgcggcattgctggcgctcgccgcattgtggagactggaagtagacgggaattactgcgcacttctacaagataggcagagcggcagcggataatagaagagagtcaaatcgtatagcaacacccaacgcggcaacgccgcgctatgggcagtgcaatcggcaagcattgcagctcttcgagctgctcgcttgcaatgggaaacgcctttcttttggacggtcacaccgcccgttttctttctcgggaaagaaaatggggggtgtgctcctgccgcccgcaggcggcatatccctccgcgctgtgcgcggaaaatattgtgttcctgctatcgcaggaaccttatttttcctcaggattgagctttgccagcatatcgatcgccatagtatagctctcgaacccgtgtccgcggatctgggcgatgcaggcgggggcggtgacggacaggtggcggaactcctcgcgcttctggatgtcggacatgtggacctcgacggcggggatgctgacggccttgagcgcatcgtggatggcgtagctgtaatgcgtgtaagcgccggggttaatgacgatgccgtcgaacgccgtgtcggcctcctgaatggcgtcgatgatcgcgccctcgtggttggactggaagcactccacggccacaccgcggctctgtgcgtgctcatagatgcgggcgcagagggcggcgtagtcctccttgccgtagatgtccggttcgcggcggccgagcatgttcatgtttgcgccgttgatgactaagatcttcatatgagtattcctcctgtgcttgccttacgcctgtttggcggcgtgggcgcggtattccttgcttttttcaagatagagcgtggcgttggccagaatgctctctttttccttgtccgtcagctcgcgcacgaccttggccggggagccgaggatcatcgagccgtcgggcgcgttcatcttgcccgtgacaagagcgcccgcgccgatgatgcagtcgctgccgatgacagcgccgtcgagcaccgtcgcgcccatgccgacgatcacgcggtcgccgatggtcgcgccgtggacggtggcgcagtggccgacggacacatcgtcgccgatggtgaccttgttgtggatcagggcgaggtcctgaatgttgcagcgcttgccgatgcgcacgctctgcatctcgccgcggcaaacactgttgtaccagaacgccgtgccttcacccgcgacgacgtcgccgagcacctgcgcgccctccatgatgagaattttgtcatcggtggaaaggcggttaaaattcatagacatggtttttctcctttgtgagcgggcaagcgcccgcagtatcattttttacagggcaaagttgccgttgacgaacacgggaatctcgcgcccgtctttcgtcgtgccgatgatggaaaggtcggcagtgccgaccatgaaatcgacgtgcgtattggaatcattcaggcccgcggccttgagctcttccttgctcatggcctcgccgcccttgacgcactcggggtacgcctcaccgaaggcgaggtggcaggccgcgttttcgtcgaagagcgtgttgtagaagagaatcttctggtttgaaatgggactgtcatagggaacgagtgcgacctcgccgaaatacgacgcgccctcatcctcagcgatggcggctttcaggatgtcctcgcccttttccgcgtgcgcctcgacgatcttgccatccttgatgacgaagtggaagttttcaatgatgttgccgttgtgcacgagcggcagggctgcgtaaacgacgccgtcaatgccgtctctgagcggggcggtgaagacctcctccgtcggcatattggcgacgaacggaaagcctgcgcggctggtgttgtcgccgccggcccagacgtgcgtctcgggaagcttgatgttgagacttgtgccgagggagttctggtaatagagcgaggtgaagtgaagatcgttgagctttgcgatgcggcttttgagcagcgcgacgtgctcgcgccagcgcgcgacggcgtcgcccttgccgctgatgcggacggaggtgaagatcgcgtcccagagcttgtccatcgcctcctgctcgggaagagcggggaagactttcttcgcccagctcggaatggggacggatgcgacgcaccagggattcacgttcgccatcattgcgtcgtagaaggcggagacctcgtcatcgcagcgatttgcgcgcgtgatgcggtcggggtccacgccgcgcagcacctcgggatcgcgagcagagatgctgagatacgctgcgccctcggcggcgtagccgttgagaaattccttctgtccgagcgggagcgagtcaaagacggaatcgtccgcgcgcaggaagcgctcgcggctcaaatagtcgtctgaccagcgcatcacgacctcgcggcagccgacgtcgtaggcggcggaggcgcacagacgcgcgaagaacgcgcagtcgacgggacaggagatgacgagcgtctgccctttttgaacgttcaggcccacttcgatgagcagctttgcatattctctgagtttttcttccatgaagatcctcctcaaaaagaaggcggctgtgcgtggcacagccgccttttcctatcgtacgatgccatacaacatgcatcataacacagttcatgcgcgattgaaaagagtttttcgtatttttatcagattccgagaagaagcgaggcaaagttgaagtagatcatcagcgagatggcgtccacgaccgtcgtgatgaacggcgaggccatgaccgcggggtcgaagccgatcttcttggcgagcagcggcagcgtgcagcccacgaccttggctgcgaacaccgtgaccacgagcgtcaggcagatgacgagcgcgaccgtgatggtgatgggatttccgaagatcatcttgtcgacgagcatgagcttgacgaaattcgctgcggcaagcgtggcgccgcagacgaccgccacgcggatctccttccagatgacgcggaagaggtcggaaaattcgatctcgtcgagcgagataccacggatgaccgtgacgctcgcctgtgagccgcagttaccgcccgtgtccatcagcatcgggatataagccgtcagaatggcgaacgcgctgagcgcgtcttcaaagcgggcgatgatctggccggtgaacgtggccgagaccatcagaagcagcagccaggggatacgggacttgtacgtatcccagacgctcgtcttgaggtatggcttatccgtcggcagcatagccgccatcttttcgatatcctcggtcgtctcctcttccatgacgtcgatggcgtcgtcgaccgtgatgatgccgacgaggcggtcttccttgtcgacgaccggaagggcgatgaagttgtacttcgagaaggtctgcgcaacgtcctctttatcctcgagcgtggagacagagatgacatgcgtctccatgatctcgtcgatggtgtcgtcctcgtcggagaggaggatcgttcgcagcgagacgatgccctgcagcttgcgcgccggatcgacgacatagcagacgttgatggtctctttgtccgtaccggtgcggcggatacgcttgagcgcgtcctcgacggtcatatcgcgctttaagtcgacaaactccgtcgtcatcagcgcgcccgcgctgtcgtcggggtatttgagaatttcattgatgctcttgcgcgtgtcggggtccgcgtgctttaagatgcgcttgacgacgttcgcgggcatttcctccacgatgtcgaccgcatcgtccagatacagctcgtcaaggacctctttgagctcggtgttcgaaaagccgcggatcagcatctcctgcgcgtcgggatcgagctcgacgaacacctccgccgcgggctctttaggaaggagccggaacaaaaggggaatgctgtcctcgtccaaatcttcaaaaagcgaggcgatatccgcgggctccaggtctgcaagcaggtcgcgcagcgcggtatattgttttcgcttgagcagatcctcgattctttccagcagttcgtcgcgcatttcttcaaagccgaccataccgactcctcctttctgaagatagtgccaaatcaaagtgttcaggtgaattttgcgataaaaaaatcccccatatcctgcgtccggcgacgcggctatgggagcgacaatcaagaaacacccgcccctggcgagaagtttccttaccgttcaagctttagcatcacgaggcggtgaaactgcattagatggcaccttgctttcgatgcaacctgttcaaaccctctcatagtgtctccactactccgcggcagcagtccgtatccttgtggtagccttacctaccggacgatgtatgaacttatcggcactatattatgcacattttcccgtgctgtcaaccccttttccggctttatttctgtaaaaagtatgtcatggcacgcgtttctgcttccctttcgaattggactgtgctatactacataaattgaagagaaatcgacttttgaggaggtgagcatcgcccttgcagcagtatcttgaccggcaccgctttttgaaaggcatctacctgatggtcaggcggtacttcgatcatcatgtcggccgcgacagtgcggcgctcacatactaccttttgtttgcgcttttcccgcttttgatctttttgagcaacttagtcggcatcatgtccgtggatatcagcggctttctgtatgaaattcgcgcattcatcccgcaggaggcgcttgacatcatcgagcagtaccttatttacgtcggacgcgactccagcccgcgcctgctctggttctcgctcgttttttcgatctatttcccgtaccgtgcggcggcctcgctgatgggctctgtccggcgggcctacggcgagcaccggcccacgcagtttgcgcgctatcagatcaagctcctgctctacacgctgagcctcatcctgatgatcgtgctgtcgatcggcctttccgtcgtcggcgggcgggtgctgaactacgtgtcgagccacctgtcggcctatatcacgctgagcgacggctttatccgcctgtggtcgagcctgcgctttgttatcatcggcggcatcgtattcttccccatcgcgatgatgtacggccttgcgcaggagtcgcaccggatgaaccgtatctggccgggcgcggtgttctcgctcgtgatgtggctcgtattgtcattccttttttcgtattatgttgaaaacatcgcgcgctactccgtcatttacggcacgctcggcgcggtgatcgtattgcttttgtggctgtatctcgcctcggtcatgctgatcatgggggcggaattcaacagcgttttgatggtgctgcgtaagcagcacgcggcggaagccgaagagaatttaggagaaacacagaaatgaaaatcatcattgtcggtatcggtaaggtcggctacgccatcgccgagcagatgacgggcgaaaaccacgatctggtcgtcatcgaccgcgacagcgccgtgctcgaccacgttgactccatgctcgacgtcatgtgtgtggagggcaacggcgcgagcgccagcgtccttttggaggcgggcgtgcgcgaggcggaccttctcatcgccgtttcggaaaacgacgaggtcaacctcatctgctgcctgatggcaaaaaagctcggcgcgaagcacacggtcgcccgcgtacgcaaccccgagtatttccgcgatgcaccgatcctgcgccgcgagatcgggcttgatatgatcatcaaccccgaaaatgccgccgcgcaggaaatttcgcgcattctgcgcgtgccgagcgcgttcagcgtggagacgtttgcccgcggacttgtcgagctcatcggctttcagaccgaagagggcgacagccttgtcggcaagtccctcatcgactacaaccgcgaaaatcccaacagcatcctcatgtgcgcggccaagcgcggggaagaggtcatcgtgccgaacggctcgttcgtcccgcagacgggcgaccgcgtgtacgtcatcggcacgcccgcggagacgacgcgcgtgctgcgctcgatgggcagggccatggcgcccatccgccgcgtgagcatccttggcggcagccgcatcgcacagtaccttgcctgggtgctcaccgacatcggcacgcacgtgacgatcgtggaaaaggatgaggccaaatgtctcacgctcgcggaaaagctgccgaaagtcaccgtcatccacggcgacggcacgaatcacgacctgctcgagtccgagggcattttccactgcgacgcgttcatcgccgtgacggaccgcgacgaggaaaacctcctcatggcgctcacggccaagcgctacggcgtgaaaaaggtcgtgccgaagatgtcgcgcatggggtatctcgacatcgtgaacctcacgggcctcgacacggtcatctcgcccaaggccatcattgcaagccagatctcaagttacgtccgcggccttgccaactcgcagggcagcgcggtggagagcctgcactatatcctcggtggcgcgatcgaggcggtcgaattcaccgcgacgagtgccacgcactttctcgaccggccgctcagcgacctgcattttcgaaacggcctgctcgttgcggccatcgtgcacgacggcaagatggtcattccgaacggacattcccagatccatgcgggcgaccgcgtgatcgtggtggcgaaaaagctctttttgcaggacctcaacgatattctcggctgatgtgccggctgcttgcggcaaggaagtttcattatgaaccaaaatcttattcttagaatcgtgggcgtcattctctgtatcgaggcgctttgtatgatcccgccgctgctgctgagcgtgttcggcggtggtgttgaccagagggcctttttgtacgcgctgcttatctgcggcggcgtgggagtgctgctctcgctcatccgcgcggacaacgcgcggctccagacgcgcgacggctttgtctgcgtggcactgtgctggatcgcgctgagcgtgttcggcgcgctgccgtattttttcagcggcagctgcagctttatcgacgccattttcgagaccgtctccggcctgacgacgaccggcgcatccatcttcccgtcgcctgcgtcgctgccgcggggcatccaattctggcgcgcgctcacgcagtggatgggcggcatgggtatcctcgttttgatgctggcgctgctgcccaagctcagcgagggcagcgtgaacctgatgaaagcagaatcccccggccccatcagcacaaagctccgtccccgcacgggtgagacggcgcgcatcctgtaccgcatctacatcgcgctcaccgtggcggaggcgctgctgctgcgcattgcgggcctcccgctgttcgatgcgatcaccacggcgctgacgacgatctctaccggcggcttttccatccgggatgcgagcatcgcgtattatcaatcgcatcttgtcaactggatcctcattttcttcatgtttgccgcaagcgtgaactttacgctcctctacctctgcgtgacgcgccgcttccgcgaggcgctcaagagcgaggagctgcgcgtttactcgctggtcgtggtcggcgcgtcggcaatgatcgcggcggacctgatcgtgcgcacggggcgcgacatcggctcggccatcgagaatgcggcctttcaggtaacaacgctcatttcaacgaccggctactgcacggaggattttgacctctggccgcagttctgccgctgtatcctcgtgctggtgatgtttttcggcggctgcgcgggctctacggcgggcggcgtcaaggcctcgcgcatcgtgcttttgtgcaagtcgctgcggcgtgatctgcggcgcgtgatgcactcgcgcgaggtgcgccccatcacgctcgacggacatcgcgtgacggaggagaccgtctcgtccgtttcggtcttcttcttcgcctatatcgcgatcatgctgctcggcacgctgattttgtcgcttgacaacatcgactttaccgcggcgttcaccgcctcgctcacggccatcagcaacgtgggcccgggccttggcgcagtgggaccgacgtgcaacttcggcttcctctccggcatcagcaagctcacgatgagcgccatcatgctgctcggccgtcttgagatcatgccgctgcttgtcctcttaatgccctctgtctggcgcagaaaataaaagaaaatcaaaaagggtggatcgcaattttgc

SEQ ID NO: 10147 - DNA, 38343 bp, Unknown
  gut microbiota DNA sequence
aatgacgacgatccatgtcgcccagcggtcggatagaccgacggtcttggccttgtccgcgtcggcggactggacaaggcggatcatgcgctggatggagctgtcctcgccaacctttgtggccttcatctcgaaagcgccgaactggttgaccgtgccggaggagacctcgtcgccgacgcccttgtcgaccggcagcgattcacccgtcataacggcctgattcacagatgtctggcccgatacgatctctccgtcgacggggatagtctcgccgggcagcacacgcagcaggtcgccgaccttgacggcctcggcggggacggtcttctcctctctgccagagatgacgcgcgcggtctgcggcgtcaggtggacgagcttttcgatgcccgcgcgggcgcgggcgacagtcagctcttcgagaagaccgccgagctgcatgatgaacgcgacctcacccgcggcgaagtcttcgccgatgcagaccgacgcgatcagcgcgagcgagacgagcacgtctgccttgatgtcgaacgccgtgacaaggccgatgacggcctctaaaataatggggatgccgcagaggatgatcgcggcccacgaggcgtcgaacggcaaggggacgagatcaaaaatgctgacgatcagcgcgatgccggagatcacgagcagtgtgatatctttttttgtgccgcccagctctaaaaaatgctccagcttttccattgccagtttcacggaagtgactcctttctgtaccatagggggtatgggcttattatacatatgggggtataggttataaagcctgcaaaaagagagacgcagcacaaaactgcttctcttctttcgtgcaattctaccgaaaacgggcgcgtgagagggtttatctcctgctcagcccatgttcgaaaagcgctcgaccgccttcgtaaagttctcgatcgttttgtccgcgtcgccgtgctcgatgccgtcacgcacgcagtgcttgatgtgcccctcgagaacgaccttgccgcagccgtgcagcgcggatttggccgcgttgatctgcgcaagaatatcctcgcaggggacgtcctcgtccaccatgcggtcgatggcctgcacctggccgatgatctttttgagccgacggtgcagattgtcggcgtccatacactgtttcatcgtttgacctccatacctgttggggtatctgcattgtacactctgcgccgcgattttgtcaatttgcgctgccgcgccggttttgtgcgcctttggcgaaaaaatggcgttttgcggcaattttctcttcctccgcggtgttgcagagcaaaaaaaagtgtgataggatatattagaaatagtatgaccggcggccatattgccgtcggagcgattttgaggtaaccgaatgaagaaaagcgacaaaacacccaagcagacccaccgccgcgcggacccgaacgtcatgggcctccacgcggatgtggtggagcagaatatcaccgagacgctggaaacgaactacatgccctacgcgatgtccgtcatcgtctcgcgcgccattccggagatcgacggtttcaagccctcgcaccgaaagctcctttacacgatgtacaagatggggcttctcaccggcgcgcgcacgaagagcgcgaacatcgtcggacagacgatgcgcttaaacccccatggcgacgccgcgatctacgacacgatggtgcgcctttccaagggctacggcgcgctgctgcacccgttcgtcgactcgaagggcaacttcggcaaggtctattcgcgcgacatggcgtgggcggccagccgatacaccgaggcgaagctcgcgcccatctgcgccgaactcttccgcgacatcgactccgacaccgttgattttgtcgacaactacgataactcgatgaaagagccggcgctgctgccaacaacgttcccgaatatcctggtctcggccaaccagggcatcgcggtcggcatggcgagccagctgtgcggctttaacttgggcgaggtctgcgacacgacgatcgcctttttgaaaaatcctgaggtgcgcatcagcgagacgctgctcgcgcccgacttcccgaccggcggcgaggtattgtacgacccgcgcgccattgaggacatttacaacaccggccgcggcggcgtaaaggtgcgcgcccgctggcgctacgacaaaaaagaaaatctcatcgaaatttatgaaattccctacaccaccacgaccgaggccatcatggacaaggtcgccgaactcatcaaagcgggcaaggtcaaggaaatttccgacatgcgtgacgagaccgacctctccggcctcaagctgacgatcgacttaaagcgcggtgccgaccccgacaagctgatgcagaagctcttcaaggcgacgacactgcaggatacggcgtcgtgcaacttcaacgtcctgatcggcggcatgccgcgcgtgatgggcgtgcgcgagcttttagacgagtggtgcgcatggcgcaccgagagcgtcaagcgccgcgtgtacttcgtgctcaaaaagcggcaggacaagctgcacctcttaaagggccttaaaaagatcctgctcgacatcgacaaggccatcaagatcatccgcgagacggagaaggaggccgacgtcgtgccgaacctgatgatcggctttggcatcgaccagatccaggcggaatacgtcgccgagatcaagctgcgcaacatcaaccgcgagtatatcctgaagcgcgtggaggagacggcatcgctcgaggcggagatcgaagacctcgaggatacgctcgcgcgcccgtcgcgcatccgcaagatcatcgtcagcgagcttgaggatgtgcgcaaaaagtacgccgagtcccgccgcaccggcatcctctacgactatgccgaggacgccgagagcgaggaggacgccatcgaggactatcccgtgacgctgtttttgtcgcagcacgggtactttaaaaagatcacgccgcagtcgctgcgcatgtccggcgagcagaagttcaaggaggacgacgcgctcaacatgagcgtggagagctccaacgccgccgagctgatgttcttcaccgataaggcgcaggtctacaagacgcgcgcgagcgactttgccgacggcaaggcgagccagctgggcgattacctgcccgccaagctcggcatggacgagggcgagagcgtcatgggcatggtgcttcccggcgattacagcggctatatgatcttcttctttgaaaacggcaaggccgcaaaggtcgagctgtcggcctacaagacgacctcgaaccgccgccgcctgaccggcgcctacagcgacaaaggcccgctcaaggcgctgttgcatctcaaggaagaccgcgagatcgccgtctattcgacagagccgcgcgtgctgatcgtcaacacggcgcttcttggtgtgaagacgacgcgcacgacgcagggcgtcgcacttttgacgctcaaaaagaagtacgtgctcgacacggtgcgcttcccggaggagaccggcatcaccgaccttgcccgctaccgcggccgcagcattcccgcgacgggcgcgctgctcaagacggaggacagcgacgacaagcagctctcgctgatttgacgtcggaagcctgagagaaacatgtgaggggagaaaatttatgaaaaataaaaaactgcgcgagcaggtgaaaagctatatcattgtcacgcttgcctgcgtgctgtatgccttgtcgttcgattggttctatgcaccgaatggctttacggtcggcggctttacgggtatttcgcagatcattaacttttttgcacccattctgccggtcggtacgatggtcatcgtgctcaatgtgccgctttttatcgtgggacttaaaaaattcggcttcgcatttttgtgcaagtccatctacacgatgacgctgagctccattttgatcgacgttgtcgcggccatccacgagtttgcgcccatggacccgctgcttgcgtgcctgtacggcggcgtgacgctcggtatcgcctcaggcctgctgttccgcgaggagacgacgacgggcggctcggagctcggcgcgtggatcgtgcggtcgcacgttgaacggctgtcaatcggcaacatctgcctcggcatcgacctgacgatcattctgatctacgccgcggtgttccacagcctcaacaacgcgctctacggtgcgctggcactctacatcacgacgaaggtgctcgatctggtcgtctacggtcagaacacggcaaaggtcgcctacatcatcagcgacaagtatgagaagatcatgcaggagatgctgcggcgcgacatgggcgtgacgctcctgaacggcaagggcggctacacgggcgcggagcgtccgctgctgttctgcgccatccgcaagaaggaagcggtttcgatcaagcgctatatcaaggagctcgaccccgacgcctttttcatcgtctgcgacgcgagcgaggtgctcggtgagggctttggcgaatacgacccgcagggcctctaagaatatcaggatacaaggaggaagcaggaatggatcttacgacggtggagaagaatctcaaagagcgcggcttcaaggtgtctgccttcgcgacggcgaaggaagcggcggactatctgaacgcgcagatcgacggagagagcgtgtcgttcggcggcagcatgacgctctctcagatggggctttttgaaagcctcggcaagcacaacaagatgttcagccactggaacgtgcccgacggcatgaacgctgccgaggtgctcaaaaacgcctcgacgtgcgacaactacctgctctcggccaacggccttgccgaaacgggcgagatcatcaacatcgacgggacgggcaaccgtgtgtcctcgtcgctctatggccacaagagggtgtggttcgtcgtcggcagcaacaagatcgcgccgacctatgacgaagcgctctggcgcgcccgcaacattgctgcaccgaaaaacgcgcagcgcctcggcgtgaagacgccgtgtgccgtgaacggcgaccgctgctacgactgcaagagcccgcagcgcatctgccgcggtcttgtcgtgctgtgggaggccatccgcagctgcgagaccgaggtcgtgctcgtcgacgagccgcttggctactgagaaagagagatttcgcccaaaaggagggagcgccgtgcgcaaaaagttcattccgctttcgctggcgctctgcctgacgctctcgggctgcggcggcaacgtcgtgcttgagcgttcctacagcgtctccacgccacacagcgaggtctactgggaaaacgagggcgcggacaccctgcgcgccgacagctatcaggacctcgtcaatgcgctgctgctgctccttggcgagcacagcgaggaaggcgttgtgcgtatttacagcgaggaagacgccgcggccatggccgagcaggcctgtaaggaggtgcaggaggagacggcactgggcgcgtatcttcttgactacatcagctacaccgacacgcaggagcgcgcctattacgagatgcacgtgcgcctcggctaccgccgcacggcggaggagcaggcgggcattgtcaccgcgacgagcaccgaggcgctgcctgaccttctgcgcctgacggcgcgcgagggttcgctcagccgtatcgccgtgcgcttcacgtacttcaccgcggaccgtgacggcatccgcgacatggtacgatctgtgcaggaggaggtcgacaccggctttactgagccgtggcaggtgaacttctaccccgataccgacgatgtcggcattgtcgaggtcgtgttgcgggaagcgtaaaaaaggataagaaaagagcctgaacaaagcgttcaagctctttttgtgctttataggggagagagaaaacgttaggagaggatcgcgcggtcgttggcgaactcgtcgccgctggccttcgtgaactgctcaagaagatcgggcacggtcagcttcttcttctcctcgcccgcaatgtcgaggatgacgtggccgtcgtgcagcatgatgaggcggttgccgtactgaatggcatcgcgcatgttgtgcgtgatcatcagcgtggtgagctggccctcgcgcacgatgcggtcggtgagctccatgaccttggcggcggtcttcgggtcgagtgccgcggtgtgctcatcgagcagcagcagcttggggcgcttgagcgttgccatcagcagcgtgagcgcctggcgctggccgccggagagcgtcgagaccttcgtggtcaggcgggactcaaggccgaggccgagaccgccgagcagctcgcggtactgctccttttcctccttcgtcacgccccaggaaagaccgcggcgctggccgcggcgggcggcgagggcgaggttctcttcgatccacatcgagggggcggtgcccatcatcgggtcctggaacacgcggccgatgaatgccgcgcgcttgtgctcgggcaggttcgtgacgtcagcgccgtcgatgatgaccttgccggagtcgacaaagaacgtgccggcggtggcgttgagcatcgtggacttgcccgcgccgttgccgccgatgacggtgacgaagtcgccgtcgttcagcgtcagactcaggccgttcagcgcagtcttggcgttgatggtgccggggttaaaggtcttataaagttccttgagttcaagcatggccgttgcctccgttctttgcgctctggggctgcaccttgcggcggaacatcttgctcttccagtaggggatggcgaggaagaccgccacgatcagcgccgtgatgagctttaagtcgttggtgttcagaccgagctgcagcacgatttggagcacgatgtagtagatgatcgcgccgatggaaacggccagcagcgtgaggccgaagttcgtgaagatcttgccgaagatgacctcgccgatgatgacggcggcaaggccgatgacgatggcgccgcggcccatgttgatgtcgctcgagccctgatactgcgccagcagcgcgccggagagggcgacaagaccgttcgagaccatcaggccaagcacgatatttgagttcgtgttgatgccctgtgcgcgcgccatgtgggggtttgcgccggtcgcgcgcagcgagctgcccttctccgtgccgaagaaccagtacaggatggcgatgaccgcggctgtgaagagaagcagcagcggcagaggattgttcatcgagagctcgcgcacatagcgctgcgaaagcagcagcggatatttatcaacgctgagtgcctggtttgccttgctgtccatgatgcgcagattgatcgaatacagcgcaagctgcgtcaggataccggcgagaatggccggaataccgcagtgcgtgtggaaaagaccggtgacgaggcctgccagcataccggcgagcatcgcgcacagcagggcgatccagggattgaagccgccgcggatcagcatgacgcagacagcgccgccggttgccagcgagccgtcgacggtcaggtccgccacgtccagaatgcggaaggtgatgtaaacgccgatggccataatgccccaggcgagaccctgtgcggcagcgccgggcagggcgttcatcagcgacgaaagaaaactcatgggttctctcctcctatctcttgttgaggcaggaacgggctaagcccgtccctgcctgcggggggatgtgatcagattactcttcgatggcagtgtagccatcgagaggctcgatgccgagcgtctcgcacatggaggcgttgtacttcggggtggcctcggtgaactcgatgggcatctcggagatgtcggcctcgccggtcaggatcttggcggccatcttaccggtggtcacgccgaggtcatagtagctgatggagagggtcgcgacgccgcagcccttgcagatgccctcttcgccgcagatggcaggcacgcccgcgggaacaagaacgtttgcgatggcctcggtgttggaagcggcggtgttatcggtggggacgtagacaacgtcggagtagtcggcggcggactgggtcacggaagcgacgtcgttcgtgtcagtgaaggcgaactcctgggtctcaatgcccttgtcggagaggcacttggcgacctcttcgatctggtagcgggagttgggctcggcggagcagaacagcaggccgaccttcgtggcatcggggaaccattcggtgatcatgttggcctgagcctcgaggtcagcgaggtcggaggtgccggagatgttgccgccgacagtgccgttgaagtcgtcaatatcaagagcaacgccgtaagcggtgatggaggtgccgaggatgggaatgtcgctcgtggcggcagcggcggcggtcagcgcgccggtggcgttcgccaagatgagatccacaccgtcggaaacgaagccgttgacgatggtagagcagttggcgctgtcgccggaagcgttcttgttctggaattcgacctggccgggcagtgcctcattcagcgcgtcgatgaagccctgggtggcagcgtcgagtgcctcgtgctgcacgagctggcagatgccgacggtgtacttcgtgccttcgccgtcggtgctgccctgattgtcgtcctgtgcggccttatcgccgcagccggtcagacccacgctcaggctgagaacgagggcaagagaggcaacaagagaaatgatgcgtttggtgttcatgcttttttcctccaatttttatttctcgctgataacaataaaacccgctgtaaggacttgtggtccatacggcgggttccttgactcaactctttttgaagtgaccttcaagtgttggttcgaaagacctttcagctacgggcatcacaaatcgctcttaccttgtccttaaagtaaaagtaagagtaatagtaaaagcgatatgcaacgttgcttacaacagtcttcatcactcaagctccaagtcctttcaaaaaggatggtagtaatatagcacacacaaaaatggccgtcaatagcatttttatccaaaaaacaccatttatgtagaaatttggcagggcacagcaccgaaaagtatgctatttgcattaggaaacggcatgggtgtgctcgcaaagctcattgatcttctgctgtaagcccttgaaatcctcaaacgactcgggcctgcggcgcggatcgcgcagcagtgccgcggggtgatacacggccatcatctgaaagccgttcttttcgaaccactgcccgtgctcacgcgtgatcttgaagtcgggcttgatgatgcgcatggccgcgatgcgtccgagacagacgatgatcttgggccgcagcagcgcgacctgacggcgaagatacccgatacaggcgtcctgctccacgccgagcgggtcacggttttccggcgggcggcacttgacgatgttggcgatatacacatcgtcgcgcttgaggccgatgatctcaagcatgtcgtcgagcagatgaccggccctgccgacgaatggcacgccctgcgcatcctcgttcgcgccggggccttcgccgatgaataaaacttcagcattctgattgccgacgccgaagacgacgttcgtgcgcgtctcccacagcgagcattcgcggcaatttttgcagtcgtgttccagagcttcccaggtatcaggcatagttgtgttctcctgtcgattttttgtcattttaccatgattcgccgcgctttgcaacgcgcgcggcacgcatttttccatctgcgcgggccatactgaaaaaaacggacgcggaggaaggaatggatcatatctggtactggtttgcttacagctttttgggctattgcttggaaaagctcttcgccacagcgacaagctcgagccaccggctgcggcggtgcttcgtgttcctgccgctgtgtccggtgtacggctttgcaatggtcacgattttattgctgggggcggaaaagctccccggcgcgtgggagcagatcttgctcggtatgctcgcggcgacggcgatggaatacgccgtgcactggggctatgaaaggctgtttcaagtgcagttttgggactattcttcgaccaaatgcgacgtgaacggccgcatctgcctgccgttttccatctgctggggaatattgtcgatgctcgccgtgcggtatgtgcagccggttctggagggctatgccgcactgcttccagagtgggccgcggcgctggcggtgttcctcgtcacgcttgacggcatcctgaccgcgcgcgtcctgctcacgacgcacgatatcgacgctttgacgccgcgaacgttgctccgaagtaaaagaaggcgaaccgcctgacgggtcgccttcctgactttattcataaatgtttttcgatccagctccacaggtcgttatagaccacggcacggcagtcttcgttcagaatctcgtgccgcaggcccttgtagagcttcagctccacgtcgcgcacgccggcgcggcggaaggcctcgtatgcgcgcctgacgcccttgcccatctcgccgacagggtccttgtcgccggagatgaagagaatgggcgtgttgcggttcatcgacgcgatgtttttcggcgtgctgatgaagcggatgccgccgagcatctcgtagaagaggccgatgctcgccttctgaccgcagagggggtcggcaatgtaggcgtcaacattgttgtcgctcgtgctgagccagtcgacctccgtgcggttgggcgcgaacgccttgttgtaagcaccgaaagccagcgcctccacgcgcggagagtgcgccttgaagccgtggcgcttgcccgcggccttggcaatggcgcgcccgcccgcgacgatcgcgggggactggtgccccgtgcccatgatgatggcggcgtcaacggtgccggggtagcggatgagataggtgcgcgtcaggaacgaacccatcgagtggcccatgagaaaatagggaacatcgggatatttttccttcgtgcggcagcgcagggcgtacatgtcgtccacaacatgcttccagccgtcgcacgggccaaaatagagcgtgtcggcgtccttctcggcggaaaggccgtggccgaggtggtcgttcgccacgacggcaaagccgtgctcggtcatgaattcggcaaacggcgcgtaccgcatgccgtattccgccacgccgtgcgcgatctgtaaaacgccgatgatctcaccgctctcgggcatccactctgccgcgtgaatgcgcgaggagccgtccgacgaggggaagtaaaattccctgcaaatagccatggcgcaaaaccctcctgcatgatataatcttattcattagtatagcataaggcggtccaaatgaacaagggggtatcttcatgcagcggtatattttggcgctcgatcaagggacgaccagctcgcgcgccattctgttcgggcgcgatggcagtgtcggcggacacgcgcagcagccgtttcggcagtattatccgcagcccggctgggtcgagcacgacccgaacgagatctgggagagcgagcgcgccgttgccgcgcaggccttgcgcgaatcgggccttggccgcgcggtcgcggcgatcggcatcacgaaccagcgcgagacgacgattctttgggatcgcgcgacgggcgagcccatccacaacgccatcgtctggcagtgccgccgcacggcggacatcgcggatgctcttcgcgaaaagcgcggcgtgagcgagcttgtggccgagaaaacgggattgcacatcgacgcctacttttccgcgacgaagatcaagtggctgctcgaccacgtccccagcgcgcgggaaagggccgagcgcggcgaaattttattcggtacggtggagacatggctcatctggaggctgacgggcggcaaggtccacgtgacggactactcgaacgccagccgcacgatgctcttcaacatccacacgctttcgtgggatgaagagctctgcgcgctgctggacattccgatgaacattctgccgcgtcccgtgtccaactccgaagtctacggcacggtggcggagggcatcgaagggctcgaagagctcgcgggcgtgccgatctgcggcgcggcgggtgaccagcaggcggcgctgttcgggcagggctgctttacgcgcggacaggcgaagaacacctacggcacgggctgcttcacgctgatgaacgtcggcggcgcgccggtgcgctcgcgcgcgggactggtgacgacggtgggctggagcttaaacggcgagacgacctacgcgctcgagggcagcgtcttcaacgcgggctcggccattcaatggctgcgcgacgagctgcaagtcatttcgagctcgcacgagtgcgacattctggcagaatccgttcccgacagcggcggcatttacttagtgcccgcgtttacgggcctcggtgcgccgtattgggacatgtatgcgcgcggctgcgtcgtgggcatcacgcgcggcacgacgaaggcgcacttcgcccgcgcagtgctcgaatccatcgcctatcaggtcaccgacctgatgaccgccatgcggcaggacgccggctgcgagatctctgtcctgcgtgtcgacggcggcgcgagcgtcagcgatttgatgatgcagtttcaggcggatttgctgcgcattccggtcgaccggcccgcgatggtcgagacgacggcgtttggcgcggcatcgctcgcgggtctggccgcgggcgtgtggaaggacttggacgagctgagcactctccggtgcagcgagcgcgtcttcacccccgagcgggcgcagtacgagtgtgaggagctgtaccgcggctggaagcgcgccgtcggctgcgcgcagggctgggtcgagaaaaagtgaacgctgtcacaaaaaatttatacttttgtcgtaaattatccattgaaatgaaagccccggtagcttatactgtcaataacaaacccgaggacacggtttgaaaggagaaagtattatggcatttttcgataacttcagcaagaaggttcaggacgtcgcgttcgtggcgactgagaaggcacagcaggtcgcggccgttgccggtgaaaaggcaaatgccgttgccgataaggccaagaccgagtatgagatggcatctgagcgccgcagcatggacaagaactaccgcgccatcggcgagtggtatgtctccacgctcgagggtgacgcacccgaagcggtcgccgatatcgtcgcggccatcaaggcctctcaggagaagctcgccgcttacgaggccgccaaggctgaggctgccgctgccaagaaggcgcaggagcccatcatcgaggtgaccatcgagaaggacgcggaagagaaagcgcctgctgcggaggaacccaaggagccttccgaagccgaggagaccaaggaggactaaatccttcccaatgtgcggcgcagctctggctgcgccgcttttttccagcttagggcaaatctggtctgcataatttgttttgttttgactatatgaataataccaggacgggatataatacggccaacaaccaaaacaaaggagcacccgatcatgaacgataaaaagatcagaaagcttgtccttgccgcactgcttgcggcgcttgtctgcgtggcgacgatggtcgtgcagatcccctctccgatgcagggctatgtgaacctgggcgactgcttcgtgctgctgtccggctggctgctgggcccctggtatggctttgcggcgggcggcatcggctcgatgctggcagacattttcctcggctatgcgcactacgctccgggcaccctggtcatcaagggcgtgatggcgctggtcgctgcgctgatgtatgaaaagatgggccgcactgcgacctcccgcatcgccggcggcgttgtgagcgagatcatcatggtgctcggctatttcggctacgcttctctcctgctgggcaagggccttgccgctgcggcaagcatccccggcaacatcttccagggtgtggtcggcctcgtggtcggcgtgctgctggtcacggtgcttgagcgcgccaaggtgacggagaagctggcataataaatttctaaagaggtgtcagatcatggcgggaatcgtacatgaggtagaaaatcatcgtctggtggaacaggcggagcaggaggcggcagaggcggcgcgcgagcttgcggagatcgcacatctgcgccgcggacagatcgtcgtcatcggctgcagcacgagcgaggtcgtgggccatcaggtcggcagctggtcgacgccggaggtggcggacgccatcttccgagggctctccagcgtattttcgcccatgggcgtgtatcttgccgcccagtgctgcgagcatttgaaccgcgcgctgatcgtggagcacgaggctgtgccgaacggcgagatcgtcaacgtcctgcctcagcccaaggcgggcagctcgtttgcgacggccgcgtacaaagcgttccgccatcccgtggcgctcgaagagatacacgccgacgccggacttgacatcggcggcacgctgatcggcatgcacctcaaaaaggtcgccgttcccgttcgcttgaagcagaaccgcatcggtcaggccattgtgctggccgcgcggacgcgtcccaaattcatcggcggcgagcgtgcgatctacgatgagtctctcaaagacggttatcctgatttcaccgattgaaccaacacagcaacagaaaaagcgcgatgcccgatctcgggcatcgcgctttttcgtcggttcctatcaaatttttcaggcgaggaagcccttgagaatcgtgtcttcggcctcctcctcggtgagaccaagggtctggagctttaagagctggtcgcctgcgatcttgccgatggcagcctcgtggatgagctgcgcgtcggtcgaattcgcggtgatggcggggatggattcgatcgtggccttgcccatgatgatcgagtcgcactgcacatggccgaagcacttgctgttgccgacgaccacggggtggaagatctgcttggactcatcctgcgcgacagagcgggagatgacgcggccgcgcgcatcttcgccgttgagctcgatctccatgtcgctctcggcgtgctgtttgccgtgagtgagaaggcgctcggtgatgacggcctcggcgtccttgccgcagacgatcttcgttttgcgcacggtggagtcgatgccgcggatctgcacggtctccatctggatgctcgcgccctcgtcaaggtagacgatcgtggtggggttcatcacgcgagaaccttcgccgtcgccctcgccgtagtgcttttccacatagcgtacgtgggagtttttggagacgtagaacgtgtggacgccgtcgtggcggctctcgttgcagccggagttgtggatgccgcagcctgcgacgatgtcgacgtcgcagttttcgccgacgtagaagtcgttgtagaccatttcggtcacgccgctcttgctgatgatgacggggatgtggcactgctcgcccttcgtaccgtccttgatgcggatgatgatgccgcttttaccctcgggctgcgggtcgatggcgatgtgctcggtggactggcgcgcctcgcatccgctgtcctttcgaatgttgaacgcaccgacgggcttgcccgtcaggtcggcgatcttttcaagcagggaagcgtcgatttcggtgatcatattgtgtactacctccttacttgttcagcaccgggcaggagcccagcgtgtccgccatgatgagcgggaaaatttcttctgtgctgccgcggtgcttgagttcgccgccgcccacgacgacgatctcgtcggcgagctggatgatgcgctcctgatgcgagatgatgatcatcgtcgcaagctcgcgctggcgcagctgctcgaacgtctcagtcaggcgggcgaagctccacaggtcgatgccggcctcaggctcgtcgaagatcatcagctcgctgccgcgggcaaggagcgttgcgatctcgatgcgcttgacctcgccgccggagagggagacgtcgacctcgcggtcgagatagtcgttggcgcagaggcctacctgcgtgaggtacttgcagcacttgtccttgctgaggtttgcatcgcccgaggcgatggtcagaaggtcgcgcaccgtgatgcccttgaagcgcggcggctgctgaaagccgtagctgatgccgagtttcgcacgctcggtgatgccaaggtgcgtgatgtcctgaccgttgaagaggatctggccgcccgtcggcgtgacaaggcccatgatgaccttggcgagcgtcgtcttgccgccgccgttggggccggtgaagacgatgagcttgcggtcaggaatgtcgatggaaatgtcgtttaagatcgtctgctctccctcaggggtggagacggtataggtgatgtgcttcagttccagcatgaaaagaagacctccttacagaaactgccattgcttgtctttagtatggaccggatggcagagaatgaaaagttgcaaatgcaacaaaatgcacaaaaatacaaaacaaatatagtttaccagaaaaaatgggaaaaatcaacgagagaggtgcgattttcaagattttctttttccctgcggggaataggaaaatatcggctctgcacgcctgaaaaatgcccgcataggatagagacgagaaccgttccggaaaggggaagaagaacatgacggaaataaaaaagccctgcgcctgcgactatgaagcatgccgcgaggtgtggaagcgcgtcgcgccgggggaggacccgtacccgatggaggacaatgcgaacacacagatgagcgcacaggatagcgagctcacgctcccgggcgcggaggcggacccttgctgcatgggcagcgaggcaagcgtatcggtcgaggtgctgcagggctttctgcgcgaggaacttggcgacgcgcaggtgtacgcgtatctctcctcatgcacgccgcggcgcgagatggcgcgagccttccgcgcgctgagcgaggacgagaagcgccacgcgcgcgatctggctgccgcgatctacttaatcaccggcaaggcatactgcccgcgcgtgtgcgtggagcagccggatacgtgcgacctctgcgcgctgctgcgcagcctctaccatgcggaggcctgtgcgggctacaattacgcccgcgcgggagaggagacgctggacctgtgcctcagcaagctgtttgcggcgatgagcgaagacgaataccgccacgcagagctcttgatgaagctcctcgggcggaagatgaacgtctgacgggcagaaaaaagcggagcaggagaaatcctgctccgctttgctgtgcttgggtcattcgatcgagatgatatagtaatagaccggctggccgccgcagatcagattgacctcggcatccgggcacttgcgggtgaaggcgtcgcacgccttgcgcgcgtcctcttcattcacatcctcgccgtagaagacggtgatgaactccgcttcgcgggacgctgcctcgtcggagagcccgtcgagcagcgcggagacgtcgcggtcggtgccgagcagcttgccgtccagaagtgccagataatcgccctcgtggatgtcgaagccgtcaaaatcggaattgcgcgcggcgtaggtgatctgcgcggtggagacgcactgcgcggcgtccgtcatcgccttggcgatggtgtctgcgtcgctcatgtcgggatcgacggccatcatcgcgctcacgccctgcgggatggaggcggttgggatgaccacgacggtcttctccgtcaggccgatgcactgctgtgcggccatgatgatgttcttgttgttcggcagcacgaaaacggtgtgcgcggggacctttttgatctccttgaggatgctctcggtcgagggattcatagtttgtccgccgctgatgacgccgtcggcgccaaggtcggtgaagacgttcgcaaggccctcacccgcgcagaccgcgaggaagccaaagtccttttcgggctcggcttcaccggcgttttcgtgctcggcggcttcgagctcctgctcgatggcctcaaggtcgtcggtggactgggccttgccgccggcggcgagctgctgggcctgcgtgcgcatgttctcgattttcgcgagctcgagcgtgccgtacttctgcgcctcggtcagcgcctcgcccggaatgtcggtgtgaacgtggactttgaaagcctcgtcgtcctcgccgatgacgagcgaatcgccgatgccgtcgaggaagcggcggaacggctcaatgctgcgtccgctcttgcggacgatgaacacggtgtcgaacgtgaaggtgatgtcctcttcgttgagcatggcaaaatcggccttctcctgtgcattctcttcggtgagctcggggcgctcctcgccgcgcagggcgctgagcataccgccgagaatcagcaggaagcccttgccgcccgcgtcgacgacgccggcctttttgagaacggggttcatgtcagtcgtctgcgcgagcgtgatctcgccctgggcgatggcctgctcgatgacgtactcgacgctgttgtgctcctcggccgcgttcacggcgcgctcggcagcgagacgcgaaacggtcaggatcgtgccctcggcgggcttcatcacggcgttatacgccgcggcgacaccctcctgaagcgcggcggcaaacgccgcgccgtcggcctccttgcagcccttgagctccttggagatgccgcggaagagaagcgacagaatgacgccggagttgccgcgcgcgccgcgcagcagcgcggacgccgtgacagaggcggcctgatcgaccgtcgcgggctcgatcttcctgagctcctgcgccgcggtctggatggtaagactcatgttcgtgcccgtgtcgccgtcgggaacggggaatacattcaaatcattgatagcttgctgtgcctgtgcgatggagacggtgccgaagagcagcatctccttgaacatggcaccattgatggtatcgtgcataggatgatgtcctcctcggtttttagagattcatgctgtcgacgcaaacgtcgatgctgcggatgcttgcgccggtgttttcgctgaccatatagcgcacctgattgatgatggagcggcagacggcggcgatgttcacgccgtgctccacaacgatgtgcagctcgatggaaatgtccccttcttcgtggggaatgatgcgcacgcccttgctcatcgcctcgcggcgcagcaggtggacgagcccgtcggtcatcgagcggtaggccatgcccttgacgccaaagcagcttgtggccgcggcgccggtgatattagacagggctgcgtcggaaatgctgacttcgcccttttcggtttgtagcctgatcatggaagatactcctttctccctggtcgatatgatatgaccatatcattatatacgaagcagcgcagaataacaagagaaaatattttgcgtaaaatgcgggaaaatgccaaggactctattgaaaataaacggaaattcacgtattatggaaactaacgagttcattgcgcccgctttgggcgctgcggagggataaacatgagagttatcacaggctcggcgcgcggacggcggctgggcgagctcaagggcatggagacccgcccgacgaccgacaaggtcaaggaaagcatttttaattgtatccagttcgacgtggaggatgcgcgcgtgctcgatctttttgcgggcacggggcagctcggcatcgaggcgctctcgcgtggggcaaaaagcgcgctttttgttgacaagcgtgcagacgcggtcaagctcgtgcgcgaaaatctcgcgctgtgccatctggaagaaaacgcgcaggtcatctgcggtgattcgctcgccgcgctcggcacgcagagcgggaggttcgacatcatcttcctcgatccgccgtacgaaagcggacttttggagcaggcgatggaaaagatcgcgcagtttgacattttatcaccccatggtataatggtcgcggaaagtccgcagaaccagacgcttcccgagcttcccgcgccgtacggactgtatcgcgagtaccgctacggcaagatcaaggtgagcatctatcaccgcgcggtggaggaagaggcatgagaatcgcagtgtttcccggctcgttcgaccctgtgacgatcgggcatcaggacattatcgcgcgcgcatcgaagctctttgaccgcgtgtatgtgtccatcgtgccgaacgggacgaagacgcacccgatgttcaccgacgagcagaagctcgcgctcatgcgcgcgagcgtcgaggagttccccaatgtggaagctgagctcggcggcggacttctgaccgactacgcgctgcgcaaaaacgcgcagtttctcgtgcgcggcgtgcgcaacagcgtggattttgacgccgagcagcagctttcgctcatctatcgcgatgtgtcggacggcgcgctcgaaacggtgctgctggtcgcggagccgaagtatcagcacatcagctccacgatggtgcgcgagatgatcaaatacggacaagaccttgaaaaatatatgccgctgcgcgcggcggagcttgtgaaaggatggagagaagaccatggcgaacaatgatgtgcagcatcttttggatatgctttacgagatgatcgacggcgcgaagaacgcgccgctgacgagcgacaagtgcattctgaaccgcgacgaggcgctcgacctgctcgacgagattcgcgcccagcttccggtggagctttcccgcgcgcaggagctcatccgcgcaaaggaggactatgtcaaggccgccaagcgcgacgtcgagcgcatgatgcagcaggccgagcaggacgcgaagaataaggtctccgagaccgaggtgctcggtatcgcccgcgaaaagagccacgagatcatcaaaaaggccgaggaccgctcgcgcgaaatgtaccgcgtggccaacgagtacaccgaggatgcgctgcgccgcaccgaggaggccatccagatggcgctcgaggaggtcaagcagtcccgcgtgcgcttccgcgccgcctctgccgagcagatgcagaagcgccgcgaggagctggcgcagtcagctgaaaagcagacgcagaacggataaaattttgtcaaaagtgacaaaaaccgacatgatcggtagacataatctatatttgggcatagcataaggggccgccacaagatattgtggcggcccttttttaaccaaaaacaaagtagaacatgcgttttaaaaatacggtgcactggccgaattttcacaggaaaaagcggtaaaaggcttgaaatctcagggaaatatctgcttgcattttttatgtgaatctcgtatactcaaaacaagggtgggggaaagtggtgtatcataccatgaaaatggcttactttcccacataagcatcagatcggacgcggtacggctttttccaaaatgaagaaaaggccgcgcttttgtgccctctgtatgcgaaaatgcacagaaaaagggggtcagccgccgtgacgggtcagtatcagcacacgatcgacgccaaggggcggctctttatccccgcgaagctgcgcgaggagctcggcgacacgttttatgtcaccatgggcatggactcctgcctgagcatctattccgacgcctcctgggcgcgcttcaccgaaaagtttgaaagcctgccctacacgaagaccaaggccatgcgcccgctcttcgccaacgccgccaagtgcgagcccgacgcgcaggggcgcatcgtgctgccgcagaagctcagagcctacgcccaccttgaaaaagacgtggtcgtgatcggtgtttcgaaccgcgccgagatctggaatgcggagaagtgggcagagatcgaggccgaggagctcaatcccgagaatctggccgccgtgatggaagagctgggattctgatatggaagagaactacggccataagccggtactgttgcacgagtgcctcggcgcgctcgccatcaagcccgacggcatctatgtggacggcacgctcggccgcgccggacattcgctcgagatcgtgcgccgcctgacgacgggccgtctcattgcgcttgaccgtgacgagaccgcgatcgaagcggcaaaccgccgcctcggcgattatttggacaaggtcacgctcgtccacagcaatttcagcgcgctcgacgctgtgctgcacgagctgggcgtccacggcgtggacgggatgctgtttgacttaggtgtttcctccccgcagctcgacgaagcgcagcgcggcttttcctacaagcaggacgcgccgctcgatatgcgcatggacgaatccgccgcactgaccgcgcgcgaggtcgtgaatacctattcttatgaagagctgcgccgcatcctctttgaatacggcgaggagcgctatgcgcccgccatcgcgaagagaatttgccagcaccgcgagcaaaagcccatcgaaacgacgcttgagctcgccgatatcatccgttcggccatgcccgcgagcgcgctgcgcgaaaagcagcaccctgccaagcgcagctttcaggccatccgcattgccgtgaacgacgagctgggcgagcttccgccgatgctcgatgcggcggagaaaaatctgaaaccgggcggacggctcgcggtcatcacgttccactcgctcgaagaccgcatcgtcaagaagaaattacaggagcttgcacagggctgcatctgcccgccggaatttccggtgtgcgtgtgcggacgaaagccaaaggtcaagctcatcacaagaaagcccatcgtttcgggcgaagaagaactcgcagagaatccccgtgcccgcagcgccaagctgcgcgtcgcggaaaagtgctgacaacagccgaaaatacgcaaaagaaaggagatcgccatggccagccgcagagagcagaacatgaaataccgccgctacagcggacgagtcaatggcaatctcgcttacgatcccgcctacgaagagcgccagcgcaggctgcgccgcgagcgtgaatacgagcgcgagcacgagcgtcagcgcgaggaattcatgcgtcccccgcagcggaaggtgcagaaaaaggctgcgcccgtccgccgtcaacgcgaaaaggtctcgctcggcacgctgtgcggctttatggcgctggccgcaatggtcgcgctgatgatcatgtgccgcgcacagctgacggaaatctccgcgcaggtcgtctccgtgcagaaggagatctccgcgctcgaggacgagcatgtcgcgctgctcacgcgctacgaaaaaacctttgacctcaccaccatcaaggaggcggcggccgcggccggtatggccaagcccagcgcctcgcaggtctactacatcgacctgtcggagcccgacagcgtggtcgtctaccagcagaagagccagaacgttttgtcgcgggtgctcacgtcgcttggcaacggcgtatgcgcagtggtggaatatttcaaatgagcgaagctatacataaggagtaaggagcttccttactccttttccatttttaaggaggatgaacgactgtggcaccacgcccccagaaccagaaaagacggcccgaatccgcgcgccgcgcaaaccgcatcattcagacaagaacgctgctgcttctgggcgcgttcggcgtgctgacgtttgtgctgctcttcacccaactctatcactggcagatcaccgagcatgacgagctccagtccgtcgctgtgcgccagcaaacgctgcgcaccacggtggaggcgagccgcggcacgatctacgatcgaaacggcaccatcctggcgatgtccgcctcggcggaggatatttttatctctccgaaggagatcatcgaaaacgatcaggatcaaaacctgatcgcgggcggccttgctgaaattctggaccttgaccccgctgacatcctcaaaaagatggagaagacgaactcgcagtacgaagagctcaagaaaaaagcggatgacgagctggccgacaaggtgcgggaattcatcaatgagaacgacctcaagggcgttttcattcgtccgacgagcaagaggacctatcccaaggggacgctcgcctcacaggtcatcggctttaccaatgacctcggcggtgcgatgggacttgaggcgacgtacaacgacgagctgaccggtgagaacggtatggtcgtcaccgcgcgcgaccgcgacggccgctccgtgctctaccagtacgaccagtatttcgacgcggaaaacggctgcgacctgcacacgacgctcgacacgaccatccagtattaccttgagaaaggtgtgcaggagctcgaggcgcgcttcggcaccggcaagggcgccgagggcatcgtcatggatgtcaacaccggcgcggtgctggcgatggcgtcgctgccgacctacgacttgaattcccccggcacggtctacaacgactttctgacctccggcatgacggaggagcagatcgaggagaacatgaaggatcttctcaacaaacagtggcgcagcaaggccatcaacgacacctacgagccgggctccacgttcaaaacactgacgctcgcgatggcgcttgaggaaaacgttgtcgacctgaacacgggcttctattgcagcggcagcgtaaggatcgagggcgagaccatcaactgctccaagcgcgcgcccggtcacggccagcaaaacctgacgcaggcgttcgccaactcctgcaaccccgcgtttatcaacatcggccttcgcatcggcaacgacaagttttaccagtacatgctggactttggcctgacggagaagaccggcgtcgacaccacgggcgaggccagcggcttcgtcaacagcgaaattaaatattcgacgctggcgctggcgtgctacgccttcggccagaacttcaacgtcacgcctatcgcactgctggcggcgcagtgcgcctgcgtcaacggcggctacctctatacgccctatcttgtcgaagagatcaccgaccaggacggcaacgtcgtctccaagcacgactccacgcccatccgtcaggtcgtctccgaggagacgtccgcgcttgtgcgcgacatcatggagtatgaggtcacaagcggcacgggcaagaacggtcaggttgcgggctaccgcatcggcggcaagaccggcacggccgataaggtcggcggcggcgtcatcgtctcgttcgtgtgcttcgcccccgcggatgacccgcaggtgatgatgctcctgacgctcgacgagccgagcaagtggaccggtacctacgtttccggcggtaacatggtcgcccccgtggcgagttccgtcatgggcgagatcctgccgtatctcggcattgagccgagctacaccgctgaagagctcgtcggcgcggataagactgtgccgaacgtcgtcggcctcagcaaggacgcggcggccgagcgcctgagcgcgaacggcttcagcttccgcaccgtcggcagcggcgataccgtcaccgaccagacgcccgcaggcggcgcgatcgtaccgaacagcgcggagatcatcctctacctcggcgcggagaagtcgactgacaagtgcatcgtcccaaacgtcgtgggcgacagcgccgcgaccgcgaaccagaagatcgtgaacgcggggcttatcatgggcgtttccggcgcgacgaacgcaagctcgtccacggtgcgcgccatctcgcagagcatcgccgcgggcacggaggtcgaggccggtacggtcgtgcgcgtccagttcagcgacagctcggtgcgcgactaaagacagcaagacccaattccgaaaggaatttttcaaacgcagttatctgagcttatttccgcattagaagacaaaacggtgcatgcgccgcctgacctgatagtcagcggccttgcgctcgattcccgcaaggcagaagagggattcctcttctttgccctgccgggggagaaggaggacggcggcgagtttatcgccgaagccaaagcgcgcggcgcggcctgcgccgtgtgcgagcatccgccggagacggaaattccctatatcttagtgccggatgcgcacaaagcgcttgcgctttgcgcggcggtatggtatggtactccggcgggaaaactcaccgtggtcggcgtgaccggcacaaacggcaaaacgaccacgacgtatcttatcaaacagcttttggagcgcacgaagggcgcaaaggtcggcctgatcggcacgaatcagaatttgatcagtgacaagaccatcccgaccgaccgcacaacgcccgacgcgctgaccgtgcagcgcctgctcgcccagatggtcgatgcgggctgcacctatgccgtgatggaggtctcgtcccacgcgctgatgcagagcagggtagaaggaatccgattccgcgtcggtgttttcacgaacctgacgcaggatcatcttgactaccacggcacgatggaggcctactgcgacgcgaagtcgaggcttttcgaccagtgtgacatcgcctgcgtcaacggtgacgatgcgtggacggagcgcttgctcgcccgctttacgagcgagcggatcacattcgggcagggcatgacgaatgaccttgtcggctggcgtgcccgctacgaaaacgactgtgtgcgctttaccgcctgcaccgacctcgaccacgaggagacgaaaatcggcatccccggcggcttttcgctctacaatgcgctcgcggcgctctgcgccgtgcaggcgctcggcgtgccgctttccgacgcggcaaaagcgctgacggaatgtgtcggcgttaaggggcggtgcgaggtcgtaccgcttgatgcgccgttcaccgtcatcattgactatgcgcacacgcccgacgggctcaaaaatattctctctacggtctgcggctttgccgacgggcgcgtcatcgcgctctttggctgcgggggagaccgcgacaggacaaagcgaccccgcatgggccgcatcgccgcggcgctctcggacttcgttgtcctcacgagcgacaatccccgcaccgaagacccttacaccatcctgcgcgatgtgctccccgccattttggagagcagaacgccgttcgccgtcatcgagaaccggcgcgaggccatcggctttgctctgcgcgaggcaaaagcgcgcgacgtcgtcgtcctctgcggcaaggggcacgagacctatcaggagatcggaacgataaaataccacctcgacgagagggaggtcgtgcgcgagaggttcgcgcaagtacaaaggaaggacgccgccgacgcggcgaaggaaaacgaacatgaagatcatcattgcctgcatactgagcttcgcggtctccgcgatcacgggaaaatttctggtccctgagctgagaaagctcaaggccggacagagcatccgcgaggacggccccacctggcacgccggaaaggccggcacgccgacgatgggcggcttaatgttcatcctcggcatcttcgtctctatcctgatctgcggctggaaaggcatgatggcgggggactttgagcacctctacatcttcttttttgcgctgatcttcggcggcatcggctttttagacgactttgaaaaggtgaagcacaagcagaacctcggccttacggccattcagaagttcctgctccagctcgccgcggcggtcgcgttcctctgcctgatgcgctttgagggcatgctgacgccaaacctctacgtgccgtttttcaacacgcagatcgtcatgagctggtgggtgtacatggtgttcgcggcgtttgtcatcgtcggcacggtcaacgccgtcaacatcacggacggcatcgacggcttggccggcagcgtgacggtgccggtcggcctgtttttcaccgtgctcgccatctggtggcagggctatgagcagctcggcatttatgctgcggcgctcgtcgggggaattctcggcttcctcatctataatttccaccccgccaaggtcttcatgggtgacacaggctcgctgttcctcggcggcacggtggcggcgctggcttttgcctacgatatgccgctcgtgctgatccctgtcggctttgtctacatctgcgagacgctgtccgacattttgcaggtcatctacttcaaggcgacgcacggcaagcgccttttcaagatggcgccgctgcaccaccacttcgagctctgcggctggagcgaagtaaagctcgtcgccgtgttcaccagcgtgagtgcgctgtgctgtctggcggcgctgttcggagtactcaacagatttcatttttgagaaacggcaagccgtttctcaaaaatgagaggggatgcgcggcgctctgtgcctcgccgcccttggcggctcgacactcactctgcgagaagtatttttcgccacgcaccggtcgcggcgaaaaatgattaaaaatatttcgcgcctgcgggcgcgaaagtctgcgacgcttggttgcaaaatggaggcaaactcgcgcagagcgcgagtttgcaatcagtatgaaagggggaagactgcatgaccaaggaagaacgcttgctgcggcaggagcagcgcgagcgggcgaaggccatcgaggcggcggcgcgcgaagcgggccgcggaccgctggaccttccgtatcttctgctggtacttacgctcgtgggcgtgggcctgatcatgctgttttccgcaagtttcccctcggcctactatgaagagggtaaccccgcgcactacctcatccgtcaggggattttcgcggtcctcggcatcacggcgatgttcgttgtcggcaagatcaactacgagcgctatcgcgcggtggcgaagatgctgctgatcttttccatcatcctgctggtgctcgttctgatcccgggcatcggcacgggccgactgacgcacggcgcgcagcgctggatccgtctcggacccatccagttccagccgtctgagatcaccaaggtcggcatcatcctctattttgccgacagcatttcgaagaagaaagacaaaatggccacgctgcgctacggcatcgtgccctatgttgccatcctcggcgtgattgcggcgctgatggcaaaggagccgcacttttccggtatggtgctgctgctcggcatcggtgctgtgatgatgtatgtcggcggcatccgcaactactgggttggtctcggctttgcgatggtgctgctggtgatctacgcctttgcgaccggcatcatcacctacaactcgagccgaatcgacatctggctcgacccgttcaacgaagagtggatgcgcgataagggctatcagatccggcagagcttgctctccatcggttcgggcggattgttcggactgggccttggcaagagccggcagaagtttctgttcctgcccgaagagcacaacgactttattttcgccatcatctgcgaggagctcggccttgtcggcgcgacgatcatcatggtcatgttcgcgctgctcatcatccgcggctactggatcgccctgcacgcgcgcgaccgcttcggaagccttcttgccgtcggcgtgacgacgcagatcgccttgcaggtattcctgaacatcgcggtcgtaacgaatctgatcccgaacacgggtatttcgctgccgtttttcagctacggcggcacggcgcttgccgtgcagctggccgaggtcggcatcgtactgagcgtttcgcgtcagatgcgctgacgcgggaaggagaaaacggctatgaaggtcatctttacctgcggcggcacggcggggcatgtcaaccccgcgctcgcgctcgcgggctatatgcgggaaaaggacgcgggcacgcagatcttattcgtcggcgcggagcgcggactggagcgcgatttgatcgcgcacacggactatccgttccgtacggtgaacatttcatcgttccaccgctcgttcaggcctgcggagatcaagcacaaccttgtctcgctcaaaaatctcgcccacgccgagcgtgaggcgaacgccatcttacacgattttcaccccgacataatcgtcggcaccggcggctacgcgagctatccgctcgtgcgctacggtgcaaaggcgggcatcccgacggcggtgcacgagtcaaacattgtgccgggcctgacgacgcggcagttagagccccactgcgaccgcatcatggttggctttgaggactgccgcgcgcactacaagcaccccgaaaaggtggtcgtgaccggtacgcctgtgcgcggcgacttcttcacgatcagcaagcagcaggcgaaggaaagactcggcatgaacgacgggcgcaagctcatcgtctcgttctggggcagcctcgggtcgaacgcgatgaaccgcgcgatggcggagtttctggcgcttgagagcgcgaaggagcccttttaccatatccacggcgtcggcgagatctgctggaagccgatgcagcagtggatgcacgatgacgggctggagatcaccgagcatcccgcgctcgacgtgcgcgagtacatctacgacatggcgactgtcatgcgcgccgccgacctcgttatctgccgcgcgggcgcgtctacgctcagcgagctgacggcgctcggtgttccggcaattctggtgccgtcgcccaacgtgacgaatcaccatcaggaaaagaacgcggcgctgctcggcgaccacggcgcggcgctcgtgctgccggaagagggccttgacggcaagaagctcttcgccgccgcggcgggcatcctgaacgatccgcagcggatggagacgatgtctcaaaacatggcggcgctcggcattcccgacgcgaccaagcgcatctacgacacagtgatgacgctgctcaagtgaaagagaataaaaaggaagcgagccgtgaggctcgcttcctttttgcgtgtttttgcgatttattccgccttcaaaatgaaatccatatagatgggattgtggtcggagtagcgataccccgcgtcgacgacatcggcggagacggcttcgacgttgtcggagacgaggaagccgtcgaccgtcacgcggaaggtcgtctcctcgttgtagggttcgttggccgtgcggcaggtggcgacgggatggtcggcgtcaaacggcacgacaagggagagcccgtcggggatcgtcccctcggggatgggctgcgcccaggtgtcgttctcgccgcccgcgacgccgaagatctcggcagaattgccgagcagatccttgttgaaatcaccgcccgcgacgcagtagttgccgttttcatattccgccagcatgtcggcgcagagcatttcaagctgctcggtcgcgatggtgccgtcggacgtgtaggccgaaagatgcaggttatagagcaccagctccctgccgttttccatcgggacgcggctgacggagtagcagcggtccaggtcgacgagcttcataacgcccgtctcgatcggcagcgagcggcgtacggcggacgagatcggatggcgtgagagcgtcacgataccggactggtttgcgccgtgggggttaataagaggatagaagaggtagggactgtcataattctgcgcgaagacctcgcagccctcgcggccgtccatcgcgcgcacgatgtaggcgcgctcgtcgacgtggtggctgcgcgtgccgtcggtgtcgacctcctgaaagagggcaaaatcgggcgtgaggtcgttcacaagcgcggcctcgccacagacgttttcgcgcacggcgtcggcgctgcgggcgcggctctccttgccgccgtccatgaagaagctgtaatcgtcgctgtacgcgccaaagccgatgttcgccgacgagacgcggtaggtgacgccggcctgcggcgcgccctccatcggcagcgcgctttcgccgccggtcgtgtgatcctgcacggagaactgcacgatgtcgagcgtctgccagtcctccacgcggtagtacgcggcaaagacatagatgacgtaagccagcacgatcaaaacaagcgccaacagaacatagagcgcaattttcagcggttttttcatcgaaaaactcctttcggggagaaatgccagtagtttcattttgccacaaagcgggcgggaaagcaaggcaaaaagaagttgacgcgccgcggcaaaatagctatactgaaaatgcccaactattgccctgcgaaaaccggcagtcacccattttccgcaaaagccatacgatggaaaagtaatgtgcttgcgggagggaacatgatgtgtgagctgttggtagagggcggggagcgcctgtacggagaactcacgatacaaggctcaaaaaacagtgtgctgccgattttggcggcgacgcttttgtgcgcggacacctgcgtgatcgaaaattgcccgaagctgcgggacgtggatgcgtccgttgccattctgcggcacttgggctgctgcacgcactgggaggacagtgcgctcgtggtcgacacagcgcgcatggaccgcgcggtcgtgcccgacgcactgatgcgagagatgcgctcgtcggtcatctttctcggcgcgattctggcgcgctgcaaggaagcgacgatctgttatcccggcggctgcgagctggggccgcgtcctattgacctgcacttaagcgccctgagcgccttgggggcagagatcagggagacgggcggcgagctcaagtgccgcggcggaacgcttctcgggagcgatgtgtacttacccatgccgagcgtgggcgcgacggaaaacgcgctcctctgcgcctgcggcgcagacggcgtgacgacgatctacaacgccgcgcgcgagccggagatcgtcgatttacagaactttatcaacgcgatgggcggcaacgtccgcggcgcgggaggctcaatcatcacagtcgagggaaagcgcgcgctgcacggcgggaaataccgcatcatcgccgaccgcatcgtgggcgcgacgtatctctgcgccgcggcctgctgtgggggagaggtgcgccttcgcggcgtcgacccgcgggcgctttcgactgtgtccggcgcgctgagcgaggcgggctgcacggtcaaaagcggggaggacgatgttttccttcaaagtgatggcagtctcagatccatccgccctgtgcgcacggcgccctatccgggctttccgacggacgcgcagccggtgctgatggcggcgcttttgaaaagcgcgggcagcaccgtttttgtagagaatatttttgaaaaccgttaccgccatgtcgacgagctggcgcgcatgggcgcggaggtgcgcgtcgcgggacgcgtggccgtcgtcacgggacgcgagcacctgcacggcgcgcgcgtcaagtgcaccgaccttcgcgcgggcgcggcgcttgtgattgcgggcctgcaggccgacggactcacgcgcatttcgcgcatcgagcacatcgaccgcggctatgagagcatcgagcgcgaccttggcgtgctgggcgcgcatgtgcggcgggagacgggtacataagcaaacgaagaaaaaaggcaggaaaactatggcgtcaaagcgaagaaacagacggcgcaggcggggaagagcctctttcccgctgagacttttgtgcctcgcggtcgtgatcgccgcatttctcggcgcgctgacgatgttcttccgtatcgatatgatcgtggtggagggcaacgagcgctataccgaggagcagatcatcgaggctgcgggcgtgcagaaggagcagaaccttgtgctgctgaacaaatataaggtcaaacaatccattttcgacacgcttccgtatgtggagaccgttgtcatcaaccgcaaataccccgacgcgctcattctgaccgtgacggagtgctcggcctccgctgcgctgacgggcgaaaacgacacatggctcatgagcgacgaaggcaaaattctggagcgcgcatcgcagatccccgagggctgcgcgcgcgtgaccggctgcacgctcgtcgagcccgcggtcggcgcgatggcggcgtttgcggacgaggattcgtataaattcgagcgcctgctcacgctgctgcgcacggcggaggataagcagcttctctccatgatcggcgagatcgacctgagcgacggcacggccatcacttttacctatttggaccgctttacggtcaaaatgccctgggatgcggacattgcctacaagctcgggaatgtgcgcacggtggtggagcagcttgaagccaatcagaccggcacgatcaacctgatgaacgacggcagggctgacttcatcccggaataaaggcggaagttgacgtaaaaaagtttccccgaaatgcccgattgctattgaccccgcgggaaaaccgtaatacaataattaagatagcaaatacctgatattgtggcgcttgcagcggcaagtgccttgcccatacaacagattgcaggaggaaccgacatggcattcggattggagaccggtcctgaaaacgtagttaagatcaaggtcatcggcgttggcggcggcggcaacaatgtggtcaaccgcatggtgcgcaccggtgcgcgcggcgtcgactttgtcgcagtgaatacagataagcaggcgctcaacgtgtctgccgccacttataaaattcagatcggcgaaaagctgacgcacggtcagggcgcgggctccgaccctgaggtcggccgcaagagcgccgaggagagccgcaaccagatcgccaaggcgctcgaggacaccgatatggtcttcatcaccgccggcatgggcggcggcaccggcacaggcggcgcgcccattgttgccgagatcgcgcgcgaggcgggcatcctgaccgtcggcgtcgtgacgaagcccttcggttttgaaggccgccgccgcatgacgcaggcggaagcgggcatcgaagagctcaagaccaaggtcgactcgctcgtcatcatcccgaacgagcgcctcaagcacgcgaccgaccagaagatcacctttgccaacgcgttcgagatcgcggacgacgtgctgcgtcaggcggtgcagagcatctccgacctgatccgcgacacgggcttcatcaacctcgattttgccgacgtgaccgccattatgaaggacgcgggccttgcccacatgggcgtcggccgcgccgccggcaagaacaaggccgaggaggccgcgcgcatggccatttcgtccccgctgctggagacctccatcaacggtgcgcacggagtgctcatcaacgtcacgggctcgatggacatcggcctcgacgaggtcgagcaggcagcgtccctcgtgcaggaggctgtgcatcccgacgcgctcacgatcttcggcgcgacgttcgacgagacgctcgacgacgagatccgcgtcaccgtcatcgccacgggctttgacaaggcgcccggcgcgctggacttcaacaaggataagaagcctgcggagcagagcggcgagagcgccgctgccagtcttgcgccgctcgacttcgacaaggaaaaggccgaggaagaggccaagcacgaagatgagcccgatccgttcgacgacatcttcaaaattttcaaccgcgagcgttaaatggaatcaattcccaaaattccgcagactttggtctgcggaatttctttgtccgcatttacagcgccatttcaaaaagcgatgccagcgcatcaaaattttgcaccttttaattttgcccgaagcgcagaaagtaaatgcgccggacagagaaaaagaaatgagaaagaaaaaatttccggcgttgggcggacggctgcgcgctgcgcgcacagggcgcgccgtccgcccgtattttttaaaggggtgagagaatggatggaacgcatcgcacaaaaaagcgagcggcggcgatcctgctgggattttttgccgccgctgcgatcgcaatgccgtctgcgcaggcggcggaccggacggtcagcgagctgatccccgtcggacagaccgtcggcgtcaagctcttttccgatggcgtgctcgtcgtcggcttttccgatggggaaagtccggcgaaggactgcggactcaaggagggcgacgtcatcaccgccatcggcgggcaaagcctggacaccattgaggaattccgtcagcttctggcagaaaacggcgaggacgccgcggcgctgaccgtcaagcgcggcagccgcacgatcgaactgagcgcagagccggagaaggatgaggacggcgagtaccgcctcggcgcctgggtgcgcgacagtatggcgggtatcggcacgatgaccttctttgatccgcagagcggcacgttcggcgcgctgggccacggggtcacggatgtggacacggggcagctcctgccgctcgaccacggcagcatcatggacgcctcggtcaaggcggtgaaaaaaggcgagcgcgcctcgcccggcgagctcaagggcgactttgacctgacgcgcgacagcggcacgctctacgcaaacaccgaatgcggcattttcggcaagctctcggcagaggacgcggcaaagatcaccggtgcggcgctgccgattgcaaagaaggatgagatcaagaccggcagggcggcgatcttagccaccgtttccggcaatgaaacacgcgagtatgatattgagatcgaaaaaatctattcgccttccggcagcacgcgaaatctgctgctgcgcgtgacggacgaggagcttcttgcgcagaccggcggcgtggtgcagggaatgagcggcagcgcgattttgcaggatggcaagatcattggcgcggtcacgcacgtcctgctggatgatccgtcaagaggttatggtatttttatcgaaaatatgctctctgcggcgggactttcgagtgaataacctacccatatagtagaaagattgtgttaagatagcgtaaaaacaaccaaattttcatgcaaaaagttagaaaaagatggttagattcgacataactcgcttgaaaacgctgtccaaatatgttagcttagagccatggcagaacgaagacgtcacattttgctgctgaagctggccggctgggtcggcgaaaacttgtgtgaaaaggacgggatgacatggacaagaggatcacggtcgtattagcggacgcaaacgaggagttccgcacagcactgaaacaggcattggaagcaacgggtgagttcgacgtagtgggatgcgcagccgacggactggctgcggcgcaggatatagcggagcgaaagccgcagcttcttgtgatggatcttttgctgccgggacttgacggctttggcgtgctcgagcaggcggcgaaggacaaggtgcagatgaagacagttgtcgtctcggctctttatcgcgatcagatcgtgtcgcaggcgatgaaccgcggcgtatcgttcttcatgcccaagccctgcgagctgacctcgcttctggaccagatgcgccgcgcggtcaacgagggtgaggagagcgaggacgagtcgcaggcgcttgagcgcgaggtcacggcagtgatccacgaggtcggcgtgcccgcgcacatcaagggctatcagtacgtgcgcgaggccatcgtcatcgccgtgcaggacatggatgtcatcaacgccgtgacaaaggtgctctatcccgaggtcgcgcgccgctacagcaccacgccctcgcgcgttgagcgcgcggtgcgccatgcgatcgaggtcgcgtgggaccgcggcgaccttgagacgctccagcgctattttggctacacggtatccaacacgaaaggaaagccgaccaacagcgagtttatcgccatgatcgcggaccgcatccgtttacaacggaagatctatagggtgtgaaagcgaaagacgtaaagagccacggagatactccgtggctcttttaataagaggtttatgacttatcacttgcagcgaacgcaaatgacagctcagggtcggaaagaatgacaacagagaaagtatcgtcactgacaaaagcatatccaaaagccgaggcgtcaggatcatccgaagcttttacatcataacaatagccggcaagcttttcaccatcattcacagcttttgttttctcgggactgtaagttaagtagaaggatcaatcagaaatggagcgttctgagaatgaaattgtagccgcaccacccttttcaacggtgcaggtaaagccaccgagattttttgcgcggatgctctcaaatcgctgggaatcaccggcgtccag

SEQ ID NO: 10148 - DNA, 38889 bp, Unknown
  gut microbiota DNA sequence
gattgaaagatttttctgtctgtggtcattcctgtggtcaaagccgcttttgtgccgctttcggcaatcggggaaagtcccgcaaacacaggcgtcacaaggctttgcggcgtttcgccatgccctgtcccggataccgccacggcactcccaaaccaggcgcgataccaacttcgctatacccagatactattgatacttgaatagggcttcgatttgaagccctattattataccgcctgctctgcgcggttgcaagggttatttgcggtgtgcggagcgtttttcggcatccttggggcgcgtgcccttcatcgcctcgtgttcctgacggagctcgtcgtgcagctggagcgaactccacgcggcattgtcctcggtgacgacggccttgagcgcgacgaccacgcggctgcggcgaagagacgagagcagcgcgtcgagctgcggaccggaaagaccgcagagcacgagcatctcgtcggaaaagccgccctcgacggcttcctcgacaggggagaagccctcaagatcgcagagatagccgatcggctgcgaaagttcctccggcgcgacgatgcgcccattcacaccgagcttgaagagcgcgaagcggaccttttgcagccgtgcggcgtccttgaaattgtaaagcagtgcacatgccatggtcaaaccctcctcagcggtgctgcgcggccttctgtgccatgatatcggggtcgatgcagaaataggtgaactcgcccgtggcgaggagcttgccgccctcacctaaaatgtccacattgacaaggcaggtcgttctgccgcggtggcggactttggcgtccgcgcgcacgacgccctccgactggttgcggagaaaatgcatcgagctgccctgcgtcacgtaggatcgaccatccgtgtgggcggcgtagcccgtggcgttgtcggccatcgtgtagatcgcgccgccgtgcacgataccgtagggattcttgctctcggggcggatctcaagcttgaagatcgcgtggtcgggctcgacaaattccgcttcaatgtgattataggtggcaaaaagattcttcttgttcaattctgccgcctgctgggcggctgtgagctgttccatgaaagtgctcctttgacattgttactgtcgtatcctaccacagtgcggcgataaaagcaacaatgcggtgaaaacatcgaatcagtaaaaatcaacagaagaatacgaattttgtataacattatcatgttgagtgcaaaagatgaaaaaacttgtatcgcttgcccacttccattttgcttgaaagcctgctatactacctttatcatagaaaaatatgcgcttgaaggggaaatccctatggtatatgagagtagtgcgtcctcccgctgcgccgcggggccgaagatcgccgccatcggcggcggcacgggcctgtcgaccatgctacgagggttgaaaaaatatacagaccgcttaacggccatcgtcacggtggcggacgacggcggcgggagcggcgtgctgcgccgtgaaatgggtattctgccgccgggtgacgtgcggcaatgtatgcaggcgctcgcgaacaccgagcctgtgatggagcagcttctcggctatcgctttccggagggacagctcaaggggcagtcgttcggaaacctgctgcttgcggcgctcaacggcatggcggggagctttgaagaggccgtcgccatgatgggacaggtattggcgatctcgggccgcgtgctgccggtgacgaacgcggatgtacagctcgaggccgtgtttgaaaacggcgcgcgcgttgtgggcgaatcgcacatcttcaacgcgaaaaagcagcaggactgccgtatccaccacgtttcgcttgtgccggagcacccgaaggcgctgcccgatgcgctccatgccatttcagaggccgacctcatcctgctcggccccggcagcctttatacgagcgtgatcccgaacctgctcgtcgacggtgtggccgacacgatccgcgcgtcgcacgcgcagaagttttacatctgcaatatcatgacgcaggacggcgagaccgagggctacaccgccgccgaccatctggaagccctgcagcgtcacgggcgggaggggatcgtcgacctctgccttgccaacaatgcgcccatcccgcgcgtgctcgccgcgcgatacagtgaagaggacgcggagctgctgcgcgtcgaccgcgagcgcatcgcggagctgggaatcgcgctcgcggaatacccgctgctctcggcgcagggcggctacgcccgccatgacccggcgctgctggcgcaggcggtcatggagctctaccgcgagcgcacggtgcgcatctaccgcggcacccagcagtacattacggaagaacaggagtggaaataatgctcaacagtaaggaatttgtcagggaattgcagctgcgccatgagagcgcctggatgaacccgaatgtcgggagcgcggaaaccgcgctcgccgcgctgccgctcacgcgtgcggatgtcgatgacgccgaggcgcggctggagcgcttcgctccgttcatcaagaaggtatttcccgagaccgtggctgatcgcggcctcatcgaatcgccgctgacggagatcgagcatatgcgcgcatggctcaacgaaaatgaaggtgcgcagctcgcaggcaagctcttcttgaagcgcgacagcgacctgcctgtcgcgggcagcgtcaaggcgcgcggcggctgctacgcggtgctcaagcacacggaggacttagcgcttgcgaaccggctggtcgagatgcgcgatgattacagcgtgtttgccacgcgcgcgttccgcaactttttctcgcagtatgagctgcacgtcggttcgacgggcaatctggggctgagcatcggcatcatgggcgcggcgctcggctacagggtcacggtccacatgagcgcggacgcgcggcagtggaaaaaggacctgctgcgcgcaaagggcgtgacggtgctcgaatacggcgcggactactcctacgccgtgcagaagggccgcgagcgcgcggcggaggacccgagaagctattttgtcgacgatgaaaactctgtcgacctcttcctcggctacgctgtggctgcgcggcggctcaaggcgcagctcgccgagcaggacgtcacggtggacgacgagcacccgctgctcgtttacattccctgcggcgtcggcggcgcgccgggcggtatctgctttggcttgaagcaggagttcggcgacgcggcacacgtctacttcgctgagccggtggaagcgccgtgcatgctgctgggccttgccagcggcttgcagaatgcgatctgcgtgcaggatatcggcctgacgggccgcaccgcggcggacggactcgccgtcagccgcccctcgggcttcgtgggggagacggtcaaggcgatcgttagcggcggcttcacggtgtcggacgagcatctgttcacagactttcacgccctgcacgagacggagagactttttgtcgagccgtccgcctgcgcgggttttgccggtgcggtggagctgtccaagatgacggattatctcgaaagcagcggccttggcgcgcactgggagaatgccgcgcacatcgtctgggcgacgggcggcgcgctcgtgccggaaggcgaacgcgaaaagtacctcgcaaactgaaaagagataaaaagaaggacttcacgcattgcgtgaagtccttcttttttgcgccgcggcggggaggggaaccccgttacgcgggcgtcatcgtcagcgtatagtttgcggtgcggatcacgatctgcgttacgatgcttttcaccgtgtcgatgctgagctcggcggtgtagccggtaaagccatcgcttgcaaacgcgactgccagctcccatgtttccgtgctacccgacgaggacacacgctttgcgtccgtgatatgcttgctgcgcgcacctgtgaactggcagtcaaggaagcatttgccgatgtagctattctccgcccgtacagccacctcggcataaatcggatagccaacatcacctagttccgggctgttgccggagatgctgatctgttcatcgcttgcaaaaccgcccttgacagcatagtaatttgcaaaataactgacaccgttatcaaagaacggaaacggctcggcagtaaatttcacggtggtgacatccggtgtgctgctgacgtcgagcgcggcgtcgaagctcgtcttcttgccgccgccttcaagcatgccgtggtatttgccgcccgtggcgtatttgctgttgaggatcgtgagcgccttatcgagcgcggcgtttccggtgttcggttcggtcggcacatgggcgggggcagaggtcgtgtcgatgcgcagtccgttctctgcgtcccactgatagccccagccgaaggactcgtacgcatagcggaacgtcagcgggaagtacgttacgccgttgtaattgaagatcggataggtcgcctccttgttgtcgatcagcgcgccgttgacgctgatccggtagcttggcagcgtgacggagacgctgcccttcggcgctttgccgggttcggcgacgtaagcgctctgcgcgccgcctgcggtgatattgagcgacttggcggcattgttccagtcggtctccacgcccatgaaacggcttaattgatacgtcatgggaaagtaggtgatgttgctgtaggacagcaggggatacttggcgttcttgttgtcgatgacctgaccgttgagcgtcaccttgccggtgacgacgtcggcgcgcattgcggcctcggcctgcggcagcagactgaacgcgagcgcgatgcagcaggcgatggcaagcaggacgcgcagaaaagtcttgttgatggtagacataacatactcctttccgttttgtgatggttgacgtttactcgtacagcttggcgctgcggttgaggtacacgagctctatgatctcgaccacgcccagagcgatggcaatggcgagaatgaacaggagcaggacgatcatgccgccgttgtagaagtagaagaaggaagcagatgacagacccaaaagcaggagcagggtaaggaatgcaccgaagcagccgatgatcacgacctgccaggtgcagagtgaacgccattttgccgccattgcgtcgtctgcgccgtcaaacgcttcggcgcaggcggtgagctggtggtacgccgcaagtgtggcaaacaggaagatcaatcccagcagaatgatcagaacgaccagaatcgcggagacgtccgatgccgttatccactcctgtacgcttggcgcatcgagaagcgcaacgaacggcagcgcgatcagcggcagaagattaaagtacacggccttgcggaagcgggggacggccgcgctcagcttccagagcacaacgagcgcgagaacgctgaccgcgagcgacaccacactcagtacaacgccgagcgacgggatcttgtcgccgagcttaaaggtgttgttcaaaagattgatgacgatattggcgatgccgaggcggaagaggttctggaaccccttgtgcagcagcggcgcgtttggcctctcgcgcagggggatgaccggcggcgcgggcgggggagtgacagcgctttctgcggggacgggaacggcaatgggggaggcttcggggacggggtcagggcttggtgtcgaattattttccatcatggcggttctcctctcttgttctctcgctttttatttttctctcaatttgaaatacggtcacgctcactggaagcggtatccctgcgcggtaagggaggcaaggtagttcataaagttttcgtactgctcaaagtgcagcaggtcgcttgcctcgacctcatggaacgaggcgattttagtggaggtatccacccacacaagataatcgttcacggtttcgcctcctcgtcggggagcttttccccctctatgtcatcaagggtgagaatattctcgtcttcatcgtcgtcggaaagatcgacggtcttctcggtgaccgccacgctctcggccaaggtgcgcaggacggcttcatcgccgctggcatcgagcgagaagtggagattgctctcctcgtcgatccactcgagcgtgctccacagcgattcatcgctcgcaaggaaaaacttgcccttgcagccgttgatggtgatctcggagatttgggtgtcctcgcccatgtcgtaatagctgaacgaatcgtcctgcatgtagatatagctgaaaaggatgaggtcgttgccgctttgatagcagagctggcggaagccggagtcctcgtagctcatatcttcgtccagcgtgtaaccgtccggcagggcggtgatcgtgtagaacggcagctcgccggtgggggcgtcgcccgcgtattcataggagacctgcgagcccgtccacgtttccacccagtggatcatagcggcccgcgcggcgggactggcggcggcaaagccgctgagcgcgagcagagcgaccagagcgaccatggccgcgcgcttggcgagcttgctccagaagctccgctgcgcggggcgcttgtaggtcagggcctcttcgacgtatttcgcgccgatctcgttcatggcgtcggaaaaaagctcgggtgtcataccagcacctcctgttcggtcagataggtcttgagctgcttgcgcatacgcgtcaggcgcaatcgggcgttgccctcggtgatgccgaggagcttgccgatctcggcaaagctgtcggcgtaccagtagcggcgcatgaagagcacacggttttccttgctctgcgtgtcaagaaagcgctcgatcgcggcggcgagctctctggccgcatagtgctcctccatcgcctgctggggcgaagcgaggaacgtttcaagctcctccatgcacatatcgtaatggctgtttcgtttcattgccgtgttggcacgatagcgcgtgatcgaacagcggcggacgagcgtgccgacaaacgccggaagcgattccggacgctgcggcgggatcgcgttccaggtgcttaaataggcatcgttcacgcactcctccgcatcctgcgcgcttgcaaggatgttgtccgcgagcttgtggcagagcttgccgtatttcttgtccagctcgctgatggcatcctccgagcgcgcaaagaacagctcgatgatctgcgcgtcttccatcgtgcagcgcctcctttcctcgtgaaagagtgtttctacttgaatagacgcaatttccggcaaaatgcttcacgaaaccgtaaaatttttttatttttcctttttgacggaaaaaccggatgatttgttcctgcgcggcgggagaaaaaggaaagatatcgacaaaattatatgataaatataagaaaacggccccgcaccttttcggtacggggccgttgatcctgcatttaaaggtgcagccttgcgtgctcgcagattgcgtcgtatgtctgctggctgatgtcgtgctcgatcttgcacgcatcctcctcagcggtcttttcgtccacgccgagggcgatgagaaattttgtgagcgtgtggtggcggtcgagcatctttgctgcgatcgccatgccgcggtctgtcagcgtgatgaggccgtcgcggtccatctcgatatatccgttttcgcgcaggcgcttggtcgcgtaggtgacgctgggcttcgtcacgcccagatggtcggccacgtcgatcgaacggatatagccgtgctgctctttcatcatcagcatggattcgagataatcttcagatgccttttggattttcatgtgcggtttcaccaacttcgcaataaagtacgataataggttaacatgctctaacaaaaaatgcaagcattaaaaaaatgttcacaaaacctcttgacaaaataggttagagagattaaacttacgggcgaaagttaaacgacactaactttgcgccggcgaattgcggatcgccgcgggcagaaaagtgccagaccaacagcatgcggagggataagtaatgatgccgcttacactggcgaatgccggagaagaaaatactatcctcaaagtcggcgggagcgctgaagtcaaaaagcatctcgaagatctcggctttgtggccgggggcacggtgagtatcgtgtcgtcgctcggcgggaacgtgatcgtcaaggtcaaggaagcccgcgttgccatcagtgaagaaatggcaagaaaaatcatggtttgagcaatttttcaaataaaaggagagagattatgaaaacactgcgtgaagtcaagatcggcgagaccgtcaaagtcgtcaagctccatggcgagggccccgtcaagcgccgtatcatggatatgggcatcaccaagggcactgaggtgttcgtgcgcaaggtagcgccgctgggcgacccgatggaagtcaccgtgcgcggctacgagctgtcgctgcgtaaggcggacaccgaaatgatcgaagttgaataatttatttctacataagttaaggaaacttaacaagaaggagcagtaagaaacatggaaaagcagatcaaaattgccctcgcgggcaaccccaactgcggtaagacgacgctgtttaacgccctgaccggttcgaaccagttcgtcggtaactggcccggcgtcaccgtggaaaagaaggaaggtaagctcaagaagcacgatgacgtggtcatcatggaccttcccggtatttactccctgtccccctacacgctggaggaagtcgtcgcccgtaactacctcatcaccgagcgtcccgacgcgatcctgaacatcatcgacggcacgaacctcgagcgtaacctgtatctcaccacccagctcactgagcttggcatccccgtggtcatcgccatcaacatgatggatatcgtccgcaagaacggtgatgagatcaacgtcaaggagctctcccgtgagcttggctgcgagatcatcgagatctccgcactcaagggcgacggcgtcatggacgctgccgaggctgccatccgcgccgccaagggcaccaagaccgtcccgatgcacaccttctccggccctgtcgagcacgccatcgcccacatcgaagaggcggccgtgcactccatgccggaagagcagcagcgctggtacgcgatcaagatctttgagcgcgacgacaaggtgctcgcaaagctcagcatccccaccgagacgatgaaccacatcgaagaggacatcaaggcggcggagaccgagctcgacgacgacgccgagagcatcatcaccaacgagcgctacatctacatcgcacagctcatcaagggctgctacaagaaaaagggcacggaaaagctctccacctccgataagatcgataaggtcgtcaccaaccgctggctgggcctgcccatcttcgcggtcgtgatgttccttgtttactgggtcgctatggtcggcgtcggcgcgcccgcgaccgactgggcaaacgacggcctgttcggcgacggctggcatctgttcggcatcggctccgccgcctatggcgaagcgagcgatgattacaccgccgcttccgaagcgatcaacgcctttgctggcattgacacgggcgacgaagagttcgacgccgacacggcgctcgaagagatcaaggatttccagcccaccgaagacactgccactgttgatgttgaggatgaagagaccctcgccatcaacgagatgaccgcctactacgacgcgctgcccgagggcgcggacaagatggacgatgttgtccagatgacctatgtggacgctgtcagctacttcgaagagaacggctttgacgagcccgacccggctgactacggcgtttgggtccccggtatccctgttctgatcggcgatgcgcttgacgctgccggtacggctgactggctcaacggcctgatcctcgacggtatcgtcgccggtgtcggcgcggtgctcggcttcgtgccgcagatgctggtcctgttcctgatgctcgccttccttgaggcctgcggctacatggcccgtatcgccttcgtgctcgaccgtatcttccgcaaattcggcctgtccggcaagtccttcatcccgatgctcatcggcaccggctgcggcatcccgggcgtcatggcctcccgtaccattgaaaacgagcgtgaccgccgtatgacgatcatgaccaccacgttcatcccctgcggtgcgaaagtgcccttcatcgccatggtcgccggcgcgatcttcggtggtgccgcatgggtcgccacctccgcctacttcgtcggtatggctgccatcatcatctccggcattatgctgaaaaagaccaagatgttctccggcgaccccgcccccttcgttatggagctgcccgcctaccactggccgaccgtcggcaacgtgctgcgcagcatgtgggagcgcggctggtccttcattaagaaggccggtaccatcatcctgctttccaccatcgttgtgtggttcaccacctacttcggctgggtggacggcacgttccagatgctctctgaggaacagatcgacgcctccatcctcgccaagatcggcaatgccatcgcatggatctttgcgcctctcggctggggtacctggcaggcggctgtcgcctccatcaccggccttgtcgccaaggagaacatcgtcggcaccatgggcatcctgtatcccgccggctgggctgagatcggcgcggccttcacgcagatcagcggctattctttcctggtgttcaacctgctgtgcgctccgtgcttcgcggccatcggcgcgatcaagcgtgagatgaacaacgccaagtggacctggtttgccattggctatcagtgcggctttgcgtatctcatcgccctgatgatcaaccagttcggcaacgccttcaccggcagcctgaacgtcatcggactgatcgcggccatcgttgtcctcgccggtatgatctacatgctcttcaagccctataaggaagctaccaagctgagcgataagcactgatcccttaacaccgataccctgcgaaaggagtgatttccatgttgaactgggttaccgcaaacctgtcgacgatcatcgtctctgctatcctgcttgccataatcattgctatctccacctatcttatccggcagagaaagaggggaagaaactcctgtggctgtaactgtgcacactgcgctatgcacggcacttgtcacagtaagcagcattaaatagcacaggagacgcgggacttatccacccgcgtctcctgcgccgtatgaaaggaaatgatcttaacatgtacgaaaccaaagtgaagatcgacggcatgatgtgcggcatgtgcgaatcgcacatcaacgacgccatccgcaacgcgttctccgtgaagaaagtctccgcctcccatggaaagggcgaagcggacatcatcagcgaagagcccatcgacgaggcgaagctgcgcgaggccatcaccaagaccggctatgacttcgtctccatgacgagcaagccgtatgaaaagcacgccctgttcgcctttttgaagaagtaaaagacaaaatgaaaggcacggcttttgccgtgcctttttttgacttagttctgcgcttcggcgcgcttcctgcggtgcgggcttttcaaaaagtcgacgagcttttgctccatgcgggagagctgctgcgatttgagcgtgatgagatagatcgtgcgcttgagcgcgcttttgtcgatctcgaaggcgagcagcgtgccgttttggacctcctgctccacggcgagcgccgagagcacggcaacgcccacgccgccggagaccatctgcttgatggcctcgggatcgtccacgcgcgccacgacatgcagcatatcgtgggagaggccgagcgtgcgcagatagttttgcaggctcgtgtctgtgccagagccctcttcgcgcgagacgaacggctcttcaagcagcagctcgcggccgtagacgccgcgctctctgagcatgcggtagtgctcgttgttcggcgcggcgagcacgagcctgtcgtcgtagagggggaagtagtcgacattttccggctcactgaccgcgccgacaaagccgacggcgatctggccggatttaagcatccggtgcacctgctcactgtcgccgcggcgcagagagtagcggaactccggctcgcgcttcaaaaacgcagcgaggtagcccggcaccagatactgccccggcacggtggacgcgccgagcgcgaccgcgggggcgctgtccgcgtcggagaacagcgtgcgcagcgcggcgcagtcattcagaacgcgccttgcgatggggtagacctgttcgccctccttcgtcaagcgaacatggcggcggttggagcgcacgaagagcttcttgccgagcgcctgctccaaaagagaaatgtgcgcgctcacggtggactggttgaagaacagctcctccgccgcacgggtgaagccgccgtattccacaacggcgacaaaaatttcaagctgcttgaggctgatatcgttcataagatgggtttcctccggaatgtcgttctactttgaaaagaataatatgagaggacgaaaaaagcaaggcgtttcatcgcttttttcaatgataaactgtattttatgaaatacaggcgatagatcgtgcgctcttgcaatttgcgggggagtttggtatcatggcaggcagatcaaaagaaaaacggcggtgatgataagatgaaaacagcgcttgtgacggatggaaaataccgctcgtccatcgcggcggtgcgtgcgctgcaccgcgcgggctaccgcgtggtcgtgacgcagacaagggcggacgtcaagagcgcacccgcagtgtcggtgtcgaagtcctgcgatgatttccactggatcgacggcgcgtgcgcggatgcggattacgccgaaaagctgctgagcgtactcaaagagtatgagcatccggtgctattttgcgtcggcgcggtgacgctcaacaccgtcgccgcccgtcgggaggagtttgccgcgctggcgaacttcctcatcgcgccgaaggagacgctcgacgcgctcaacgacaaggagagcgtgcatcagcgcgcgctggagcttggcattcctgtgccgcgcgagtacgacggcacgccggagagctatcccgtcgtcgtcaagccgcactgcggagaaaagttcggcctcaaggctgccgaccgctacgccgtggcgaacaacgaggcggaattcgacgccatcatggaaaagatgcagcgctacgacccgtgccccatcgtgcagcagaagatcacgggcgcgggcgcgggcgtgagcctgctgctcggccgcgagagcgagctgctcggcgcgctgtgccaccgccgcgtgcgcgagtatccgatcacaggtgggccgtcgacctgctgcgagagcttttatgatgaaaagatgatcgacgaggcttacgaactgctcaagtcgtttcactttacaggccttgcgatggttgaatttaagggcgactgcattttagaggtcaatccccgtgtgtggggcagtttcccgatgacggaggcggcgcagagtcccatcgccgcgcactacgcgcaggccgcgcagggcgggcaagtcacctacacggcgaaggactaccggacgggtgtaaaaatgcgctttttcctcaatgacacggtcgctgcactgagctatctgaaggcgggccgcgtcaaggagggcctgcgcggtctcggcgatttcttcacggcgaaagaggccttgagcgccaagggcgatggcaaggtcatgcgcgcataccttaaaaagagcctgtttgagcgctgagaagggggagaggatcatggagctgcggctcgatctgcacattcattccgagcggtcgttcgacggctgcatgagcctgagcgagatcgttgcgcttgcgcgcgagcgcgggctgaacggtgtcgccatctgcgaccacgaccgcgtgctggacgaggttccggaattcgacgattttctcgtcatccccgcgaccgaggtttcgaccgagcgcgggcatctgctgggcctctttgtgagagaatccatcgaaacgaggaagttttccgagtcggtcacggccattcacgcacagggcgggctggcggtcatcgcgcatccctttgagcacagcacagacgcgaaccggctcgacgatgtgatgagccggcttgacggcgtcgagatctggaacagccgtgccgaccgcaagaacaagaacgccaacgccatggcgcgcgagctggcgcaaaaatggaaaaagcccgtcactgcgggcagcgacgcacatgtgccagaagaggtcggcggcggcgtgacggtgctggaagcggacgagctgtcgctttccgccgtcaaggcagcgctcctgcggggcgcgaagcaggtcgaaggccgccgtggccgcgcaatgtgcgtagcgagaagccagaagaccaaaagagagaagacaaacgcaggcgtaaaaagacgagtaaatggaatgctctttacagtaaaatgcgccttgcaggactttaccaccagggaggatggatggcatgtcatggatcgttaaactcggcaaaaagggaaagaagatcgtcaagaagatcatcacgcccgcggaaaagcactacgtcggctacacgcgccgcatcgagcgcgtgaagacgggtgagcgtatctgcgcgatgacgttcgacgacggcccgatgggccttcccgcatcgcccgaccgatttgagggcaaaacgctgacggatgtgctgctcgacacgctcgcgcagtatggcgcaaagggcagcttcgacgtcatcggcgacacgagcgagaactaccccgacgaggcgggcaagctcggcagcgcggcgtggggcggcgtcaaattcgaccactaccccgatatccactgcgacgacaaaggcggagccgtgcacaacgaccgcctgatccgccgcatgctcgacgagggccatcagatcacaaaccacggctaccgccacatcatcttcggcaaaaagccgtttgtctacggcgcgcgcgagtacctgcctggctttgacgccgcggtcgcggacctgacgcgcctcgacacgctgatgcgtgagcgctacggctatacgctcacgctcgcgcgcccgccgcactatgtcgacaagatggcgggcggctttacgagctacgacgtctacgagcgcatggggtaccagtatatggccgcgtcgttcgacggcgcgggctggctgccctcgacgcatgaggaccctgaggcggcgcttcaggcggagatcgacgcgatggtcgagccgatgcgcaaggcgctcgaaaaggacccggacttcttctgcggacagatcatcttccagaaggacggctacaacatggccaagcgcacgccggtcgcgttcgcgctgggcaagcagctcgcgcttcttaaggagtacggctaccgcgttgtcagcgtgggcgagctgatggaggagagcccgtttacggatgtcgggcgcgacgatccgctgtttgaaaagctcgtcgcgcttgcaaagacgcgagccatcgtcttcacggacaacaagctgcgcctcgacgataaaatgaccgtcggcgagctcgcgatgctgctcgcgccgcgcgacgaggccctctcccgccgtgtcgcccagctgcgaaagaccggcaaggccggcccctacgacggcgcaatgtcctactgccgcgaaaacggtctcatcggtgcgagcgccaaggccgaggacgccgtcacaaaactgccggacgccatgttcgacaaggcaactgactttacaagaagaaacgtctacgcggcatataaaatggaagaataaaatggcctcaagtacctccgctacatggcggaggtatttttttctcctcgtccacataggctatggcagaaatggacgggaggcgggcggcatgaagaagcggcggcagtggacaacatacagcgggagcgggaagcgcgttgcgccgcgaacgcgcacatcgcgcgtgtctcgcggcaaggagatgggagtgccgcggctttgggtgcagctcatcgtctgcggggcgctgtttgtggcgctcattggcctcaagctgctgatgccggggaacttaagcgcgctgcgcgggacgctggggcagtggctggtgcgcgacgcggacttcatctcggcgttttccgcggtcgggcgtgcggcatccggcgagcaggactggggcgattcgctgtcggaggcctatgtcgcggtgtttggcggcgagagcaaggcgcaggaggtctcgggcaatctgatcggcatgacggtctcggagcaggacgtctccgacctcacgagcgcgcgggagctgcccgcactcgccgtgggtgagcagcgcattttaggcttttcgtacacgacgccgctgtccggcacggtgacatcgccgttcggctggcgcgacgacccgaacggcgcgggcgagtgcttccattacggcatggacatcgcgggcgaggagggcgcctctgtcgcctgctttgccgacggtaccgtcggcacggtgggggagagcaatatcctcggcaactatgtgacggtcaaccacgagggcggattttcaacgctctacgcccattgtagcgccatcaccgcgagcgcgggacagagtgtcaaaaagggcgatgcgatcgctaaagttggctcgaccggcaacgccacgggctcgcacctccactttgaggtgcacgacggggaggagtatctgaaccctgtttactatgcggttccctgaacgcgggctccacgtttcgtggagcttctggctgctcattctgctcgcggccatcgtgagcccgctgacgatcgtgctctcgattttgctggccgccgcgctgcacgagtgcgggcatcttctggcgctgcgggcattccacgtgcccatcgaggggctgcgtctcagcgcgtttggcgcggtgctgcacgcgcgcggagcgcaaaggctctcttacgggcgtgagcttgtcgtcacgctcgcgggctgcggcatgaacctcgtctgcggcgttctgacggcgtggttttcgctgcactatgtgtgggtggagggcttcgtcttcgctggcgcgcacattctgctctgcgcgttcaacctgctgcctatcccgccgctcgacggctcgcacgcgctgaatcttgcggtctcggcgttgtttggcccgctcgtgggcgacgcggtcgcggcgcttgcgggcgttctctgttcactcgcgctgctgggcggggcagtgtatctctatgtgcagacgcgcggcggcgcgctcgttatttttgccgcactggcactgcttttaagcgcgctcaaagaactgagacttgcgcgtcgcgcaataaaagtgtagaatagccgaaaatggatgtttgtgcccattttcggctttttatttttgcttacttcagaggagaacttttgtggataagagattggaacgcattttgccccgcgtgcagaagcccgcacgctatgtcggcggggaattcaacgcgatcatgaaggacaagagcaaggtcgacacgcgcgtcgccttctgctttcccgacacgtatgagatcggcatgtcgaacctcggcatgcgcattctgtacggtgtgatgaacaatattgagggcgtgtggtgcgagcgctgcttcgccccctggggcgacatggagcaggagatgcgaaatgcgaacatcccgctctacgcgctcgaatcgtttgacccgatcaaggattttgacatcatcgccttttccattggctatgagatggcgttccccgcgatggtcgacatgctggacttagcaggcgtgccgctgcacgcgagcgaacgcacggcgctcacaccgctcgttgtcgcgggcggcacggcgatgtacaactgcgagcccatcgcggattttatcgatcttgctcttatcggcgagggcgaggagatggatgtcgagctcatcgagctgcaccgtcaggcgcggcgagagggctggagcaagcacgagtttctcgtgtgcgccgcgcagatcccgggcgtctatgtgccgagcctttacgacgttgtctacaacgacgacggcacggtcaagtccatcacggcaaacgagggcgcgcccaaggtcgtcctaaagcgcatcatgcgggacatggacaaggcctactatccgaccaagaccatcgttccctcgaccgagatcgtgcaggaccgtgtgtcgctcgaactgtttcgcggctgcatccgcggctgccgcttctgtcaggcggggtatgtctaccgtcccgtgcgcaaccgctcggaggagctgctgcgcggctacgccgttgaagctgtcgaggactcgggctatcaggatatgacgctctcgtcgctctcgacgtccgactatccgcaccttgtcgagctgtgcgacgacttagaggacttctgtgcccagcggcatgtgacgctcgcgctgccgtcgctgcgtgcggataacttctccatggcgctgatggagcggctgcaaaagggcagaaagaccggcctcacgtttgcacccgaggcgggcacgcagagactgcgcgacgccatcaacaagaatctgacggaggaagatctgctcgaatcctgccgccgcgcgtttgcgggcggatacagcgcggtcaagctctacttcatgctcggccttccgaccgagacggacgaggacgtgctcggcattgccgacatcgcggcccatgtcatgcacgcctggcgcgaaagcgcactcaacaagacgcgcggcgtgcgcatcacggtgtcgacctcgtggtttgtgccaaagccccacacggcgttccagtgggagccgcagatccccattgaagagtacgagcgccgcgtcaagctcctgcgcgaggcgatgaacaccaagtccgtcacgtacaactggcacccctcgcccacgagctttatggaggcggtcatctcctgcggcgaccgccggctcggcaaggtcatcgagaccgcgtggcgcaagggcgaaacgctcagcgcgtgggaggactattttgatctgaaccgctggatggaggcctttgaggagtgcggtcttgacccgcacttttacgccaaccgccgccgcagcgaggatgaaattctgccgtggagcatgatctcctgcggtgttgcaccggggtatttgaagcgcgagcacgcgctgagctatgagggcgtgacgacgccggattgccgcacgcactgcaacgcctgcggcgcaaactgcctggtgggagggaaatgcgatgtctaaattgcggctggtttttgtcaaggagcatcaggcgtcctacatttcgcatcttgacgtgatgcgcacgttccagcgtgtgttcccgcgcgcgggcctttctatcaagcactccaatggcttccacccgcaccccattttgtccatcgtgctgccgctgcccgtggggcagtcgagcgactgcgagatcctcgactttgaaagcgtggaagacagcacgggcgagggcgtggccgaggcgctgaacaccggcatgcccgcgggccttcgcgtgctggactgctatagcgtgacgcgccccgtgcgcgagatggtcaacctgcgcgcacagctcgaaatggaatacgacaacggcgtgcccgagggtgcgtgcgagcgcatccgcgagttttttacgcaggaggagatctttgtcgaaaagcgcacgaagcacaagggcatgaccgagctcaacattgcgccgctcatccgctcgctcacgctgacggagggggagggcgtgatcctcgccgatgcggtcgtcgccgcgcaggacccgggcctcaaccccgcgctgatcggtgcggcggtcgcgcggcacctgccggagatcgcaccggactttgttcgcgtgcgccgaaaagaggtctacgacgcggaaatgaacgttttccgctgatttctgccgtgtttttgcaaataatgcttgcattcccgttggggatgtgatatgctaccatagcttgaaaagggcggtcctctgccgtgcgcgggtgaaagagtcccgacagcgccattgatcagcggtcaagaacgcctataaataggaggaaaatatccatggatctcatcaaagagctcgaatcccagcagctgaaaaaggaaatgcccgtcatcaacgtcggcgacaccgtccgcgttcatgtcaagatcaaggaaggctcccgcgagcgtatccaggtcttcgagggcatcgtcatcgcgaagaagcacggcggtcttgaggagaccttcaccgttcgtcgtcttgcctacggcgtcggcgtcgagaaggtgttccccatccactcccccctcatcgagaaggtcgagaccgtgcgcagcggttatgttcgccgcgccaagctgtattacctgcgtggccgcgtcggtaaggctgccaagatccgcgagaagctgtaaggcagattctttgagaacaaaaaagcatggcgtttccgccatgctttttttgttgcctttttcaaaaagcgtgctacaataatacattagaaaatcaggcgcattttgccgcagagggagactgttagtccgccgctgcgcggcgctgggtttaggagaccgaaatggacgaatttgatcagaaaatggagatcagcgagcagccgcaggaggagatcgtggaaaagatccccggacgcgacgtgtatgagacggtctcgtctctcgtctcggcgctgctggtcgttgtgctggtgtttacgtttcttgtgcggctgatgggcgtttccggcccgtcaatgatcccgacgctgcaggacggcgaccggcttctcgtcgtcaactcgctgctctgcggcgactatcaggtcggcgatatcgtcatcgcgcgcaaggagacctttgactcgaagcccatcgtcaagcgcgtcatcgccaccgcgggccagaccgtggacatcgactttaacttgggtcaggtctatgtggacggcgagcttctggacgaggactacatcaacgactacacctatcgcgaagagggcaccgtgttcccgcttaccgtgccggagggcgaagtcttcctcatgggtgacaaccgcaaccattcgaacgacagccgcgattcctcgctcggcacggtggacgcgcgccttctgatcggcaaggcggtgttcctcgtcttcccaggacgcgactatctgaccgagcagcgcgagtttggccgcatcggccttttgcagtaaagggggacgagcaaatgcagttggattctctgagctggttcccggggcacatgaccaagacccgccgcatgatcacggcggagctcggcaacgtggacgccgtgtgcgaaattctggacgcgcgcatcccgatgagcagccgcaaccccgatgtggacgaactgacggcgggcaagccccgtttgatcgttttgaaccgcgtcgatcaggccgaccctgagatgacgaaaaagtgggcggcgtatttccgctcgctcggctgcgccgtcatcgaaacggacgcgaagcagggcgggggcgtgaagcagttttcttccgccgtgcgcacgctgctgcacgataagatcgcctcttacgaggccaagggccagatcggccgcgtgctgcgcgtgatggtactcggcatcccgaacgttggcaagtcgacgtttatcaacaaggtctccggccgcaagagcgccaaggcggaggaccgccccggcgtcacgcgcacgaagcagtgggtgccggtcgacaagacgctcgagctccttgatacgccaggcatcctgtggccgaaatttgaggacagtagcgtcggcgtgcgtttagccttcaccggcgcgatccgcgacgaggtcatcgacatcgaagagctcgccatgcgcctgatggattacctcggcaaaaattatcccaaggccatcgaggagcgctacaagctcaccgtttcggaagaggacgacggctatgcactgctcgaaaaggcggggcgcaagcgcggctttctgatctccggcggcgaggtcgacaccgagcgcatgagccgtatcctgctcgacgagttccgcggcggcaagctcggccgctttacgctcgaattcccgccggagggcgaacgcacatgagcgtcaacctacactacgaggacaaagcccgctccgcgggcttttcatccgtctgcggcgtggacgaggcgggcgcggggccgctgatgggccctgtgtacgccgccgccgtcatcctgccggagggctgtgagatcgaggggctgaatgactccaagaagatgacggagaaaaagcgcgaagcgctgtttcccgtcatctgtgaaaaagccgtcgcctacgccatcgcgtccgtcgacgagaaggagatcgacgcaacggatattttgagcgcacgcatgaaggcgatgcagctcgccatcgatgcgctgcaaatcccagcggactatgcgctcatcgacggcaaccgcgaccacggcgcgtcggcaaagatcaccacgccgcacgagaccatcgtcggcggggatggcgcgagcttatccatcgccgcggcgagcgtgctggcaaaggtcagccgtgaccattatgtggtcgaagtgctcgacccgatgtatcccgagtatcagttcgccaggcacaagggctacggcacaaagctccactaccagatgctcgatcagtatggcccgagccccgtgcaccgcatgacgttcctcaaaaagtgggaggcgcggcgatgagcacgaagcaggacggcgactggggcgaggcgctggtcgaaaagtatctgagcgagcgcggctgccgcatcgtggaacgagagtggcgctgccgcttcggcgagatcgacctcatcgccgagaaagacggcgtgctgatgttcgtcgaggtgaagctgcgcacaaatttgcagtacggtgcgccgcgcgagtacgtcacggtgaaaaagcaggaaaagctgcgtgccgcggcgcttttgtacttgagcgagcgcgagctggatgtgcccgcccgcttcgacgtggcggaggtctacaccgatgtgcaccgcagcgcgggcaaaacgcgcatccgctacatcgcaaacgcattttgatctgactttggaagggaggcacgcgatggcattatacgcgatcggcgacctgcacttatcgctcggcacgaacaagcccatggacgtgttcggccccaagtgggcaaactatgtcgagcgcattcgggaaaatttctcgaagctcaacgatgacgacgtcatcgtcatcgcgggggatatctcgtgggggatgtcgctcgagcagtcgctgccggattttcagtttattgacgcgctgccggggaggaagatcctcttaaagggcaaccacgactactggtggggtacagcgtcgaagatgaaaaagttttttgccgagcacgacatcacaacgctcgatatcctctacaacaacgcctttttctacggaggccacgccatctgcggcacgcgcggctggttttatgaagaggacgccgcgggcacgcacacgggcaagatgctcgcgcgcgaggcgctgcggcttgaagcgtcgctcaaggcggcggaggggaagcccatctactgctttctgcactatccgcccatctatcagggctacaagtgtcccgagatgctcgagcttctcgacaaatacgaggtcgagcgctgctattacgggcatctgcacggctacacgcaccgccgcgcgttcgaggggttgcgcgaaaaaaccgaatatgcgctgatcgcggcggattatgtcgcctttcagcctgtaaaaatttgcaattaagacataaattgatgcaaaaaagggtggaaattttgaggaagctatggtataattccactttgcaaaagcatcattatctgatgttaaacggaggaaaaagaaatcatgactgtcaaaaatgttgaaaagctggaaaagagcagagtcgcggtgaccgtcgaggtcggcgcggaggaatttgaagccgccgttgccaaggcctacgccaaggcccgcggcaagctcagcattcccggcttccgccccggcaaggccccccgcaagatgatcgaaaagctctacggcgcgggcgttttctacagcgatgccgttgacatcgccctgcccgaggcatatacgcaggccatcggccagagcggcctcgatgttgtcggctatcccgagatcgagatcgtggacgacaagatcgacgagaacggcttcaccttcaaggcgaccgttgccgtgtatcccgaggtcaagctcggcgagtacaagggcctgacggctgagaaggaagagatcaaggtcagcgccgacgatgtcaaggagcgcctcaatgagatggccgagcgcaacgcccgcctcgtctccgtcgaccgcaaggccaagaagggcgacatcgccgtcatcgacttcgagggcttcgacaacggcgaagcgttcgagggcggtaagggcgagaattacgagctcgagctcggctccggcagcttcgtccccggctttgaggatcaggtcatcggcatgaaggccggcgaagagaaggatctcgacatcaccttccccgaggattatcacaaggacctcgccggcaagaaggttgtcttccacgtcaaggccaaggagatcaagtgcaaggagcttcccaagcttgatgatgacttcgccaaggacgtgtccgagtacgacacgctcaaggagctcaaggacagcatcaagcgcgagatcaccgagcagcgcgagcagtccgccaagtatgccgtcgagaacgagctgatggagaaggtcgccgcgaacatcgagtgcgacatccccgatgcgctcatcgatgagcagtgcgcccgcttcctcgaggagttcaagcagcgcttacagtctcagggcatcccctatgaccagtactgcaagatgaccaacatggatgaagccaagttcctggaggagggcaaggagcccgcgacccgtcaggtgcgcatggacctcgccgtgaacgccatcatcaaggaagagaagctcgaggccaccgacgaggaggtcgaaaagcagtacaacgacctcgctgagaagtacagcatggacgtgggcgagctcaagaagtatcttgacgccatgtccgtccgcacgcagatcatccgcgacaaggccatcagcgtcgtcgtggacagcgcgaagatcgaaaagaagaaggctcccaagaaggaagccgagggcgaagccgctgaaggcgaggaaaagcccgccaagaagaccgctgccaaaaagtccgccaagaaggaagaggaaaaggctgaataatcggcaaagcggccataatagatagaaacgacgatcaaccacaaatgcctgccatttgtggttgattgtgtacataccaattttttgaacagggtatgaacaaggaggttaccaagatgagtttagtcccttacgtcattgaacagaccaaccgcggcgagcgctcttacgatattttctcccgccttctggaagaccgcatcattttcctcggcgaagaggtcaacgatgcgaccgcgagcctgatcgtttcgcagcttttattcctcgaggccaaggaccccgacaaggacatccagctctatatcaactcccccggcggcagtgtgacggccggcatggcgatctacgacacgatgcagtatatcaagtgcgacgtgtccaccatctgcgtcggcctcgccgccagcatgggtgcgttcctgctctcgtccggcaccaagggcaagcgcattgcgctgccgaacgcggagattatgatccaccagccctccgccggtacgcagggcaaggtcacggatatggagagcgacgtggagcacttcctgcgcatcaagcagcgcttgaataagatcctggccgagaacaccggcaagacgcccgagcaggtcaagctcgactccgagcgcgaccactggatgacggcggatgaggcgcaggcctacggccttgtggacaaggtcatttacaagagataaggacagtttgacttatgagtgaagataggaaaaaagagcttcgctgctcgttctgcggcaagagcgagcacgaagtgcaccgcatgatccaggggcctggcgtgcgcatctgcgatgagtgcgtccgcctgtgcatggacgtgctggaggacggctatgagccgcacgacgagctggaagcgcccgactccatccccacgccgcgcgaaattcgcgaggtgctcgaccagtatatcatcgggcaggaggcggccaaggtcgcgctgtccgtgtccgtctacaaccactataaacgcatcttcttcggcggcgacgacgaggtggagctgcaaaagagcaacatcctgctcctcggccccactggcagcggcaagacgctctttgcccagacgctcgcccgcattctgaaggtgccgttcgccatcgcggacgcgacgaccctcaccgaggcgggctacgtcggcgacgatgtggaaaacattctgctccgcttgcttcaggcggcggattacgacgtggagctcgccgagcgcggcatcatctatgtcgacgagatcgacaagatcgcccgcaagagcgagaacacctccatcacgcgtgacgtctccggcgagggtgtgcagcaggcattgctgaaaatcgtcgagggcacggttgccaacgtcccgccgcagggcggccgcaagcacccgcatcaggagtttatccagatcgacacgcacaacatcctcttcatctgcggcggtgcgttcgagggcatcgagaagatcatcgagagccgtctcgaccgcaagtcgatgggcttcggcgcggagctcaagagcaaaaacgacgtggatgaaagcaagattttacgcgaggtgcagccgcacgatatcttgaagttcggcatcatccccgagctggtcggcagactgccggtcatcacggcgctcgacgcgctgacgcgcgacgaccttgtcaagatcctgacccagccgaaaaacgcgctcgtcaagcagtatcaaaagctgttttcttacgacgacgctgagctcacgttcgagcccaaggcgctcgaagcgattgccgacaaggccatcgagcgcaagatcggcgcgcgcggcctgcgcgcggtaatggagggtctgctgatgaacgtgatgtacgacatcccgtccgaccgcacgatcgaccgcgtgaccatcacgccgggctgcgtggaggggacggaacagccgaaaatttcccaccgcacagagaaagaaggggaggcgccgcagccgtcgctgccggcagactccgcttcataaggagaaaccccatggaacctgtaacaaaaaatcttccggtcatcgccatgcgcgggctcaatgtgttccctcgcatgaacacgagctttgacctcgagcgtccgatctccgtgcacgcgcttgagcgcgccatggaaaacggggaggagatttttctcgtcacccagcgtgagatcggcgtggagcagccggaggaaaaagacctgtacgagatcggcacggtcgcgcgcgtgacgcagatcttgcgcgtgtctgaccgtgtgctgcgcgtgatgatggagggcgcgtgccgcgcccgcctcaagcggctgtggcagcgcgagccgtttttgcaggcgcaggtcgagctcatcgacgagccggccacctcgtgccatagcaagcggacggaggcgatgctgcgccagacctacgccagcgtgacggaatatgccgagctcgcgcagaaattgccggacgatgtttacgccgccattttatcgacgaacgatcccggctatctcgctgactttatcgcccagcagctcaacctgcgctatcaggacaaacaggatatcctcgacgagctgcgcccgctgccgagattgcagcgcatgaacgagatcctgcgccgcgagatcgaagttaccgccatggagcaggacattgaaagcaaggtccgctcccgcgttggaaaaattcagaaggattttgtcctgcgcgagcagatcaaggtcttacagaacgagatcggtgagggcggggaggacgaagaactcgacgagtaccgcgagaagatcagcaaggcgcacctgagcgaagaagtggagcgcaagctgctgaaagatgtggacaagctcgccaagcagccgttcggcagcgccgaggcgagtgtgctgcgcaactatctcgacacctgcatggaaatgccctggggcgaggagacgaaggagcgcgccagcgtagacgccgcgcgcaagattcttgaccgcgaccactacggcttgcagaaggtcaaggagcgcattttagagttcatcgccgtgcgccagctcaaccccgaggcgaaggggcagattttatgtctcgtcggccctccgggcgtcggcaagacgtcgatcgcgctgtcggtcgccaaggcgatgaaccgcaaggtcgcgcggctgtcgctcggcggcgtgcgtgacgaggcggatatccgcggccatcgcaagacctacatcggcgcgatgcccggccgcatcatcgaggcgatctcccgcagcggctcgatgaatccgctgctcgtgctcgacgaggtcgacaagatgggaagcgacgggcgcggcgaccccgcgagcgcacttctcgaagtgctcgacagcgagcagaactacgccttccgcgaccactatcttgaaattcccgtcgatctgagccgcgtgatgttcatcatgacggccaacacgcttgacaccattccgcgcccgctgctcgaccgcatggagatcattgaaatccccagctacacggacgaggagaaggtgcagatcgcgcagcggcacctgctgcccaaggagcgtcaggcccacgggctgacggcctcgagcctgcgcgtggacgagagcgccatccgcgcggccatcgcgctctacacgcgcgagagcggcgtgcgctcgcttgagcgtcagctcggcaagatctgccgcaaggcggcaatgcagcttgctacaagcgatgtaaagcgagtcaccgtgacagagaagaacatcaaggacttcctcggtgcgccgcgtgctgcacaggaaaagattcccgaaaaggaccttgtcggcgtggtgaacggccttgcgtggaccgaggtgggcggcgaaattctgcccgtcgaggtcggcgtgatggatggcagcggcaaggtcgagctcacgggcaacctgggcgacgtgatgcaggagagctgccgcgcggcgctctcgtgcctgcgccagcgggcgcaggagctcggcatcgcgccggacttctacaagacgaaggacatccatatccacttccctgagggggccatccccaaggacggacccagcgccggtatcgccatcgcgacagcggtgctctccgcgctgacggggcaggcggtacaccgcgatgtcgccatgacgggcgagatcacgctgcgcggccgtgtgctcgccatcgggggcttgcgtgaaaagacaatgggcgcgctgcgcgcgggcgtacatacggtcattctcccgaaggagaatgaaaaggacctcgacgagatcgacccgctggtgcgcgaaaagctgcgctttgtaccggtcgagacggtggacgccgtctttgccgaagcgctggtgctgcccgaaaaatgcaccgctgccgcgcacgagagctatcttcctcccgtgcaggagagcgcacacagcgcgctgcgtgcgggcgaaatgagctgaaaggaaacgaaaaccatggcgatcaacttcaacaaggtcgaattcatcctctcggcggcgtcggaaaagcagttcgtgcgcgacgggatgccgcagctcgcgtttgcggggcggtcgaacgtcggcaaatcgtccgtcatcaaccggctcgtcaaccgcaagaactttgcccgcgtgggtgcgtccccgggcaagacctcgcagatcaactactttaagatcgacggtaagctctacctcgtcgacctgccgggctacggctacgccaaggtctccaagaccgagcgcgaccgctggggcaagctgatggaaaactatttccagtctgcggggctcattcacctcggtgtgcagatcgtcgacgcgcggcacaagccgacggcggacgacgtgacgatgcacgactacttcgtgcagacgggctgtcccgtcgtgatcgtggcaaacaagctcgacaagctcaaagcgcgcgagatcgagccgaatcttgcccaaattcgcgagacgctgagtttgcgcgacgatgagctcgtcattccgttctctgccgaaaagggcacgggcaaggagcagctgatcgcggcgatcctcgaccatttgaacgactgaaaaggaataatgcttcacagaaaagcctctgtatgggttgaccatacagaggctttttatcgtatttcccggggaatcagcggcgcagcgtcaaaagcgcggtgcagtgggagaaggattcaaacgtcagcgcagggaagtgagggcggagctcgtcatagacgaagtaaatttcatcctcgtcccactcactgcctgccgcagttcgacacgcttcgagctcttcgcgcgtgcggaaggcgacgtcgccgatgaaaagacagccgtcctgcttcaaaagcggcagaagcgcgcgaagaaagtcgattttctgcgtgtccgtcaggtggtggagcgagtaggtcgcgacgatggcgtcgtactgctgcgcacgaagctcgggcacaaggcctttggaaaaatcgccctgatagagccgcgcgtccggcatttttgcctgcgccagttcgatcatgcgcgcggaaaagtcctgcccatagatgcggcagctatgctcgtagagccgcgaggtcaaaacgcctgtgccgaagccaatgtccagcacatcacgcccgctctgcgcgagcacgcgctgatagagcgcgttcatcatggcgcggtagcccgcaaaggggtagcggtcgttctcgtcggagaggccgacgctcttgtcatagccgtcggcccagaggtcgaagccggtattgttcagcatgtcagtcctccttttcgttcagcgggggaagtcccagctcatagaatgccacggcgctcgctgcggcgacattgagcgagtcgacgccgtggtacatcgggatcctgaccgtgtagtcgcagctcgcgatggtcgaggacgcgagcccgtcaccctccgtgcccatgacgatggcaagcttttcttcggcggcaaggcgcggatcgtcgagccgtacggagtcgttgcgcagtgccatcgcgacggtgcggaagccgagatcgcgcagcagctgcgtccagtcgccgctttcgggcaggtaggtccacgggatgaggaacacatttcccatgctgacgcgcgaggcgcggcgatagagcggatcgctgcccgcggtcgcgagcagcaccgcgtccatgccgagcgcggcggcggagcggaagatcgcgccgatgttcgtcggattcatcacgttttcgagcacgacgacgcgccgcgcattgcggcagacgtcctcgacgcttgggagcttcggccgccgcatggcgcagagcatgccgcgcgtcaggtgaaagccggtgagctgtgtcagcacggattcatcagcggtgtaaaccggaatatcttgacagcagcgggcgagaatttcgcgccccttgccctgagtatgctgccgctccatcagaaacgacaccggctcacagcccgcatcaagcgcacggccgatgacgagcggactttccgcgacgaagagcgcgttgtcggggtccgcgcgattgagcagttggttttcagtcaggcgcgcgtaaacgtcgagcgcgggatcggaaaaatcgtggatttcgatgatgtttgccataggttttcctttttaagattctaagatgttcagcagtgcggcgacgtccggcagaacgaacgtcggctgcgggtcagcggtggggaggccttcttccttcgtctcgccagagaggacgagcagcgtgtcgatgcccgcgttcgcgccgctggcgatatccgtgtagatgcggtcgcccacgagcagtgtttcctgcgcggaaacgcccgcctcaagcattgcgagctgcggcatcagcggttcgggcttgccgatgacgatggggcggcgggaagtcgcgcgccagagcatttcgcacacgctgccgcaatcgggcacgaagccgtaggccgtggggcagacccaatcgggatttgtcgcaacgtagggagcgccctgaccgagcaggatgcaggcgtcctccagcttttgaaatgtcagctcggtgtcgaagcccatcaggagcgcgttcgcgtcctcacgccgttctgcgacggtaaagcccgccgcgcggagctgtgatttcatcgactccgtaccgcagacgtaatagcgtcggtcttctccgccgtgctcgcggagatagtgaatcagcgcgtcgaccgaggtgagaaaatcggccgcctccgtcgcgacgccgaggcgtgtgagctttttgacgtaggccgctacgctgcgcgaggagttgtttgtcagaaagcggtactgcccgccgcgtgcgcggatggcagagagcagctcgcggacgccgggaaaaagccggttgcccaagtacagcgtgccgtcgaggtcgaaaagaaagagctttttgcactgaagcggattatggtcaaccatcagtcacgccttctttttgctgtcgatcgcaatgaagaagaatgagctcaccgccagaagataggggtaaaagaggtttgggatgatgtcgaacgccgagatggcgtagcccagctcgtgcgccgcggagatcgcgacgagcatctgtgcgccgtaggggatgatgccctgaaagatgcaggagaacgtgtcgaggatcgacgcggccttgcgcggggtgatgccgtactcctcgctcatctccttggcgatggggttcgccataacgatggcgacggtgttgttcgcggtggcaatgtccatcgcgccgacgagaaggcccatgccgatctggccgccgcgcttgccgcgaaacgcctttttgatccagccgagcagcgcttcaaagccgccgtactcacggatcagcgcacagatggcggagaccaaaattgcgaccatcgacgtttcaaacatgccggccgcgccgctgcccatgttctcgagcagcgccttgactgcgaggatgccggtctgccccgtcgcgccggtcgcgagcgcgatgaccgcgccggatacgataccgatgagcagcacgacaaagacgttgataccgatgatgccgccgatgagcacgagcacataggggatgatctgaatgagattgtagggcggaatctccgcaggtgtcacgtcggcgtggagcgtcagcacgaggatgagtgcgagcgacgcgagcgcggcggggaaggcgatgtggaaattttcgcggaatttgtccttcatcgcgcagccctgcccgttgcaggcggcgatggtcgtgtcggaaatgaagctcagattgtcaccgaacattgccccgcccatgacggacgcgacacacagcggcagggaatagccgctggccgcggcgatggggatggcaatgggcgtgatgagcgtgatggtgccgacgctcgtgcccatcgcggtggagacaaagcagcttacgacgaacagcaccgccacggcgaattttgacgggatgatcgagagcatgaagtacgcaacgctctccgcactcgagcggcccacgacgccgacgaacatacccgcggctaagaagatgagcagcatcgtgatgatgttcttatcacccacgccacggcccattagcgtgagcttttcgtcgaacgacagcgcgcggttctggcagcaggctacgagcagcgcgacgagaaagatgacgacgatggggatggaataaaatcccatcgggattttgagcacgtactcaaagatcaggccgaggcccagatacaagacaaggaacactaagatcggcagcagcgccgcgggattggctttttttgacatgggatgacactctctttctccaaacataaaaaaagctcctgcgcggagctttttgtgcgatatgaattattataaggagcgtggaggaccttgtcaagtgagatttgcccagaattgagcgcaaaagggcttgacagaaggactctaatctgttagtgtacaaatatactctaacagattagagagggaacaagatggaaacgccgaaaatttttgagagcgaataccgcttttgccaaatcctgtgggcacacgagccggtcaagagccgtgaattggtcgcgctctgcgccgagcacctgggctggaaaccgacgacgacctacacggtcatcaaacggctctctgagcgcggggtgctgaaaaacgagaatactgtcgtcacgtcgctcatctcacaggacgaggcgcaaaccgccgagatcgacgagctgctcgacaagcgcttcgacggctcgctgcccgcgttcgttgccgcgtttacaaagtcgagccacgtgagcgacaaagagcttgacgaggtgcagaaaatgatcgacctttatcgaaaggagaatcatcatggatgacgtctttttgaagctcgtgaacctcagcatcagcgcaagctggctcattctggcggtgctcgtgctgcggtttgtcctcaaaaaagcgccgaagtgggtcatgccgcttctctggggtgtggtcgcactgcggcttgtctgcctgttttcgattgaaagcgcgctctcgctcatcccgagcgccgagaccatcccaagcgagatcgtgaccgaaacgcgcgagccggtgctctacgagcaggcgacgcttgacatcgtcacgaatccgacgctgccttcggcggcggaggtccccgtcggcgtgagccgccagcaggcgcaggtggacttcaacatctacagcgtcctctggctcgccggcatgacggcgctgctcgtccacgcgctcgtgagcgcgggaaagctgaaaagaaagctcgcaacggcgattttgctgcgagataacatctacgagagcgaatttgtcgattcgccgttcgtcttcggcgtggtgaagccgaacatttatcttcccatgcacatgggcgaggggacggcggcgtatgtcatcgcgcacgagcacgcgcacctcgcccgccgcgaccactggtggaaggtgctcggctacctcgtgcttgcgctgcactggttcaatccgctggtgtgggtcgcctacatcctcttctgccgcgacatcgagctcgcgtgcgatgaaaaagtcgtcaaggggctggacggtgcggcgcgcgcggactattcgcaggcgctgttgtcctgcgccgcgccgggaagagctgtcgcggcctgcccgctggcgttcggcgaggggaacatcaaaatgcgcgtgaaaagcgcactgcactacaaaaagcccgcgttttgggtcgccgccgcggcggtgctcgcggtcgtgatcgtggccgtgtgctttttgacgaatccgaagtcggagcgcggcagccttgtctgggcgcagaagctgaatgcggcggacgttgcgtcaatcgagctctacgttccggcggaaggggaggcgcggcagtataaaaaactcgatacggaagaaatggcacaggcagtcgaactgatcaacagcagccgcggcacatatatcgaaaaaccggagacggtttacgccggcttgccggtgtggttccttctcacgatggacgacggcacggtgcatgctgtcggcagcgtagtgggccattatctgatcatcgacggcgatacttttgatgcggacgtcgagaatcaggcggaatgggaaaactatgtgctaaagggcgattcggcaagtccgatcgacatggcagaccggctgtcgtatgcactctatgggatgacaacgggggtgtatacgctcggcgaggccgttttcgaggattccgtctgggaaaccagctatgaggagacctttgccaacacaaagtccacgcccgagctgtggctttcctccgcacttggcacggacatgaccggtattctgtacggtacagtgacggcggcgagaggatacagctaccgcttttcggagtgggaagagatcgacctgaccgtgagcaacttcgattggctgtttcgcagcggaagcggcgaagattgggacggtacgagcgccgcgaggctgcgccgcgaaaacgcccatgcctggcgcggcacgagaacgggcgaggacgtcaatgcgacagtgccgatggcggagatcaggcgtcaggacgagctcacggcgatggaccagtggctcttattgcagcagaaggacggcagtctttacctcgtgatgggctatcgcagcgggggacttccctacagcggggcgcatccctaccgctggatcgtccgcctggacggcggcgcgaccgagctgacccgcgctgacctgaacggcgacgggatcgaggaagtgatctcctataccggcacttccacgcaggagccgtaccggctgcgggtgagcaatcagagcggcgaagagctctggagcgcggagctgggactggcgcacgcgggctggagcagctatttcctctatcgcgacagcgtcaagacggcgctgctgtgctacgagccgacgatctatcagggcgaggcatcgtattcctacgagctctttatgctcagtgaaaacgggacgaccacgctggcggagaattcggtgagcttcagcgtaaattccgattccgccgattcatggcccgccgaggcgcggaaattcgcggacgaggtcaacaggcttttagacaagagcgagttgctgttctccacgctgaacgccgagctgcattcctacggcgacggcacggtcatccgctgcgcagaaccgtcggagagcgacggaagcagggcgctggcgtccgccgacctcgacaacgacggcagggcagagcagatcatctgcgagaaagcgttcggcggctatgagctgtgcgtcgtcgacgacaacggcgaggaactgatgcgcgaccgcatgtgggagggcgacgtctacttcctctgccgcgaaaacggacgcgacatgctgctgcaatacagcttaaacgagggcaaaaatcaagacgcgatcagctattgcgcctactactacggccttcacacctttgacggcggcaaactgaacatcgtggaaaacaacaacacgagcatttatctgaactgggacggaacgcagaagggcgattggggcgaatcgcagcaggcattcgcagcgcgcgtcaatgagctgatcgaccagagcgaatttctcattgcccaacaggacggcgagctcattttgacaagcgaggtgcagcgctggtactgcgtatcgccgaaaacgatcagagtggcaatggatgacacaacgatctatatcgacagaaaaagctgggactttgccgaacagtacccgtcgctcaaagggtttgaggacattgggaccgcaggcaactactttgtggcgttcggtagcctgggggagaaaaacgacctctacgtggtgttcaatttcgtggccggcacgctgctcaagaccttccccggcaacaacctcatctggcaaggaagtgacctttccaccgcggtctactcctaccggtcggacgtctacgcgctcaacgggacgaagctcgccgcgctcgaactcgcgagcggcgaggagatcagcggccttgcctttgcgcccgacggcgtgtcgatcattgcgacggtctccggcaagagcggcgagcgtaaggtgacggtcacgcgcgagggcagcgcgtagcagacctcgctcaccgactggacggagggcgacggcgcggagcgcacgtacttcgcccctgtcgggatcgaggggaacgagacatttctggcgacggtcggcgtgagctaccggctggaacagcagtcggacggcacatcccgcatcgcggagatcacaggcgcgcagggactcacgctgccgcgctatcgccgcggctgggtcagcgtggatgaaaaggccgacgtgctggacaccgtgatcgcggacgacggcaagagcgccgacgtgacggtgcagtattacgcgagccttgggtcggggtatcagacgtacacggcgggggttcatattgtcgcaccgtagggtgcgagggggattcctgcatcgtgcaggagtgcgctaaagggggatactctctttcaagaaagagagtatccccctttataacccccgagagaaaggacgaggggccttccccctcgaccccgcacattgtgagtttgcagcttgaatgactgcacgcgctgcgcagtgtgggtgcggtgtacatggcttcgccatgaatccctgcgagtcgtgatctgacagcaaccgcgccttactgtcgtgaggcgcgagtgacgtttgtctggcggcagactgcctgccgaatgcggcattgctggcgctcgccgcattgtggagtgctccggtagacggaaattaggctctacttctacaagatgggcagagcggcagcgggtagtaggagcagaggcaaatcgtcttgcagtgctaacgcggcaacgccgcgctatgggcagtgcaatcggcaagcattgcagctcttcgagctgctcgcttgcaatggcaaaacctttctcttgggggatcaaaagggggccattctcttttgtgaaagagaatggccccctttgactgcacgccgcagagactgcggcattcctccgtgaaccacggaattgttactgaaatgatcagtgaatattcaaaacgccgtcttcgttctggagaagaacgaaataatcctgcattcgctcgaacggcgcgtagctgcggcggtgttcg

SEQ ID NO: 10149 - DNA, 9261 bp, Unknown
  gut microbiota DNA sequence
tgcggtctggacggggtactggaagcggccgttctggtggacataataaaatcgtccgttgagacgggaaacattatcgctgaggggatgaagcgagcaggcgatatagccgcgccggttcgtgccgctgtttggaaaagagaggtcggcgcagtagatctgccggaagcaattctcgtaccagttgctgaggctggcttgctccgtaccgggatcaatgtaaggggcggtgtaggtcgtgccgtccggactgtcatagaacacccggccggagaattctttggcaaaccaggagttgctgtcgtggtgtggctcaaaggcaaggctctccgtgccgtaaaagcgcacgccatcgtcccagcgaaaatgacaggcgacgaacagccggtcaaagggccgttggacggcaacgatggtcaggtggaaggcgtcattcgtctgcggcttattggagtagttgatataagcgctgcctgtgcactccctgacgagcacacgctcggcgcggaggcaggtgagaaggtcctcgtcggagaggtcgttgagctcggattcgggatagccgagggcgaggagcctttcatgggcttcgatcacctgtgcgtcggtgctggcctctttgggcgtccagtccatgcggtaggagccgaaaaacaggaagccacaggtaatgacgacggcgaggacggcgagcagcgagccgacgagcttgtgatttgagaagcgctccttgatcggcttgatggcgcagccctgcgtggccatcgacttcgagagctttttgaggcggacgaccaggtagaaataccagacgaggtaagcgccgagcaacagggaaagcgaggcaaacaatgccgctgcgacatagagcagaatgtaccagagcaatagagcgcccgcggcgggggcggcaggcggcgttatgcctgcgtcgcgctgcatatcgagcaggccctgccaaaggcagaagagcagcacgagctgcacggcggcggcaacgacggtgaaaaatgccgccaggccggtgtccgcacggtagatcacggcatcctgcccaagctcaacaaaaaggagcagcatgtgcaggcaggcgcagacatagcccgcgcgaagaaagccgttgacccgccgcagggcgcggaagccgacgagcaggcagaatgtgccgaccagcggcagcagcacgtcgaggttccagaaattcagcgtcacgccggtgacggcgaggccgccggcgatcaagcccattgcgcggcagaagggcgaatcgctcacatcgggcgtctctacttcgggcgcggagagcgcgtcggccatctcctgcgcgggcgtgagggtctcggccggttccttctgcgcgggaggatcggcgggcggttcgggcgggggagtttgcggcagatcaggaaagacttggccggtcatgcgaattcctccttggcgttatgtgaacagaatcataagatcgagacaacgagccgccagacaggctcggccagataatagccgagaacagcggaagccagattggccgtgatcgcataggccgcggcgcggcccttgctgtggccagtgagaaagccgcagccggcgtagagatacagctcgacaagcaaaatgatgagttccgccggaagcaggaagaaaaagaaataccaagcgctcacgccgctgtgtgcggcgacagatacagatgcaacggctaaaaagccctgtgtcagaacgttgacaagtaaaaacgcttcccagtttttcttccacgaatagcggaacagaagcaacagcgcgccctcgatgagaaacgtcggcacgagcgttgcgacaaattgcagcaagtagccggggatggttgagggaacggaaacggtgactgccgacgtatcgtccgaccagttgaccgtgacggacgattgcagaacgcggcgattgagtatatcggagacccagaccttgccggattcggtgacgaggatgatgcggtaggtgctcggcacaccgacgtagccgaaccggtgcagtgcattgccagaggcgtctgtccctctggaaaagagatggctgaagatcggtgcgccgaaggtcccctgtgccgtgcaggcgtgccatccggcgggaatattgtcgagcagcagggcgaggagatcttcgttgagcgggacggtggtctcgctgccgtcactgttcgtgatgacggtgctctgtttcaagcggctgttgccctcgctcgcgtcccagttgccctcggcgagcaggtcgaggtagtagggttcctgcggcgcgtctttgacgcgcacgatgagtaggggctttggcccgctgtcggcaaaggcaaaggttgtgagcgcaagagatgcgaggagcgcgcaaacaagcgtgcgaagagattttcgtttcatccaaatttcctccttttgtgtgtggggtgttccatcttccaatcgtatagacgcaaaagataacaaaaaagttcacgcttttacaaattttatcataaaataccgcgctgcgggaaaaagttctggcggggcgttgtacttttttcatattctgctacaatgggggagagaaagaagcgcattgggggaacgggtatgaaatggtatgcgatcggcaagacgctgacgccgctggaccgcgcgccggagagcggcgcggcggtggtgctgctgaattcggacgagttggcgcacgaaacggcgctgccgggactcgaagcggtgctgcaccatacgccgagtgcgagggacgcgcacgtctgcaaggcggaggtgcgctccaactgtctgagcggaacgctcgcactgccgcgcggccgcagggacggcacgcgcctttgctgcggctatctcgtgacgaaggaccgcgtggtgctggtggacgacggagagatggccgagccttatttgaagcacatcgtcaaggaaaaacgcctgatagaaaacagcgtcggacgatttctctacgacttcttcgagctgctgatcgccagggatctgcaccgcctcgaggagatcgaagaccgcgcgacggcgctggaagaacgcgtgctcgcgggcgagctggaggaattcagcaccccgatgagcgagctgcgcaaggagacgatggcctggtaccgctactactcccagctcgacgacgtggcgtgcgagctgcgggaaaatgagaacggctacttttcggatgaggagtgcggactgttccgattatttgaagagcgcgtcatccgcctgcgcgaggaatcgcagctgctgcgcgaatactgcacgcagatccagtcgctgtttcagtcggagatcgacatccgtcagaaccgcatcatgcagatcctgaccatcgtgacgacgatcttcctgccgctgacactgcttgtcggctggtacggcatgaacttttccggcatgccggagctgcactggaagtacggctatcccgcgatcatccttgtgagcatcgctgtggtggtgctgagcctgtggatgtgcaaaaagaaaaaattctggtaagaaaaaggaacggcacgagccgttcctttttcttttgacaggagtcactttttatcgaagtagtaatcgcggaagttgtggtattgcgcggcgtagtagcgcagcaggcgatagagtcgagagagcggcagatcgcccttgcagaagagcgtgtgcgtgcccttgaactgcttgagctcgtcggagagctcctgatccttgacatagcggcgcagaatgccggtcggcacgttctgccagagggcgacggtgtggttgtagacgcagtcctcgcgcttgccgtagacgacatcgttcgtcaggagcttcatcatgttcagccccgcggcacggcagaaatagctgctgcggccaaggcgcgggttgatctcgaagagcacgtagcggcccgtgcgggaatcgtacttcatgtcgatgttcgaaaaaccgacgtagccgagcttttcgagaaactcctgcattttgtcatacaacgactgatcgccgcgcgagatgatggcggcatagttgccgacggacttggggtcgtagtattcgagcaccggctggccgaggcacatcgcgcgcacatggccgtcaaggtccgaatagctgttgagcacgcgcatcgcgtcgtcgccgccggggataaactcctgcaaaatgagcttgccgcggtagtccgactggttcatgctgtggaccatcgtgaggtactgctcgcgcgtgtcgaagaagaagacctttttctgcccctcaaaatggcagcggagatagtcgagtgcattggaattctcgggcttgacgacgatgggaaagtcgaacggaaggcggtcgacgacgctctcgcgctcctcaggagaggcgatgacggtcttgggatagtccatgccgtactgctcgcagagggtgtagaacttgtccttcgtgtcgaaggtctcaagaagcgcctcggagatgaagcggtttgcgatgagcccctcgaaatggtcgtagtggcggcagagaagacccgtgtaatagtccgagcaggggatgacgagcagcttttcatagtcctgtgcgcactgcttcagcacgccgagcagcgcgccggggaagacctcctcgcgctcaaaatccgggataatgcggcagagaaacaggtgtgagctgcgcgtgggcacgagctgctgcgtacacagcagcagcggtgtgacgtgataggcctcctggaagagacgcgccgtgccgtaggcgttttcgtcgctgccgaggatgatgggcaaaaagtccttttttgcctttttggcgctgctcgccggcgcggcgggatggaccttgtcgtattcggcgaggtatttgagtgtgagctcgacgtcgctcgggtaggggacgaagacgctgccgcgtttcatcgttgtctcttctcccttgccggtcagcagaatgacgcgcgcgtccttgccgtccagaattgcgcggcggatgcactcggcgcggtcctcgagcacaaggtgcgggcaggcaacgtgcttttcaatgtcggcggcgatctgcgcgaacggctcttcgccggagtcctcctcggtgatgaagacgaagtcgcagttctgcccgctcagctcgccgaggtcttttctgcgctggagcgcgtgggagccggggcagccgaagacggagatcatctggcggccggggtattcgatcttcgtcgagcggtagagcgcgtcaaagctcatgcggttgtgcgcgtagtcgacgatgacggtgacgttcttgtcgcggctctcgtagatctgcatgcggcccgcggcgcgcgccttgcgaaggcccgagcgcacatactcctccggcacgtcgagcaccatacagatggccatggcagcgagggcgttggagatgttgaaaaggccgggcatcgtgatggaaaattcaccgttgtacttgggcgaggaaaccgtgaagtagagcccgtcgctgcgcttttccacatgctggcaggagacagtgtcgctttcgtgtgagccaaacgtgatgaggttgcagcggtccttggcgtattcgatgacgcgatccgagtacttggcgtcggtattgacgcagccgaagcggcaggagtcgaaaattttgagcttggagttgaagtaatcctcgaagtccgggtgctcgatggggctgatgtggtcgctgccgatgttcaaaaatgcagcgacgtcgtacgtgataccgcgcacgcggccgtatttgagcgcctgggacgaggcctccatcacaagatgcgaaatgccgctttcataggcgttttcaaagtgctggtagagctcaagcacctcgggcgtggtgatgtgggactcctcggtgttcttgccgtcgtagttgtcgatagaggagagaatggcgcacttgggcatcgactgcgcgcgcagccagtcatttaagatgtagcgcacgtagtaggctgtggtgctcttaccctttgtgcccgtgatgccgacgcttgtgagcttgtccgtcacatggttataaaagagctgaccgagcacgacgagggaatagcgaatgtcgttgacaagaagacagggtgcgtccacattgtgctttttctcggcgacgtaggcgatcgcgccgcgcgagagtgcgccgcacaggtactcttccttgaagtgtgcgcccttgcagatgaaaagcgcgtcctcgctcagtgcgcgcgtatcgtaggtgaggcagtggatctcacgcgcggcgagctcgtcgctcacggtgctttcgaccagaatgcccgcgtcgcgcagcgcatcgacatattctctcagtgtgtgaacggtattcataaatagctcctttgggtcttgctttttcggcaggacgggataaaatataggcgatatcgcgtcggatcgacacgatattggcaagcaaactcatttccgaagggggaaccaacatgacttatcagcaagtgctggaaaacgcaaggacctgcatcggcccttactgcaaggcgtgcaatgactgcaacggcaaggtctgccgcaacacgatgcccggccccggcgccaagggcgagggcacgggctttatccgcaacgcagaaaagtggcgtgagatctgcgtcaacatggacaccatctgcgaaaattcacaggtggacacctcattcacgctctttggccggacgtttgagattccggcgttcgccgcgccggtgggcgcgatgcgtcttcactacggggacaagtacgacgatcttacttataataatatccttgtgcgcgcgtgcgcaaacgcgggcattctcgcttttaccggcgacggcaccgacccgaaggtggtcgagggcgcggctgaggcgctcaaggcgaacggcggctgcggcgtgccgaccatcaagccgtgggatatggacacgatccgcgaaaaattcgcgctcgtgcaggaatccgagcccttcgccatcgcaatggacatcgacgcggcgggcctgccgtttttgcagggcttgacgccgccggcgggcagcaaaagcgttgaggagttaaagaagatcgtctcctgggcgcagcgtccgttcattttaaagggcattatgaccgcccgcggcgcggaaaaggcgctggaggcgggcgcgagcggcatcgtggtctcgaaccacggcggccgtgtgctcgaccattgtcccgcgacggcggaggtgcttccggacatcgtcgatgccgtcggcggcaagatgacgattttggtcgacggcgcgatccgcagcggcatggacatgttcaaggcgctggcgctcggtgcggacgcggtgctcatcggccgcccgtttgttaccaccgtctatggcggcggggaggagggcgtgcagctctacgtccagaagctcaaagcagagcttgccgacacgatgcgcatgtgcggcgcgcactcgctcgcggacattgatcgcagcatgctatatggtttttgatcatataacatatagtatagcaccgcaaaaaaaaactgacaagtgaaaatcgggagaagaggacggcgaggctaagtcgtcctcttttttgtcggctgcatactatataaaataaaatataaaaaacgggaacaaaatcgccgcgacgaacgtctgagaagatagagcgacccttctgaaccacattgattttggaggaaagtgcaatgaaaaagacaacgagccgtattctgctctccgcgctgacggtgctggcgctgctctctcttagcggctgcgcgcaggaaaaagaggagaataccaagcaaagcgacccgcaggcacgggaggcgatcctgcaatgctgcgagacgatcttcggcagcacggaggaaacaggcgcctatcacatccgcgtgacggatgagcgagacggcgggcgcgtggatgaatacgactgcccacgcggtgcagacgagcagggctatggcaattcgcctgtatatgcgctgagtgaaccgtcgatgtacggcgacgagccgtggtatgcggcaacggagcaggactgggacgattgccgcaacggggtcgttgcggagatttcttatgggaaagatgcgatcgcgttcattccgccctggggagcaatgaaaccggatgcagagtacgagcatccgggcggcaatgtgctgcggctgacgcgaaacggcgggactacctattataaaagcaatacggcgcacgcggcacagctcctgttcgtctatgcgcaggaagcggtgatggaaaagctgtacgacctgcatgttcccggcacagagacggactacgagaatatcgcgaacgagttctgcgcgcagttcgccgccggtctgaacgccgcgccgcgctggttcagcgggaaaccggatgacgcggcatcgccggtgaaggagcgcgtgttcgacgcgtattacggaacggactacccaaatttctgcttcggctttggcgtgatgatgcgctttgatgacccggagtcctcacagcgctatcaatgggaggctggcagcggcatgatcgagccgacgggcgaaggcgagtacggcgattattatggctggggtatggccgcggacgcgtgccgggatgaagcgggaaactggtacattgacggcacatggacgggcggcggaggcgttcgactgccctacatcgggcgcagctgggactccgggcagcagacggtgacggcatcgcagcttgcggagtgctggttcctgtcggcgggcgagtcgcacgagtggcggcttcccaatatgatctataaccgcccgagcgccgagctgcgcgaggcgcttgccagtcttgcacccgaacaggcggcggaattggaaaagggcctgcgcgaggtgtgggacgatccgctgcacgccgatatgtttccgggcggctatgacgccaagctcagcgcggactgagcacgctggcaatcattgcatttgcaatccggcggcaaaaacggtagaataccgcctgtcttgatcgaggcgcattccagaatcgaggaggacttgacgccatgtttaactgcggcaattttgatcgcggcacgctctttacgatgctgtgccagctgtttagcggctgcttcaactgatagcagtgcaaatgcacggtggggagggtgctttgcgccctctccgcctgtctattttgcacagtctgacaaacaaattgtggaaaaatcaaaaagtttgaaaaaaggtgttgacaaaaggggcggtaggtgctaagataacacctgttccgcgaatggagcgtgcaccttgtaaattaaacaacgaaactttgacaagcaccagatgaaaa

SEQ ID NO: 10150 - DNA, 1173 bp, Unknown
  gut microbiota DNA sequence
caacaggttctattagtcctgcgcttttgagcttatctatcaatgcacctgccggtgaggaggttacacccgcgagcttcataatatccgctcgtgcaaatgcagcgtcaaaaccaaatttatgatacagctttagcattgtttccttggtgcttgctttcgctttcagccctaaaaggagtgtttcaaacagctggtttttctcagaaacaactgctttctgctcatcaaacaactggttttcatccgaaatactcgttttatcaatggattgcccataattcaggttgtacagcgtcacttggaatgagataacatccgagtagaatttaggctccaactcagcacggtagttatgggcggcatgataggattccgtgatcttcttaaaaccactgccttgccgctccatatagcccaatctgccgaaaatatccgcaaggacgggattgcgtcgtgtggaggaaatgctggacagatcccgttcctgtatccgtgtgccgtctgccataccaccgggagaatagatagtaagacggtcatcgtaaatatcgatgtgaacctcgctgcccaaaatcagataatcccgatggatcagcgcattgacaagcgcctcgaaaacgcttcgttcgcagtaatccggcatttcaatgcgggaatctgcggttttcttccagcgggttttcatattccgcttgacaaagctgacaccctcattgagcaggataatcaggctgcctgaatactctgcgctgtcaagcgcatccaccataccgccgcttttgtcaagaccgttccaacgagtgcagaacaggcgggaatgccggataggcgaatcgtccgcaagcaaagcgcctgcgttggtcagcttgccgttctcatcccgcataccaaaggaatcgaatagcttttcttccatgctgtttcctgtccacgccttatatcgctcccgcagcttggaaaaagcgtaatccttaaaatcatactcagaaatcagctcgtcataagtgcggtgcatccctttgagaatcagctgattgaggacataggatggggcaatcacgctttcattgcccattcggatgtaggcttccatgataccgtccgctttataataatacggcgtagaccgtccggatgacacagacaataccagaatatccttgccgtttt

SEQ ID NO: 10151 - DNA, 7972 bp, Unknown
  gut microbiota DNA sequence
gcggaagccgtcctcgctcttgcgcgtggaagcgtaggcctcttcgacggtcgagggatcgcggccttcgaggatagcgaccatttcaccgcccgtgatggtctccttttcaagaaggtaggcaacgaccttgtccatatcctcgcggttgtcgcggatgacctgtacggcgtccttatagcactcgtcgaggatacgcttgacctcgcggtccatgatggcggcggtatcctgcgcgcagtcgaggccgtagccgccgtcaaggtactgattgcgcaccgacccgagcgcgaccatgccgaccgcgtcgctcataccgtacatggcgaccatgttgcgcgcgatgctcgtcgcctcctgaatatcctgcgaggcgccgttggtcatcgtgttcatcacgacctcttcggccgcgcggccgcccatcgagacggcgatctttgccatcagctcatcgcgcgtgcgcaggttcgtcttgtcctcttcgggcatcaggagcgtgtagccaaggcttccctcggtgtgcgggacgatcgtgatcttctgcacgggctcggcgtttttctgcttgtaggcgaccatcgcgtggccgacctcgtgataggcgacgagcttcttttcaaactcggtgaggacgctgcctttcttctcgctgcccgcgatgacgaactcgaacgccgcgagcatgtcctcctgcgtaacgagcttgcgtcccttgcgcacggcgcggagcgccgcctcgttggcgaggtttgcaaggtccgcgcccacgcagcccgcggtcgcgagcgcgaccttcttgagatccacgtcctcggcgagcttgatgccgcgcgtgtggacctgcagcgttgctaagcggccggcgaggttcgggcggtcgacggtgatgcggcggtcgaagcggccggggcgcagcagcgccttgtcgagcacctccgggcggttcgtcgcggcaagcacgatgacgcccttgctcgggtcaaagccgtccatttcggcgagcagctggttgagcgtctgctcgcgctcgtcgttgccgccgccgtagcgcccgccgtcgcgggatttgccgatggtgtcgatctcgtcgatgaagatgatgcagggggcgaccttcgacgcctcggcgaagaggtcgcgcacgcggctcgcgccgacgccgacgaacatctcgacaaagtcagagccggagatcgagaagaacggcaccttcgcctcgcccgcaacggccttggccagcagcgttttaccggtaccgggagagccgacgagcagcgcgcccttggggatctttgcgccgatggcggtgtatttttcggggttgtgcagaaagtcgatgatctcgacgagcgattctttcgcttcgtcctgaccggcgacgtccgcgaacgtcacgccggtggacttttccatgtagaccttggcgttggccttgccgacattgccgatgccgccgatcccgcccatgccgccggactttttcgcgatgaagttcatcagcagcatgaacgcgccgaccatcagcaccgtgggcagaatatagctcaccatgaacgtgaggatcggcgaaacgggcggctgatagggcttggtgtaggtcacgccgtgctcatcgcacagggtgatcagcttttccgtcgcgtcgggaatgatggtggtgaagagcgtatagttctgatcatagcgcttgccgtcgtcatccgtgtaggtaaagccgtcgaccggcgtgatggtgaagaccgtgtcgccgaattcgatggacttgaccttcccctcctccacgagttcgacaagctcactgtaagcgatctcgcacgaagactcggcggtgcgggcctgatcgagcatgacggagaggtagttcacaccgatcgtcagcagcagcgcccataggacgatcgaccacatgcccccgccgcgccggcggttcttgtcgccgcgattgcggttgtttctgttgtttggctccatgttgttcctcctgtcgggagacagaaaaatgcgaagatgcgcactttttgaattagtgatttcaactataccatatataagaaaatcgcacaagttttctacggtgaattttcgatgaacttttgctttgcgccctctttatcttgcccttgttctgtgttatagttgcaatggagtattctataaaaatttgtcacaaggagaaatttcttttatggataaggaacgcaaggaaaagaccgcgcgcgtgcaggacgcggaggccgacggcatcatcgagggccgcaacgccgtgatcgaagcgctgcgcgcgggcacgaccatcgacaaaattttcatccagaagggcgagaccgataagacgcttggccacatcgcctcgaccgcccgcgccgcgggcgtggtcgtcgtggacgcggacaagcgcaagctcgacttcatgtcccgcacgcacgcccatcagggcgtcatcgcgctcacgagcgtgcgcgaatatgtcagtgttgaggatattttgaacatcgcgcgcgaaaaaggcgaaaaccccttgatcgtcgtctgcgacgagatctccgacccgcataaccttggtgcgatcatccgcacggcggagtgcgcgggcgcgcatggcgtcgtcatccccaagcgccgcagcgcgggcctcacgagcattgtcgccaagacgagcgcgggtgcggtgagctatgtgcccgtcgcgcgcgtgccgaacatccccgcgcttttggagcagctgcaaaaagagggcgtctgggtcttcggcacggcggccgagggcacgagcgacctctactccgcggacctcaagggccccgcggccatcgtcatcggcagcgagggcgacggcatgacgagactggtgcgcgaaaagtgcgacttcctcgtcagcatcccgatgaagggtaaaatttcgtcgctcaacgcctccgcggcggcggccatcctcctctacgaggcggtgcgccagcgcctggggcagtgacggtaaagaaggaacgatatggaccccaaagaccttgaatttgaagaaacgctcgccgactccgagctgctgctgaaaaacacggcccgcagcatggacgaggacgcggaattcacgctcgagagcattctggccgagtacggcagcggcacgcccgccgcgcccgaaccggaagaaaaagaacccgagccgccggcggaaaagaaaccgccggcaaaggtcgtccccctgccgaaaaaggcggaggcggcgaaaaaaacggtggatgaaacggcggatgagaccgcccgcatccccgtcatccccttccccggtgcgaaaaaggctgaagagccgatagaagccgaaccggaagagaaaacggacgcggaaaccgaagaagaaccgccgcaggacgacgagcccaagtccatgagcttgcaggacatcctggcccagaccgtgcaggaggcgctctccgagcgcgaggacacgatcatcgaggaggagccgccgcgccgcggtttgttctcccgccgcaagatgcgcgacaccgagcagctctacgacgacgcggaggaggaagaggacgaggaagaagcgttcgaagagcccgaacccgagctccccgagccgccgctgaccgaaacgctctccgactaccgcgcccagctttcgggcgcgacgaaggcgcgccgtggggcgggttttttcacgcttttgctgtgcgtcatggcggtgctggagcatttttccatcctgccggaggcgtacaccgctgatccgatgatccgcgcgctgccgctgctggcggtcgaggcgatcgtctgcgccatcggctggcgcatttttgcgggcgcgctgcgctcgctcaaacagggaaaagtcacgtcgggctttttgacgatgcttctatgccttgtcacgctgctcgatacggcactctatgcgtttcttcccgcgcgcgcggcgctgtcgctgccgctgccggtgctgggggcgatgtcggtctactgcgcgctgctgggcgaaagtctgcgtctgcacggcatgtatgacacgttccgcatcgcggccatcggcaatgcgccgtatatcgtcaccgtgacggcagggggcgcggccaagcgcgtgggcctgccgggcggattttcgaattccgcgcgcgcaaacgacccctattcgcgctggcagagcgtgctgctgccggtcttccttgcggcggcggtcgtgttcggcgtgctctcgacgctcgagacgaagcagaacgcgctgcttgcgtggaacctctcggtgatgctcgcaagcgcgaacctgctcgcgtttccgatggtgtgcgcgctgccgctcaagcgcatcgccgcgcggcttgccaaaagcggcagcgccgtggcgggcttttccggcgcggacgccatccgccggagcaactgcgtcatcctgaccgacggcgacctgttcccgcccggaacggtcacgctcggcgggctcaaggttttcggcgaggagagcggcaaggtcatctcctacgccgcgacgatggcccacgcgtccgaaagcggcctgagccgcctttttgacaatcttctcgccagcgacggcggcttccgcgagcaggtcgaggatgtcgacttttacgaagagggcggcatcggcggccgcatccacggcgaaacggtgctcttcggcacggcgggctttatgagaaagcgcggcgtgaacctgccgcgcaacttaggcctcaagaccggcgtgttcctctcggtcgacggcacgctcatcgcggtgttcgccgtgaagtacatgcccgcggaaaatgtcgactgggcgctccacgccctgcaccacagccgcatcacccccgtgctcgccgtgcgcgacggcaacatcacccccgcgctcttaaagcgcaagttcggcaccgacgcgcgcgcggtctaccccaagctctcgacgcgcctggcgctctccgagcgcggcggcgggcggccgtatgcgctgctcatgcgcgagggcctcatgccgtatgccgaggtcgtgctcggcagcaagagattgtgcgcgtccgccaagcggtgcacggtgcttgcatttttagccgccacagcgtcaacactccttgcattttatttaacttttgtcggcgcatacagcgtgctcacgccgttttctctgctcatttacgtacttttgtggtcgctcagcgcgctggtcgacgccctgctcagcgaccgttattgacacttcgaacgaagaaaacgaaaatttgcggaaaaatatggttgtaatggagagaaaaacatgatatcatttctgcattgagtattatcccatcttatggcgcgagccgatctgggatttacgattttcggaaggagactgacccattatgagtgcaaaagacatccgcaatatcgtgctgcttggccacagcggcagcggcaagaccaccctcgctgagagcatgctgtatctcaccggcggcacggaccgtctgggcagaattgccgacggcaacaccgtttgtgactacgatcccgaagagatccgccgccagatctccatttctctggccgtggctcccgtggaatacgacagctgcaagatcaacgtgctcgacgtgcccggcggcttcgacttcgccggtgaggtcgcggaggccgttcaggctgccgacgctgccgtcatcgtctgctcggccaaggccggcatgagcgtcggcgcggaaaaggcgtggaaatattgcgagaagaactctctcccccgtctgctctacatctccaagaccgacgaggagaactccgactacaacgccgcgttcaacacgctgcgcgagcgcttcggcaagaacatcgcccccgtcgtcgcccccatctgggacgagagcaagaaggtcatcggcatcatcgacgtgctgcataagcgcgcattcgagttcggccccggcggcggccgcgtcgagatcgaagtgcctgagaacaaaaagcccgtgctcgatgagctctacgacgcgctcaaggagtccgtcgccgagacgagcgaggaatttatggaaaagttcttcgccggtgaagacttcacctatgccgagatgatccatggcctgcgccagggcgttaaggacctgtccctcttccctgtcgtgtgcggctccgccattcagggcatgggcacgcgcatcctgatggataccatcgtcgagcttcttccccagccgcaggacgcccgcgccctgatggccgagaatgaggacggcgagtcctccgaattcgtcgtcgcgcccggcgcactgccgaccgcgttcgtcttcaagaccatttccgaccagtacggcaagtattcctacgtcaaggtgctctccggctccatcaagcccgatatgcccatggtcaacgcccgcaccggcgagaccgagaagctcggccgcctgtacatccccaagggcaagaagtataccgaggtcaaggagctcacctgcggcgacatcggcgccatcgccaagatggacaaggtcaagaccggcgacacgctctgcgagccgcgcaaggtcgtcaagatcgagcccatcccgttcgatgagccctgctacagcgtcgccatcgcgcccaagacccgcggccaggaggacaagatggcccagggcctcaaccgcctgaacgaggaagatccgtccttccgcgtcgtcaacaacgccgaaacgcaccagatggtcgtctccggcgcgggcgacatccagatcgacgtgctcgtcaacaagctcaagagccgcttcggcgtcgaggtggtgctcgacacgccgcgcgtgccctaccgtgaaaagatccgcaagacggtctccaagcagggccgtcataagaagcagaccggcggcagcggccagttcggcgacgtttggatccgcttcgagcccaacgaggagagcgaagagatggttttcgccgaggaagtcttcggcggcagcgtccccaagaacttcttccccgcggtcgaaaagggtctgcgcgaggcctgcgtccacggcccgctcgcgggttatcccgtcgtgaacctcaaggccgtcctttacgatggctcctatcacccggtcgactcgtccgagatcgcgttcaagaccgcggcgaacctcgcctataaggcagccatgcccgaggcgtccccggtcctgctcgagccggtgtgcgagctcaaggtcacggtgcccgaccagtacatgggcgatatcctcggcgatctcaacaagcgccgcggccgcgtcatgggcatgaccccgaccggcaacggcgagcaggtcatcgaggccgagtgccccgaggcagagctgatgagctacgccattgacctgcgctccatgacccagtcccgcggctcgttcgtgatgcactttgtgcgctacgagcagtgttccgccgacgcacaggcgaaggctgtcgctgccgcgaaggcgatgcaggaagcggaataattgcttctgcacagcagaaaataggtaaaaagagagggcttctcgaaagagaagtcctctctttttccgcgcatggcgcggagggggagcagcccgaagaggctgcggcttttccccacaccgtgtggggctgcggataagggggatattctctcacgtgagagaatatcccccttggacccccaagagaacgcaagggccctgccccttgaccccgccattgcgggtttgcagcttgaagggctgcacgcgctgcgcagtgtgggtgcggtgtacatggcttcgccatgaatcttctgcaagtcgttacagatatcaaccgcgccttactgtcgtgaggcgcgagtgacgtttgtctggcggcagactgcctgccgaatgcggcattgctggcgctcgccgcattgatgggactggcggtaaacggaaattactgcgtactcctgcaagatgggcagagcggcacccgcaaggggtgtgccgcatccgtaaggcagcagagccgccaacggctgcgcaacagcgggtagtaggagcagaggcaaatcgtatagcag

SEQ ID NO: 10152 - DNA, 15435 bp, Unknown
  gut microbiota DNA sequence
aatataaatacaatttgtaatattctgccgaaatataacgaaacacggcggttttgggcgtatgcccaaaaccgccgtgccatattttccttacaggcgcccgtagatgcgggtcgtctcgtggatggactttgcgagctttttgctcgcctcgccgctcagcatgcgccactgccagttgccgctgctcgtgccgggggtgttcatgcggcagcccttgccaaggcccagatagtcctgcatctgtgcgacaaacaacctgctctggcagctcatgccgccgcggatgatgccggcgttgaagccctcctcgtcattgagaccgaggtacttcttcgcgaacgcgatgtccgccttatccgcctccgtgcgccagagggcgaggggcgcgttgtcgtgcgtgccggtgtagcaaatgctgttgaagttgcagctatgcggcaggtagtcgctcgggtcgcgcgagtcgaacgcaaactcgaggaccttcatgccgggaagaccggaatcggagagcagctgcacgacctcgggcgagggatagccgaggtcctcggcgatgaaatcgaggtcgcggaaccagccggtcagcacgccgacgagcgacatgccggggcccttgacccagcggccgtttttggcggtcgtctcgccgtagggaatggcccagtagctctcgaagccgcggaaatggtcgatgcggatgacgtcgtagagcttctgcgcgccgccgatgcggcggatccaccagccgaagccgtccttcgccatggcctcgtagttgtagagcgggttgccccagagctgcccgtcctcgctgaagcagtcaggcgggacgccggagacctcggtgggcacgttgtgctcgtcgagctggaacatttcgggttctgcccacacgtcggcggagtccatcgccacatagatgggcaggtcgccgatgatgcggatgccgagcgagtggatgtacgccttgagtgcctcccactggcggaagaagagaaactgaatgtaagtgaaaagctccacatcctcgcgcagctcggcgcggtagcgctcgatgacctcgctgcttgtgcggcagcggatgtcctcgtcgtcccattccgtccaagacttcatgccgaagtggcgcttgagcgccatgaagagggcgtagttcggcagccagcgctcattttcccgctcaaatgccgcgacggcctcgcggtcgcgcgtaaagccgcgcgtcttggccttttcgagcagcgtgaagcggctcgcgtagattttgccgtagtcgacatagcggggatcgtcgccccagtcgcaggcgttgacctccgcgcgcgtcaggagcttatctttgacgagcaagtccaagtcgatgaaatacgggttacccgcaaaggacgaaaagctctgatatggtgagtcgccgtagctcgtcgggccgagcggcaagagctgccagtatttctgccccgcggcggcgagaaagtcggcaaagtcataggcggccttgcccatcgtgccgatgccgtggggcgagggaagggacgagatcggcatcagaatgccggaggaacgttcgatcaatggaaccacttctttctggaaaatgaaggatgaaaggcgttaaccctttaccgcgcctgcggccacgcccttgatgatgtacttctggcacagcaggtagaacacgatgacagggatgatgctcagcaggatcagcgccatcgtcgcgccgaggtcgacggtgccgtagctgcccttgaggtactggatgtggatggggatggtcatgtacttcgtgcggtcgagcacgagatagggcagcagatagtcgttccacacccacatgatctcgagaatgccgacagagatcatcgtgggccgcagcatcggcagcacgacggagaagtacgtgcgcagcgggccgcagccgtcgatggcggccgcctcctcaatttcaagcgggatggatttgataaagccgacgaacatgaaaatcgcaagccccgcgccaaagccgaggtagatgatggggatggtccagggggtattgagcttgagggtatcggccgtcttcgacagtgtgaacatcaccatctggaacggcacgaccatcgaaaagacgcagagataatagaccatgcggcagaatttgctgtccacacgcgcgatgtaccacgcggccatcgacgtgcagagcaaaatcagcgcggtcgagacgatggtgataaataagctgtagccggcggattttaagaacgggtagttgccgaacgtcaggcccttgatgaagttcgcccagccggcaaagctctccgcgttcgggagggcgaacgtgtcggtcttgacataggtgttgagcttgaaggagttgatgaccaccgtgaggaccggcagcacatagatgacgcagatgacaccgagcacgatggagaggatcgtcttgcggcgggcttctgcggaaagagagtgcttgttcattactgctgcacctcctttttgcggttggcactgagctggagaagactgatggtcgcgaccaaaatgaagaacagcacggccttggcctgcgcggtgccgcgcgagttggcattctgcccgtagaacgtgttgagaatgttcagcgcgagcatttcggtctctttgatcgagctgccgtcggacaggatggtatagggctggccgcccgtgagggcgaggttctggtcgaagagcttgaagccattcgtaagagagaggaacgtgcagatggtgatggagggcatcacattcgggatcgtgactttccagagcgtctgccagcggctcgcgccgtcgatcttcgcggcctcgagcatgtcctcgggcacggcctgcaggcccgcgatgtaaatgatcatcatgtagccgatctgctgccagcacatcaggatgatgagaccccagaagccgagcttcgtgttgagcaggatcgacgtgccgtagcgcgagaggatgccgtcgaagatcatcgaccagatgtagccgagcacgatgccgccgatgaggttcggcatgaagaacaccgtgcggtacaggttgctgcccttgatgccctgcgtgagcgcgtaggccaccgcaaaggccagcacgttgatgagcacgagcgatatgacggcaaacagcgccgtgaaccagaacgaatgcacaaagctcgcatcctggaacgcgcggcggtagttttcaaggccgacaaaatgcgcgtcgctcgtgaccttgaatttgcagaaggagagatagatgcccttgcagaacggatagacaaagccgatgatgaacgcgcagaccatcggccccataaagagcgggaaccagcggcggatcgggcggcggatcatcgagctgttgaccgcagcgttgctgtgcttatgtttcaattcgatcaactcccagccaaagatagaatattgcttttgtttctgcacggcgggcgcttcatgcggcgctcgccgtgatatgcagggagggacgggcgaaatcgcccgcccctctcatttgtgcttttcggatgcgcttgcttttttaaaagcggcttagccgttggcggcagcgtactgcgtggcccagccgtcgacaaacgcggtcttgacgagctcccagttggcatcgctctggtcggcgtcgtactggttcatcgcggagacgagcgcagcgcggtaagcatcaacgttcggctggaagttggtgacccagggcatgatgtagttgccgttggtggtgtagtcgttggcgtcggcgaggaagccgttggtggattcggcagcctgcttatagggcatggcggcgaattcatcgaccagcatacgggagacctcgggatcggtgaccatccagttcatgaattcgagcgtagcctgaatgtcttcctcggaagccttggcgttgacagcccagcagttctcggtgccgcagttgagacccgcgttctcttcgcccgcaacaccgcagtagaacgggatcatggacaggttgtcaagaccgtactgaccgtcgccggtaccggtgagcttggcccactcccaggagccgttctgatagaacacggcctgctccttgccgaactcgtccgccgcgtcaaagccgccggcagcgagatcagcaggattcacggcgctgttgttgatgtacagatcccacaggttcttgtagttctgcatgtaggtacccttgatggaagacgggcattccttccaggcgtcgggatcgtccacggactcgtagtaatactcgaggttcgcgaggtggccggtgaagcgccagctggaatcgtcgctcatggaagaggaggtgaaggcgtcgaagccgagctcggaagcacgagcgtggatgtcctcagcgacggccttgagagtctcaaagttcgtgatgtcgccaagcgtgtagccggccttttcgagcagatcttcgttgacgatgatgccgtagcactcgtagcagtagccgatggagcagagcttgccgtcggcgtcatagaggttgtaggcgtcggtgttgagctcgttggcaacggcggtgccgctcaggtcatagcagtagtcgccccaggtgtcgacagcggcctggttgcccacgacgaacagcgtcgggggagcggacttgtccatctcggcggtcagggtctcgttgtaggtgccggaagcggcggtcacgacggtgacgggcacgccggtcttctcggtgtacatggcggcgaccttctgcagggtctcgtcggcttcgggcttgaagttcagccagtagacgcggccggaggcggtatcgccgtcgctgttgtcagtggagtcatccttcttatcgccgcaggcgacgagagaaagcgccatgacaagagcaaggatcattgcaagatactttttcatttcatcaatactccttttcaaatttattttcacgcggttcccgcgggaaaatcagtgcttgagctgccgcacggacgcaccctcgcgcagcgcggtcggcagagtgacatggcgatgaacgccgcgtccctcgataatgtcgagcaggatctcgacgctcgcctctcccatggcggtcatgggctggcagagggtggtgagcatgggatgaatgtattccgagacgctgatgccgtcgatggcgatgacggagcagtccccggggatggagcggccgctttcgcgcagggcgcgcatcgcgccaatggccatgtcgtccgcaatggcgaagacagccgtaaaatcggcgggggagcgcagacgcttttgcatggcggcataggcgttggcaatggtgaaatcttcggcgcagatcaggttttccggatgctctgttaagccgaagtcgcgcagcgcgcgctgatagccaaggtaacggagctgggagatcgaactgtcgtcgggggcggcggtcagcacggcgatgcggcggtgaccgtttttgtaaagctcgctgaccgcgcggtaggcctcctgctcgtcggcgatggagacggaggagtacgattccggcggaagcgtgccgtaggagttggtgtaggagcagcagacatagggcacgccgagaagcgaaacctcttcgggcgaataatcgctgcgcccgccgaggaagataatgccgcgcaggcgcttttccttttccatcaccgcaccgcactgaatctcgtcgtcgcccgatgggatctggcgcatgaccatcgtgtagcccgaggcgtcgagcttctgctcgatggcgtggatgatgtcggtgtagaaggggttctgcacgccgcgcaccacgaggccgaccgcgtcggagcggatcttgacgaggtcgcgcgcgctgttgttcggcacataccggtgcgcctcgatgacggcgcggacccgtctgcgggaatcctcactcacgtccggacggtcgttgagcacgcgggagacggtgctgacgctcacgtctgcgagctttgcaatatccttgatggtcatgccgacgcgccccctgcgatgattccggaaaccttaccggtaacgtttccaatccttgcttacagcatagtccccacagcgggcaaagtcaaatgaaacttgccgtttgtggtaaaaatggggaaaacacacaagaaatgtgcaccgatcattgacaaaacagccaaaggatcagagaatagctctcttaacgttcagcttatgacgtgcctgtaccactttatgagcggcttatagcaaaatgcgggccaaaatcggcgtttctgtgcagaaacgaaaaaattccccgttttccgccgctatgcggcagaaaacggggaacgatctgtggctaaaaaagccttacttgagcagcagctccgcgatctggatggtgttggtggcagcgcccttgcggacctggtcgccgcagcaccagaggttcagaccgcgctcgtcggtcaggtcctcacgaatgcggccgacatagacgatgtcctgatcggacgtgtcgagcggcatggggtagaccttgttcttgaggtcgtcgacgagcttgcagcccggggcgtttgcgatgagctccttggcacgctcgacgctgatcttctccttcgtgcgcagcacgacggatacgctgtggctgcggatgacgggcacgcgcgcgcaggtgcagctgaccttcatctcgggcaggtggaggatcttgcggccctcgttctgcatcttcatctcctcgctggtgtagccctcaaaggcctcgccgccgatctgggggatgatgttgtacgcgatctgatactggaagaccttgggctcaaggtgcttgccctcggaaagggccttgacctcattgttgagctcgtcgatgccgcccttgcccgcgccgctgacggcctggtaggaagaggcgatgatcgtctcgatggggctttccttggcgagggcgttgatggccacaagggtcacgatggtggtgcagttggggttcgagatgatgcccttgtgccacttcacgtcctcggggttgatctcggggatgacgagggggacgttggggtcgaggcggaatgcgctcgaattgtcgacaaacaccgcgcccgccttgacgatcgagggggcaaaacgctcggcgatgtcgttctcggccgcgccgaggacgatatcaaggccctcaaacgcgtcgtcagacgcctcgacgatggtgcactcctgaccgcggaacatgattttgctgcccgcgcttctggcgcttgcgatgggacgaagggacgcaacggggaagttgcgctcttcgagaattttgatcatttcctgaccgacggcgccggtggcgccgagaatgccgacattgacctgtttcatactacattctccttcacaaaactattgtacaggacacggatggcctgttcgaaatctttttcttccacgcccacgatgatgttgagctcttcggggccctgcgtgatcatgcggatgttcacgccgttttcgccgagcttggcgaaaatcttaccggaaacgccgggacggtacgccatcttgcggccgacggcggcgacgatggcgatatgctccgttacggttatcttattcggctgcacctctttttgcagctcgcccagcatttcgtagagcgagcgggacaccttgtcggacgagacgacgagcgagacgttgtcgatgccggacgggaggtactcgacgttgacctcgtgcttggcgagcacgttgagaattttcaggagagagcccggttcgctcgacatgccggtcttggcgatggtgatgatggaaaagcccttcttgccggcgatgccggtgatgaagccgccctcttccatctcgtcgccgatggactccaagatcatcgtaccgggatggtcgggcgcgttggtgttgcggatgttgagcgggatgtttttctcgcgcacggggaagatcgtgccctcgtgcaggacctgcgcgccgatgtagctcagctcgcgcagctcgctgtaggtcacgcggcggatgggctcgggatcgtcgacgatgcgcgggtcggccatcaggatgccggagacgtccgtccagttctcatacacgtccgcgccgagcgccgctgccgcgagcgcgccggtgatgtcgctgccgccgcgggagaacgtgcggatgtgcccgtcgggcatcacgccatagaaaccggggatgacgaccttgcggtccccggcgagggagcgcagcgccgcgtaggatgcgtcctgatcgacggtgccgtcgaacttgaacttgatccagcgggccgcgtcgacgaactcatagccgaggtattcggccatcagccgtgcggagaagtattcgccgcgcgaggcgagctcatcctgactgatgccatttttcatcttgtcccacagcgcgtcgaactctttgtcgaggctgatgtgcaggctgcactcggcgatgatctcgttgtagcggtcgcggatcatggcgaagatgtcctcgcacgaaacgccgtatttgatgtgcgcggcgcagagatagagaagatcggtgatcttatggtcgccggagaagcgcttgcccggcgcggagacgatgaccacgcggcgggcggggtcggcttccacgatggacttgaccttggcgaactggcgggcgtcggcaagcgacgaaccgccgaatttcaaaactttgagcatggagtttattcctcttcggccgcgtagcgcgcaagcagcgcgtgcgggtcgtcctttcggtaagattcataggcgtcgaacgcctcgcgggcgctgcactcgcgggtaaagtattcgcccatgcagcggaacagccacttgcactgcgtgccggagaggttcaccgagcagggggtgaaggagtcagcatagaagctgcggcagccgtcggcgacgtcgagacagtcgcgcagcacgttcgagccggtcgggtagccgcctgcgcccgcgccggaaaagctctgcttgccaaaacgcgatgcgaacagcgtgacgaggttgccggtgccgtcggtgtgcgcctcgggcgcggaggaggggaaaagcgtcgggcagacgaacgcggccacggcacggccgtttttctccgctcgggcaatgagcttgtaggtcaggccctcgtccttcgccttggcgatgtcgcccgcggtgatggacgagataccgacacaggggatgtcctcttctctgatgttcacgccgaaggcaaggtcggcggagaggacgatcttgcggcgcgcgtccagaccctcgacatccgcggtgtggtcggcctcggcgtagccgagctcctgcgccttgcggagcgcgggcgcgtaatccgcgccggaattcgtcatggcggaaagcatgtaattcgttgtgccgttcagaatgccctcgacagccttgatctcatcaagctcagacgcgcgggagagagaggtgagccaggggatgccgccgcccgcggcggcagtgcagcgcagcgccacgcctttttcttttgcaagggaggtgagctcttcaaagtgggcgcacatgagctgcttgttcgcggtgacgacgtgcttgcccgcacgcatggccgcgcagaggtagctgtacgccggctcgatgccgcccatgacttccaccacaatatcaatcgagggatcgcgcacgatctcgtcgtaatcggcggtcacggtgcatgtgagctccaggcggggacggcgggagagaacagctgcaacatgcagatcggttcgcccctcgcacagcttataaaaatgggaaccgacggtgccgaagcccagcagcgcaatattcacggggaatgaccttctttcttttttggatactccgtcaagtgcggacgaatttgtgacttacgccgaaactgtccgcggaagaaaaacacttgactttttgatggaaacaatataacatagcgtttgtgaaaatacaatagggaaaacaaaaaaacttttcccgtgagatacaggaggaaacatccatgcagtatcagagcacccgtgacaaaaatttaaaggccagcagcgcgcaggccatcttaaacggccttgcccccgacggcggcctctacacgatgccgtcgtttgacgaggtcaagttcgactatactactgtattaaatatggacacgatgtccatgtcgacgaagatcttatccaagctcctgcccgacttttcagaagcggagatggcaaaactcgtccacgacggctataccggcaagtttgagaccgaccacctgaccccgaccgtccccgtcggtgaggacttcatcctcgagcttttccgcgggccgacgagcgcttttaaggatgtggcgctctcaatgctgccgcgcctgatgaccgcgtcgaaagaaaagctcggtgtggacgacgagatcatgatcctgaccgccacgtccggcgacaccggcaaggcggcgatggagggcttctgcgatgtgccgggcacgaagatcatcgtcttctacccccacggcggcgtgagcgccgtgcagcaggcgcagatggcgacgcaggcgggcgaaaacgtctgcgtgtgcgcggtgcgcggcaacttcgacgatgcgcagaccggcgtgaagaaaatcttctccgctgtcagcaaggatcagctgctcgagggcaagggcgttcgcctgtcctcggccaactccatcaacatcggccgcctcgccccgcaggtcgtctattattatagagcgtacgccgacctcgtgcaggcgggccgcatccagccgggcgacaaggtcgactacgtcgtgccgaccggcaacttcggcgatatcctcgcgggctactttgccaaggagatgggccttcccgtcggcaagctcgtgtgcgcgtccaacgccaacaatgtgctgaccgacttcctgcgcacgggccgctatgaccgccgccgccccttctacaagacagtgtccccctcgatggacattctcgtctccagcaacttggagcgcctgctctatctcctctccggcgacgacaagctcatcgcggatttaatgaagcagctcagcgaaaacggtgagtacgaggtgcccgcggacatgcttgaaaagctgcacgagctcttctgggcaggcttctgcgacgacgagggtgcgaaaaccgccatcggcaaggtctggaaggacgaccattacctctgcgacacgcacacggcggtcgcctgggacgtggcgcagcagtacaagcaggcaaaccccgagcacaacgccgtcgtcgtgctctccactgcctctccttataaattccccgccgccgtgctcgagggcatcggcgaaaaggccgagggcgacgagttcgacgtgatggagcagctccacaaggtcacgggcgtgcccgtgccgaagaatcttgccgacctacgctcccgcgcggtgcgtcaccgcgacgtgatcgaccgcggcgagatgctcgactacgtgctcggcaaggccgcggcggaaaagtgataaaggagaataaacatgtatattacctgccttgatatggagggcgtgctcgtccccgaaatttggatcgaatttgcccgtgagagcggcattcccgagctgacgcgcaccacgcgcgacgagccggactacgacaagctgatgaaatggcgcctgggcgtgctccgcgagcacggcctgggactcaaggaaattcaggagacgatcgcgcgcatcgacccgctgccgggggcgaaagaattcctcgacaagctgagatctgagacgcaggccatcattttgagcgacacctttgaggaatttgcacaaccgctgatgaaaaaactcggctggccgaccattttctgcaactctctcgaggtggacaccgacggattcatcagcggcatcaagatgagatgcgagcattccaagcttacgaccgtgcgcggccttcagtccatcggctttgagaccatcgccagcggcgacagctacaacgacctcgaaatgatcgaagcgtccaaggcgggcttcctgttccgcacgacggaaaagatcaagcacgactacccgcatctgcccgcttttgagggctacgacgagcttttagcggccatcgagcaggtcatccgcgcataaggaaaaagcaaatatccagctcgaatgaaataatattcattcaaaatttgttcattttgacgattgacttttttctccaaaaaattattataatcaggcgaaacgcaggggaaattcccctgcaaggcaaacatttgtgaaaaaataggaggagaaaaatgtttagctttctgatctgcctcgcattgctgatcggcggctacttcgtttacggtggcatcgtcgaaaagaccttcggccctgacgaccgtgaaacgccggctgtcaagatcaacgatggcgtggactacatggttctgccgcagtggaagctgtttatgatccagcttctgaacatcgcgggtctcggccctatcttcggcgctttgagcggcgctctgtggggccctgtggttttcctgtggatcaccttcggtacgatttttgccggtgcggtccacgactacttctccggtatgatgagcgagcgtaatgaaggcgcttccatctccgagatctccggtatctacctcggcggcgcgatgaagaacgtcatgcgcgtgttcagcgtggtgctgctcgtcatggtcggtacggtctttgcggtcggccctgccggtctgatccagctgctgttcaccaacggcggcagcaccggcattgtggccagcaagctgttctggctggtcctgatcctgatctactacttcatcgcaacgttcctgtccatcgacaagatcatcggtaagatttaccccgtgttcggcatctgcctgatcatcatggcgctcggcgtgggtcttggcatcttcaccaagggctatgagatccccgagatctggaacaacttcgccaacctccacccgcagggcactccgatctggagcttcatgttcatcaccgtcgcctgcggcgcgatctccggcttccatgccacgcagagccccctgatggctcgctgcatgaagagcgagaagcagggccacttcgtcttctacggcgcaatggtttctgagggtatcatcgctctgatctgggctgctgccggctgcgctctctacaccggcgaagagctcctcgctctcggcggcggcggttccaccgctgtttacgatgtctgctccaagaccatgggcggcgtgggcatcgcgctcgccatgctcggcgttatcgcctgccccatcacctccggcgatacggcgttccgttctgcccgtcttgttctggccgactggttccacatggagcagaagaactggaagaaccgtctgatcctctgcgtgcccgtcctcggcgtcggcgcgatcctcggcatcggcaacgccctcggcaagatcgactacaccatcatttggcgttacttcagctggacgaaccagaccctcgccatgatcgttctgtgggccgcttccatgtacctcttctatgataagaagaactactggatcaccgctgttcccgctaccttcatgagcgctgtgtccgtgacgtacttcctgctgggcaacgagtgcctcggccagttcctgaataccaagactgctgacggcgctaccgtttacaacactgcgctcgcttatcccgtcggtatcatcgccgctatcgtgttccttggcatcttcctgtacaccatcaagaagcgccacacccagcctcactacgagacgctgcacaagtaaactattcgtagagcggtgggagaatgctctcccaccgcttttttcaaattttggaggagctttatgatttttgcacctgtgcgccttggcgaaacgagtctcaacgccgaagctgtcgccgcggacaagaagtcctgcaagcgtttcggcccctgcggcgtggggaaagaggcgctgtttttgaatagctattttatcgaccggcgatactatgtcgccttttcgtcggtgcgccgcgtcttcaagcgcgtggcgatgagccagggcggcttttcgggcaagggcgtgttcggcgcgatcccctatctcgtggtgcagtatgacggcgggaaggaaaagcagtgcaccttcaagcgcgaggaagacgtggacgcgatgctcgcctatatcggggaagtgcatcccgagatcccgacgctgagcgtcggcggcgagcagcgcttggagcagaaggcaaaggaagaggctgcgcgctatctttccgagctgacgagcgacgcgcagagcgcgaaagaagagctggaaaaggcgcagaagttcctctccggctaccccgagctgacagaccggctctccaaggcagccagagccaagcgcgtgaaccagcatacgaaccccgcctaccgctgggtcgcgctggccatcgtgctggcaggcgcagcggcgctggtgtacggcatcatctcgtggcgtaacggcggagatttcggcatgtatttcgccctcttcggctttgcggcgatcttcttcttttccggcgcgcacgtgctgcccacggcgaagaacaacaaaaaggccgtcgcccgtgcctgggaagaggcacaggccaaccttgcccacgtcctgccggacgattttccgctgccggcgcgctatgcgcaccctgtcgtgctcacgcgcatgatccgcatcctgcgcgagggccgcgcccagagcgcagatgaggcgctcgaggtgctcaagaccgacctcaaggcgctcaacgccgacgtgcaggtctcgcaggaggaatacgacgaggtcgtcgcgatcaagtcgatgttcctgctgagcgattatcagtgagcggatattgattcatttcgtcaaaaagcccatggattttgcaaacccatgggctttttcctgtcgcctggcaagtgaatataagagcggtaaaagaaaaatgcttgcaaagcgatcgctttgcaagcattttttatctctttttgctctttgccgtgggctttggcttggcccagccggatttgcgcttaaagtttttcggcttgtcagcgccgttgttcttcgggctctgcccgccgcggggcgcgtcgtttctgcggccgccggtctgagcggcggagggctttttgccgccgccggatttgccgtgcggcatcgcgcggtcatcgccgtacgggcggacaaggcacttcggcccgtagccgatgagatcctcgcgtccggcctttttgagcgcctcgatgacgagctttttcttgtcggggcggaaccactggagcagcgcgcgctgcaattccttgccgtgcggcgtcgtctcggcgaagacaggtgtcatatcgcgcgggtcgatgccggtgtagtacatgcaggtcgagagcgtaccgggcgtggggtagaagtcctgcacctgctcgggcttgtgacccgtggagtgcagaaattccgcgagctgcacggcgtcctcgagtgtgcagccggggtgggacgacatgaggtagggcacgagatactgctgggtatccgtaaaacagttttcgaaaaat

SEQ ID NO: 10153 - DNA, 10119 bp, Unknown
  gut microbiota DNA sequence
gatctcctcgtgcagcaggaaatgcgcgagcaccgtgacgaagatcggattgcaggagaagatgaccgcgacgatggacgcgcgcgtatgggtgacggacatctgatagagcgacatggcgatgacgacgcacagaaagcccgcgcacgcgaaaaagccgaggtccttgcgcgtgagtacggcgttcttcttcctgatcgagcgcacggcgaagggaatgagcagcacgccgccgacgagaaagcgcagacacgtgatctgcatgggcgcaaacacgccgtgcacggttttgagcatgacctccatcgtgctgaaaatgacggcacagaggacgatatagacatagccggagcgggaacggttcatagcgattctcccttcatcattcaaacgaaagcagtatatgccattttctgcccaaaggcaagggatgcttgacaaaagctgaatttgagatataataacgcaagtaaaacgcgatgaaaaagtcagctttgcagacgagcctgaagcgagaggggaatggtgcaagccctcggccaccggtgcgaagcagccgctttggagccgtccgcgaggagcggaacgcctcgtccccgttaccggacggctaagatgctttcccacaagcggaaagataattagggtggtaccgtgaagtgtcaagtcttcgcccctatgtgtagggacggaggctttatttttttggaaagggatagatatgcgcaaaaaagtgtggctttttgcattggctgcggtgctgctggtgattttggccggctgccgcggaaacgagctgcccgacggcatggacgaggacaaggtctcgagcgcgggacttgccgtcatgtcccagctgacgaagggcgaatatgaagcggtctacgacgcgctgcgcgaggatgtgcgcgagcagacgagcgccgatgccattgaagagatgatggatatcgcgaccgaggggcgcggcagcttcaaaaaggtcaaggattcgatggtgacgggcgtgacggacgcggacgagccgcatgccatcgccgtcatcggcgcgaaatacgacaaaaagtccgtggtgttccgcatcgcgttcgatacggagatgaaccttatcggactggatgtgagagggaagtgagcagatgacaagaaaaatcatcgacatgacgaaggacccgcgcggcggccagtttgaatacttccgcacgatgaccgacccgtgggcgggcatcacggttccggtggatattacggatcttcttgcttcgcttaacggccgtccgtttttcctcagctatctctatgcggtgatgcgcgcggcgaacgccgttcccgagctgcggcggagattgctgcccgacggtcaggtcgttgagtatgatcactgtgacccgtcgtacaccgtgatgaagcccgacggcacgggcgtttacgtctactgcctgcttgaggacgatctgtcgtcttacgaaaagtttgtcgccgagggcaagcggcggcagaaggagacgctcgagcgcggtacgctgaccgaggatggcgacgtgctggcgaatttcttcgtctcctgcgtgccgtggctctactacacgcagatcaaagagcccgccggcggcgcagacgacagcaatccgcgcttcgcctggggaaaataccgcgaggaaaacggccgcatgatgctgccgatgtcacttttcatcaaccacgcgctctgcgacggatggcacgtcacgcagttctataaaaatctcgaccgtgagctcgcggaattgagcgcttatctgaaaacacagaacgaacaacagtaaattttacaataaaaggagaaaccaaccatgtctcagcccaagtattacggtctcaatgagctgcgggaaatgttcctgcacttttttgagacaaaaggccatctgcgcctgcccagcttttccctgatcccgcagaacgacgcgtcgctgctgctcatcaactccggtatggcgccgatgaagccgttcttcaccggcgagcaggagcccccgcgccaccgcgtgaccacctgccagaagtgcatccgcaccggcgacatcgagaacatcggccacaccgcgcgccacggcacgtactttgaaatgctcggcaacttctcgttcggcgactatttcaagaccgaggccatccactgggcgtgggaattcctgacgagccccgagtgggtcggcctcgacccgaaccgcctgtatccctctgttttcgccggcaacgagaccacgcccgccgacgacgaggcgttccgcatctggcacgaggagatcggcatccccgaggaccgcatcttcaagttcggcaaggaggacaacttctgggagcacggctccggtccgtgcggcccctgctctgaaatttactacgaccgcggcgaaaagtacggctgcggcaagcccggctgcaccgtcggctgcgactgcgaccgctatatggaggtctggaacgtcgtcttctcccagttcgacaacgacggccacgaccactacaccgagctcaagcagaagaacatcgacaccggcatgggtcttgagcgcttggccgttgtgtgccaggacgttgattcgctcttcgacgtcgacacggtgatgaacatcacgaacaaggtcacggagatcaccggcgcgagctacggccagagccgcgagaaagacgtgtccctgcgcgtcatcaccgaccacatccgctcggcttcctttatgatctgcgacggcgtgctgcccagcaacgagggccgcggctacgtgctgcgccgcctgctgagaagagcggcccgccacggcaagctgcttggcatcaaccgtccgttcctctatgaggtcgtggatacggtcgtgcacgagaacgaaggccattatcccgagctgcgcgagcgtcaggcctatatcaccaaggtcatccgcaccgaggaggagaactttgccaagaccatcgacggcggcatgaagatcttcaccgagcttctgaacgcccacaaggagaagggcgagaccgtcttctccggcgcggacgcgttcaagctgtacgacacctacggcttccccatcgacctgacggtcgagatggtcgaggacgagggcatgacgctcgaccgcaaagcctttgaccacgagatgcaggagcagaagacccgcgcccgcgaggcgcgcaaggcgctcggtgacctcggctgggcgggcgttgagttcggcaaggacattccgtccacggaatttgtcggctacgaccacgattccgtcgacgatgcgaaggtcgtcgcgctggtggtcgagggtgagcaggccgaggctatgatgagcggcgtggagggcatcatcgtgctcgacaagactccgttctatgccgaaatgggcggccagatcggcgatacgggcgtcatccgctgcggcgaggccgtgtttgaggtcacggacgtccagaagaacaagggcggcaagttcatgcacacaggtaaggtcatccacggcagcttccagctcggcgacaccgtgacggcatccattgatgtggagcgccgcatggccatccgccgcggccacaccgcgacgcatctgctcgacgccgcgctcaaggcggtgctcggcgaccacgtgcatcaggccggttctcttgttgagcccgaccgtctgcgcttcgacttcacgcactttgagtccatcacgcccgagcagctgctcgcggtcgatactttcgtcaacgacgcgatcctgcgcggcatccccgttgtgaccgaggtgctgcccatcgaggaagcaaagaagaagggcgctgtcgccatgtttggcgaaaagtacggcgacgttgtccgcgtggtcgagatgggcgatgtgtccatggagttctgcggcggtacgcaccttgacaacaccgccaaggtcggcctcttccgcatcaagagcgagggcagcgttgcctccggcgtgcgccgcatcgaggctatcaccggcaaacagacgctcgaagagcttagaagcggccaggagaagctcatccgcgcggcgcagctcttaaagaccacgtcgaacgagctcgaaagccgcatcggcggcatgctgagcgagatgaaggagatcaagagccagcttgaaaagttcaaggagcaggcatcgctcggcgaggcgcgcacgttcctgacctccgccaaggaagtgaagagcctgaagctcgtcaccgcccagcgcgacggcatggatgcaaacgccctgcgcaagctcggcgacttcctgcgcgacaaggagcccaagatcgtcggcgtgctcgcctccgtcaaggacggcaaggtcacgcttctggccgtgtgcggcaaggaagcggtcgcaagcggaatcaaggcaggcgatatcatcaaggccatcgcgcccatctgcggcggcaagggcggcggcaagcccgactctgccatgggcggcggcaccgaagtcagcaaggtcgacgacgcgctcgcggcggtggacgatctcatcctgagcaagctcggctgatggcggcgttaccgaaagatccggcgatgctgctgagcgccgtgaatatgaagctgcgcgatttttacgattctctcgatgcgctgtgcgatgatctggacgttgcgcgcgagagaatcgaaacatcgcttgcaggcatcggttacacctacgatgccgagaaaaatcaatttgtgtaagataaaattactttacagaaaggagcgataaaacatgtctgattgtctgttctgcaagatcatcgcgggcgacatcccgtcgaacaaggtctacgaggacgacctctgctatgccttcaacgacatcgcgccgcaggcaccggtgcactttcttgtgatcccgaaggcgcacatcgcatctgtcgcgggcgtgaacgaagagaacagcgccgtcgtcgcgcacatcttcgaggtcattgccaagctcaccaaggagaagggcattgagagctaccgcgtcgtgtccaacatcggcgagcaggcgggacagagcgtgccgcatctgcattttcatgttctcgccggccgcgacatgacctggcctccgggctgattgttttcccgtaggggaagcgaaattggcagcgcgcagcgctgcatccattccctgcgccgcgcaggggatgcggataagggaggggtatctctttttcaaaaagagatacccctcccttacaccctcccagagaaaattcacattgcgggcttgtagcttgaagagctgctcggcctgcggaatcaggtgcggtgtacatggcttcgccatgaatccctgcgattcggcaccgattgcaaccgcgccttactaccgtgaggcgcgagtgacgtttgcttggcggcagactgcttgcgaaatagcggcattgcttcgctcgccgcattgtggagactggcggtagacgggaattactgcgcacttctacaagatgggcagagcggcacccgcaaggggtgtgccgcatccgtaaggcagcagagccgccaacggctgcgcaacagcggataatagaagaaagtcaaatcgtatagcaacactaaccgcggcaacgccgcgcgcaggcagttgcattccgaaggcataaaggttattcaaccccgagactgccaatctaaacctttctcttgggggatttaaagggggatattctctttcgtgaaagagaatatccccctttgcccttgccgcccgcaggcggcattttcttccttgccaaacggcaagaattgttgtatgcttacatgcataatgtgaagccgtatgggtgaagattctctcggaaatgttaccgaatggtagcataaatccgaggtgatttcatgtatttccagcggctggaagaccttcgagttgacaacgataagacgcagatcgagatcgccgaatatctcaatctgaatcgcaacgtttattggcgatatgaaaagggcgagcgtgagatccctgtatgggcggtcatcaaactcgccgactactaccgcgtcagtaccgattatctgctcgggctgacggacgaccctgcgcgccgatgagagtactggcgattttctgcgcggcgtttgcggcgggcgttgcgctctcgcagtatttactgagtgcgcggtgggcgctcattttgtgcggcgtgtttgccgcggcggcgcttgtcatgggactttgtggctgcgcaaacaagcgcggggactgggcaaagcgcgcgtttttgtgcgcgctgggcttatgctttgcgttcgggtacaacacgctttatgcgcattttatcaaagtgccgaacgacgcgctgctcggcacgcaggacacggttgaggtcgagcttttgggctatgccgaggagacgagccacggcgcaaaggtcacggtgaagatattgaaccgcggcctgccggggcgggccatctactacggtgacgcggatcttatggacctcgagcccggcgcgcacgtgacggcggaggcgctgttcaacagcgcgaccgacccgacggggaagggactgcatctgcgcaatttcacggccaaaggcgtctacgtcctgctctatcagcgcggcgacccgacttatgacgacacaaacgcgggcgcgctcaagtatctgccgcagcgcatcgcaaggacgctcggtgagaccattgagcgcagctacagcgagcgcgagggcgcatttctgcgggcgctgctgctgggcgacaagaaatatctcgacgaggaggacgcgagcaacttatccgaggtcggcctttcccacgtgatggccgtctcgggtctgcactgctgctttctggcgtcgctgatcggttcgctgatgggcgataagcggaaaaagctccgctgcgccgtgacgatcccgctcattttcctctatgcgttcgtcacaggcctgacgccgagcatcctgcgcgcgtgcatcatgatctcgatgggcatgatcgcgccgcttctggggcgcgacaacgacccgccgacgtccatctcgtttgcgctgctgctcattttactcaaaaatccgttcgccatcgcaagcatcagcttacaattatcgttttccgcggtgtcgggcattatctggctgacgccgaagctcacgaagcgtgcccacggcaagcacaagcttgtgcgcgcggcgctgctgtcgttttcgacgacgctcggcgcgatggtgttttccacgccgcttgcgtgctactatttcggaacgctctccattgtgtcgcttttgagcaacctgctttgcctgtggctcgtgagcatcgtgttcgcgctgggattactttcggtactgatcgcggcggctgtgccgcagctcggcgcggcctgtgcctttgtgccggcgctcggcattcgcgcggtgcttgccatcgcaggacttttggaggagcttccgttccacgccatctatttcaacacagcgttttccgtcgcatggcttgcgtacgtgtacgcgatcttcatcacctgcgcgctggcaaagcgcgggaagtaccgttattttgcggcggtggggctttccgtcctgtcgctcttcgccgcggcaagggtcaatgccctacactatgaacagggcgggctgaacgttgtcgcgctcgatgtggggcagggggagagcgtgctgctcatttccgagggccacgcggcactcgtggattgcggcagcaaaaattcctacatcgacgccggcgcgatcgcggcggactatctgcgctccgcaggggcgacgctcgactccgtggtgctgacgcattatcacgaggaccacgccaacggccttgccgcgctctttgcgcgcgtggatgtcgataccatctaccttgccgatatcgacgcgggcgagggtgaccgcgatgaggtcgaagcgctcgccgagcgctacggcgtgaacatccactatgtcaccgaggtgacggatgtagaaaacggtgcgtcgacgatgacgatctatccgccgctcggcgagaagggcgcaaacgagctgggattgacgattttgtgctcgctcggcgacttcgacacgctcatcaccggcgatatggacgcgaaaaccgagacgaagctcgtcgagacctatgatttaccggatatcgaagtgctgctcgtcggacatcacggctcgaagtattccaccggtacgacgctgctcgaatcggtgacgccggaggccggcgtcatcagcgtgggcgacaacagctacggccatccgaccgaggaggcgctgctgcgcctgacggacgcgggcatgacggtctaccgcacggacatgcagggcaatatattgatcacagtggactgagaggacttcatggcagagagaaaaacgcccaacaagggctatcagaaattgaaaagcgacctgagcgcgggcaatatcggtcaggtctacatcttttacggcgaggagagctatctgcgcgaatactacctcggcgagatcaagaaaaagctcgtccccgcgggctttgaggagttcaactaccaccgcctgagcggcaagacgctgacgatgcaggagctgaacgaggcggtcgaggcgatgccgatgatggccgagcgcacgctcatcgtggtaacggactgtgacctttttaagctccccgaggagcagcgcacggcgctcatcgcgctgctcaatgactttccgccgtactgctgcctcgtgttcgtgtacgacctcattgagtataagccgagcaagacctataaaaagctctacgaggcgctcgacaaaaacgcacagagcgtcaagttcgaggcgcaggagcgcagcgatctcatcaattggatcgggcggcgcttccgcgcgctgggcaagggtatcgacgcgcagacggcggagcacctgatcttcacctgcggcgcgctgatgactggccttgtgccggagatcgagaagatcggcgcctacgccaagggaaagaacatcacgaccggcgacatcaacgccgtggccgatcctgtgctcgacgcggtggtgttcgatatgacgaacgccatcacgaagcgcgactacggccacgcgtcggagcttttgggtcagctgctcaaaaagcaggaggagccgtttgtgatcttggccgttatcagcaaggagctgcggcgcatctacaccgcgcgcatcgcgctcgacaacggcaaggacaagctctggctcatggagctgtgggggatgcggtcagactatcccgcgcgcttactgatggaggcggcgcgcaaaacgacgagcgagtggtgcagccagagccttctcatgtgccagcggctcgaccaacgcatgaagagtgaaaagggtatcgacagcgagggtgagctcaagctgctgctgatgcgccttgcacaggggaagtgaatcttatggcaaagccgaaggtaaaggaagtcatcgtcgtcgaggggcggtacgacaaaaacacgctctcgcaggtcgtggacgcggtcatcgtggagctcggcggcttcgccgtgttcaacgacaaggaaaagcaggcctttttgcgaaagctcgccatggagcggggcatcatcctcttcaccgaccccgacggcgcgggattcgtgatccgcaaccgcgtcaagggcaatatccccgagggtcgtgtgctgcaagcctacgtaccggacatctacggcaaggagaagcgcaagcgcaagggcggcaaggagggcaagctcggcgtcgagggcatgaagccggaaattttgcttgacgccctgcgccgcgcgggcgcgaccattgatgaagaaagcactgtaaagggaaaatccatcacaaaagcagacctctatgacctgggcctgatcggcccggacagcgtggaaaagcgcaaagcgctgtgcaaaaggctggagctgccggagcatttgagcgcaaatgcgctggtggaggtgctcaatttgctgatgagcagggaagagcttgaaaagctcttccaatgaagagcgaaattatccctgcgtgccagcagggaacggggcaaagggggctgttctctttcacaaaagagaacagccccctttaaatcccccaagagaaaggttttgacattgcgagattggggcttgaagaggtgcacagcctgcggaatcgggagcctgcgtggcagcgagcgaagcaatgctgccacgcaggcat

SEQ ID NO: 10154 - DNA, 1691 bp, Unknown
  gut microbiota DNA sequence
gtgcttggcatacacgccgacgagcaggccgcgcgctgcctgcggcaggatccacaggatcgtggtcgcggtcacgccataggtgagaagctgacccatgaatgcgccgagaaggccgacgagcaggccgccgaccggaccgtagagcatcgcgcccacgatgacgggcagcgacgcgacggagatgttgatccagccaaggcgcaccgtgccggcaaagttcagcacaacgtaaactgcggtcagcatggcgatggtgaccattttgcgcgtggacatggccgaggacttccacgtgaagaccactgcggcgatgagcacgagggcgaccgcgatgatgatcgtccacatgatgggggaaagcgcttcgatctgaagggacattgtgaggacctccttttttcataaaaagatcttcccgcggctgcggtgccgcgcggaacggcttaatccggtgaaaaaagaaaacacctctccctccggatggcaggaaccacgcggaggagaggcctcacttaaactctcttctgagtggcaagcggatgcggaaaccatactgcaaaccatgggtttttcgtccgtgggcaacttcccatcccaacggcactattcgctcttcgcgtaaacacatggcttcctactctgccgatgcataaagctcttcaaaatttaaacttcatgcaggcacagcatagcagactgcacaacgcacgtcaatcccttttcgaccctttttgcacacttttacgtttttaaggtgatattcctcttttccctaataaattcagtccctccaaggcccgtttttccttgacagggccttactttttttgctattctaaggtgtgagagaaccggcataagttcgcacttttcagcttagccgccggtaatatatcaatcgactgaaaaatcagaggaggaacacgcaccatgatcaaagaaaccatggaattcctgtcccagtatgaccccgaagtcggcgccactattgagaaggagtatcaccgcgagcagcgcaacatcgagctgatcgcctccgaaaacatcgtctccccggctgtcatgatggctatgggcacgtgcctgaccaacaagtacgccgagggctatcccggcaagcgctactacggcggctgctactgcgtcgacgagaccgaagagatcgcccgtcagcgcgcctgcaagctgttcggcgctgagcatgccaacgtccagccccactccggcgcttccgccaacctggccgcgttcaaggctatgctccagcccggcgacaccttcatgggcatgaaccttgcccacggcggtcacctgtcccacggcagcccggtcaacatctccggccagtacttccatcaggtcccctactccctcaacgatgagaccgaaatgatcgactacgacgaggtctaccgcatcgcgcaggagtgcaagcccaagatgatccttgccggcgcttccgcctatccccgcaagatcgacttcgccaagttccgtgagatcgctgattccgtcggcgctttcttcatggtcgatatggcccacatcgccggtctcgtcgccgctggcgttcacgagagccccgtgccctatgccgacgttgtcaccaccaccacccacaagaccctgcgcggcccccgcggcggcatgatcctgtgcaagaacgagatcaccaagaagaacatcga

SEQ ID NO: 10155 - DNA, 1562 bp, Unknown
  gut microbiota DNA sequence
gtatctatgtaagcaccgggggaatgtggtgtccagcgaggaactgtttgaacatgtttggggcgaggcgtttatggacagcaacaacaccgtcatgagtcacatcgcccggctacgggaaaagatgcacgagcccagccgaaagcccaaattcatcaagaccgtttggggggtggggtacaccattgagtaagaaaggaaatacccgcagccgccggagatctttgcgcatctggggcggctacctgctggtcctcatggcttgggtggtcgcagtgatggccttggcattcctgggcttcatcatctgcgccagcatcacctggcagccctcgccgctctacgacttcctgaattgggttcgagactacatcgttctggtctgcatcgtcacagtgctggcgggctgggtggtcatcagcttctattttatctccaagcccatcaagcagctggacgtggtggccaatgcggcagagcaattatcccgccccagtgaggagcccatccagctgccggattccctggaggacatctccatccagctgaatctggcccgggagcaggctctccgggacgcccgggcagcccgggaggcagaacagcggaaaaacgacctaatcgtctatctggcccacgacctgaaaacgcccctgaccagcgtcatcggctacttgaccctcctgcgggatgagcctcagatctccccggagatccgggccaggtacaccggcatcgccctggagaaggcggagcggctggaggacctcatcaacgagttcttcgacatcacccgcttcaacctctctcgcctggagctggagcggcagagcgtggacctgacgcggatgctggagcaggtcgccagcgaattccgccccattttcgcagaatcggggctgtcatgcagcctggatctgccgcccaagctgcactattcctgtgacccggataagctggcaagggtctttgataatctcctgcgcaacgcgtcttattatagcctgccggacagcacggtggaaattgccggacggatagaggccgggaaaatcgtactcaccttctccaatgcgggaaagaacatcccccaggagaaattggaccggatctttgaacagttcttccgtctggacagctcccgcgccacccggacaggtggtgcgggccttggcttagccatcgccaaggagatcgtggagctccacggcgggaccattcgggcggacagcaccgaggatcggatcaccttcaccatctgtcttccgtcagaccattcagaagcgccgtaagaaaatcacaagaatttcgcagaaaacttgcaaggcatccgttggtagatagacaagtatgaaacgcctggttctggtaccatttcagtatcagaaccaggcgctttattttgattaggaggtcttatcccatgaaaaccattctcgttctcttcggcggatgctccacggagtacgaagtttctctccattccgcctatgcggtgctgtcccacatggaccccgcccgctatactcctttggctgtgggcatcacacgggaggggcagt

SEQ ID NO: 10156 - DNA, 962 bp, Unknown
  gut microbiota DNA sequence
ctgatcatcctctgaaaggctgtgctcctcgggaggaaacaagctgaactgtcctgtgatctcccgtatcaccgaaaagaaagcgtcatagcaatcgtccggtagcaagcggaacacagtatatcggcgaagttcctgacagagctgctccatctcatcattcagtttccaccaaagttcactcttgcggacatactcgtagatgtccataagggtacggatgcgcaccatccgttcgtgcagggggtggtagtcatccggtgatagattcagcagatcttcggtcagcctgcctgcctcaaactgctgcccgttcagctccaaggtgctgccgtaggtatagaatatgatgctcccctccatttccgctggccccctcctctgcaataatttgtcctacttgatttttaatctgtccatgctttttatcaggataccatcttttccaccacaatacaagcagaggggcaaggggatgctcaaaagtcctgtgggcactgctcctctaaaagaatactactcccacttctttcgaggtgggagatttttgtattcagatattttgaattggaggtactgactatgagcaacaaaatggaccgtcctctggtcacggtggacggtaggacgctgatggaccgtccgctggagccgcccaattttgtggtggacacgctgatctctcagggtctgcatatcctggcgggttcacccaaggtgggcaagtcctggctggccctgtggctggcggtgacggtggccaagggagaaccggtctggggaatgagcgtgaagcagggcaccaccctctatctctgcctggaggactccgtccttcgcatccagaaccgcctcttcgagatcacagaggacgcgccggacagcgtccatttctgtacggagtgcgctcccatcggccaggggctggaggagcaggtggagggcttcctcgtagctcaccc

SEQ ID NO: 10157 - DNA, 20505 bp, Unknown
  gut microbiota DNA sequence
taacaaaaagagattgatcgtagatgagcaggttcgtgacatcattgtcatgattttcgagtcctgcgttgcaggcatgaccacgagtgagatcgctcaaatgctgaatgatatgggcattccatccccgttagagcataaacggcgaaatggcgggttttataatggggtggtcaaggaagagactggaatctggctcaagggggctgttcgaaagattttgactgatgagcgctataccggtaagatgattaccaatactcgagagacagaagaagtaggaaagcctaagatgcggtcgttgccccgagatcaatggatcatagtgccaggtacacatgaagcaatcatttcggaggagctgttccgagcggcacagaatgcgctccaagggcgtattcggaatgttaacaagaatactgccgggaaccgagccaacaatctgtttgtgtgtggctgctgcgggaggaagctccgaaagaatccagcaaaggaaccacaccttgtttgcccgaaaaatgacagtattaagggtgctgagtgtgcaggcctctttgtcaatcaggcccatattgagcaagctgttcttcagatgctgcgggaacaaagtaggagcttccttgagcagcattgcttgatgcaggcatgcattgacaaaaagctttcaagtattcaaacggagcttgatgctaacaccaatatgacaagacggctccaaagtagaaaggctgaactatatgagcaataccgagcgggtcgcataagcagagagaaatttgctgatatccagaagacagattcagagaagctggcaagactctcaagtagagctgaagagatcaagcggcttctggtagagcactatgagtctcgaggtaatcttgcggcgggaaaaagaacagccgatcagatcatcctgcttaaagattatgatccggaaataattagaaattttgtagagcgggttcgtgtgtacccttcaggagagattgagatagatatgcgtacttcgagcgggtttgcatttgtaacggcaagctaaaacaataagcggtccactttggaggcagctgaaaaaattccgaaaaaactgtatgtctatcttgacacaaccagagggcttcatcaccggcatggcgtcaaagatgttcgtcgtcgcggggccggtcatcgtgttcggcacgctcgcaagcgtcgtgtacggcgttatcctgatgctgctgtaaaaaaggagagatcccgcggcatctctcctttttgattcatttcgcccgctggatgcgcttttcgttttcgtgcgcgctggggatgaccagcggcgcctgctccacaatgaccgacgaggtgtccagtccgtaccactggatgaccgagcccgccgcgcggcagacggcgtatttgaggttcaggatgatctcgtccgtgcggctcagctccgacatcagcggcaccgcgcggcgcagcatcagaaacttgaagctgcccacctgcgaggggccgtagatcgaatactttctctcctgcggtggcagctccccgctcttgagcaggtcgcgcacgatctggcgcaggtagatgttcacgcgctggtcgttcttgaagccgaggttgagctttacgcggaaaatatagtccgtgccaaacgtctcgacctgatagttcatcgcgtttggctcgtcgagcacatgcacactcaaaaaccagtaggcgcgggcgcgcttggggtccttatcgaggatggagtagagtgtgttgcgatcgatcgtctccatatcgtcgctgctgccgatgtagacaaggttctgcgtcagctccggcaatgcactgtcgccgcgcagcgccgcaagattctccgtatagtcaccaagcttgaggcgcacgctgtatttctgctcgagttgcgtgccgcggtgccagatgatcataatcgacagaagcagcagcgccataatgaccgccacatagccgccgtgcgcaaatttcgacaggctcgagaggaaaaacaccgtctcgatcgcgccgaagacaatgagcacgccccacgcgagcgctttcttccctcgcacacgggaaagatacacgaacagaagcagcgttgtcatcagcatcgtcaccgtgatggcaaggccataggccgactccatgcgcgcgcttgagcggaacagcagcacgatgaacgtgcagcccacccagaggatcttgttgaccgtgtcgatgtagatttgacccttggtctcggcgggatactgctccttcaggtgcggcatcaggtcgaggcggatggcctccgataccagcgtataggagcctgtgatgagcgcctgcgaggcgatgaccgccgcgagtgcgctcaaaatgaccgccaccggacgcagcgcgccgggcagcatcaaaaagaacgggttcaggctctcaagcgatgcaagcgccgcgtcgccccgactgctgagcagccacgccccctgccccagatagttgaggatcaggcagatcttgacgagcggccagctgatgtaaatgctctcgcggcctacatggcccatgtcggaatacagcgcctccgcgcccgtcgcggccagaaacacgctgccgaggatcataaagccgagtttattataagggctcacgagaagctccaccgcgtgcgcggggttgaacgcccggagcacctgcggcatggagaaaatgttcatcgcccccgtcgcaccgaggaagaggaaccacacgagcatcaccgggccaaaggccttgccgatgcggctcgtgcccgcgtgctgcacggcaaaaagcgacgcgatgatgcagagcgtgatgatgatgacgcccgtctggcggcctccgaggagcctgtccatcatcgcgatactgcgaagtccctcaaccgccgaggtcacggtcaccgcaggcgtcagcacgccgtcggcaagcagcgccgcgccgccaagcatcgccggcacgatgagtcacttgccgcagctgcgcacgagcgaatagagcgagaagataccgccctcgccgtggttgtccgccttcatggcgatgagcacgtacttgatggtcgtgagcagcgtgatcgtccagatgatgagcgacagcgcgccgacaatgaacggctcgttgatctgcgtgatgccgccgttcccctccaaaatggacttcatcacgtacagcggtgaggtaccgatatcgccgtacacgatgccgatggccacaagacacatcgtcagggaggctttttgtctcttttccatagcgttccctgcctttttgggcacgcggagcggtctttatctccccaccgcgccgcttcttcataaattcttaacgaaattttagcatgtcctcccgacaagtgcaagcgacaaatgccgtcaagtgttaaattgacgaaaatgccctttccgcgctgaagaggcggaagcgtgtccattcatggtttatccgcggttattctgttgacataacgatgtggaaaactctgtggaaactgtgaataactttgttgttccagtgcgttcccgccggttgacaattggttatgctcgacgtctttcggcataattggcgcagaaattcccgcgaatttctgcattttcccgccaaaggcaaaaatctgccgcggccacttgccattgtggtcaaaaaatcgtataatgtactaagttttgtgtttgaagatcagaatcgtaaatttcggcgaaatggagaaaccccaatggcagaagcaaaaaaaacgaattacggcaacgagagcatctcgtccctcaagggcgcggaccgtgtgcgcaagcgcccgggcgtcatcttcggctcggacgggctggacggctgcgagcacgccgtgtttgagatcctctccaactccatcgacgaggctcgcgaggggcacggcaggctcatcaccgtcacccgttacttagaccacagcatcgaggtcgaggatatgggacgcggctgccctgtggactataaccccaaggaaaagcgcttcaactgggagctcgtgtactgcgagctctacgccggcggcaagtacaacaacttggacggcgacaactacgaatactccctcggcctcaacggcctcggcgcgtgcgcgacgcagtattcctcgcgctatatggacgtgaccgtctggcgcgacgggaacaaatactccctgcactttgaacgcggcgagcccgtgggcaagaagggcgatgagctcaggatcgagccgaccgaccgcggccgcaaaaccggcacgcgcacgcgctggctgcccgacctcgacgtgtttaccgatatcgacattcccgccgactactatgtcgaaacgctgcgccgtcaggccgtcgtcaacgcgggcatcacgttccgcttcaaaaacgaagtcctccccggccactttgagacgcaggacttcgtctacgaagacggcatcatcgactatgtcgccgagatcgcgggtgaagacgccctgaccacccccgtcttctgggagacggagcgccgcggccgcgaccgcgaggacaagcccgaatacaaggtcaagctctcctgcgcgtgctgcttttcgaataaggtgcagcgcatcgagcactaccacaactcctcgtggctcgagcacggcggcagccccgaaaaggcgtcgaagaccgcctttgtctacgccatcgacaagtatttgaaggacaacaacaaataccagaaaggcgaagcccgtatcgcctggcaagacatcgaagactgcatcattcttgtctccaacaacttctccacgcagacgagctacgagaaccagacgaaaaaggccatcacgaacaagttcgtgcaggaggcgatgacggactttctgaagtcccgcctcgaaacctatttcatcgaaaaccgcgtcgacgcgctcaagatcgccgagcaggtgctcatcaacaaaagaagccgcgagagcgcggaaaagcagcgcctgaacatcaagaaaaagctctccggcagcatcgacatctcaaaccgcgtcgaaaagtttgtcgactgccgcacgcgcgacgtctcgcgccgcgagatctacatcgtcgagggcgacagcgccctcggcagcgtcaagctctcgcgcgacggcgagtttcagggcatcatgcccgtgcgcggcaagatcttaaactgtctcaaggccgactatccgcgcattttcaagagtgagatcatcaccgaccttttgaaggtcctcggctgcggcgtcgaggtgccgggcaagtttgtcaaggacctgaacgcctttgatatcaacaatcttcgctggaacaaggtcatcctctgcaccgatgccgatgtcgacggcttccaaatccggacgctcatcctgacgatgatctaccgcctctgcccgacgctgattcgcgagggctatgtctacatcgccgagaccccgctttttgagatcacctgcggcgaaaagacgtggttcgcctacacggacaaggagaaaaacgacatcgtcaagacgcttgagggcaagcgctacaaggtcgaccgctcgaaaggtctcggcgagaacgaccccgaaatgatgtggctcacgaccatgaaccccgagacacgccgtctcatcaaggtcatgcccgaggacgcggaggcgacggcacactcgtttgatctgctgctcggcgacaatttgcagggccgcaaggaccacattgccgaaaacggctacaaatacctcgaaatgatcgacgtatcgtaatacgaacaaacaggaaaggagcgttactttatggaaggcattttacttcacgttctctatcgcggcgaaaaggctaatgactttgcatcggagatggagcgaagtggcctgcgcgccgccgtcctcgcggaagaaggctgcatgcagtacgactactaccggcctcttgccgaggaaaactgcgtgctgctcgtggagcactggcgcgaccgcgccgcgctcgacaagcacgccgtcggtgagccgatggcgcgtctcaaggcgctcaaggcaagctacgacctcgcaacgaccgttgagcgctttgaatgaggaggcgcgcatccggggcagaaaattgggaatctactaaggagttttgatagctatgaaaaagatcgttcttaaaactgtgatagggattcttctcgtttgcagcgtatttgttggttttctttatgtaagtaacgacattggcatagcatcgggcaatctagaggctgacattcgttcgtcgcagaagatcaaggaggattgggcggtcgatggaagtgtttctgacacgatggctgcatatatttcttatccgcaggacatgagcgaccacactttttccgtctatgtcaatcgcccgggactttccttcggatatttcttccgcgcgggtggaaaactctcggagatccaggaaggaattgcagagttcaccacagagggtgctaatgagcgcgcattgatttccatgaatcagcagcaggtgcagcagcttcaaatcgatgatggccacgccattcaagtgatcgatatcgacagcgatcagccctttgcgatcgtcctgccgatcaatgcgggcagcattactttttatgacgtgaacggaaatgctgtagaatattggaatcatcctctttaacagcttccggtttgccaagccggcttcatcccttcaagggcaaaaaggcctcgcatcattcgaccgcaaaaaatccgtacacaagcaggaaggcccgaccgatgagcatccatcggtcgggtcttctgtctgatgcgtcccttttttcacgccttctgcgcgccgacgtcgccgagggcggcggccgccgctttctcccgccggcgcacgcagagcgtgccgttttccgccgccaaaaccgccgtgtcgccgcttgcgagcgtgccgtccaaaaggcaggtcgcgagcgcgtcctccacctcgccgcggatgagccgccgcaggggacgcgcgccgtaggaaacatcgtagccccgctcggcgagggagaccgcgcagtcctcgtccgcctcaagcgtgatgccgagcgccgcggcgcgggaaacggtctgcgcaagcagccgccgcgcgatctcggcgcagtcctcgcgcgataagcggcggaagacgatcgtctcgtccacgcggttcaaaaattccggccggaacgtccgccgcagctccgcgatcaccgccgccttcacggcagcgaactgcgcgtcggcgcttttctgctcctccggcgcaaagccgagcggcgtgcccgccgccgtgatgctctttgccccgatgttcgacgtcatgatgaccgctgtgttgcgaaagtccaccttgtggccctgcgcatccgtcacgacgccgtcctctaaaatttgcagcaggatgttccacacgtcttcgtgcgccttttcgatctcgtcgaagagcacgacggagtacggcttgcgccgcaccttttccgtcagctgcccgccctcgtcgtagccaacgtagcccggcggcgagccgatcaggcgcgagacggcgtgtttttccatatactcgctcatgtcgatgcggatcatcgcgtcctcgctgccaaataccgcctcggcgagcgctttactgagctccgtcttgcccacgcccgtgggaccgaggaagaggaacgacccgacaggccgtttcggatccttgacgccgacgcgcccgcggcggatggcgcgcgccacggcgcgcaccgcgtcctcctgcccgacgacgcgcgcgtgcagcgtttcttcaagcgtcaaaagccgcgcgctttcgctctcgttgagccttgtcaccggaatgcccgtccagttcgacaccacggcggcgatgtcctccgccgtcacgcgcacagcggtcttttctgcctcgcgcgcctgttttttccgctcagctgccgcctgcgtgcggaagctctcctccgcgtcgcgcagccgcgccgctttttcatagtcctgcgcgcggatggcagtctccttgtcccgcgcggcggcgctcgccttctcttcgagcgctttcagttcgggcgaggcgctgcgcgcggacagtttcacgcttgccgccgcctcgtcaataaggtcgatagccttatccggcaaaaaacggtcgggcagataccgctttgagagcgtcaccgccgtgcgcagggcctcgtcctcgatggaaaggccgtgatacgcctcgtactttggccgcaggccatgcaaaatttgcagtgcctgcttctcgtccggctcgccgacctgcacgctctggaagcgtcgctcgagcgcggcgtccttttcgatgaattttcggtactcctcgagcgtcgtcgcgccgatgacgcggatctccccgcgcccgagcgcgggctttaggatgttcgccgcgtccaccgccccctcggcgctgcccgcgccgacaatggtgtgcagctcgtcgatgaacaaaatgacattgccgtcgcgccgcacctcgtcgagcacggcgcggatgcgctcttcaaactcgccgcggtactttgtccctgccaccatgcccgaaaggtcgagcagcaggatgcgcttgtcgataagctcctccggcacgtcgcccgccgcgatcttttcggcaagcccctcggcgatagccgtcttgccgacgcccggctcgccgatgagcacggggttattttttgtccgccgcgtcaggatgcgcagcgcgcgggcgatctccttttcccgcccgatgacggggtcgagccgcccctcgcgtgccatcgcggtcagatcgcgcgagaattccaagagcgtcttgccgtttttcgcctccgcgcggcttgcacgcacctcgggcagcgggagcttgcgcggtgacaggctcatcgcgcgcagcgtgtcgctgtacagctttttggtatccacacccagcgatcgcagcagccgcacggccatattgccgctgtcgcgcaggataccgagcagcagatgccccgcctcgatctctccgctgcccgtgcgcatcgcctcgccgacggccagctcgaccgcgcagcgcgcgtgcggcgtgagcccctgcacggtcgatctttccgccgtgccgcgccccagcttttcgatcatcctctcgcgcactgccgactcgtagatgcccgaggcattcagcgcacggcaggccgcgtcgtcctcctcgcgcagcatcgcgagcagcaggtgctcgcagcccacatagccgtgccccagctcgcccgccgccgcctgcgcacagcgcagcacatgctcagccttcaggctgaatttccggtcattcattgctctaccctccgcttccttttcgtcctttcatttttgaccggtttattcaaaaataaacaccgcaaatgacacagaaaattcaatattttcctgcattctgactcttgcattttcgctttgacatgctataatagcgtcatcaacttatggaggtactaattatggcttatcagattagctctgcctgcgtcagctgcggtgcttgcgcagacgcctgccccgtcggtgctatttcccagggcgattcccagtatcagatcgacgcaaatgcctgcctggattgcggctcctgcgctgatacctgccccaacggcgccatctcccaggcctaaggtctaagggtacttaaaaaataaggacgcgcgaaagcgcgtccttatttttatcatcagaaagggtcatcacatggaaaaacgcgacgagctctggccgcgcggcccctgcttttattacgacaccgccctcttcccgccggggacggacagcttttgcctcgcctactttgcccgcccgtcccgcggcgacacggtctgcgacctcggcagcgggatcggtcttctcggaacgctcctgctcgcgcgccaggaatcgctttttatcgaaaatgttgagctttccgcgcccgcggcagcgcttgcgcgaaagacgttcgccgaaaacggctgggcggacagggctgctttccacgaaggcgaccttcgcgacgtctccgtcctgccgaaagccggcagcgtcgactatgtaatctcgaacccgccgtactttcccgccggcagcggcgagagcgccaaaggcgaagcgcgccaaatcgcgcgcgaggaaacctcctgcacgctggacgacgtctgcgccgcggcgcagcgtgtgctgcgctatggcgggcgcttcaccctcgttcaccgcgccgagcgcctcgccgacgtgctctgcgccatgcggagtcacggcatcgagcccaagcgcctgcgctttctcgcaaaatcgccggacgccgcgccctcgctcctcttcgtcgagggaaagcgcggcggcaaaagcggccttgtcatcgagccgccgctcgtccccaacggcgaggaatgggacgccgtgtatttccgaaaataagaaaacgggccgccctttcgggcggcccaacagctttattatactaaagtgccggatgaactgcaagcattttctgccagttttcgaataatcagccctgcgcacaaaatatcgctcgcatttttatccattccgccgcttgatttttgagttcattcttgctattctttaagcacagaaagggtgagaccaatgtacaagtgatcttcacaaaggcgatcccaaatggttccgatcatatccatcgcgcagcactctctgatgtgtaccgtcattcaggtaaaaccgccgcaaccgcggtgtttgagatagcaggagtggaaaccggagtaagtgatattcggcaccagatcattgaagaaaggaaggaaagaaaacagaatatgagagatccaaatattcatcatggctgacccttgatcgtagttcagtaatcgcgatcaagggtcagtcattttttgttttctttcacttttttagaaaaattgaggaaaaatatcccgtgctctgtgcgggaggggtggcagcgccggtggcgctgctacgaaataagggggatattctctcgcgtgagagaatatcccccttggacccccaagagaacgcgaggggagaccccctcgacccccaacattggcagtttgcagcttgaatgactgcacgcgctgcgcagtgtaagtgcagtgtacgtggcttcgccacgagttcctgcgagtcggttcatccagcaaccgcgccttactccgtgaggcacgagtgacggaagtctggcggcggactgcgtgcgggcgcagcaatgccgcgccgtcagaagagcgggaagaataatccaaaaaggaggggcggggcccctcccttttggtcgttaggggtgcaggggtgagatcgaaacgcccctgccgttctcttgggggattcaaaaggggggccttctctcacgtgagagaaggcccccttttgcttcagacttcacggaacgcttcaatgcgatagctcccgtccgggcgcacttccagcgtcaactcatcgtgcgttccttcgccgtcctcgccgcgcggcgcgctccacagccggatgctgtcgccgtactgctcgccgcccatcggaataaaggatccggggccgaaatcgctcgcatactcatagaatgcatcatactgtgcgaggtacgtcacaccatcctgattgcacagatcgtccaccgtgatatccgcccactgcgtcaaaagcgcggaaacgtcactcttgggaatgcgccgcacggggaccgcccagtcatccggcaccttgaacctctccgcatcctctattcccagcgtgtcgagcacagcgtggaattcctccacgtccgcgtctcccagcgtggtgctgagcggacagtaccgcaaaaattccgcaaggtcgatatcgcgcggatcgtcgtaatgtgaggtgaaaaagcagctcaccggcgtcgaggtcgtatagcggtactctcccgttgtctcatccgtcacatcggcagtggaggcaaacaactccttaaattcttcgatctgcgcgtccgtcagcggcgcccaatcatcctccggtccgccgtccgatttgtcatcattcgctcccgcgcagccaaacagcgccagcgtgcacacgcaggcgagcaaaaaggcaaataatttcttcatcgtttctctccttttcatttttgcatcatttgttttttactgccgtcgcgccagctttactcttataggctgttcaccgtgccgaggaagagcggcagtccgtccacgccggtgatcaggaaggcaaacggccggttcagatccatctccaccacgggaaggtcttccggcgcggcggactgggcgtccgccctgacggcggtaaaggcggcggcctcgcagcccttttcatcgatcttgacgcgcgcggcgtgctgcacctgcgtcacggcgaccgccttatcaaagcggtcaaagtcgacaaggggcgaaaagtccgcgcgatcaaagtcaaacacatcagaaacgcccagcgcgcggagcgcgtcggtcagttcaaggtcggagctgacgtcgaactttggcacgctccagatgagtttgccgctcggcaggctcacgcccatgtcgtaaccgagcagtccgcccacggcgctgccgtccgcaagaaagcttttaaggctcgtgccctcgtcgggcagcaggaagcgcatcgcctgcccaccctgaaagcgcagctccgccacggtgtagttttcgccccggcagtaagcggcacgatcctgcgtgaggtgcatgaagtcgaccgtctgctgcgcgccgtttgctgcggtgaaggtatcctcctttgtcgcattcttccagaattcgtcgcgccactggtccttaaaatagagcgtcgtcaaaaggagcatcacggtctcgggcttcgtctggatctcgcccgccgcgtcctgcaagagattgcccgtgttctcattgatccattcgccgatggccttgtccgtcttctcatctcccatcggagcggagaacgtcgaagcaaggtactgctcggcgagcacctgcaacgtctcttcattataggggacgttctcattcagccacacggaactgccgagcagcgtctttcccgtcgaggtctcgccgtagagattgcgccagacatagttgcccgcagcgcgcggcgcatcggtattttcaaggcctaaaagcgacaagagctgtgcgcggctgtcgccgtccgtcgtctcgctgagcatcgcaaaggcaagatacaggtttgcgggcgagagaacggtgttctcctccgccgaaagcagcgtgcccgtctcctgtgtgaagtgcaggaatgccgcggggtagctcgtgcccttgctgcgcagcgccttgagcgcatcgtaataggcattgctgcgcgcgtcccagtcctcccagatcttctcctgcgccttttcataggcatccgcgcccatcttgtcatagtcgatggtgctgaatgcctcgtcaagctcactctcgttcggcatggcgggcagcacgggatagtccgccgtcttcacggcgaggtcctgcaaatactgcgcggcaatggggtcttttttcacattgtcctcctctttttcatttcggatcgtcgttccgttgtctccgcaggcggcgaaggacaggaccatcgccgcggcgatcagcagcgttaagaatcgtttcatgtcggatgtacctccgtttcgggatttgttatattagacggcgcggatggaaaaaagttcccgttttgtcaaaaatagcatgccgcccttttacgaaacgggcgaatgtggtatactttcaaaaatattttctcttttgtgtaacgcaaacggcaaaaaagttgtcttttccccatgatggcagacaacagaaaggagcgaacctatggacgaccatgagatcgtcgacctctactggcagcgggacgagcacgccatcgaagccaccgccgccaaatacgaaagctattgcatgaaaatttcgcaaaacattttatctgaccgcgccgacagcgaggaaaacgtcaacgacacgtacttacacgcctggcaggccatgccgccgcaaaggcccgcgattctctcggcctttctcggcaagatcgcgcgcaatctggcgctgaaccgctataaggcgaggtcggcgcagaagcgtcagggcgacgccttcgcgctctcgctcgacgagctggacgactgcgcacccgccctgtcctcgcccgacggcgaggccacggcagcagagctcggccgcagcatcagcgcgtttctgcgcacgcagagcgaagaggtgcgcagcatgttcatcctgcgctatttctactgcgaaccggtcgaagcgctggccgcgcgctttcactgcggcgagagccgcatcaaaaccacgctcctgcgcacgcgcagaaagctcaaggagcatctcatcaaggagggatactgtgaagcatgaagttctgacccgcgccataggcgagctcgacgatgagctcatcgcggacgcctacgcctacaagccgcgcaaacggtacgccctcccgcgttttcttgccgctgcggcgtgcctcgtgctcgtgctggccgccgccctggcgatgacgcgcgacaccttaccggctgagatcaaggtcgaaggcgcagcactctcctcaatccccattcccatcagtcagcccgcagcgatggcgctcgacgcgcgcggcagtctgagcggcccgctcagtccgatgctcaccatcgagagcaaatcgggtgaggccgtgaccgttacggtgtcggatggcgtgctgacccagcctctttactcgctgcaggaggagttcacctcctacaccgtctccggcaaggtgcagctttgctggaccatcgaagagccggacacgggtacggtttacacgctctctctcgacggcgcgcccgccgtcacgctgcgctacgacgaggccaacggctattgggccgccgcgcgggcgtaagcatcccattccacattactattgacaacacacaacattttggaggtaaattcccatgaaaaagtttctcaccctgctgctggccgcagcgatgactctctccctcgccgcctgcggcagcaagacggatgacaatagcggcaataacagccagcccgcgagcgctctcgagctgctgaacgccgtatgggccaactacagcgacgacgacaagttccctgctgccggcggcgactttgatgaggcgaatatgaccgaggacgcgcccggtaacttctccgtcgaagacggcgacgcacttgactactctctctccttccccgccgcggacgcaggcaagctctccgatgccgcgtccctcacccacatgatgaacgccaacaccttcaccgcgggcgcgttccatgttgcgagctcttccgacgttgacagtgtcgtctccgacctcaaggacaacatcatgaaccgccagtggatgtgcggctttcccgacaagcttgtcatcctgacgctcggcgactatgtcatctcctgctacggcgcggaggaccttgtcgaccagttcagcgaaaaagtcaccgaggcctttgccgatgctgctgtcgtctgcgacgaggccatcgcctgatttgatcttctgaaaggcggagaagtttatgctcttttccagcgttccctttctcttttactttctgcctgcggcgctgctaatctactttgcagcgccgcggcagctgaaaaacgcggtgctgctgctcgcaagcctctttttctatgcctggggcgagccgaaatatatgctgctcatgctcgtctccatcgtgcagggctatggtttcggcctgctgattgaaaagcaccacgggcaaaaggcgtcgaaggtctttctgacgctctcgatccttgtgagccttgggcttctcggctattttaagtacgcggacttttttctctccagcgtcaacgccgtcacagggctctccctgccgcttttgaagctgagcctgcccatcggcatcagcttctacacctttcaggtattgagctacgtcatcgacgtctaccgcggcgaaacggcggcgcagcgaaattttatcgacctcgccgcctatgtttcgctcttcccccagctcatcgcggggccgatcgtgcgctattccgacgtcgccgcggagctcaaaagccgcacgcacagcgtctccgccgcggcggagggcgtgcgccgctttacggtcggctttgccaagaaaattctgctcgccaaccagttcggcgcgctcgcgagcgcctacaagtcgacgcaggacgcgagcgtcctcttcgtctggctctacgcgctcgcgtttctgctccaagtctatttcgacttttcgggctacagcgatatggccatcggcctcgggcggatgctgggcttccacttccctgaaaacttcaactacccctatatttcagcgagcatcacggagttctggcgcaggtggcacatgtcgcttggctcgtggttccgcgactacctctatatccctctcggcggcagccggaagggtaaggcgcgtcagctgttgaacattctgatcgtctggctcgcgacgggcctgtggcacggggcggcgtggacgttcgtgctgtggggactgtggttcgcggtcctgctgcttcttgaaaagctggcgctgctgccggtgctcgaaaagcaccgcgtgctcggccatgtgtacacgctctttttcgtcacgctcggcttcgtgcttttcgacgcagacagcgccgcgcaggcggtctcgcgcatcagcgcgatgctcggcgcaggcggactgccgctgtcgagcacgcaggcggtctactaccttaaaagctatggcccgctgctcgtgctcggtatcctctgcgcaacaccgctgccgaagatgatcgtcgcaaagctgcgcaaatccaaaggcgcagcgacggcgctcgatgtgctcgagccgctgtttgtactgattcctctgctgctcggcacggcatttttagtggacgggtcgttcaacccgttcctctacttccgcttttaaggagggcatcgcatgaatcgaaaaatcaaagacgtcctcaccctcggcatcgcggcagcgttcgtgcttatgttcgcgctgtggggcatttgcaagagcgacgacgccgtgtcggaaagcgagcgccgcccgctcaagcagttcccgacgctgaatgcggaagaagtactctccggacgcttccagtcgaattttgagagctacacgctcgaccagttcccgctgcgcgacgagttccgcacactcaaggccctgtccgtccgcgatttatttggcgagaaagacaacaacggcatctacgtcgcggacggctacgccgcgaagctcgacgacacgatccacgaggattcgctcgaccacgcggccgaccgcttccgctacgtgtacgaaacgtatctcaaagatacgggcgtaaacgtctacctctccgtcatccccgacaagaattactttttggccgccgaaaacggctatcccgcgatggattacgagaagttctttgcgctcatgcgccaaaaggtcgactttgcggactatatcgacctgacgggcacgctgtcgctctcatcctattaccgcaccgacctccactggcggcaggaaatgcttgcccccacggccaaggcgctggcagatgcgatgggcgtctcactcaccgtggactttaccgaggtcacgcttgatacgccgttttacggtgtgtaccgcgggcagtcggcactgccaatggagcccgacggtctctcctacctcacaaacagcgtcattgaaggctgccgcgtgtacgactacgaaaacagcgaatatctccccgtttacacgctcgaaaaggcggacggcagcgacccgtatgaaattttcctctcgggcccgaagtcgctgctgcgcatcgagaatccgaacgcgcaggcggagcgaaaactccttgtcttccgcgattcgttcgccgcgagtttgcttccgctgcttgcggagggatacagcgagatcacgcttgccgacatccgctacctctccccctcaatgctcggaaaattcatcgactttaccgcgcaggacgtgctgtttctttacagcacgagcgtgctgaacgacagcgccacgatcaagtgatgcaaaacgggacgcaagcgccgtgaccggcgttcacgtcccgttttcttttttgtccgcaaaattctttcacagcagatcagaaaaacaaaacgcccgcccctgccgtttccggcaagggcgggttcaggttaaatatagcacagccgttttcttcatgcaagaaaaagttgccgcactttcataatttcgttcacaccgcacatcccgtcccactaaagtgaggggaaagttggaaaaacaaagtattgacgctgcttgccccgatgaagtatcattacttatcaaattttttatttcgaaacaggaggtctggatcatgagtgaagcgactcgcattcccgagctttttggctctctggtgttcaatgaacgcacaatggagcagtatgtgccgcagagcgccatggacgtttggcgcggctgcttaaagagcgggcagcctcttcccctttccgcggcaaatgagatcgccgacgcgatgaagacctgggcgctggagcatggcgcaacgcatttcacgcactggttccagcccttgagcggcgtgacggcggaaaagcacgacagctttatcaacaacgccggcggcggccgcgtgatgatggacttttccggcaaggagctggtgcgtggcgagcccgacgcgtcctccttccccaacggcggcctgcgcgccacgtttgaagcccgcggctacagcgcctgggaccccacggcgtttgccttcatcaaagatggcagcctttgcatcccgacggtgttctgctcctacagcggcgacgcgctcgacaagaagacgccgctgctgcgctccatggccgcggtcggccgcgcggcggtgcgcgtgctcaagttatttggcgacgacgcggaaaaggtcacgccgcagatcggcgcggagcaggagtatttcctcatcgaccgcgagctgtacttaaagcgcatggacctgcgcctgtgcggccgcgccctgttcggcgcaaagcccccgaaaggtcaggagttggacgaccactacttcggcgcgttccgtccccgcgtggccgcctacatgaaagagctcgatgaagagctgtggaagctcggcgtgctctccaagaccaagcacaacgaggtcgcccccggccagcacgagatggcccccatctacaccgacgccaacaccgcgagcgaccagaaccagctcgtcatggagacgatgaaaaaggtcgccgagcgccacaaccttgtgtgcctgctgcacgaaaagcccttcgcgggcgtcaacggctcgggcaagcacgttaactggtcgctctcgaccgacactggcaaaaacctcttctcccccggcaaaacgccgagccagaacgccgtgttcctgctggtgctcgccgcgttcatcaagggcgtggatgagtatcaggagcttctgcgctgctccgttgccttcgcgggcaacgatcaccgtctcggcgcgcaggaagcgcccccggctgtcatctccgtcttcctcggcaccgagcttgagggcatcatcgatgccatcgtcgatgaaaacgactacaccgcgcccgagcacaagtccctgcgcatcggcgtggacgtgctccccgccatcccgcaggatacgaccgaccgcaaccgaacctcgcccgtcgccttcaccggcaataagtttgagttccgcatgcccggctcctcgcagtccatcgcgggcccggtcacgatcctcaacaccatcatggccgaagagctcgacgaattctacgcgcagctcaaggacgcgccggacttcaccgccgcgctccacaagctgatccgcgacacgttctccgcccaccgccgcatcatcttcaacggcaacggctatgaagaggcctggatcaaggaggctgaaaagcgcggccttgccaacctgcacaacaccgccgaggcgctgccgacctacatcctgcccaagaacattgagctgctgacgcgccagggcgtttacagcaaggaagaaattttctcccgccacgaagttcatatcgagaagtactgcaaggtcatccgcatcgaggccgcgacgcttgttgacatggtccagcacggcattctcaacgccgcttccgaatacgaagccgcgctgtgcaacaccatcgccgccaagcgcgccgccgctccggagctgacctgccacgtcgaatcctcgctcgccaacgccatcggctcgctcaacgagcagctgctcgaagagaccatcggcctcaagacggcgctcgagaccgtctccgacgacgcagagcccgaaacgctcctgcactactaccacgacgaggtcgaaaagcgcacgaacgacgtgcgcaagaccgtcgacaagctggaagtgctgaccgcgtccaagtattggccgtatccgacgttctgcgaattactcttctccgtgtaagtcaaaaaggacgctctttcgagcgtcctttttgagtaggtcttccgtatttttgtgtattctgaatt

SEQ ID NO: 10158 - DNA, 2119 bp, Unknown
  gut microbiota DNA sequence
gtatcagcacggcgaggtctttgtcacggacgacggcgcggagaccgacctggacctcggccactacgaacgctttgtcgacgaggcgctggacgagaaatcctccgtgtcctcgggcaaaattttctggagcgttctcaaccgcgagcgtcagggcggttatcttggcggcacggtgcagatcatcccgcatgtgaccgatgagatcaagcgccgcatttacgacatggacgacggcgagaccgacgttgccatctccgagatcggcggcacggtcggcgatatcgagagtcagccgtttttggaggccatccgtcaagtcgcggccgagcgcgggcgcgaaaatgtgctcttcatccacgtgccgctcatcgtgaccatccccggcagcggcgagctcaagagcaagcccacgcagcactcggtcaaggaactcctgagcgagggcatccagccggacgttctcgtcgtgcgcacggatgagcccatcacagacgacatccgccgcaagattgcgctcttctgcaacgtggagcccgactgcgtcatccagaacgcaacggcgtccacgctctacgaggtgccgttgctgcttgagcacgagggcctttgccgcgtggtgtgccgcaagctgcaccttgactgcggtgaacctgacatgaccgagtggcgcgcgctggtcgacaagatccacggcgtgcaccgtcatgtgcgcatcgcgctcgtcggcaaatacgtcggcctgcacgacgcctatttgagcgtcgttgagtcgctcttccacgcgggcacagcctgcgacgcgagcgtcgaaattcagtgggtcgactccgaaatgctgacgagtgacaacatcgcgcagaagctctgcgggtgcagcggcatcttagtccccggcggctttggcgaccgcggcatcgagggcatgatcttagccgcgcagtacgcgcgcgagcgcggcatcccgtacctcggcatctgcctcggcatgcagattgcagtcatcgaatttgcgcgccatgtgctcggctgggacgacgcgacgagcgcggagttctcctccacgacggcgcatcccgtcatcgcgctcatgcccgagcaggtcggcgtgacggccaagggcggcacgatgcgccttggcaagtatccctgcgtgctcgaagagggctcgctctcccgcgcgctctacgacgcgccggagatctgggagcgccaccgccaccgctacgagttcaacaacgacttccgcgacgacttcacggacgccggcatgcgccttgccggtctctcccccgacggcacgctcgtcgagatcgtcgaatcgaagagccatccctggttcgtcggcgcgcagttccaccccgaattcaagagccgccccaacaagccgcatcccctgttccgcggctttgtcgcggcctccctcgatcgcgcggtccattgaccgcgcgacctttttatttttacaataccgctggaaaaatgggaaaagctatgatatgatgcttttaccatattattggatacggcaggagaatttcaatatgaaccatcagaccatcatcgtactggactttggcggccagtacaaccagctcatcgcgcgccgcgtgcgcgaatgcggcgtttactgcgaggtcaagccctacacgacgccgcttgcggaccttctcgcaatgaagcccatcggcttcatcttcaccggcggcccgaacagcgtgtatctcgaggacgcgccgcacgtcgatcccgcgctctttgacgcgggcgtgcccgtgctcggcatctgctacggctgccagctcatcgcgcaccacctcggcggcaaggtcgtcgccgcaaacgacgccaccgcgcgcgaatacggcaagaccgagacgttttttgacacgaactgcaagctcttcaagggtcttcccgaaaagagcgtgacgtggatgagtcacggcgactacatggaaaaggtccccgagggcttctctctcgtcgcgcactccgacgcctgcccgaacgtcgccatctgcgacgaaacgcgcgggttctacggcgtgcagtaccatcccgaggtcaaccacacggagttcggcaccgcgatgatccgcaacttcctctacgaggt

SEQ ID NO: 10159 - DNA, 229 bp, Unknown
  gut microbiota DNA sequence
ctgcttcattcgtaggtcaagccctcggactattagtaccgatcagctgcacacattactgcgcttccaccttcggcctatcaaccagatcgtctttctgggtccttactccttgaaggatgagagatctcatcttagggggagtttcacgcttagatgctttcagcgtttatctcgtccgtacatagctacccagctatgcccttggcaggacaactggtgcaccaga

SEQ ID NO: 10160 - DNA, 645 bp, Unknown
  gut microbiota DNA sequence
ctccgtcgcgggtcatcttctgcgcctccttctcggaggccttccattccttcatgcgtcaccacctgcctttccgtaggggcaaacgctcacgcactcgcccgtctcgatcatagagatatacttgaaaatgggatatgcctggggcgggcagaccgcgttgcccagggttttcagccgtagggcgcggtccgcggtgttttcggtgatacgggggactccctctggttcggcggcccagaggatacgtccgtccatttctgcgggaagcccatgagccattccacccaatccgggttcagcgccgccgtctcggatatcggccgctcctgccggatcacctgggatgacaggttggcagacggggcgctgttccgaaacgccgctggtttcagcgtggagcggtagccctccgacgctgccggggtcagatagaacaccgccgccgacaggctcaggctccagatcgcgccgctcttgttcaccttgcggaatatcccgttgtcggagaggtacacatccaggttggccgcgtccctgcaggtgttcttgtcggaggcaaggggtgtgggaaacatcagccgcgacgataaaagttcgctggcgctcatgccatgcgccgacgccgcaagccggaaatacgaa

SEQ ID NO: 10161 - DNA, 2771 bp, Unknown
  gut microbiota DNA sequence
cgcagtcgatgtagcccacgccgcccgtgaccgagacggtcgtattcgtctgcgtgacgagcgcgcgcgtaacggtataatccgcctgcgtgccgtccgcgtggcggacggtgatggtcacgctcgtccccgcttcgccgaggagcttggcgcggtgctccgcgccgcccggcgcgcaggactcgctctcaatggcgatgataatgtcgcccgcggcaaggcccgccttctccgcgccgccgcccttgagaacggagacgatgcggatgccctcgggcacataggtgatctccgcgccgatgccggcgaagctcacatcaccctcaacgccctgcaaaaacgcctgatactcctccgccgtcatgtagtacgtgtagtcgtccgtgtaggaaaagagctcgtcgagcgacttcgcgtcctgcgcggcgcgcggcagcttatcaacatagctgcgctgcaaaatatcgtaggcctcctccacgctgagcgcctgcgcgctggtcgttatcgtcatcgccgcaacgcagcagagcgcgcccaggcggaacagtctctttttcatgcccgattctcctttgttcggcagttttctccattataccgtgcccgcggcaaaaagcaatcgcaaatcccgccgcttctcccgccttgccaagcgggcgaaaataggctatactgtcagcataatgagaaatttttgctttttggaggatattatggacgagcagaagaccaccggcaccctttatatcgtcgcaacgcccatcggcaactcgcgcgacatgtccgagcgcggacgcgaaatcctgtccaccgccgacatcatcgccgccgaggacacccgccgcagcgtggtgctgctcaacaagctcggcatccgcggcaacagcctgagcgccaaccacaagttcaacgaatacggcaaggcgaagtggttcatcgaacagcttgcctccggcaaggacatcgccgtcatcaccgacgcgggcacgccctgcatctccgaccccggcaacgagctcatccgcgccgcggtcgaaaacggcattcgcgtcgtcggcgtgcccggctgctgcgccgcggtcaacgcgctatcgatctcgggctttgacctctcgagcttcctcttctatggctttttcccgcgcgagacggccgaccgccgccgcgtgctgatgatgatgcgcaagggcgacaccgcgacctacgccttttacgaatctcccaagcgcatcatgagcgtcatcgacttcttcatcgaggaaaacgcgcagctgcgcctgtgcctctgcaacgacatgacaaagctccacgagatgaccttccgcggcacgccgcaggaggtcaaggaccagctcattgcgaaggagacctacgaaaagggcgaatatgccctcattgtcgaggtctgcgatgactaccgcctgcgcgaggtcgagcacatcacctcgcctgaggcgctgctcgtcgactgcatggtgcgcagtgactgcacggccaaggacgccatcaaaatgctcctcaaggacgagaacaacacctacagcaaaaacgagctgtacgctgcgcaccttgcgctcaaagagaggtttggcgcatgagcattgtagtctccgacctctccgaacggctcgacacgctcaccaagctcgtcctcgccgagccggtcgcgcgcatcggtcactcgcgtgtcaccgtgcggccgctgaagctgcgcggaaaagcttttttccagctcgaataccagcaggggcagaaggtcgcgcaccgcaacgtcgcgcgcggcgcgctgcttgagacctttgagcaggagctcgacggtctgttccgctctgtcacactctgcaccgaaacggagacgcgccagtacgtccgcaaggcaaacggcgcgtacaaatgcacggccaagtccggcgcggcccgcgccgccgtgaccgcctcgcacaaccgcaaaaaagagtacattttgcaggagggcgagaacatccccgccctcgtcgacctcggcgtcttcacgccggacttcaagatcgtcaaggcgaaatacgacaaatataagcagatcaaccgcttcatcgagctcgtggacgacgcgttccgcgcctacggccgcgacgagatcacgattctggactttggctgcggcaaatcgtacctcacgttcgtgctgtactactatttcgccgtcaagcgcggcgtgcgcgccaagatcatcggctatgacttaaaagaggatgtcgtcgagcactgcaatgaggtcgccgcgcgctacggctattcagatcttcacttcgtcgtggctgatgttacgcgcgatgtgctctacagcgagcacattgacatgcttgtcacgctccatgcctgcgacgtcgcgaccgactacgccctgcactacgccatctcccgcggcgtcgagcacatcttctccgtcccctgctgccagcacgaggtcaataagaccatccaaaagggcggcgatttcgacattctgctctcccacgggctgtttcaggagcgcttctcggcgctgctgaccgacgccatccgcgcagcggtcctggaggacgaaggctacgacgtcgacgtcatcgagttcatcgacttcgcccactcgcccaaaaatctgatgctccgctgtcaccgtaccggccaccgcggcaccaaaaaactcaccgagtcccgccgtctccgcgaccaatacggctttgagcagactctattgtcgctcattgaaaacgacaggaaataagcctcgcagagtttcgtgccgc

SEQ ID NO: 10162 - DNA, 1217 bp, Unknown
  gut microbiota DNA sequence
gggtgcagggtgttcccggcttctatgtggatgataacggctgctggacggtcaaattccaccagcggacatcaggcatcatcattcccatcttcggtgtagacggtctgatccgcggcgcacagatccggttggatcacccgctcaaggataaagacaatccaccggagaaaacgggcgtgaaatatctgacgctgtcctccacgggaaagcgcatgggaacgacctcggggagccccattcattttgtgggcgacccctgctcccgcgttgtatatgtgacggaaggctgcctcaaggcggatgtcgctcacgcgctgatgcacaggacctttgttgccacactgggagccaacaacaccgccaagctggatgaactgtttgcgttcctgcaccgaaacggaacggaggagatcatcgaggcggaggacatggataagtacagtaatgaaatggtgggaaaaggcgcatcgaagatctatgcgctggcggccaggcacgggatgcgctgccgcaggctcacatggaatcccaattacaagggcattgatgactggcagcttgcgctgcgccgcaaaaaacagaaaatgaaggaggatccaggaatggcatttaaggagcaatatcttaatggcctatgcgggctggaaatgctggaagcctgtacggaaaaatggcatgcgatgaaggtgaacagtatttccctgcgggagtatctggggctgacagagcaggaatacgatgcgtacttacagactgcccccggcgtttcttttcgggagttgttggacagtcagcgcaaaatgcagcggtttcgtgtttatcagctggatctggagcatggtgagacgcgcgccttcgcatttggcggcattgacgcgctgcacaaggccggctttcagcagcccccggcggcggaatacacactcgtttacgacggtgagctaacctgcccggtcgggcaagatgaacgtgatattctggaacgcatttttgcacgctataatcaggcgttccccccggactatcacggccgcagcattgccccatccgatgtgctggagctttatgatgaaagcgagcgcagatacttctactgcgatatggctggtttcctgcaggtgaaattctctcccgcgctggcaaagaaggcttgaatgcaggctttatcgcagacgatccatttagaaatggacgagcagaagagaaagcagctg

SEQ ID NO: 10163 - DNA, 2735 bp, Unknown
  gut microbiota DNA sequence
caaaaccgctgctcctattccagagcttatcagactttacgaacagcgccttttgcagtgcgagcagtctccgcagcagccgctacctgatctggtcttttttcgccagtgcaggatagctgtgatagctgcagctgcgatgaggacaagaaggacccaatctaacagatgcatcacaggatccccaccaaggtatagacagcaagagccacgatccatgccacgcagcactgcatcatcacgatcccaactgtcttcagcgttgagccgaattctcgtcgaatcgtggctaccgccgcgatgcagggagtatacagcagcgtgaacaccagaaagctaataacggaacgaccggtaaacatcgtagaaagtgcagccccgcctaacaggatctgcagcgtactgaccacagattcctttgcgataaaaccggaaataagagaggttgcgcagcgccaatccgcaaagcccaacggtgcgaacaccggcgcgatccatcgaccaatgagagccaaaaggctatcggcactgtcggcaactacattcagcctggtatcaaaactctggaggaaccaaatcacaatggtagcaagaaaaatcacagtgaacgcccgctgcaaaaagtcctcggccttttcccaaagcagcagcgcaacgctcttgaggctcggaagccgataattgggcaactccataacgaagggcacgggctttccgcggaacacggtttggttcatgatgagggccgcagcaattccaatcagaatgcccagcagatacagtaggatcattatgagcgcgcggtgcgttggaaagaacgctgcggtaaaaaatgcataaattgatatttttgccgagcagctcatataaggcgtgagcaggatcgtcatcttgcggtcacggtcactcgacaccgtgcgcgttgccataattgccggcacagaacagccgaagccgatgagcatagggacgatgctgcggccggacaaaccgatctttcgcagaggcttgtccattacaaaggcgacgcgggccatgtagccggtatcttccaagatagagaggaagaaaaaaagcgtcacaatgataggcaggaacaccagcacactgccaacaccggaaaaaatgccgtcaataatcaagctgtgtaccacaggattgatctcataggcagtcaaagcttggtctacaagaaaggtaaggccatcgatcccgccttgcagccagtcggacagacgctgaccaataacattgaaggtgagatagaaaatcagcagcatgacaagcagaaacgtcggaatggctgtgtagcgaccggtgagaattctgtcgatcttcatggagcgggcgtgctcccgactttcatggcatttcaccacagatgatgccaccacgccttcaatgaaggtgtagcgcatatcagcaagcgccgcgttgcgatcaagtcctgcctcactctccatctgcacgatgcaatgctcaagcaactcgcgctcgttttgatcaagtgcaagacggtcggcaaggtcatcgccgccttcgatcagctttgctgcgcagaagcgagccggcacaccgatgcggtcggcgtgatcggcaatcagatgcgtaacggcgtggatgcagcgatgaacggcggaatcatccgcgcagaaatctgtcacctttggcagagttctgctccgagccgcagcaatcgcctgattcaccagctcgctcacgccctcaccctttgcggccgcgatcggtacgacagggatgccgagcgaggcgctcatcttctgcacgtcgatggaaccgccgttggaacgcacttcatccatcatgttcagcgccagcaccataggtatccgcaactcaagcagctgaagtgtcaggtacagattccgctcaatgttggtggcatccacaatgttgatgatgccgtccggcttttggttgaggataaagtcacgggagacgatctcctcctgtgtatagggccgcaaggagtagatgccgggcagatccaccacggagcagcctttttcatctatgatctctcccatcttctggtctaccgtgacaccgggaaagttgccgacatgctgattggatccggtgagggcgttgaagagagtcgttttcccgcagttctgatttccaacgagtgcaaagatcatttcggctcgtcctccacttcgattttttgagcctcctctacgcgcagcgttagctcgtagccgcgcacgcggatctcgataggatcacccatcggcgcgaccttctgtagtgtcacgcgggtgtgcgggatcaagcccatgtccagcaggcggcagcgcaaggctccatctccgccaacagtggtgatcacggcagaattccccacttttaattgattcaatgtcattcgcttgcctcttttcttgcccagttttaatttcatggtagcattcctgctgcggactgtcaatacagccgaaccggcataattcaaagtgtgtaataggaccatttggccttgtgctgcagaaaatgttgaaaaggttcctgcggcaaggaaaagtcttacaactctttcgcagttttaatcgatccgcagcaattcatcatcgtcggagcatccgaagcggttaacatcggagtcagggaaagactggtaaatgtgcacgttcgaacgcggaaagcattcttgcagaaaatcgcggaccgggaaaagatcatggaatccgctgaagtgctttttgccgtcttca

SEQ ID NO: 10164 - DNA, 6886 bp, Unknown
  gut microbiota DNA sequence
ctctttcagaagatcaccctgcacacggctgcctcctgcgatcaggaccatccgcgcgtgtgcatcgactccaataccaatatttccgaccgcacggcagccctcctgcacggtggcgccgaccccgtccccgaaatggtcaagagcgcgcagcgcctcgagtccatcggcgcggatcttctcatcatgccctgcaacaccgcgcacaacttttatgacgccgtcgcctcgtccgtctccatccccgttctgcacatgatcgccatcacgcgcgacgcgctcaagtcccgcggcgtcaagtgcgccggtctcctcgcgaccgacggcaccgtccagaccggcatctaccagcgcacgttcgagggcagcggcgtcgagctcctcacccccgatcatagtgaagatcaatccgccgtcatggacatcatctacaacggcgtcaaggccggcgacctcacgcatgacgcgaccgccttccgcgccgcctgcgagcatcttcttgcgcgcggagccgaggtcctgatcctcggctgcaccgagctcccccccgcgttcgacatctatcatctcgattaccccaatgttgacccgacgctcgagctggcgctcgccgccgtccgcgccgcgggctgtgaaaccaagtgagggcgcgcgcatgagctatgccgatcaggtcttccgcgccaactgcctcgacattctccaaaacggcgtgcgcgacgacgacctcaccgtccgtccccactgggaggacggcacccccgcccacacgatcaaaaaatttggccttgtcaaccgctacgatctgcaaaaggagtttcccatcctcaccctgcgccgcacatacctcaaaagcgcagtggacgagctcctctggatctggcagaaaaaatccaacaacgtccacgacctctcctcccacatctgggatgcctgggcggacgaaaccggttccatcggcaaggcctacggctatcagcttggcgtcaagcaccaatacaaggagggcatgttcgatcaggtcgaccgcgtgctctatgacctcagacataaccccgcctcgcgccgcatcctcacgagcctctacaatttcgaggacctacacgacatgaacctctacccctgcgcctactccatgaccttcaacgtctcaaacggcacgctgaacgccatcctgaatcagcgctcgcaggacatgctcgccgccaacaactggaacgtctgtcagtacgcggtgctcgtccacatgtttgcccaggtctccggcctcaaagcaggcgagctcgtccacgtcattgccgacgcgcacatttacgaccgccacatccccatcatcgaaaagatgctctccgagccggagcaccccgccccgcagttcaccctcgatcccgccgtgacggatttctacgccttcactcccggcagcgtccggctggaaaattatcagttcagtccctttgaagacaagatccccattgccgtctgagcattcgcgccggcaaaatttatagagaaagccatggagttgatactatgaccgcaatcgtctgcgtttcccagagctggggcatcggccgcgacggcgcgctgctgttccgcatctctgccgaccacaagcgtttccgcaccctcaccgtcggcaagaccgtcatcctcggccacaagaccctcgacaccttccccggcggcaagcccctcaaggaccgccgcaacatcgtcctctcccaccgcgacctcgacgtccccggcgcagagatcgcccactcgtttgacgaggccgccgcgctcggcggcgacgacgccatcgtcatcggcggtgccagcgtctacatggcgctcctctcccgctgcgaccgcgtctacgtcaccaaggtcgacgctgacccggacgccgacagcttcttccccaacctcgacgacaatcccgactggcgcatcgagtcggagagcgagacctttgaggaaaacggcctcaagttccgctatgtcgactatgtccgcaagtaaaaagaggggccaaggcccctctttttttgcgccctaaagggcatatggaagcagcgccagcggcgctgcacgggaaaggggggctattctctttcacgaaagagaatagccccctttcaatcccccaagagaaaggtttcgattggcagtctgaggctcgaacagcctttatccctccggaatgcaaatgcctgcgcgcggcttcgccgcgtttggtgttgctatacgacttgactctctcctattatccgctgttgcgcagccgttggcagctctgctgccttacggatgcggcacaccccttgcgggtgccgctctgctgatcttgtggaagcacagcctaatctccgtctacttcggattttatcaattttgctgctgcctgccaaagcggcattgctgcgctcgccgcggttatgtcagcggtgatattccagcagatcgccgacggtgcagtgcagcacgcagcagatgcgggccagaatgtcaaggtcaagtttttcaacgtcaccgcgataccacttgtcgacgacctcaaagcgcacaccgatccttcttgccagcgtgttgcggttgatgccgtcactgtccatgcgctcctttaacttgagccgcacgtttccatactcttccattgtgatgataccgctgtcagccatatttttcacctcaacggtatactatggtgatagtaacatcttgactattcgcttatttatagttactatttatatagtatttcaaagagggatatgattatgctgacctacaaaaaactttatcgctccctggttcgcagtatgagcgaagccatcgacctctacgacgagggaaagggcattctcgcccgcgaaggcctgaaaaaagccctgttggacgcagaagaccaagtcatttcccacgacatcatccccgacgaacccatcagcagctcccacccagcagaagactaaacagcgcggcgagcgcagcaatgccgcccccgcacgcagtctgccgcccaactaccgtcactcgcgcctcacgaagtaaggcgcggttgctgaatgaaccgactcgcagagactcgtggcgaagccacgtacgccgcacctgattacccgcaaggggtatgccacatccgtaaggcagcagagctgccaacggctgtgcaatgcgcagcgcgtgcagttcttcaagataaaaactgccaatgtgcggggtcaaggggcaaggccccttgcgttctcttgggggatctaaagggggccattctctcacgcgagagaatggccccctttgccgcacccctgcgggtacgcagggaaaaacgcagcgctgccgcgctgcatcacgcgcagcggaacgcttccacagcctccccatccgcgcagcgatacagccgcccgcccttggcgtaaaacgtctcattcccctcgtcgcattcgacgttccagcgcagacgccacactgtctcggctccgttttcgtcatagccctgccagccgaagcagctgacctcgttcagcgctttcacgttcctcccaagccgcagtgtcaccgtgcagtcgacgatcttcgcgttcggatagtccttttccgcgtccgccgcaactttctcgtcaccgaagacgacctgggtattccatatctccggcgcgttcagcgcaaacgccgtcggcacaccgcggccgatatacccgccgagcgccgtcaccttgtagccgtgcacttcatcgggaatgacgatcaccgcgccgtcgctcccgtcccagtcaacgtccgccgcaaaggcttgatgcgtcaccagattgcggtagtagcgctgcccgtctgtgtctgtccagtccgccgcgcggtatccctgcgcaccggtcagcatccataagaggactccgaccgccgcggcgatcagcgcgaccggcagcgcgatcgcgcccatctttccggaatgtttcttctgcatgacaatactcctttcttcatccttgcaaagggtcttttcatttccatccaagttgattataatagacagacaccgcatttgtaaagggggtccaccgcatggcgacgctcaacaccgatatccgctatatcaagggcgtgggcgaagcgcgcgccaagtcgctcgccaaactcggcatcaccgacctgcgctccctcctttcctactttccccgcgcctacgacgaccgccgcgcgtacaagaagatcgccggcctcatccccggcgagaatgcctgtgtctgcgccgtcatcgcgggcgagcccaggctctcgcgcattcgcaaggggctcgaccttatcaagctccgcgccgtcgacgagaccggcgcgcttgaacttacctatttcaaccagtcctacctcaaaaacaccctccacaccggcgacgcctacgtcttcttcggccgtgccgagggtacgccgagccgcccgcagatgaccaatcccctctttgagcgcgagggcgcgcaccagatcaccggccgcatcatgcccatctacccgctcaccgcgggtgtcagccagtcgatgctctataaggccgtcgaacaggggctcgccgcctgcgtcgacgaacttcctgacatcctccctgaggacgtccgcctcgtctaccagctctgccacacccgctttgcctacgaaaacatccacttccccgcagacgacgaagccctctccgccgcgcgccgccgccttgcgttcgaagagcttttcctgctcgcgctcggcctcaagctcctgcgcgagcgccgcacgttcgtcgcgggaaaacagtgcaaaaaagtcgacctttcgccctttttcacctctctctccttttccctcaccggcgcacagcgccgcgccatcggcgatatcgcgcgcgacctgacaggtcagcgcccgatgaaccgcctcgtgcagggtgatgtcggctctggcaaaacgatggtcgccgccgccgccatctacatggccgcgaaaaacggtctccaatgcgccctcatggccccgacagagatccttgccgagcagcactatcgctcgctcgccccgcttttggagccgctcggcatcccctgcgcgctgctcaccgcctcgaccagggccagggagcgccgtgcactgaatgaacgtctccggtccggtgaactctcccttgtcatcggcacgcacgccctgctctcgcccgatgtacagtatcaaaatcttggtctcgtcgtcaccgacgagcagcaccgcttcggcgtcgaccagcgcgccgcgctgtccgccaagggcgacgacccgcaccttctcgtcatgtccgccacgcccatcccgcgcacgctcgcgctgatgatctacggcgatctcgacgtgtccgttctcgacgagctcccccccggacggcagaagatcgacacctttgccgtcccgtcgagctatcacgagcgtatctacgcctttttgcgcaagctcgtcgccgagggccgtcaggcctatatcgtctgccccatggtctcggaaaacgacgagctccccgatgagcgcaaggccgtcaccgcctacgcagcgcacctgcaagcggaggttttccccgaccttcgcatcgcccccatccacggcaagatgaagcctaaggaaaaggacgccgtcatgcgcgctttcgccgcgcatgagatcgacgtactcgtctccaccaccgtcatcgaggtcggcgtcgacgtgccgaacgccgcgctcatgctgattgaaaacgccgagtgcttcggcctctcccagctccaccagctgcgcggccgcgtcggccgcggccggcacaagtcctactgcgtccttgtctccgacaacaagggtgaggaaaacaagcagcgtctcaaggtcatgtcctccacgagcgacggcttcgccatcgcggaagaggacttgaagctccgcggcccgggcgactttttcggctcccgccagcacggcctgccgtcgctgcgcgtcgccgatctctcgtgcgacttatcccttctgcacgagacgcagtccgccgccgggcagctcctcgccgccgaccccgcgctcaaaaatcatccgctgctcaaagcccgcgtcgagcttctcttcgagctcaacgccgatgccatgaattgaaataaaaaagtcaggcctgctggcttgacttttttacgctttgtagtatgattaatataactaatcatacttcaggaggttggttttatggaagtacctcagggcaagcacgcctggatggtcaagatcggcgaaaagggccagtttgtcatccccaaggaagcgcgcgacatttttggctttcaccccggcgacgagctgctcgtcctcggcgacgacgagcgcggcatcgccatcctgcccaaggccatgcagcgggaatatatgctgcgcatcttttccgaaatggacaacgggggcaacagcaaatgagcaagatcgtctttttctgcatcccggcctacggccacaccaacccgacgctcggcgtcgtgcgcgagctcaccgcgcgcggtcacgaggtccgctactactcctacgaacccatgcgcacgctcatcgaagccgcaggcgcgcaattcgtcgcctgcgacccgtatgactgcgaacagcacctcacgcccgccgacggcgcgcgcgtcggcaaggacatcgccttttcgacgcacattctggtcgagaccaccctcgccctcgacgaaatggtctgcgccgacatgcgcgcttacgcgcccgactgtatcgtcgccgactcgatggctgtctggggcaaggccgtcgccaaaaagctcggcatcccgttcatctcctcgaccacgacctttgccttcaaccgctattccgccaaggtcatgaagcagagcggcggccagatgctcaaaatgctgctcgccatgccgaagatcaa

SEQ ID NO: 10165 - DNA, 49618 bp, Unknown
  gut microbiota DNA sequence
taattctgtactcataagtaaaaaacacccccgtaccgcggatagtatacgcgactcgcatatactatccgctactatacaggagtattctttcacgctattcattttaccgcaagtcgccgttagctttgacgcttactttatttgccgctcgcatctcttcgtccaagtcggcaaacatcagctttagcaagatgtctgccatgctttcaccgtctttcctataccgtggctcaacgataaaaactcgaccgccaatttcgtatcgttggggctctccggcaatatattctctttccatgcctgcacctcctttccaacatggacacaaaaattatatcatgccgtggagcgacgcaaagcagaaaaattattttccttgatatacgggcattctttgactataatgaaagacattcagggtgtgttttggagttgcccgcgtattgaagcgctcatttgacccggtttaggggggtatgtaaccgcactaaccgggagagcgcttgactggcagtcaagaggtcagcggttcgatcccgcttatctccaccaagaaaagccttgaaagtgtaaactttcaaggcttttttgcttaccatcgatccgaaagaaacgcgggtggaaagattatgaaactgatccgcatcggtgacagcctgacctttggatacggcgtgcatctgtctcagcggtggacgcggctgtgcgcacaggagacgggctgggagcttgtcaatgagggcatcaacggcgacacgaccggcggcatgctggcgcgcatgcagggcggggtgctcgcggagctgcgcgagggcggccttggcgccgaccggccctatgtgctgctgatgggcgggagcaacgatgtgttctactccggctccgacgctgcggcgcgaggaaatatgggcgcgatgatccaccagctcttttccgtgggcgtgctgccggtggttggtatcccgcttccggcggatgcaccgcatgcgccgcggtcgattttgaagcggcggagcggacgatgaaagggtactgcgcatggctcaagcggtactgcacggcgtttggcgtgccgtatatcgacttctgcgcggattttctgtcgccagacggatcgacccgctcggagctgctgcttgacggtctgcacccgacgccggagggacaccgcttgatggcgcggcggctgagcgcgcagctgaaaagacaaggataacagccctgaaaaaggcttgaaaatcaacgaccctgatagaaggagaccacgaccatgaagctatcatatctggacctgatgacgaccgatccaagctacaatctggcgatggagcagtacgtgttcgactgcctcccgcgcgaccgcatgtatttcatgctctggcagaatgataacgcgatcattgtcggaaagtatcagaacacgatcgctgagatcaatgaagaggccgtgcgcgagcgcggcattcgcgtggtgcgcagactttccggcggcggcgcggtctatcacgacatgggcaacctgaacttcacgttcattacagatgtcggcgagagcaatgcgctggacctcaagctcttctgcgaaccggtcgtgcgcacgctggcgacgctcggcgtgaaggcggaggtcaacggccgcaacgacatcacgatcgacgggaagaagttttccggcaactcgcagtacatccgccagggacgcgtgatgcaccacggcacgatcatgttcgattcggacctctctgtcgtcagcgaggcgctgcgcgtcgacccgacaaagatccagaccaagggcatccgctcggtgcgcagccgcgtgacgaacgttgccgagcatctgccggaaaaggtcacgctgccggaattccgccgcatcctgctggaaaatatcctgaaggagaatccgggcgaggcctacccgctgacgcaggatgaccttgcggcggtggaaaagctgcgcgcggagcgttacgccacatgggattggaactacggtttctctccggcgtgcacgatgctgcgccgccgccgcgtggacggctgcggcctgatcgaggcctacatcaccgtggagcacggaaagatcgcggccctgacattcaagggcgacttcttcagcgcctcggaaccggacgagctggcggcgcactttgttggctgcacgccgtaccgcgcgggctatgaaaaggcactcggcgatgtggacgtttcgcgctacttcgcgggcttgcagaaggatgagctgatcgacatcctgtgcgagggataatgaaaaggggagccggcgtaaaaagtgccgactccctttttctcgctcaaatggcaggcagagcatgtcattttccacccatcagcagagccagcagctctgcaagcttcgacttcactacgacatcaccgcttgcggcgctctgcgccaggatgccgtcgcacagcggggagaacgctgcgctccaccactggagggtattagtgccgcgcgcggcgcagaaaagcagcatgaccgcgaggccaacggcaagggaaagctcccatttcgtccatttcatcgaaaaccgcccatctcaaagaatttgcttcgagtatggacggttttctgagttttcaaacaaattcggcgcagaaagttttgacgcactcgccttgcagtgcctcgcacgctctgcggcaagccgctttgtcagagaagaggccgaacaccacgctgcccgagccggtcatcgccgacgtcttcgcgccgtaggcgagaagatcgcgcttgatggtctcaatgcgctcacgctgctcgccgtcgagcgcctgctcaaagacgttgcgcacgtttgcacacagcgtgtccgcgtcgccgtgctcgatggcggcgagcatcgcgtccgtatcaggacggtcggtgatcgtcacgccgtctacgcgcgcgaagagcgcgggtgtggagatcgggaagtccggcttgcaggcggcgacgaagaagcgcggtgcgggcttgaggacggtcagcttttcgccgcggccctcggccagctgcgtgccgccgcggatgcagaagggaacatcactgccgacgcttgcgctgatctgctcgagccgctcgtccgtgagggtgggggagacgagctcgcgcagcgcgcgcagcaccgccgcggcatctgcgctgccgccggccatgccggcctcggacggaatgcgctttataagcgcgacgtcgatgccgccgccgtagtccatcgcctcgcagaaggctctcgccgccttgacagcgaggttgcgctcatcgcagggaagcgccgcgccgtcgacgcggcaggtgatgcccttgccgtccgtgagcgtgacggtcacgtcatcgtggagcgaaatggtctgcatgaccattttcatctcgtgataaccgtccggccgcttacccaaaatatcaagcgtcaggttgagcttggcgtaggcggggacgctcagcgtgcgcacgggcctttccgccggcgcgtcgagcgatcttccgcagtgggggcagtatttgaggtaacggtcgcgcccgagctgcccgccgcagtgcgggcagcgatagtagagcgaccagatcacgccggaggcgaggatgagcacgatgccgagcgccgtcagcgccttgctgccgccctgcgcgccgaaaaagccgacaagcgcaccgctgaggatcagcgcggtctgtattttcgggacgctgcgaaagtggatgaaaggtttgttgtcgttcatcgcggtctccttgtgcgctcagtgcttctttttcttgtgctggatctttttcttctcctcgggctccggctcgtcggcgatccacgcgccgcatttcgggcagcgcttgggattgccgcggccgaggtgctcgccgcacttggggcagcggtaaaagcgcccccagacgatgagcgaagcgcccatcatcatgagaccgacgagcgcggtgacggtgttttgaaagccccatgcgccgacgaaggagaccactgcgccgccccagagcaatacgtcctgccagatcctggctgttttcaaatccatagagaatcctcctgatgagaaaagcgccgcaaggcggcgcttttctgcaatggttacattaggttagcggatcttgcgtgcctcgacgtagtagcgcttgtcctgcgcgtgacccatggagaaggtcttgcgcggcagaacgccgtcggccatgacggtcttgaagagctgctccttgcccatcgcgggaagcaggaagcccatgttgccctccttggagccgagctcgcgggtgacctcatcgccgtggatgtagtcgacctcaccgccgaactgcttgaggtactcgtcgatgaaggtctgcagcgtgccaacggccagctggaccttcgggtcggggacggtgacgaaatcgtcgtggccgttccagcagacctcgatgacgtggccctcgcccttgccctcgtgggcgttggggtagaacttcttgaactcttccatgaacttctcatggtcgacgccgaagagcacgcggtggatgggctcgaactggagcgcatcgtcgtggttgttcacgacctcgacaagtgcgtagcgggagggcagcgcgaggtattcctcgggagtcttgcccttcttctgctcttcatagcaggccttggcggtggcgagggagtggttgccgtcgccgacggcgaacagcaggggcgcgacgccggagacgccgtacttgctcttcatcgcctcgtcggaggtgaggccggtcagcgcgtcggcgactgcgtcgatctgcgcagcggagagcttgtagcccttgatatggccgccgttttccatcaggtcgaagtcatagacgctctccatcttgtcggccgcggcggtcaggggctcaatgacggtcttctcggggtcgtcaatgagcagcatgacgtggggcagctcgatgggggcgttgcggcgcacgcgggcgcgcggggggatacggtcgagcacggtgccctcagtcgcgcggatcagcgcgccggagccgggggtgaagtcgtactggtcgaggtcgaccataccaatgaggccgtgacggatcttaccgtcgctctggccgcgctcgatgtagatgagggagtccttgagcgtctcgaagatgccctcttcgaggtacttgctcatcgaggcgttgatgtcggcgatgaactcgtcgacgttgggggccttcaggttggcctcaggcaggatgaggcgcagggtggaaggcgcgtcgccgacggtcttctccacgcgctcccagtactcgggctcagaggtgaactggtcgcatgcgacgaccgcccacttgctcatatcgacatccttcttgggcagcagaatgtcggaaggataaaagccaagtttggaaaacttttcgttcatggtgattcctccgttatttgtttgataagcggaacgcggggtgctccgctggtgcgattgtaaaacaaattatacaatagcccacgcggaaaaagcaatggagaaagtgaaaaaatgtccaaaagcgctttatggaaatgccatgatagagcgcttcgcggcccgcttgcttgacgaacgccccgcggcatgatattctaacaaactatgcggaaaaatacgaaagattcaggtgatgattttggataagcgcgcagatctggaacacggggacgtcaaaaagctgctcttttcgctctccgtgccgacgatcacctcgcagatcgtcaacatgctctacaatctggtcgaccgcgtgttcatcggccacatgcagcccgccgagaccgtcggaaaactcgcgctgacgggcgttggcgtatgcctgccgatcatcatggttatttcggcgttcgcgtcgctcatggccatcggcggcgcgccgcgcgcctcgatcgccgagggctcaggcgagagcgaaaaatccgagcgcatcatgggaaactgtctgacgatgcttgtgatcacggcgctggtgctgacggtgctgttcgagtcctttgccgagccgcttttactgatgttcggcgcgagcgagaacaccatcggttacgcgctcgactatatgcgcatctacgccctcggcacgatcttcgtgcagctgacacttggcatgaacgcctacatcacggcacagggcttcgccaccgtgagcatgaagacggtgctcatcggcgcgctcttaaatacggctctcgacccgctgttcatcttcgtgctcggtctcggcgtgcgcggcgcggcgctggcgacggtgatctcgcaggcagtgtcggccgtgtgggtgatgacgttcctcacgggaaagaagacgcgctggtacttaaagcgcgagaacctgcacgtggacgcgaagattgtgttgccgagtatcgcgctgggactttccccgtttgtgatgcagtcgacggagagcctcatcgccatctgcttcaactcatctctcctgcgctacggcggcgacatggctgtcggcacgatgacagtgctgacgagcatcatgcagttttcgaacatgccgcttcagggcttgacacagggcgcacagcccatcgtgagctacaacttcggcgcaaagaacgcccagcgcgtgcgcgacgcctacttctgcctgctgcgcgcgtgctttacttattcaatggccatctggcttctggtcgagctcttcccgcgcgcgttcatcctgattttcaataatgaccccgcgctggtcgaatatgcggcgtgggccgtgcgcatctacatggggtgcagcggtattttcggcatccagatcgcctgccagcagacgtttgtggcgctcggcaacgcgaagacgtcgctcttcctcgccgtgtggcgcaagatcatcctgctcatcccgctcatctatattctgccgcactttttcgtggacaaggcgttcgcggtgttcctggccgagcccgtggcggacttcggcgcggtggcgctgacgagcttcacattctatcgccagttccgccgctcaatgcgcgagctggaaggtgcggaagcgactggggagcggtaaagaaaatttttaacgcaaaaataaaaggagagggcaagcccctctccttttattttttacgcctggccgccgctttccatcggctctttctcgcggaacagcatcgtgatgcaccagatgccggcaaggccgacgagcgtgtagatcacgcggctgagcatgccaatctgtccgccgaagagaaaggcaacgcagtcaaagccgaaaaggcccacgctgccccagttgagcgcgccgatgatagcaagtgtcagcgcgatcttgtcgatgaccatgaagttccctccttaaaaagatggtttggtcttcggtagtcttcccgtgatgggcgaaaatatgcgtacggcgttttctgcgttgcccgaaaaagaaaactatgataaaattaggataaaatattgataactttaagagagaaaaagggggaaggacgcttgctgcacatactgatgggacgcgcgcgcacgggcaaatccgagcgcgtgctgcaaaggatcgccgcactgggggactcgtcgcagcaaatcctgctcgtgccggagcacgcctcgcatgtggcggagatggacctgtgccgtgtttgcggcgacaccgcgtcgcgccatgccgaggccttgacgttcaagctgctcgcctcgcgcgtgctgagcatctgcggcggcagcgcggacgtgacgctcgattcgggcggaaagctcctgacgctccagcgtacgctcacggagcttgcgccggtgctcaaggtctacaagcgcccgtcgcagcgcgcggcatttttggagagcctgctcgccgtgatggaggaattgcaggcctacgccgtatcgcccgagcagctatccgagagcgtagcgcagatcgaaggcgagagcggcgacaagctgcgcgacctttctctcatctatggcatttacctcagcaagctccacgcaccggggcacgacgcgcgcgatgtgcttgaaaagctggaggaaaacctcgaagcgtcgggatatattgacaataaagacattttcctcgacggtttttcgtattttacggggcgtgagctgcgcattctgcgtatcctgctgcggcgcgcgaagagcgtgaccgtcacgctccttggcgacacgcaggaccgcgagctcttttccgagagcctgcgtgtgcgcgagcggctgtacgcgctcgcgcgcgatgccggcgtcgcatgcgaggagaaaattcttccgcagggcgaggtgcgcggcgcgctcgaccatatcgagcgctgctttttcggcgcggcggacgaatttacccagccgaccgacaccgtcgcgctctatgaggcgggcagcgcgtacagcgagtgcgagtgggtcgcgtcgcaggttttacagctcgtgcgcgagcagggctaccgctaccgcgagatcaccgtcacggcgcgcgatctcgactcctacgcgggcgcaatcgaaaacgtgtttgcccgctacggtattccgctttattatgcccaccgcagcgatattttgaaaagtcccgtgctgacgctgctgctcggcgcgctcgacgccgcgagcggaggctttgagtacgaggatgtgtttcgctgcctcaagaccggcctcgccggcctcagcatggcggaatgcgacattctggaaaattatgcgctcaagtgggagatccgcggcgcgatgtggacgcgcgagacgccctggccggcgcatcccgacggctacggcgaagaatggacggacgaggcaagggcgcggctcaagacggtcaacgcactgcgcgagcgtgtgcaggggccgtttgcgcgcctgaaaaaaggcgtgggcggcagcggcgaggccgagcagaaggtgcgcgcgctgtacggctatttggaggagatcaaactgccggaggtcttgcagacgcagaccgagcagcttttcgccgcgggcgaggcccagcgcgccgaggaaacggcgcagctgtggggcattctttgcagcgtgctcgaccagtttgtggaaatcctgggcgacgcgatcctcgacgccgaggagtttgcgagtctgatgcgccttgtgctgacgcagtacagcgtgggcacgatccccgtgacgctcgacgcggtgaacctgtgcgaaatgacgcgaaacgaccgccacacggtgcgcgcgctgttcctgctcggcgcgaacgacggcgtgctgcctgcggcggagaaccgcggcggcgtgctgcgcgacgaggaccgcgaggcgctcgagaggcagcaaatcttcctcgcgccgcacgggatggagcagtttcatctggaaattcagaatctttacgccgcgctggcccagccgacggaaaagctgacggtgtcctatcccgtttcggacggaaagggcgcggagaagcggccatcgttcgtcatcgggcgcatcgcgcgtctgctgccgtcgatcagcgtcgaaacagagagcactgacaaggaatatcgcctgtcagcaaagtcgacggcgctcgagtatgcgggcgagcatatcggcggcgcgctgtggcagtattttgaaggacgaggcgacgcggagcgtgcgcttgccgcgatgaaggacgcttcgcgctatacgcgcgggcatctgtcgcgcgacgcggtgcgcgcgctctacggcggcgcggtgacactgtccgcctcgcgcatggacatggcgcgctcatgtcactttgcctatttcatgcgctacggcctgaaagccagagagcgcactggcgcgggctttgacgcgccgcagatcggcacgttcgtgcacgatgtgatggagcatacgctgcggcaggcgaaggagtgcggcggactgcatacgctatcaaaggagaagctgcactcgctcgtgcgcgcgtcgatcgaggaatacatcgaccgcgtgctgccggacttgtgcgaaaaaagcgcgcgcttccgttatctgttcaaccgcctgtgtgcgacggtcgagcgcatcatggacgaggtgagcgaggagctgcaaagctccgactttgagccgctggcatttgagctggaatttggtgcggacgggcagctgcccgccatcacgatccgcgaggaaaacggcacggcgcgcgttgtcggcaaggtcgaccgtgtggacggctggctgcacgacggcaagctatatttgcgcgtcgtggactacaagacaggcaagaagagcttcgacctcgccgagctgcgctacgggctggggctccaaatgctgctctacctctttacgcttaaagaagagggacagatgcttttcggcgggcacgagatcgttcccgcgggagttctctatacgcccgcgcgcgagccgatgctgcgctgcgcgcgcgacacggagcccgaaaagattgaaaaagcactcaaaaaggagctgcgccgcagcggcatggtgctcgaggacccggcggtcctgcaggcgatggagcacagcgcgctcgaatcgccgtgctacctgcccatcgcggtgaaaagggacggcgcggtgacgggaagccttgcttctgccgagcagctcggaaagctctcgaaatacgtcgaccatattttacatgaaatcacgcaggaggtcttcgcgggcaacatcgacgccgacccctacgcgcgcacgccgcagcagtcggcctgcacatactgcgagttcgcgagcgcgtgccactttgaaaacggctgcggcagtgaccgtatggaatacatcaaagcgacgaaaaacgacgaattctggcagtacatcgacgaggtgaacggagagggggcgcacgaaaatggctgaaaagctgacaaacgaacagcaagcggcggtggacagccgcgagcgcagtctgctcgtctccgcggcggcgggctcgggcaagacgaaggtgctcgtcgagaggcttttttcctacgtggagcgcgaaggggcgaatctcgacgatttcctcatcattacctacacgcgcgccgcggcgagcgagctgcgcggcaagatcgcgaaggcgctcaccgagcgcatggagcgcgaccccggcaactaccacctgcggcagcagatgctgcgcgtctaccgtgcggacatcaagacggtggacgcgttctgcaccgcgcttttgcgcgaaaactgccatctgctcggcgaggacgcgcgcgggcacgcgctgcggcccgatttccgcgtgctggacgagaacgaggcgcaggtgctgcgcgagcgcgtgctcgcgcgcacgctggacgatttttacgactgcctgacgcccggaggcacactgctggccgacacgctcggcgcggggcgcgatgacagcgcgcttgaggacttagtgctcgagctgcacgcaaaattgcaggcgcagccgtatgaggacaaatggctcgaggcgcagcgcgcgttttggcgcgccgtgccggataagatcgaggacacgccctatggaaaaattctgctcaatgaggtgcggcgcaaggcgcgccactgcaaaaaccttttgcagcgcgcggcgcaggagatgtgcgcgaatgacgcgctgaaccagaagtatgcgcccgcgttcctcgacgcgtcctaccagcttgaagcgctggaggggaagaccgcagagggctgggacgccgcgcgcggcgtgaccatcgcgtttccgcgcctcgccgcggtgaaggacagcgacggcggcgagatgaaagcgcgcatgaaaagcctgtgggacaactgcaaggagaccgtcaagggctttgccgagattttttccgcctcgtccgacgaggcggtggaggacctgcgcacgatggcacccgcaatgctcgcgctcatcgacctgacggcggacttttcccgccggtacaacgaggaaaaacggcggcggaattctgctgacttctccgatcaggagcacgaggccatccgccttctcattggagaggacggcgcgccgacagagcttgcgtgtatcgtcagcgcgcgctaccgcgagatcatggtggacgagtatcaggacaccaacgaggtgcagaaccgcatttttgacgcaatttcttgtaaaggagagaaccttttcactgttggcgatgtcaagcagagcatctatcgcttccgcctagccgacccgcgtatttttttgcagcattataacacctggccgccgcttgaggacgcagaggagcacgacagcgcgaagctgctgctctcgcgcaacttccgttcgcgcaaagaagtgctggacgcgacgaattttatcttctgcaatattctttccgaggaaatgggtgagctcgactacggcgcggatgaaatgctgcgcctcggcgcgaattatgtcgaatcgagcgcgtgcggcgcggagttccatctgctcgatctgccgacgcagacgggcgagcagcgcgtgcgcgcgagcgaggctgaggccgcgttcgtcgcggactatatcagcaatatgctgacaagtgaatttcctatacaggatgacaaaacaaaagagctgcggcccgtgtgcgaggaggacatcgtcatattgatgcgctcgccgagcacgcgccttttggactatcgccgcgcgctggaagcgcgcggcctccactgcgccgctgacgcgggcgaggacttttttgcctcgatggagatcgcagtgctgttcgcgctcttgcaggtcatcgacaatccgcggcaggacgtgccgctcattgccgtgctgcgctctccgctcttcggctttacacccgatgagctcgcggcgatccgcgcgcggcagcgcacgggtgacttctacgatgcgctgcttttgagtgaggatgaccacagcagagaatttctcgatacgctggatgctttgcgcaacagcgcggcgcacctgagcgtgcgcgagctgctgagcgaaatttaccgccggtgcaatgtgctcggtatcttcggcgcgatgcgccgcggggcggagcgcaaggaaaatctgctcgcgtttttggagctcagcgaggactacgcgcgctcagggcggcaggggcttttcgactttgtgcgcacgctgcgcgagcagcttgccgaaggcgaggcgggttcgatgcagaccgcgcacgcctctacgggcgttcgcatcatgtcgatccacaagtcgaagggcctcgaatttccggtcgtgatcctctcggacctcgcgcgtcgcttcagcaatatggactttttgagttcggtgctcgtgcatccgcagctcgggttggggccggtgtgcgtggacacgcaaaggcacatccagtacccgacggtcgcacggcaggcgctcgagcgcacgctgcggcgcgaggcgaaggccgaggagctgcgtgtgctgtacgttgcgatgacgcgcgcgaaggaaaagctcgtcatggtgcacacgcaggcaaacgcgaaaagccgcgtcgccgaccttctggcgctgagcgattgtcctgtgctgcccgaggctgtggacagcggcaagtgcatgggcgactggatcatgctgccgcttttgcagcgcagcgaagcggcatccctgcgcgagcttgcggggcagaatggcgaggggagattctatgctgacgaaacgccgtggacggtgcgtgtgcacgacggtttgagctttgtgacgccgcagcagcggcccgatgacgcgccagtggatgccgcgccgccgaaggatgagctgccggtggattttgctgcgctgtcgtaccgctacccctacgcggggcagacggcctttcccgccaagctgacggccacgcagctcaagggccgcgcgctggacgaggagatatccgaaaatacaacgctcccaccgcggctgcgcagcctatataaaccaaaattccttgcgggcgaaacgacgctcacgggtgcggagcggggcacggcgctgcaccttgtgatgcaggaccttgactttttctgcgaagcaagcgagcagagcgtgcgtgagcaggtcgaaaagctcagagcgcagcgcaagctgaccgacgagcaggcaagcgccgtcgatgtgcgcgcgatcgtccgatttttgcgaagtgatcttgccgcgcgcattcgcaagaatgcgcagacggtgcggcgcgagtaccgcttctcgctgctgcggccggtgcgggactttgccacgctggacgccgacgacgcggtgctgctgcagggcgtggtagactgcttttttgaagaggacggcgagcttgtggtcgtggacttcaagactgaccgcatcggaagaacacagatcgaagaacgagctgagcactaccgccctcagctcgagacatactccatggcccttatgcgcgtgatgggcaaaaaggtcagggaaaaggtgctgtatttcttctcggtcggcgaagaaaaggtgctgtgaatacataaaaacaccctccgcgggaaatccgcggagggtgttttacaagatttgctcacacgataaaatgctctaagatcagcactgtcgcgcagcagacgagcgagacggggagaagtcccagtccgcaccaggcggcgacgatgccgatgaccatggccgccgcgcccgcgatgggcgactgcgtggcgttcatgatggcggggaacgtcatcaccgcgagcgtgacgtagggcacgtagaagagaaacgagcgcaggaagggattctggatcggcttgcggatcagcgtgagcggcaggacgcggatgagataggtcgtggccgccatgacgaaaagatataaatacgttttcatgcgacgagatcatcctccttgtgcgggaacagaatggcggcggcagcagagatcacgatggtcaagaccaggatgcgcatgccctcggacagctcgcgcgtgaacggcaaaacgcttgcaagaagcgagcagagaaagctcacgccgatgcagccgagcacgatgcggttctgcttgccgacggggatgatgatggcgagaaacatgccgaacagcatcacggagcaaccgctgacggcccagacgggcataagattccccatcagcacgccgagcacggtgccgatgctccagcccggcatggccgcgcacatggtgccgaagtaataccacacctcaagatacccaggctgcgcgatggcgaggccgaagatctcatccgtcaggtcataggcgatgaggagccgccagggaagcggcgtatcgggcgagagacgctggctgagcgcacagctcatcagcagatagcgcgcgttgacgaccagcatcatcagcgccatggcccagaggccggagtcggcggcgatgatggtgatgccgccgtattcacccgacgaggcgttgttcaaaaagctcagcaaaaaaccctgaaaaatgctcaggtgcgcgttgtgcgcgctgatgccgatgccgaagctgacagcaaaataaccaagcccaatggggatgccgtcgcgcagtccccgcaggaaatgttttttcgacataattctgatgttcctttacttccaatcatccgtgcgcaaggcgcgtaagtgccattatacgactgaaaacggcagaagtaaagagaaattgcatagcgagcgttgaaaaattgacgatgaaattagggaaaagtgctaaggaagagaaaagcacggagaggatcaaaaatttctcttgcaatttgacacaaagcgtggtaatatcctatatggcttttttagaaaagtacatttggatcagaaagaggtgaacacgagcaatgaaggaaggaatccatcccaattatcagcagactactattacttgcgcctgcggtaatgtgattgagacaggttccaccaagcagaatatcaaggtggaagtgtgctctaagtgtcaccccttcttcactggtaagcagaagctggtcgataccggcggccgcgttgccaagttcaacaagaagttcggcctgaactaattcaatcacaaaagcagctctgctacggcagagctgcttttttctgcttttttggaacgctcagttttgcccgtcgggatattcgacgatgaaggggagcggctcaagggcctgatcaagataatttgtctcctcataatagtcgctgccgcctgcaatggtgtgcacctgaagaagacggacgcgcagaacggcaccgtcggacagttcgacgatcatctcgcagatgagtggagagtcggtgattctgatgcagaggtcaagcgcattctcatcaatgggatagcggatgaagtacgaggtaccaaggtctcgtgctgcagttgcctcagcggtatcactgaggtcgttgacagggtaggcctcttccacagatgaaacaggaacagcttcgagaggtacagttgagattagcttgccgttgcgcgtgtattcaagccgcatggtgcggatgtcgcggtcgtcgtagacgccaagggtaaagctgccgaatcggtaatccacacccttttcaaaggaaagttgataggtgagcggcgaaccggagtctcggcgcatataggaaaatggtggattaaaactgtagaggacaggggaattctgagttttaaggttgtagatcgtatcaagctcttctgactgtgtttcgccgtgggtcttgaaattgacactgacgctgagctcatcgctcagcggtacggtcacttcgccgtgcagatagccgaagctgtcctgtttaagatcggcggtgcgggtcggcggactgtcgctcgtgtaggatgagctgctgcggtcagtcacaaggagagagacagccgtattttcgccgatcgtcttcggcaacagagagaaggcgagcgtgcactcctgctttttaagatcgacctttgtgacctcatagctgaactgcgagagcaggctcgactcgcgcgtcaaaatgtccgagacgttattgctgatgccgtcgatctggctggagagattgctctgcacgttgtagagctggctgcgaaggtcatttacttgcatgctgagcgtgttgatgcggttgttgtaatgcacgccgacggcgatgagcgcggcgagcgccacggccgcaccgccgatgatcttcttgtgctgtatacagaaatcgcggaagctcagcttttccgcgggagctttttcggcgttgctttgaaccggcgattcggcggcatcctgctcgggtttggcatgctccagactgagcagctcgtcgacggaaacggagtagagcttagagagttcgatgagcttgctaagctccggctgcgtggcgccgctctcccatttggagacggcttggcgcgaaacgccgagcttctccgccagctcctcctgcgacataccgctcgcgcggcgcagttcgtagagcttttcatatagttccatgaaaggttcctccttggggaaatgttgctgcgttcgacgccgtgcactgcgcctttgcaggaaaagcatagcaggaaaacgggagaaaacaccaccaaccgggcgtttctttttgtcaacctgaggttgcgtccaccctattttcacatgagaggggcggaaatgtcaatgaaaagcgtttttgccttttcttttggcggaaaatacactataataaaaatgatttgtacagcgccgatttcggcgcgataaggagaatctatggaagaattgaaagagaacaacgcgccgcgcgacagggcgattttagtcggcctttcgtcgccgcggctcgatcgaaaagagaatgccgacgaggagagccttgaagagctcggtgcgctcgtcgaaacggcgggcggcgtcagcgtcggcgtggttttacaaacgctgccgtcgccgaacccgcacacattcatcggcgagggcaaggtggacgagatccgcgagctggtaaagtcgcaggaggcgacaatggtcatcttcgacaatgacctctcgccctcgcagatgcgcgttctgtgcgaggaattcggcgtgcaggtgctcgaccgcagcggcctcattctcgatatcttcgcccagcgggcgaagacaaaagagggccggcttcaggtcgagcttgcgcagtatcaatacctgctgccgcgcctgatcggtatgtggacgcatctggagcgtcaggcgggcacgtcgggcaagggccccatcggctcgaagggccccggcgaaacgcagcttgagaccgaccgccgccacatccacagaaagatcgacaagctgaaggcggaccttgaagaggtgcgccgcgtgcgcgccacgcagcgcgaccgccgcagcaagaatgaaattcccgtcgtcgccatcgtcggctacacgaacgcgggcaagtcgacgcttttgaacgcgctgaccggcgcgggcattcccgcgaataaccgcctgtttgacacgctggatacgacgacgcgccttctcacggtgtccgacacgctggatgtcgtgatctccgacacggtcggctttatccgcaagctgccgcaccagctggtcgaggcgttcaaggcaacgctcgaggaactcgaatacgccgatcttctgctgcacgtcatcgacatttccgacccgcactggctcgagcaggcgcagatcgtggacgagctcatcgaagagctcggcgcgcagcaaattccctgcctgcgcgtttacaacaagtccgacctctacttcggcgatatccgcccgcacggggaggacagcgtcaacatcagcgccaagaccggcgagggcgtggatgagctgcttgcgcgcatcgacaagctcctcgacaagggcacgcgccgcgtgacgatccacctgccctatgacaagggcgggcttctcgatatgctctaccgcgaggcgaaggtcgaatccgtcgaatatggcgagaccatcgacatcgtggccacctgcgtgccgcgcgtcatcggccaggtcaaggactatatcgagggctaccgcgagccgaaggaggactgggaggaatgacgtttgaaacgacgcgccttctcctgcgtccgtggtgcgagagcgacgcggagagctgctatcgatacgcgagggatccgtttgtcggccccgccgcaggctggccggcgcatacgagcgtggagaactcccgcgagatcatccgaaccgtcctctcggagccggacacgtttgcagtcattttgaaggaacggccagacgagcctgtcggctccatcggcgtgtttccgacggaagcgccagaaatcgggagtgagccggaaatcggctattggatcggccgcccgctctggggtcaggggcttatccccgaagccgtgcgagagctgctgaggtactgctttgaggataaagacgcacagcgggtctggtgttcgcactatgccggcaacgagaagtcaaagcgcgtgatcgaaaagtgtggcttttcttatcagctgacctgtgaaaggccggcgcttgtggacgatgcgctgcggccgacgcttttttacgttctcacgaaagaaaagtgggagaaaacccgctgaaaggaacattgaaaccatgacagagtaccttgtcccatacgagagcgcggagagcgagtttgaagaaaagcgctcgcgcttcatcagccacgttttccttgtggagagcgaggcggaggcccgcgcgcgcatcgacgagatgaagaagaaatactacgacgcgcgccacaattgctggtgcttcgtcctgcacgacggcaccgtccgctacggcgacgacggcgagccgcagggcacggcagggcagccgatgctcaacgtcttccaacgcgaaaacgtcgaaaacgtcgtgtgcatcgtgacgcgctacttcggcgggattctgctcggtgcgggcgggttgacgcgcgcctatgccaaggcggcgaaggacgcacttgacaatgcgggcaaggcgcggatgcagctgttttccgtgctgctgctcgaatgcccgtacccgatgttcgagcgcataaagctgctgatcgagggacatgagggaagaatcgagtcgagcgattacggcgctgccgtgacgctcacgtttcttctgcccgtgcagaagacggcggacttttccgccgcgctcacggagctctccggcgggcagatgagcgcggaagaggtcgagcagcgctttctgcccggcgcaagggagtgacggcatgagtttgcgaagaaaaatctacgaggtcatcgaggtcgcggacaaggacgaccgcgacagtctcatttacgaccgcttcatgctcgtgtgcatcgcggcggtgtgtgtgctggcgtgcgggtatatcgcgctgtcggcgctcatcatgtttcaggtggagcccgacagctttgacacgtttttcgacgccatctactgggcggtcgttacgctgacgaccgtcggctatggcgacatctatccgacgagcgagattggccgcatcgtgagcatgatgtcgtcgttcatgggaatcgccatcgtcgcgctgcccaccggtatcattacggctggctacatgcgcgagctcagccgtgaaaagtgggactaaatagagagggcagaaccatggagatcagaacagcgacgatgaacgatctggacgcggtcgcggcagtggaagccgagtgctttcccgtggccgaggcagcgacaaaagaggaattcgccgagcgaatcaaatattacggcgaccacttctggctgatgttcgagggcgacaagctcatcgcgtttctcgacggctttgtgacggacgagccagacctgaccgacgaaatgtacgcgaaagcatccatgcacgacgaaaatggcgcgtggcagatgctcttcggtctgaacaccttgccggagtaccggaaaaacggctacgcgggcgaactgctccaccgtgccgttgaggatgcgagaaagcaggggagaaagggtgcagtcctgacctgcaaacagcggctcgtcgactactacgcgaagttctgctttgtcgacgagggcgtgacagacaagtccgtgcacggcggcgttgtctggcaccagatgcgcatcacactttgatcgagactgacagaaaaagggagcacgcgcaagcgtgctccctttttgcgatttttattgctttcccgcgaggtagtaatcgctttggcccggatgatagaacggacaggcggtcagcttgccgcgcaggaacgacgccatctcgtcctcatcgagttgctcgtcacagtagtagctgtcggactcttcatcgtagctgtaataaacgcagtcctcgcacaggctgatggacatgagatcatctcccgaaagaaattagtgctgatactcgaattcgagctcgtacatgctgacgatgtcgccgtccttgatgccaaggtcctcaagctgctggaaaacgccgttttctcgcagcatcttatcaaagaacatccggctctcgtagtcaccgaagttgacgttgctcataaggcgttcaagccacttgccctcgacaatgtaggtgttgtcctcgacggtgatcttgagcggctcgctcgcgtcgatcttcacgggcttgggaacgtactcgggctcatagaccgtgacgggcgggagtgtggagagcttttcggcgatcttgagcacgagctcgcgcgtgccggtgtgcgacgcggcggacagggcgaagaggggatagccgagcggctcgacatgcgcgcgcagcttttcgagcaggctttcgtcctccatgatgtcggtcttgttcgcgacgacgatctgcgggcgggtagcaaggtcgggggaatactgcgagagctctgcgttgatggcgtcaaagtcctcgaccgggtcgcggccctcgctgcccgacacgtcgacgacatgaacgagcaggcggcagcgatcgatatggcgcaggaagtcgtgaccaaggcccgcgccctcggctgcgccctcgatgatgccggggatgtcggccataacgaacgaaacgccctcgtcgacgtacacgacgccgaggttggggtagagcgtggtgaagtggtagtttgcaatcttggggcgcgccttcgacacaacggaaagaagcgtcgacttgccgacattcgggaagccgatgaggccgacgtcggccagcagcttcagctcgagcacgacatcgtgctcctcgccctcaaggcccgatttggcaaaacggggcgcctgacgcgtcggcgttgcgaagtgggcgttgccccagccgcccttgccgccgcggcagaggatgaacggctcggagtcggacatatccttgatgatctcgttcgattccgcgtcgcgcacgacggtgccgcgcggcacgcggatcgtgagatccttgccctgcttgccgaacttgcgcgcgccctgaccgtccatgccgttgtcggcgacgtatttgcgcttgtagcgaaagtccatcagcgtggacatgttgtcgtcgacaacgaggacgatgttgccgccgttgccgccgtcgccgccgtcggggccgcccgcggagacgtacttttcgcggtggaacgccaccgcgccattgccgcccttgcccgcgcggcagaagatgcgcgccttatcaataaaagatgctgccatgttggcacctccttgaattcttgttattcctaaacaattagtgtatccgttttttgacgattcgtcaagaaaaacggaacgtttcacaaaaaagaaaaaatcgtaaaaagttgggaacttttttgtgctccctttcgtcaaaggaaaagacacaacgggaaaggaagcggaaaccttgaaaagactgcttgcattgatgatggtcgtcgccgtaacggcggcgcttttggcctgcacgaagggcgggcgcgataacgaagacggaaatgacacgcccaatcctgagccgcagtacgccggcgcggacacgatgacgctgcgcgtcgtgggcgacggtgaaaacggtacgcttattttagcgggagagacggaggtctacgccctgccgctcgaaggcgtgacgctgtacttagacggtggcagtgtgtctgcttccgagatcgaaagcggcatgagcgccgaggtctggtacaccggcggcgtgcaggagacatatcctgcgaagttttcacaggtggaggccgtgtcgctttcgcgcgaggcggacccgaggtatgacctttgcggcctctatttgcaggtactggaggatctgtggagcgcggacgacggactcaacggcggcgcggagctcgtgagcgttgacctgagcaaagcacccagcgggctgaccgccggcgaaaaggcggcgatcgcctatgtgtttgcgcagaagcacgatgtgcagggtctgacgatgaccttcgacgagctgcgcgagcagggctatctcacgggcgaaaagttggaggaccgcagcacggcctattcgttcacgaacggcctgctcttcaccatcacgccggaggagacgcaggacaacggcgcgtccgtctgcttcagcgccggaaagtggcgctcgccgctcggcgcgtactactttacaaagtgtacggcctcccgcggggagggaagttgggagtacagcgtcggcgcggaattgatttcctgagctacagcagattctttaattcagacagcgattcgacgatctggtcggcctcgcaatgctccggaacggggcggcgcgtatggttgtaccagatcgttttcatacccgcggccttgccgccggaaatgtcggcggtcagcgagtcgccgatcatcatgcactcgtccgcggcaacatcgggaagaaaagcgcggcatgcatcgaaaaacgccttttcgggcttgcggtagccaagtgactctgaaacgaacacatggtcaaaataggggagaagtcccgccatttcaagtcggttgagctgctggtcgtggaaggcattgctcgccgcgcagaggatatatttttccttgaggtagcggcagatctcgtccgcgccgtcgactgggatggccgtctcgtagaggaggtccaaaaaccgcttttcaaacgcggcgccgtcggcctggatgccgagggcctcgaagatgcggttccagcggaattcaaaaagctgctgcgtcgtgagctcgccgcgctcgatcatgagccagaggccgtcattgatgcgcgtgaacgtcgcgtaagtggaatcgtcataggggagaccccattcggcaaagccgatgcgcatggcctgctcggcgcatttgccgaagtcgagcagcgtgtcgtcgatatccatcaaaactgccttgagcatgaaaagtgacctcctgcggaaaagataaagaaaagagccccgagcattcgctcgaggctcttcattgtgcaattactcagcggggtaaacagaagcctgcttacgatccttgccgagacgctcgaaacggagcacgccgctctccttggcgtagagagtatcgtcagagccgataccgacgttgacgcccggatggatgtgggtgccgcgctggcgcacaagaatgttgccggcgagaacgaactgaccgtcagcgcgcttggggccaaggcgcttggcgttagagtcgcggccgttcttcgtggagccgccgcccttcttgtgggcgaaaaactgaagaccgatgttcagcatggtgatttgccatcctttctgtaagatgatcggaacagggggcttacgcctccatgacttcgatattgtccggatattcgctgtgcagctcggaaaagagcagcatcaaacccgttaaaagagcctgacaggtgctctcgttcgtggcggacagaccgccagggagccggaattccacagcgccggagcgttcatggaccttgacggaagcggcgaggcctaaaacatcgttcacggtgctttccacaaggcggaccgcacttgtgactgccgcgcagacgatatcgctgccctcttcgctgtaaccgctgtggcccttagcatcaaaaccgatgatgcgcttcccctcagtgaggaatgtaacagtggtcatgccttagacggagatcttgccgatctcaaccttggtataaggctgacgatgaccctgacgcttgtgatagcccttcttggccttgtacttgtagacacggaccttcttgcccttgccgttcttaacgacagtggcctccaccttcgcgccctccaccacgggagtgccgaacttggtgttttcgccgtcaacgatcgccaaaacctgatcgaaggtaacggcgtcgcccgcctcgacggggagcttctcaatgaacagggtgtcgccctcgttcacaacatactgcttaccgccggtaacgatgatcgcttgcattacttgcacctctttccttaattacggactcgctgtcgggggcgttcgaaaagtctcgaaaccttccgaaactttaagcccattcaaagcggctgctcaagtataacttctgactttgaaaaagtcaataggtttttggaaaattctctgtgcagttttgctcaggtgcaaagtgagtcgcggcacgtgtgccgcgaggaagcagcgccaaaggcgctgcacgggtcaaaggggatattctctttcgcaaaagagaatatcccctttggaaccccaagagaaagactttgtattgtcagattgcggcttgaagaactgcacgcgctgcgcaatcaggtgcctgcttgatgatgtatctaaacgatttgactttcttctatcttcgctgtcgctttgcctgcgtgtcggaggtcttacgcaatttccgtctactttggattttatcaattctgttgttgcctgccaaggcggcattgctgtgctcgccgcatatgcgcaccatcggtagacggcgattaggctgcactcctacaagatcagcagagcggcagcggatagtagaagcagaggcaaatcatatagcaaaagcaatggcggcgagcgttagcaatgccgccacgcaggtgcttccattccggaggcataaaggtcattcaagcccgagactgccgatcagaacctttctcttgggggttcaagggggccattctcttttgtgaaagagaatggcccccttgtccgtgtcccctgcgcggcgcggggaacacagagcagcgcatcgcgctgcaagaactgcaattttgcatataattgcccacaatacaaacaataactctgcaagttttatttggaaggagagcatttcaatatggaaaagcgaaaagaattctggcgcgcgctgccgtttgtgatggcgctgttgttgcttaccctcgtgccgatgcagagtgcgtcggcgctgttcggcaagggaaaagaggaggcgaaagctgtcgacggcgcgccggtggcagagaacatggagatcaaggtctaccgcggcgtcgcgtatgagggcgaattccgcgcggtggacaacgagggcgatgaggtgacctttgccatcgcgcaggagccgaaaaagggcatggtcgcgctgacggaggatggcctcggctttgtctacacgcctggcggcaagctgggaacggacagcttcacctacacggcgatcgacgcctacggcaacatttcgctgcccgcgacggtgagcatcacaatcgaaaaggcaaatagcggcgtctgctacgctgatatgggcggcagccgtgcgcatacggcggcggtcgatcttgccgagcacggtgtgtttgtgggcgcgaagatcggggacagctatttctttgagcccgagcgcacgctttcacgtggtgaatttgtcgcgatggcgctcgcggcaatggacgtgagcgcggaggatgtgcagatgaccggcttctgcgacgatgcgagcataccgacctgggcgaagggctacgccgtgagcgcgctgaatgcgggcgttgtgtccggcgtcagcacggcggagggcgttgcctttcgcgcgaatgacgccattacgctcaatgaggccgcggtcgtgctgaaccggctgcttcgcgtgacggacgtggacctctcggactacgacgtgcaggacgcggacaacgcctggtgcgcacaggcggtggcgaatttgcagtccgtcagcgtgatcgagagcgggcgtttttccactgacgagatgcgctcgggcgtgacacgtgcgcaggcggcagagatcctcagcgcggcgatgacgctcaaggacggacgcgcgggaaagggcggactgctctccggcattttcggctaagggcaaaaagtgagaaaagcgaacaaaagagagcggttttcacgccgctctcttttgcttgtatttgggaaaaagctgtggtaaagtataaattagtatagtatggataaacggggacggcgacgttcctttcaaaaataaggaggaaaacggtatgcgtatcgttgttttagcaggcggcctgagtatggagcgcaatgtgtcgctctcgagcggcaacaagatctgccgcgcgctgcgttcgcgcgggcatcaggccattctggtggatatgttcatgggctttgaggactacgatggtaagctcgaagatgttttcgacgcaccggacggcttctgcggcgactattccgtcgccgaggcagagcccgacctcgccgccgtgcgcgcgagccgcaaggatcagagcaagagccttttcggtcccggcgtgctcgatgtgtgcgccaaggcggacgtcgtctttctggcgctgcacggcacctgcggcgaggatggccgcgtgcaggcggcgttcgacctgctcggcatcccgtacacgggtgcgggctacttatcgagcgccattgcgatggataaggacctgacgaagcgtcttgtgtcggaatatgtcatcacgccgcagtggcgcaccgtgcgctacacggaaggcgacatcgcgcgccttgtgtcggaaacgaagctcccttgcgtcgtcaagccggtcgccaacggctcgtctgtcggcgtctccatcgcgcatacgggcgcggagctcataaaagcgcttgaagagtgcttacagttcggcgcgcaggtcgtgctcgaacagtacatctccggccgcgagatccaggttggtatcatcgcgggcaaggcactgccctccatcgaaattatcccgaagacgggcttttatgactacgcgaacaaatatcaggccggcgcggcggaggaaatttgcccatctcccatccccgaggactgggagatgcgcgtgcgcaccgcgaccgagacggtctaccgcctgatcggcctgagcgtctactcccgcgcggacttcatcgtcacgccggacggtacgccgtacttccttgagatcaacacgctgcccggcatgacgaagacgagccttcttccgcaggaggcggcggcggtcggcatcggctacgaggaactgtgtgaaaagatcgtcgaagagtcgctgaagcagaaaagagggctgtaaatggaggccatcacggtaaaggagctgctcgcggcggtgcacggtgagctcttgcagggagatgagacagcgcagatcctcggcgtgaacaccgacagccgcaccgtcaaagcgggtgaagttttcgtgccgctcgtcggcgagcgcttcgacgggcatgactatatcgaaaaggcgatttccgcgggcgcggagggctgtctgtgcgcccgcgtgccggaaacgctgctgcccggaaagttttacatcaaggtgcctgacacgctgcttgcgctcaaggacttggccgcgtggtaccgtgcgcagttttctatcccctttgtgcaggtgacgggcagcgtcggcaagacgacaacaaaggaaatgatcgcctcggtactgggcgtgaagttccatacgctcaagaccgcggccaactataataatgagatcggcacgccgcagacgttgctgggcctctcccacgcgcatcaggcggcggtgatcgagacgggcatggaccgcgcggggcagatccggtatcttggcgagatggtgaagcccgatatcgccgtcatcacgaacgtcggcgacatgcacattgaatacctcggatcgcgcgagaacattctgaaggccaagtgcgagatctttgaaaacctcaaaaaagacggcctcgccgtcttaaacggcgacgacgagcttttgaacaccgtctctctgccacagaaaacgttgcgctgcggcctgtccgagcactgcgatgtccgcgtcagcgaggtcgaagaccttggcatcgacggcattcgctgcgtcgtgacgacggcaaaggagcgttacgcgctctccatccccgtgccgggaaagcacatggtctactccgcggcgatggccgcggccatcggtgagtaccttggcgagaccaaagaggagatcgagcgcggcgctgcggcctacgagcctgcgggctcacgcatgcacgtcatcacgttctctgaaaaccgccgcctgctcgacgactgctacaacgcgggtccgcagtcgatggcggcgtcgctgcgcgtattgggcgcgagcggcggcaaaaaggccgccgtcatcggcgatatggcggagctcggagagctcaccgagcgtgcgcataaggaaatcggagaactcaccaaagagctcggcatcgacactgtcatcgcaatcggtgcacgggcaaaatactttacagaagggaacccctctgcgcagtggttcgggagcgtggacgaggcgatgggcgccgtcaaggcggcgttcacggcggagacggcgatgctcgtcaaggcctcgcactccatgcactttgagaagatcgtagaggaactgaccaaagcatgatcgacatcagtgttacgggactcatcaagtcctttgacctcgaaaagaaaatactggacggtatcacctttcagatcgacacgggcgagcgcgtgggtcttctcggcaaaaacggcgcgggcaagacgacgctcttccgcatcctgacgggcgagctcgactacgacgcgggcgaggtgagcatcgcctcgggccgcaggctcggtctcatctcacagatccccgtgtatcccgagggctacacggtcgaggatgtgctcaagagtgcgttttcgcgcatgcagaagatggaggacgagatgaacgccctctcccagcagatggcaagcggcgacgagagcgaagagacgctgcgccgctacggcgagctttcggccaagttcgagggtctcggcggctacgacaccgagacgcccatcaacaaggttgccaacggcctttccatcccgccggagatgcgcgagcgcctgtttgacacgctctcgggcggcgaaaagacgcgcgtgaacctcggccgcctcattttggaggatacggatattttacttctcgacgagccgacgaaccatttggacctgcacgccatcgaatggctggagcagtatttgtcaacgttcaagggtacggtcgtcgccatctcgcatgaccgctactttttggaccgtaccatcacccgcgtcatcgaggtgctcgacggcaaggcggagttttacagcggcaactacagcttctacgcggtggaaaaagagcgccgctatttggaaaagatgcgccaatacgaaaaggagcaggccaagattgcccagcttgaaaagagcgccgagcagctgcgcatgtttgccttcaagggcatggacaagacgtaccgccgcgcgctgtcgatggaaaagcgcatcgagcgtatgcgcacgacggacaagccgacgaaggaacgggcactgagcgcgcagttcaagtcgcaggaattctacggcgacgaggtgttcgcgctcaaaaagctcaaaaagagcttcggcgaccgtgtgctgttccacgacgtggacttgcaggtgcgcggcggcgagcgcatcgcgctcattggcgacaacggcacgggcaagtcgacgctcatcaagatgctgatggaagaggaatatcccgacgagggcaagatcaagttcggcccgtcggtgcgcatcgcgtacctgccgcagatcgtcgaattcgacgtgccggagcggaacctggtcgacacgatgctctactccaagcgcaacatcacgccgcagagcgcgcgcaaccgcctggccgcgttccacttcacgggcgaggacgtttttaagagcgtcagcgtgctctcgggcggcgagctttcgcgcctcaagctctgcatcctgatggatgaggaagtgaatctcctgatcctcgacgagccgacgaaccacctcgatatcgcgtcgcgcgagtggatcgaagaggcggtggagagctacgacgggacgctcctgttcgtgagccacgaccgctatttcatcaaccgctttgcaacgcgtgtgtgggagcttgaaaacggcgtcatcaccgactatccgatgggctttgcgcgctaccggcaggtcaaggcactggaggcgcagaacaagatcgaccacacgccaaaggctgtaaaggaaaagacggttacagaaaaaccaaagccgaaccgctctgcccagcaggcgcggcggcagctcaccatctgtgaaaaggaaatttccacgcaggagaccgccatcgccgagatcgagcagcgcctcgaagaggcgggcggcgactatgagcgctacagcgaaatttataaggagaaggaagccgccgagcagaagctcagcgagctgatggaaaagtgggaaacgctcgccgagcaggcgggcgaatgaggaacataccatgaagagacagaaaaaactgtggacagcggcagcagcctgcgccgtgctcggcgcgacgtgccgggccgtcccgggtgtgcgctttgcaggactgctgttctggtgcctgacggcgcttttgatcgtctttgcgatgctcgagcagtacaaagagcatgcgtgggcaaagtggggaaaacgcgttctgctcgcgctcgtgtgcctggggcttgtcgcattcgggtatcttgaatcgctcgttattcgcggcgcgcacacggacgggcgcgcggaagacgcgcagtgcgtggttattttgggcgcgggcgtgaacggcacgacgccgtcgctgatgctctcgtcgcggctgcaggcggcgcttgacttcatcgcggacaagccggacatccccatcatctgctcaggcggtcaggggccgggggaggatatctccgaggccgactgcatggccgactggctcatcgcccacggcgtggacgagagccgcatctaccgcgaggaccgatcgaccagtacgcaggagaactttgcttacagcgaagagatcatggcggagctggggcttgatgcgggcgacatgttcgcctttgtcacgaacgactaccatatttttagggcggggcgcatcgccggaacagatgcggcctgcggcgtggcggcgacgctgccgcgcagcgcctattacgatgccttgcagctcaactactatgtgcgggaggcctttgccagcggttggctcctgctgagaggaaactgagtatgaacgataacattttatgcctttactattcccgcacgggaaacacgaaaaaagccatggaggaggtcgccgaggcgctggactgcgaatgtctcgaaattcgcgacaaggtcgatcgcagcggcacgatgggctaccttcgctgctgctttgacgcgatgcataagcgcacgagtgcggtttcgcgcccgaaatgccagaagccgctgtcggactacaagctcgtcatcctcggcacgcccgtgtgggcgggccgctgttcgagcgttattcgcggctttttgaagcgccgcggctatgagatccagaacgcggcgtatctcatcacgcacaagagcgagcaggactataaggacgtcttccgccagatggacctctatttgcagacgccgcacgtggcggaggtctcgctctgccccgattccgcgggctaccacttctggcgagaccagttcgtcaaggcctgctctgacttcattgcggaggacaaggcctgatgtgggaaaagctcaaacagctcgcgcgccgctatgacgagatcagcgagctgctcgaagtgccggaaatttacgctgacccaaagaagctgcgcgcgctcacgcgcgagcagaaggagctttccgccgtggtggagacctaccgcgcgtaccagaagtgcgaggacgacatcgtgcaggcgctggagcttgtatccgatcccgagctcaaggacatggcgcaggaggaattgaacactgccaaggcggaaaaagagcgcctttttgacgagctgcgcgtgctgctcctgccgcgcgacccgaacgacgacaaaaacgtcattgtcgagatccgcggcggcgtgggcggggaggagagcgcgctttttgccgccgacctctaccgcatgtatgcgatgtacgcggaaaagcgggggtaccgcgtggagctgctcaactacaacgatacggagttgggcggcgttaaggaagctgactttatcgtcagcggcgatggggcgtattcgagattcaagtttgaatccggcgtccatcgcgtccagcgcgtgccggagacggagtccggcgggcgcgtgcacacctcgaccgcgacggtcgccgtgctgccggagatggaggaggtcgacgtcgacctccggcccgaagacattgagatgcaggtctaccgcgcttccggcgcaggcggccagcacgtcaacaagacgagctctgccgtgcgcctcatccacaagccgacgggcatcgtcgtttcgtgtcaggaggagcgctcccagctccagaaccgcgccaagtgtatggcgatgctcgcgagcaagctctacgaggctgagcgcgagcgcgtggagggtgcgatcacgagcgagcgccgcgcgcaggtcggcagcggcatgcgcaacgagcgcatccgcacctataacttcccgcaaaaccgcgtgactgaccaccgcctgacgggcgagaacaagaatttcaacatcgacgccgtgatgaacggcgatttagaccccatcatcgacgcgctcacgatgcaggagcaggccgaaaagctgcgcgagagcaccgaggcttaagaaagaagagagaacattggagacaaaatggtttaccctccgcacggtggaggataaagagagcatcgcgcaggcggcggacattctgcgccgcggcgggcttctggccatcccgacggagacggtctacggcctcggcgcggacggcctggacgagaccgccgtgctgcacattttcgaggccaagggccgcccgcaggacaacccgctcatcctgcacattccagatgcaagctggcttacgagctactgcgaggatgtaccggacgcggcctacaagctggccgagcgcttctggcccggcccgctgacgataatcctgaaaaaaaagccctgcgtgccgctgcgcacgaccggcgggctcgagaccgtcggcatgagatgccccgaccatgccgtgacgcgcgccatcatcgaagcgtccggcgtgccggtcgccgcgccgagcgcgaacacctcgggccgcccgagctgcacgacggcagagcacgtgcgcgaggacatgtggggcaagatcgacggtatcgtcgacggcggcccctgtcaggtgggcgtggagtcgacgatcatcgacctgacggtcacgccgccgcagctgttgcgcccgggcggactgccgcttgagagcctgcgcgatgcgctgggcgaggtgacggtcgacagggccgtgacgcagaagatgaatgacggcgaaaagccgcgcgccccgggcatgaaataccgccactatgcgcctaaggcccccgtcacggtcgtgaccggcggggcgaaggcgagcgcgcgctatctgctcacacacgcgggcgagaagtccggcatcatctgctttgacgagttcacgcggctcttcgacgggcacatcgtccaccccctcggtgcgagcgacgataagcgcgcgcaggcgcagcacgtcttcgacgcgctgcggacgttcgacgagacgaatgtgggcgagatctgggcacagtgtccggacagtaaaggccttggccttgccatcggcaaccgcctcaaaaaggccgcgggcttccatgtggaggacgcggacgacggcaagatcgtcatcggcatcaccggcggcacgggcgcggggaagacgagccttctgcgcgcgcttgaaagaaagggcgcatgcgtgctcgactgcgacgcggtctatcacgagatgttaaaagatgacgagccgctgctgcgcgcgctgcgcgaggcgttcggcgatgtcatttttccgcaggacggcagcgtggacgtccacgccatcggcctgatcgtcttcaaggacagaaaaaagctcgccgagctcgacgccatcgtgcacgagcgcatcccgcgcgcgctggcgcagaaaatggcggcgacgaacgcggagatcatcggcctcgatgctatcaagctcatcgagagcggccttggcgcgatctgcgacgcgaccgtcgccgtaacggcgcctgaagaggtgcgggtcaagcgcatcatggcgcgcgacagcatcaccgaggagtatgcaaggtcgcgcatcgcggcacagaaggacgcggactatttccgcgcgcagtgcgattatgaatttgtgaacgatctgccgaccgctgaaaaggcggaacacgcggcagaggtctatatcaacacgatcatcaacaatttgaaggaggaaactgagagatgagtgaaaagaacaagctcgctgaaaaactgctctacgcccccaagaatggctatgaccgcctgagcgcagaggatgaaaaagcgatggaggcctattgcgaggactacaagaagttcctcaacaacggcaagaccgagcgcctttgcgtggagtactgcatcgagctggcggaaaagaagggcttcaaggcctacgaagcgggtatgaagctgagcgccggcgacaaggtctacttcaataaccgcggcaagggcatcatgctcgctgtcatcggcagcgaggacttgagccacggcgcgaacatcggtgcggcgcacaccgactccccgcgcctcgacttaaagccccgcccgctctacgaggaggccgagatggcctacttcaagacccaccactacggcggcatccgcaagtaccagtgggtgacgatccccctcgagctgcacggcgtcgtcgtgctgcgcgacggctcgaaggtcgacgtccacatcggcggcaaggaggacgatccccagttcatcatcaacgaccttttaccgcaccttggccgcgagcagggcaaaaagccgctcaacgaggccatcccgagcgagagcttgaacgtgctgctcggcggaaagccgtttgaagataaggactgctccgaccgtttcaagctcggcgttctccagtatttgaacgcgcagtacggcattacggaggaggacttcatctccgccgagctcgaagtcgtccccgccggcaaggcgcgcgacatcggctttgaccgcagcttcatcgcgtcctacggtcacgacgaccgcgtctgcgcgtatgcagagcttgcaggtatttttgacgctgtgtccccgaagaagaccgcggtctgcatcttcgcggacaaggaggagatcggctccgagggcgtgtccggtatgctgtctcaggcgtttgagtggttcatgggcgacatgtgccgcacgcagggcgtcgcgctttctgactgctttgccaactccttctgcctgagcgcagatgtgacggcggcctatgacccgaactttgccgacgtgtacgacaagcgcaactccgccttcgtcaattacggcgtggcgctgtgcaagtataccggctccggcggcaagggcggcgcgagcgacgcaagcgccgaggtcgtcggcaaggtgcgcaggctgatgaacgacaacggcgtcttctggcagatggccgagatgggcaagaccgacgcaggcggcggcggtacggtcgccaagttcatggcccagcgcaacatcgacacgctcgacgcgggtgtgcccgtgctctcgatgcacgcgccgtatgaaacggtcgccaagctcgactgctacatgacctacaagtgtatgaaggccatctttgagcaggcgtaaggaaatattctgagattccgagaagcgctctcccacgtgccgtgggagggcgttttctgccaaaaagtcatacaatgttgaacaaattgtaaagtttcctgcggttttgcttgcataagcgagtgtggcgtgatattctgtcaaaataccaaaggatcaggaagggaagagagtcatgctccagttattcaccgatacgtccgcgaacctgccagtcgcgctgacgaaacaacaccacatcaccgtcgtgccgttttcctacacggtggatggaaaggagacggactatcccgatgatgtggatttcgacggcgcggcgttctacggcgcgatgcgccgcggcgcggtcgtcaagacctcaatggtcaatcccgccctgatggcgaattactttgagcgtgcgctctctcagggcgacgatgtgctctacgtcggcatgtccggcggcatcagcggcacggcgcaggccgcggtcatcgccgcgggcgagctgacggaaaaataccccgcgcggaagatcgtcacgatcgacacctacgccgcctcccttggcgaggggttacaggtgctcgaagccgcgcgcatgatcgaagagggaaagagcctcgatgagatcaaagcgcatctcctttcgagaagaccgcacatgtgccagtttttcacggtcgacgaccttgcgtacttaaagcgcggcggccgcatttcgagcgcgacggcgctgatcggcacggtgctgagcatcaagccgattttgtgcggtgacgagacggggcacatcgtctcctgcggcaaggtgcgcggcatgaagcgcgcctatcaggagcttgcgaattattacgacggccgcgcgctcgacaagagcgagatgctcggcatcgcccacgcagacaatgaagagggcgcgcaggcgctcatcgcgctgctgcgggacaagggcttcaccggcgaatgcctgaacgtggtctacgagcccgtcaccggcgcccacgtcggcccgggaacggtggcgctgttcttctacggaacagaaaagtgaacataaggagcgcccgaagggaaaccttcgggcgctttttctatggtagactttgcgcaaaagacctgatatgatgacgaaagagagattttgagagaaaatgggaggtatttatgaaaaaaacgtgtctcatcagagcgctgctgctcgctgcgtactgcgtaccgtttgcctacctttctgtgaagggtgacgttacttcggggacgatgctatattacggcgtgatgatcgtcagctttgtgattttgtaccggtgcgcgctgaaaacaaataacgttcccatcatttttatcgggaatatactgagctttatgtcctcctatttgacggcaaagctgtcgcagttagacccgatggaatggtattgcaagccgtttacatcccactctctgattgtcgcgatatcggtcgcgtccctcatcatccatgcgatcatcgtatggagaagaggcagaaagcagaggaacgcacaggggtgtgacagaacatgaagaaacacaaaaaagcgatgatcgcactgctgatcgtagccctgttcggtatgatattggcctgcatttcttcccatccttttgtttcacgcaggtgcgaggtgccggaggagtatgtcgctgagatctgcgcgcagtcgatgggagtttactcaaagaaagtgcccttgctgccgatttacatttccatcgagcagttttcagcgggacgggcctattatacggttcactatttcccgtttggaacgcttggcatgtcctatagtttgaccgacggattttgccaggaaaatccgctgacgggcctgcaataagatgaatcggcagaaccggctgtttttccactggatttttgcgcacgcttctgttatgataaacgccaaagaaacgccatggatcggcattgcgttcaaaccgtcagcaaaggagaaacgaatatggaaacgatacaggccatcagaagcagaagaagcatccgtaagtaccagccaaaacccgtttcgcacgaggtcatcgagcagatcgtcgcggacgcggcctacgccccctcgtggaagaatacgcagatcgcgcgctatgtgctcgtcgaggaccgcacgacgatcgataaaatggcggaggagatggtgcttgatttcaagctgaacgagaagacgctcaaaaactgccccgccgttatggtgcttacctatgtgaccggccgctcgggctacgagcgcgacggctcgttctcgacgccgaaggaggcgggctttgagatgttcgacgcgggcatcgccgcgcagacattttgtcttgccgcgtgggagcgcggcgtcggcaccgtcatcacggggtacttcgacgaagagaagatcacgagacttttgaacctgccggagaatcagaaggtcggctgtgttatcggtcttggctatcccgatgaggagcccgccgcgccgaagcgcaagagcgtggaagatttgctgacgtacaaataaaaagctgcaagcgcccgaggaaaacgccctcgggcgctttttcgcttgattcggacaatgctttctggtaaaataagcagtataaaaatatagaaaaatgagagatatggaggccataagatgaaaaaatacagcttatcggttatttgcgtagtgctttttgccctgctggctggatgcggcaacaaggaaacgtcaaacataacggtcgattatggcgattcggctgtctacacagaacaggatatggatgatgcgataaaggtgatcgaagagatgatcggttcgtgggaaggctgcgaattacatagcatttcatattcgtcagatgacgtctgcacggatgaaaagaacctttcgtggatgaatgatttggaaaaggcaaatgacaacgatctggcttttacacaatgcatcatgttcgacagcagctttcgctctccgaaagagggcggcggagcttgggagccggacacggaatacacatggtcctggtggttggctcgcagcgatggcggggaatggaaactgatgacttggggatattaaagtgcttcccggtttgaggctcgtatttccgacggcacaaagggtatgcttttcgcgctttctgcaaatcctaccggaaaggactttcgggaggactttgccatgagaagcgaaacgaaaccctcgcaggacgaggagaaaaacgggcaggagccgctgctgccgcccattcagccggtcattgacttcggctcggtcgtcatcaaaaatagccgcgcggccatccactgcctgacgatcgccggacagatcgagggccacatgcagctgccgaacacgcagaaagcgacgaaatacgagcatgtgctgccgctgctggcgtatctggaggagagcgacgacatcgacggcgttttattcctgctcaacaccgtcggcggcgatgtggaggcggggcttgccatcgccgagctcatctcagggatgaaaaagccgacggtctcgctcgtgctcggcgggggacactccatcggcgtgccgcttgctgtcgcgccgatggtgacgatgatcgcgccgtcggcgtcgatgaccatccatcccgtgcgcacgagcggcacgatcatcgccgcgccccagacgtaccagtattttgagcgcttgcaggagcgcattgtgcgctttgtgacgaaaaactcacgcatcgggcgcgacgagtttttgcgcctgatgatggacacgcaggacctcgcctctgacgtcggcagcgtgctctacggggaagaagcagcggcctgcggcctcatccagcgcatcggcagcctctccgacgcgctcgacgcgctgtatgtgctcattgacgaaaagaagaagtaaaaagcctcgcagagtttcgtgccgcgcacggcacgaaatcaattcaaatccgttttctgccgcgacatgtgcgccccccagaggggcttctcttgcccgctgcggggcaattcaccttctggcagaaaacactttgcgcggagcggaaaacggtgaagcgccgtctgtgacggaaacagcaagccgttttcgaggaagcggcacgattggcgcgcctgaaagggcgcgggaatcgtaatgccgcaacggtgcaatgtcgcagacgccctttgggcggcaaggcacgaagcgcagcgaaactttctcaaaaaagctgccttggcagcttttttgaagacaaagaaagacgccttcgggcgtctttttgcgctttgttcatcgaatccacttgaaaagacggcggaaaaatggtatatagtattagtcaaaatgtgtcattatacccttatcgtgggggatgacgcctttttccaaggaggatatcgctcgtgtacttaaaggcattggagatccaagggttcaagagcttcccggacaagacggtgctcaacttcggtgaggacatcaccgccatcgtcgggccgaacggaagcggcaaatcgaatatttcggacgccattcgctgggtcatgggcgagcagtcgagcaagtcgctgcgcggcgtgaagatggaggatgtcattttcggcggcacggaaacgcgcaaccagatgggctttgcgcaggtgacgctcgtgctcgacaacaccgagcacatcttccccagcatggaggagaccgaggtcgccgtcacgcgccggtactaccgcagcggcgaatcggaatactacatcaacaagcagtccgtgcgcctgcgcgatgtgaacgagctgttcatggacaccggcatgggccgcgagggctattccatcatcggtcagggccgcatcgacgaaatactctcgcagaagagcggcgaccgccgcgagatctttgaagaggcggcgggcatttcgcgcttccgctaccgcaaggaggagacggaacgtaaattggagcgcacggaagaaaacttagtgcgcatcaacgacaagatcgccgagctggaattgcaggtcgaacccctgcgtgcgcaggcagagacggcgaagcagtatcttatctaccgcgacgaactgcgccttttggaaatttccgtgtggcttgaaaatctggaaacgctcaagacgaacgccatcaagctcgacaccgacctgtcgctcgcgcgcgaggagctcaaaaaggcgaacgcggacttagaggcgctgtacgctgcatccgagcagttctccgcgcgcatccacgagaatgacatcgcgcaggaggaaaagcgcgcgcagctctcggagctcgacgcgcaggttaaagagcaggaatctgccgtcgcggtgctgcaaacgggcatcgcgcacaacgaagagaacatcgcgcgcgtggaggaggaactcagaagccagtctgaccgcgtgggatcgatggatgcgcagattgcgcagcagcgcgcgcgtatcgaagagctggaacggagcaaaaacgaagtcgaaacggcgctttcttcgctgctcaagcaggcggaggagctgtcgagaaacgcgggcgaggccgcgagcgaggccgagaccctgcgcgggcgcgaggcgctcgccctgtccgccgcggcggacagccgcgccgaggtcgcggccctgcgctcgacgctttcggaaatggacgagcgcgagagcgccattgccgccgagcaggagagcggggaggcccagctttccgaaacgcgcaaaagcgctgcggagaaccgccgcgcgctcgaaagtgcgcaggaggaagccgacgccatccgcaacatcatcgccggccacacgatgaagatgcagggcagaatcgaacgagagaaggagacgggcgagcagcacgtttccctcacgatggagatgaacaacttagactcccgcatccgcctgctcggcgagatggaaaaggagtacgagggcttcaacaaggcggtgcgcacggtcatgcaggcgtcggagcgcaaggcgctgcgcggtgtgcgcgggccggtcgccaacctgatgaaggtcggcaaaaaatacgccgtcgcgatcgagatcgcgctcggcgcgggcttgcagaacatcgtcgtcgagcgcgaggaggacgcgaagagcgccatccaactcttaaagcagcgcgacggcggacgcgcgacgttcctgccgctctcgtcgatccgcggcgaggcgttgcgcgatgcgcgcgtgcagaacgagtacggctacgtcggtcttgcgagcgagctggtggaatacgaccgcgaatacgacggcattttcaagaatctgctcggccgcacggtcgtggtcgaggaccttgactgcggcatcacgatctcgcgccggttttcgaacgcgttccgcatcgtgacgctcgacggccaggttttgaaccgcggcggctcgatgacgggcggctcgatctctcgcagcgcaggcattctgagccgcgcaggcgagctgcgcgagctgacggcgcggcgcggcagccttgccgaaaagctcgaccttgccgccaaggccgccgaggacgccaagcgcgagcttgccaaagcgcgctacgagctggaggtcgcacagggccagcagcgcgcggcggaggacgccgtgctcaaattgcagggcgataaaaatcattatgacttattgctctcgtcgctgcgcgagcggctcgagagtttggataccgagcgcgagaccatcgcgcgccgccgcggcgaagtgaagcgcgtggcggaggaaaaggaagcgctcgcgctttcgcaggagaaggaagcgggcgagctgcgtgcacaggcggaaaagagcctttccggccagagcgagctgctgcgttcgacctcgcgcctcggcgacgagatcgccgagaaaaagagcgtactcgcaggctatgccgccgagcgcgagacgacggagaagtcgctcgcaagtttggagagcctgcgcgctcagatgcagggcgacgagcagagcagacgcgcgctcatcgagcagtacagggccgcgagcgagcagtcgcagcgcgagatcggcacacatgagactgagatcgccgcgctgagcggcaaaatgacggaaaagcgcgccgagctcgaagcgctttccaaagcgaaactcgcacttgaagccgagcgcagccagagcgaccgccgcggccgcgagctcaacgaaaacgtgctcaatgtcgagcgcagcgtcagcaagcttgaacagaagcgcgcgacgagcgcgatggaggagcagcagatcctcgacaagctgtgggaaaactacgagctgtcgcactccgccgcgcaggagcagcgcatcgagctcgagagcgtcgccaaggcgagccgccgcatcggcgagctcaagcgcgccatcagcggtcttggcgcggtcaacgtcggcgcgatcgaggaattcgagcgcgtgaatacgcgctacacttacctcacgacccagcgcgacgatgtggaaaaggcgaagggtgagcttgtcggcgtgatcgacagcatcacaagcgagatgaccgtcatctttaaagaacagttcgcgctgatccgcgagagcttccaggagacgtttttggagctgttcggcggcggcaaggccacgctcgagctcgaggacgagaacgacgtgctctcctgcggcatcgagatcaaggttcagccgccgggcaaggcgctcaagacgatcacgctgctctcgggcggcgaaaaggcgttcgtcgccatcgcgctgtacttcgccatcctgaaggttcatccgacgccgttctgcgtcatggatgagatcgaggcggcgctcgacgagccgaacgtggtgcgcgtggccaattacatgcgccgcatcacgagcaaaacgcagtttatcgtcatcacgcaccgccgcggcacgatggaggcagcggacgttctttacggcgtcacgatgcaggagcgcggcgtgagcaaggtgctgacgatcaatatgaacgacatggcgaaggaactcaacattaaggaataaagcgcgaggagaaacaaatgggtatttttgcaaagatcaaaaaggcgtggtttgacaccatcgtgtgggagaccattgacgacgaattctatgacgagcttgaggacagcctcattatggccgacctcggcgcgacggtcgcgcacgacgcggtgaaaaagctgcgcgacgtcgtgtaccagaagagcatccagcgcggcgacgatgtgaagcaggcgctgcgcgagatcctcatcgaaaagctgaacgtgggcgacaccgcgcttgacctgtcgaccaagccgagcgtcgtgctggtcatcggcgtgaacggcgtgggcaagaccacgtccatcggcaagatcgcccaccgcctgaagggcgagggcaagcgcgtgcttttatgcgcggcggacacgttccgcgcggcggcggcggatcagcttgaaatttgggcaaaccgcgccgagtgcgagatcgtccgctcggtcgaaggcgcggaccccggcgcggtgctgttcgactcgctcgccgcggcgaaggcgagaggtgtcgacgtcgtcctctgcgacacggcgggcagacttcacaacaaggtgaacctcatgaacgagctctcgaagctccgcaagatcatcgaccgcgagacgccggacgccgcgaaggaaacgcttttggtgctcgacgcgacgacggggcagaacggtcttcagcaggccaaggtcttccgcgagacggcgggcctgacgggcattatcctgacgaagctcgacggcacggccaaaggcggcatctgcgttgccatcgcgcaggagctgggcgtgccggtgaagtacgtcggcctcggcgagggcatcgacgatctccagccgttcaacgcggaggaatacgtcaaggcgctcatctgatgggaaaatcataaacctgcgagacaataaggagacgaatatggaaatcacttctgtttgcccctattgcggaaaggaaatgcgagatggagccatccctgtcttgcgtgatatttactggtgtccaagaggtgaggacggcatgctcaaagacggatttggcgacgagaaggaacaggtctgtcttggcagagcggggctgttaggagattattacacgcccgcccgttactgtgagagctgcaaggtggtcatcgtgcccgtgccggagatcgagtggccgctcgataagctcgacaaaaagttcacggcatggcaggaaaagatgagcgcgcagcgcgaagagcgcaaggcgcagcgcgaggaagaaaagcgggaagaaaaaagcagaaagagacgggaaaaggacccgtgggaggtttgacgatgaaatttgttttggcaacgcagaaccccaagaaattgaaggaaatgagcgctattctgggcgagctcggcgtggaggtcgtgtcggaggccgacctcggcgtaaagatcgaggtggaggagacgggcgagacctttgccgagaattcgcttctcaaggccaaggccgtcatggaggcgacgaagctgcccgccatcgcggacgattcgggtctgtgcgtcgacgcgctgaacggcggccccggcgtgtacagcgcgcgctttggcggcgaggggctggatgacaccggccgctaccgcctgcttttgcagatgatgcacggtcaggccgaccgccgcgcccacttccacacgacgatcacctgcgcgttcccgaacggcgacgtcttgcaggacgacggcgaggtcgagggcacgatcgcgttcgctccgatgggcgaaaacggcttcggctacgatcccgtgttcttcgtgcctgacaagcgaaagacctttgcacagctcacggcggaagagaaagcggagatctcgcaccgcggcaaggcactgcgggcattcaaggaaacgctcaagaattatcttgcggaacatcaataaaaaggataaggaaatactatggaattaagcagcaaacagcgcgcgtatctgcgcagcctttccaatgacctcgacgtgatcgtccacatcggcaaggacggcatcggcgacaacctcgtcaagcaggcgaacgatgcgctggaggcgcgtgagctcatcaagtgccgcgtgcttgaaaacagcatgctcaccgcgcgcgaggcgtgcgacgagctgagcgccttgacgcgcagcgagcaggtgcaggtcatcggcacgaaattcgtgctctaccgcccctcgcacaaaaaggacaagaaggacaagatcgtgctgcccaaggcagcgaagaagaccgtgtaaaagagaaaaagaggtcgaacaaacttgaagatcggaatttacggcggcagcttcaacccgccgcatctgggtcatatggccgcggccgagagcgcggcaaaatatctggggctcgacgagctcctgctcatcccggcgggtatcccgccgcacaagatgctctccgccgacgcggcaggggcggacgaccgccttgcgatgacgcgcctgatgggcgagcagatcgcgctcgacacgggcgtaaaggtcacagtctccgacatggagatcgcgcgcggcggcaagagctacaccgcggacacgctgcgcattctgcatgaggagcatcccgacgatgagctgtggcttctgatggggacggacatgttcttgacgttccagtactggtacaagccggacgagatcgtgcgttatgcgggcctgtgcgcctttggccgcacggaaaaggatggcgaggagcttttcgccccgcagcgcaagtacctcggccagtgctttccgggcagccgcgtcgtgacgatgacgctgccaaaccttgtcgacgtctcgtcgacggagctgcgcgcgcgcatcccgaagagggaaacggatgggtttctggcccccgcagtgctgggatatatttaccgcaagcatctatatggaacaaatctcgatttaaaacgtctaaccttagaggacctgagacccgtcgcgctctcctacctcaaggccaagcgcatcccgcacgtgctcggcaccgagcagacggccaaggcgctcgcggaaaagtacggcgcagacgtcgaaaaggcgcgctttgcggcgctcctgcacgacgcgaccaagcgcctttcgatggaagagcagctcgcgatgtgcgagcactaccacatcgaactcgacgagctggagaaaaaggcgctcaagctgctgcacgccaagaccggcgcggcgctcgcgcgcgacatgtacggcgcggatgacgagatttacaacgcgatcctgtggcacacgacgggcaaggcaaatatgacgttacttgaaaaggtcatctaccttgccgattacatcgagccgaaccgcgacttcgacggcgtggaggacctccgcaaggtcgtgtgggaggatctggacaagggccttgaaatgggccttgccatgaccgtggaggaaatggagcagatgggcaaccccgttcaccacaacacgctgcaagcgctggaatatctgagaggacatacccatgagtgatcaaagaaagctttacgagagagactgggaagacccctattacgaggggcggcacacgcaccggaaagagggctttttcgagcgcaactgcgacgaggcctgggagcaggtcaaggagaccttttcccacccagggaggctctttgccaaggtgctgctcatcgcgctgctgtgcggtgtggtcgccggcggcagctatctgctgaaaatccgcgcgccggagctgccgagcaaggacactgacagcaagaataacaatagtgagcagatcgacgatatcgactatggcgacggcgtgcgcccgcgcgcggacggcgagcgaaagagcaaggatttctacaccgtgctcgtcctcggacgcgacacgggcggcggcggcaacaccgacacgatgctgctcgcgagctacgacgtgacgaaccagaaggcgaccgtcatgtccatcccgcgtgacacgatggtcaacgtcccctgggacatcaaaaagatcaactccgtctacaactactacggcgcgggcgagaagggcatcaaggcgctctataaggaggtttcccagctcgtcggctttgagccggactatcaggttattatcgaatgggacgcggtcggcgcgatcgtggatgccatgggcggcgtttactacgatgtgccgcgcgacatgaactacgacgacccctatcaggacctgtatatccatcaggccaagggctaccgcaagctctctggcgaggacgccatgcaggtgctgcgctaccgccacgacaataaggacccggtgacaaggaagagacgtggttatcttgatggggacattggccgcatcaagacgcagcagggacttctgaaagcgatgatcgagcagcttttgcagctcaagaacgtgacaaagatcggcgaatttgcccgcgtggtgaagaataatgtcacctccgacctcacgtttgaggaaatgctctggttcggctcgcaggccgtcatgggcgggctcaaggtcgacgatgtgaatttcgtcaccatgccgaataccggtaaatacatctacagccgctccatcggcgagccgctttcctatgttgtgccgaacgcgcaggagcttttggacctcgtgaacaacgagctcagcccctttgttgagaagttcacgatgagcgaccttgacatcatgtccgtcaattcggacggctcggtgtcctcgtccacgggccatgtggaagacagcaaggcggccaggccgcagaatcaccagtcctcctccggctcgcagaccggcacgggggatggcagcgagaccaccgaccccggtacgaccgac

SEQ ID NO: 10166 - DNA, 7648 bp, Unknown
  gut microbiota DNA sequence
tggcgataacagcggtacgaccacgccaagcgagcccaccacgcccgacaccggtgataccggaacgaccgacccaagcacgggtgacggcagcaataccggcgacagcggaacaagcggcagcgacgagatgcctgattggctgcgcccgtaatgtaaaagaataaaaaagatcaaaaactcaaaataagaaaaggagaccccctatgttaccttccagagaattggccgagatcgccgtcaaggcactcgacagcaaaaagggtaaggagatcagactcatccgcatcgacaagatcacgacgctcgcagagtactttgtcatctgcaccggtacgtccaacacgcagatcaacgcgctgtgcgacgcggtggaaaaggaactgaccgaaaagggcgaggagccgctgcaccgcgagggctaccgcggcggcacgtgggtcctgctcgactacggctgcgtcgtcgtccacgtcttcaacgacgaggcgcgcaagttctattccctcgagcacctgtgggccgacggcgaggaagtcgacctgagcgccatcctgccccacgccgaggaaaaataacgcttgacaaggcgggacaaaacgcctaaaatggtcatgctgaatttatgcaaaacgcgatgacggagcaaaaagacgcgtgattttcacctgaagagagccggcggtcggtgcgagccggtgggagaatgcgcgtggatgactcactcccgagcagtccacctgaaagggcggaacggtcgcccccgttacgggcaaggctatgaagccgctgagggctcacgggaaaccgtgcgctgaatcagggtggtatcgcgtaatgtgttcgttacgtccctgaccgtttgaaaaacggtcagggactttttttcgcgtcaaaatactatttcacataaaggagaagatccatgaagtacgatttcgcagccattgagaaaaaatggcaggacaagtgggagcaggtaaagccctacgccgccgtgacgggggacaagcgccccaagttctacggcctgatcgaattcccgtacccctccgccgcgggtctgcacgtcggccacccgcgcccgttcacggcgatggacatcatctgccgcaaaaagcgcatgcagggctacaatgtcttgaaccccatcggctttgacgccttcggcctgccgacggagaactttgccatcaagaaccacatccatcccgccatcgtcacgcagcagaacatcaagaacttcacccgtcagctcaagatgctcggctacggcttcgactgggatcgcgtgatcgacacgactgacccgcagtattataagtggacgcagtggatcttcctccagctgttcaagcacgaccttgcctacaagacgacgatgcccgtcaactggtgcacgagctgcaagtgcgtgctggccaacgaagaggtcgtcgagggcgtgtgcgagcgctgcggcgcgcccgttatccgcaaggaaaagagccagtggatgctgcgcatcacgaagtatgccgaccgcctgatcgacgatctcgacgacgtcgactacatcgagcgcgtgaagacgcagcagcgcaactggatcggccgctccaccggtaccgaggtcacgttcaagaccaacaccgaggatgatatcaccgtttacaccacccgtgtcgatacgctgttcggcgtgacgtacacggtcatctctcccgagcacccgctgcttaaaaagtggaagagcatcatcaagaactgggacgaggtcgaggcctatcaggctgccgccgcccgcaagagcgactttgagcgcggcgagctcaacaaggataagaccggcgttcgcctcgacggcatcgaggtcatcaaccccgcgaccggcaaggttgtgccgatgtttgtttcggactacgttttgatgggctacggcaccggcatcgtcatgggcgttccgggccacgaccagcgcgactgggatttcgccaaggcgttcggcctgcccatcgttgaggtcgtcgagggcggcgacatcacgaaggaggccttcacgctcaaggatgacacgggcatcatggtcaactccggcttcttaaacggtatgaccgtcaaggaggctatccccgcgatgaagaagtacgccgtcgagcagggatggggccatgaaaaggtcaactacaagctgcgcgactgggtcttctcccgccagcgctactggggtgagcccatccccctcgtcaactgcccgaagtgcggctgggtgcccgtgcccgaagaggagctgccgctcgtcctgccgcaggtggacagctacgagctgaccgacgacggcgagagcccgctctccaagatgaccgactgggtcaataccaagtgccccaagtgcgggtgcgacgccaagcgcgagaccgacaccatgccccagtgggcgggttcttcgtggtacttcctgcgctatatggatccgcacaacgaccatgagcctgtctctcacgaggcggaaaactactggggccctgtggactggtacaacggcggcatggagcacaccacgctgcaccttctctactcccgcttctggcacaagttcctctacgacatcggcgttgtccacacgaaggagccctatgccaagcgcacgagccacggcatgatcctcggccagaacccgcactacgtcggcaacgtctccacgcaggaggagaaggacgcgctgatcgccaagtacggcaatcaggcgctgcgcccggcggtcaagatgagcaagtccctcggcaacgtcgtcaaccccgatgatgtcgtcaaggcttacggtgcggacacgatgcgcctttatatcatgttcatcggcgactttgaaaaggtcgccacctggtcggacgatgccgtcaagggctgcaagcgtttcttagaccgcgtgtggaacctcgccgatcaggtgacggaggaagatggcgtttccgaaaagaacgcgcccatcgtccacaagaccatcaagaaggtcacggacgatattgacacgctgaagatgaacactgccatcgccgccctcatggccatggtcaacgagttctattcgaacggcctcagccgcggcgactttgaagcgctgctgctcatgctctctccgttcgcgccccacatggtcgaagagctgtgggagcagaagggctttgccgccaagtacgagggcaagatggcgatgcagtgcgcgtggccggagtatgacgagagcaagaccgtcgcctcctccgttgagatggccgttcaggtcagcggcaagttcaagggcacgatcatcgtccccgtggacagcgatcagaatactgttgtcgaagcggcgaaggcgagcgagaaggtcgccaaggccatcgccggcatgcagatcgtcaaggtcattcacgtcaagaacaagctcgtcaacctgatcgtgaagccctgctgagcggaatttcggattttttcaaaaatatgaggaaagattattgacaagccgtgatttttctcatataataccaccgttagtcatgtgaatgactcttaaagagcgcccaggatcaagccgggtgtatcggagggagggaaaatataaatgtccgagatccatgtcaaggagggcgagtctctcgatagcgcgctcaagcgtttcaagagaagctgcgccaaggccggtatcgtggcggaggtccgcaagagagagtgctatgaaagccccagtgtcaagcgccgcaagaagagcgaagccgcccgtaagaaccgcaacaagcgttattactaagatcctatgaaaaaagacctgtcacagtcgtggcaggtcttttttacacccttttccaaaggggtgccctgattttcccgcgcgagcgcgggagggggagcggcgtgcgcgccgcggcaccaaagggggtattctctttccgaagagaataccccctttgaatcccccagagaaaggcgaggggagtccccctcgacccccggcattggcagtttatagcttgaatgactgcacgcgctgcgcaatgtaagtgcggtgtacatggcttcgccatgaatcttctgcgattcgtaactactcgcaaccgcgccttactgccgtgaggcgcgagtgacgttacttcggcggcagactgcgtgcggaatgcggcattgctgcgctcgccgcattgtggagactggcggtagacggaaattagtccgcactcctacaagataggcagagcaacagcgggtagtaggagcagaggcaaatcgtatagcaacactaaacgcggcaacgccgcgctatgggcagtgcaatcggcaagcattgcagctcttcgagctgctcgtttgcaatggcggggtcaaggggcagagccccttgcgttctcttgggggtccaagggggatattctctcacgtgagagaatatcccccttattccgtgcagcgccattggcgctgctttccccgcggcgcagcgcgccgcttaaagctctgggagcaggtcaacgatctcagggaacatgagaaacgccgtctgaatgcctaaattctgcgcaagcttgaccttttgccgcaaggtctctgcatcgtcaaacagcacgaagtgcgtgccatttcccgcggagtaggtgaaatacttcgccatcagctcgcgggaaaaatagacggacgatggatgcttttcccgcagggcgagcagctcttcgcgcgtgagcggtgtgccgcagccggagggacaggggaggggaaagtccatcattacgcgttccaagtcgagcgccagacgctccgcgccatagcggcaggcggtttcctccagcagcgcgcgcagcgacccgccggaaaggcccgtgccgacgaggagcgctgcgccctcggccgggagcgagagggggcagtagagcgccatcccctgcgcactcaggcgggcggagagacgcgaaagaaacgaaagccggtcagaatacggattggtctcaaagtccgccagcacgccctgaaagccgcgcctgacgcattccgcgacgatggtgcggcagagcgtgtcgatgcgtgggatcgccccggtgcagcggtcggaaaggcccatgagcccgccgcgcgggaaggccgttgcgtcgcagcgcgtcaggcatccgccctgaccgacggcataggccacgtggacgagcggcagtgcgggccttgaggcacactcagagagcgcctttggcgtgatggcgaggtaggtgagcagaaaaatccccccttgtgaaaagcgcgttcggcgcgtataataaccgtaatacttttatgcgcgatgggagaccgatatgctcagatttctttacccgcaatgggtgtttgacaattacgaggccgtgacgccggaatttttgaaagagcatggcgtgaagctgctcctcgctgacctcgacttcacgctcgcgcccaaaagccagagcgagccggacgagtcgctcacgcgctggatcggcgcgctgaaggaggcgggcatcgagtttgcgattttgtcgaacaatagaagccccgtgcgtgtggaaaagttctgcaagccgcttaaagtcggctacgtcggccacgcgggcaagcccggcacgcgcggctttcacgaggcgatggcgcgctacggcgtgaacgcgggggagacggcaatgcttggtgacaagctgctcaccgacacgctcggcgctcggcgcagcggcgttctgatgctgatggtcgagccgcgcggcggcgcggtgggtgcgtggaaccacgtgctgcatgccctgcagcggccgttcaaggccgcaagcgcgcacgacgagcggaaaaagcactgaaatttgcaaatttcacccacaacatcaagaaaaacacttgcattgccgcactatatgcggtaaaataccataggtttagaaccgatactttgtgaatttgaggatagcgatgatatcctcgggaatacaggaggaaatagttatggcaacgattaccgctggtgagttcagaaacggtaaagtatttgaaatggaaggcaagtactatcaggtcgtcgagttccagcatgtcaagcccggtaagggcgcggctttcgtgcgcaccaagatgaagaacgtcgtcaccggcggcgtgaccgaaacttctttcaaccccaccgcgaagttcgaggaagtggccatcgagcgcaagaacatggagtacagctacaacgacggcgatctgtactacttcatggatcaggagacctatgatatggttcccctgaaccgcgatatgctcggcgatgcgttccgcttcgtcaaggagaacacgatgtgcatgatcctgtccatcaagggcaatgtcttcggcgtcgagccccccaacttcgttgaccttgaggtcaccgagaccgagccgggccttgccggcaacaccgcaaccaacaccctcaagcccgcaacgctcgagaccggcgcggagatcaaggtgccgctgttcatcaacatcggcgacaagatccagatcgacacccgcacgggcgagtatatcggccgcgccaagtaatagacattaagtaagcagcaacaggaaaatcgtagttccggtaacagaaaggagttttacgatgggtatttctgaaaaagtcgcatatctcaagggcctgatggaaggcatgaacctgaatgcggattccaacgagggcaagctgttcctcgcgatcgccgacgttcttgacgagatcgctctcgaagttgaagacctgaccgacgaggtcatggagctcagcgacggcctggacgtcatcagcgacgacctcggcgacgtggaagatatcgtctatgatgaagacgaggacgactacgaggatgaggaagacgacgaggacgacgaagaggagtgctacgccacgacctgccccgagtgcgaggaagagatcttcttcgacgattccgtcctcgaagacggcaaggtcgagtgccccaactgcggcgcgactctcgaattcgaccccgccgaccttgtggaagacgaggaagagaaggacgactaagcgtctgaaaaccgtataaagtaaaggaccgccacagcaggaaactgctgtggcggtttttgctattttgaggttatgaagcggtgtgcttcgtctccactgtgctcttgtcaatgatcaggataacaaggggcacaaggaacatgatcgccaatgcgatctcgagcacggaattcatgcttgcgagcagggaggcatccttccacttgatgtaggatgtcatatttgtggggatatcataaatgaaatgcagcagcatgggaatgacgatgttgcccgacttgagatagatgaccgcaaaggtaaatccgatggcccctgacagaaagaaagcggaggtgctccaaccggtcaccacatgagccgccccaaagacaagaaaactgacaaaggcatagagcagacggctccaaacgcttttattcccgtggaaatatccttccaaaatgaggaagcggtaattcagttcctcataaagggcagtcgtgagctgctgcaataggatccttgcgaaaaacagccctgcggtgaggcctaaaattcccctgcatccgacatagacggcggccacgtagcacagcagaaatacgagaaaaccgagacctgataatatggcaatcttactgttatgaaggcttagaatttcccttg

SEQ ID NO: 10167 - DNA, 1201 bp, Unknown
  gut microbiota DNA sequence
cttgagccgattgacctccttgctgataagatgcgttttaagctgccccgtacaccatcggaccttaacgccgggccagccgtttccgtaaagcggaacgcccagcctttgccggttttcgatggaagatggcttttgcttttcttcctcgaacatcaggtattcaaagccttttgggtgacggagcatggtgatgtggataccacgctcccggtaaaggtagtcatccaccttgcggatatggtcatacatttccggaaattccatgccggtgtctgcccaaaggaccgtgtttatgggcaaacctcgttcaatcatcagcaagagcatagccgtactgtccttaccgcctgagagggacactgcataaaaaatctgcttgttgaatgaaatcacctccaatttgctcatgaaaaaagccgcctgtttcggcggctgcaatacaaaacggcacgggaagccgtgccgttttcattgaaatcttctgttccgacaggcagagcagatccgcggtcattctatgacttcatgttccattcgcaaatacttttcgcgcagataccatgcctgttcaggactgatgatccggtttacctccgcgctattgatgtcgctttgcagagaacagtaatcgcaatcccagagataatattcttcaccacgatccagcttatcccatgcgctgaccatagcttggattgactcctgcaaaaactccggcaaattctgttcccaatcacagtgaccatcggcattgttttttctatcgtcttgcaaagccacttgcggcacctcacttttcgttgatgctcgcatcatagcaacacgccagtccgatgtcaacaaatgccccggcagaagcattatcgactcatctcctgctgccgcttacggtgccagccttccagcagcttgataatgacatcctccatctgctttggggtgtagctggcgggaaagtatttttgcaggcggtcattgcggatcgtgaccttgcgctccagtggcttttcctcccgcatgatgaggtcgatgatgttattttccaattttccctcgccgctgagctgcttgagccgctgggcctgtccaagcgacggggatacttcgtcacgctccatgaccagcaggaggtaggtctgttctttttcggacaggtgggagaggaaatccgccgcgggaacgaacttgagcgttcccg

SEQ ID NO: 10168 - DNA, 2084 bp, Unknown
  gut microbiota DNA sequence
ccacgcaggcatctgcattccggaggcaccaaggtcattcaagatcgagactgccaatctaacgcctttctcttggggttccaaaggggatattctctttcgcgaaagagaatatcccctttgtcccgcactcctgcgcggccgcagggaatctgcaagcatattatgcttgcaataactctcaatacgggatataatatttcattattttgtctgcctcaccgcagacgcgaagaaaggaatggatcatatggctgaggaagtcaagactgccgccgctgagggcgaatccggcagcaaaaattttatcgacgccttcatcgaagaagacatcgcggagggtgggcgcttccagggccagcaggtccacacccgttttccgccggagccgaacggctatctgcacatcggccactgcaaggcgctgaccatcgactttggcaccgctgagcgcttcggcggcctttgcaacctgcgcatggacgacacgaaccccacgaaggaggacgtcgaatttgtcgacgccatcaaagaggacatccactggctgggcttcgactggggcgaccgtttcttctacggcagcgactattttgaaaaggactacgagtacgctgtcgagctcatcaaaaagggccttgcctacgtctgcgacctgacgcccgagcaggcgagagagtaccgcggagacatcggcaagcccgccatctccccgtaccgcgaccgcgatgtagaggagaacctcgacctctttgagcgcatgaaaaacggcgagttccctgagggcagccgcacgctgcgcgcaaagatcgacttagcctccggcaacttcaacatgcgcgaccctgttatttaccgcatccgctacatgcaccatcaccgtcagggcgacaagtggtgcatctacccgatgtacgactttgcgcaccccattcaggacgcgctcgagggcatcacgcactcgctgtgctcgctcgaattcgaggcgcaccgcccgctctacgactgggtggtgaacaacgtttccgtgcccaataagccgcgccagatcgagtttgcccgccttggcatcgatcacacggtcatgtcgaagcgcaagctcagaaagctcgtcgaagagggcatcgtctccggctgggacgatccgcgtatgccgacgctgtgcggcctgcgccgccgcggcttcacgcctgcgtccatccgcagcttctgcgaccgcatcggcgttgccaagagcgcgagcgtggtcgaatacagcttccttgagcactgcctgcgcgaggacctcaacgaaaaggccgagcgcacgatgggcgtgctgcatccggtgaagcttgtcatcacgaactatcccgagggcaagagcgagaccgtcacggtcgagaataacccgaccgaccctgcgtccggcacgcatgagatcacgttctcccgcgagtgctggatcgaggccgacgacttcatggaagtccccgtgcccaagtacaagcgcctgacgccgaacggccccgagtgccgcctcaagggcgcgtacctcatcacctgcacaggctgcaagaaggatgaaaacggtaacgtcgtcgaggtctacgccgagtacgacccgaactcgccgggcggcgatcccgccgacggccgcaaggtcaagggcgcgacgatccactgggtcgacgccgcgaccgcgctggacgccgaggtgcgtgtttacagcgagctgttcagcgaccccgcacccgacggcgcggacaaggatttccttgcctgcatgaaccccgattcgctcgaggtgctgaccggctgcaaggtcgagccgcgcatgcgcgacatcgccgcggcgtacgacaagaccgaaaagaagggcaagaccgcgccgaacttccagttcatgcgccttgggtatttctgccttgataacaaggattgctccgaggatcatctggtgttcaacagatctgtgacgctgaaagacagctttaaaaaataaatctgcaccggtgcaggggcggaaatttccgcgctgcgcggaaacgggcaaataaagggggatactctcttttcgaagagagtatccccctttaaatccc

SEQ ID NO: 10169 - DNA, 22994 bp, Unknown
  gut microbiota DNA sequence
gcacgcgctgcgcaatgtaagtgcggtgtacatggcttcgccatgaatctctgcgattcgttaccagtcgcaaccgcgccttactatcgtgaggcgcgagtgacggtagttgggcggcagactgcgtgcgagcggcattgctgcgctcgccgcgctggggatttttttagttttctgctgaatcggtactgccgataggctcgtcggggatgatatcatgtgtgatgacttgttcttctgcgtctaacagggcttttttcaggacttcacgggcaagaatgcccttgccctcatcgtaaagatcgatggcttcgctcatggagcgtaccatcaggtggtagagacttttataagttgtcatagtgcatccctccttgatggcattctaccgcattgtggagatatacacaatacttgtttttcgctttgctccatataataggctcgtaagaaggtggggtgaggacaatcatcagttacgagcctttatggaaaacgttgcaggaaaaaggtatttcgcagtattatctgctgcaaaatgggcttgacaataagactttggattcgctgaaaaagggaaagaacatcacactgctgacgctggaaaagctctgcaaactgatcgactgcaccccaaacgatattatcgaatttatctgaaagctaccggtgtgttagtcggtagcttttcattttcccgcggcgagcgcagcaatgccgcccgcacgcagtctgccgccgtgctatcgtcactcgcgcctcacggagtaaggcgcggttgcgactggtaacgaatcgcagagattcatggcgaagccatgtacaccgcacccgattgcgcagcgcgtgcagttcttcgagctgtaatctggcaatgtgcggggtcgagggggaaggcccctcgtcctttctctcgggggttgcaaagggggatactctctttcgagaaagagagtatccccctttttacgcactcctgcgcggcgcaggaaatccccccgcgcccgcgcggaacaatttgcaaatggttttgttaaaccgtttccagaatctctctggcaacataaacaccgctcgccgatgcgtgcgacagcgaatgcgtaataccgctgccgtcgccgatgacatagagccccttgtacggcgtttcaaggtgctcgtcgagcgcgacctccatgttgtagaacttgacctccacgccgtagaggagcgtatcgtcgtttgcggtgcccggcgcgatcttgtcgagcgcgtagatcatctcgatgatgccgtccagaatgcgcttggggagcacgaggctcagatcaccgggggtcgccgcgagcgtcggcgtgacgaggccttcttcgatgcgcttgaccgtgctgcggcggccgcggacgagatcgccgaagcgctggacaatgacgccgccgccgagcatgttggacaggcgcgcgatggactcgccgtagccgttggaatccttgaacggctcggagaagtgcttggcaacgagaagcgcgaagttcgtgttctcggtctggagggatttatcctcatagctgtggccgttgaccgtgacgatgccgttcgtgttctcgttgacgacgatgccgttggggttcatgcagaacgtgcggacgttgtcctcgaacttttccgtgcgatagacgatcttgctctcgtagagctcgtcagtcaggtgggagaagacgacggcggggatctcgacgcgcacaccgatatcgacgcggttcgacttcgtggggatcttgagctcctggcacacgccctccatccacttgctgccgacgcggccgacggagacgatgcacttatcgcaggtatagtccgtctcgccgacggtgacacggtagccatcgccctcgcgggcgatggtggtgacgggagaatcgaagtagaagtcgaccttgtccttgagcaggtcatagaggttcgagagcacaacgaggttcacgtccgtgccgagatggcggacggaggcgtcgagcagattcagcttattctggatgcagagctttttgaacttcgtgccggcggtggagtagagcttcgtgccctcgccgccgtaggccatgttgatctcatcgacatagtgcatgaggtcgagcgcctgctttttgccgatgtactcgtgcagcgtgccgccgaagtcgttggtgatgttgtatttgccgtcggaaaatgcgcccgcgccgccgaaaccgctcatgatcgagcagctcttgcagcggatgcaggatttgaccttgtcgccgtcgatggggcagtggcgcttttcaaggctgtgaccggcctcgaacacggcgacgcgcaggtcgctgcgatcctttgtcagctcgtaggcggagaagatgccgccggggccgccgccaatgatgatgacgttgtaatgcatggaaggaacctccatttgatccggatttgccggaggagcatcccaccggcacaaaaatacatactatattgtattaaaatggcggataaagtcaagagaagaaacggaaaaaggagcggaaacatttccgctcctttttgtctgagtctacatattcttcttgatgctcttgatggcgtttttttcaaggcgcgagacctgcgcctgcgagatgccgatctcactcgagacctccatctgcgtcttgccgtcggagtagcgcagggcgaggatctggcgctcgcgctcgctcaggcgcgccatggcctccttgagcgcgatctgctcgagccagtcctcgtcggtgttcttgttgtcgcgcacctgatccatgacgcacacggcgtcgccgccgtcggagtagatgggctcaaagagcgacacggggtcgcatacggcgtccatggcgaagacgacctcctcgcgccggatgccgagctcgcgcgcgatctgctcgaccgtgggatcgcgctgctgctcgcgctggagcttttcacgcgcctgtaagacgcggtaggccgtgtcgcgcatcgagcggctgacgcgaatggagctgttgtcgcgcagataccgccggatctcgccgatgatcatcggcacgccgtaggtggaaaaacgaacattctgcgaagtgtcgaagttgtcgatggcctttagtagccccacgcagccgacctgaaagaggtcgtctgcgttttccccccggccggaaaagcgctggatgaccgacagcaccagccgcagattgccctcgacgagcttttcgcgcgcggctgcgtcgccgtcctttgcgcgatgaagcagcgcgtccgtctccgcggcggtcagcgtcggcagctttgtcgtgttcacgccgcagatctccaccttgccaagcataaaaagaatccccgcctcccatgcgtagtgctttcagtatgtccgcacgcggcggaaacatacggaacgggaagcggggatattttttatcgttcggcgcgcttcgatggactttgcgccctcgaacggttctcacgcaagaagaccgatacagaatgcaatgatcgcagcgttgaagaagtcgttgaagaggccgccgaccatcgggatgacgaagtaggccgagggagagggaccgtagcggcgggaaacggcctgcatgttggccatggcgttggatgtggcgcccatgccgaaaccgatgaagccggcggtgatcatcgcggcgtcgtaatcgtggcccatgaccgggaagacgaccagcagcgagaagacgaccatcagcagcacctcggcggcgagggcgacgatcatcggcagcgccaggtcgacgagctgccagagcttgaggcccgagagcgccatcgagaggaagatcgcgaggaacatgttgcccattgtgctgatctcggcggcggggaactccatgatcttgaagtggtcgatcacgttgcgcacgacgacggccacgagcatcgaaccaatgtaaatggggaagctgaagccgcagaggttcgtgagcagaacgctgacgacgttgccgacgccggcgcagaacatcagcagcaggaaaccgtagacaaagttattggcgtgggtgttgtaatgcgtgtcgtcgacatcctcttccaccgtctgctctgcgagctcgttgcgcaggtggttcttgacgatgagcttgcgggcgatcgggccgccgaggagcgagccgaagatgaggccgaacgtcgccgccgcgacggcgaccgtcgtgccgccgatggcaccggccgcatcaaggtcaggaccaatacccgccgccgtgccggggccgccgatcatcgagatagagccgcaggcgaggccgtagagcggatctttgcccatgagcgccatcacgccgctgccgacgacattctgcaaaatgatcatcacaacgctcaaaataaggagcatgatgacggatttgccgctcttgagcagcatcggaatgctgacggtgaagccgacggtcgtaaagaagaagatcataaagaccgtttgcagcgtgtcgtcaaaggtgatgaccgccgtgcccgtggcatagaggatggtgttgaagatcgcgaagcacagaccgccgaccaagggagcggggatgcagaagcggctgagcacggggatcttcttcatcagcaccagaccgagggcgtacatggcggcgccaagcgcgagggcatggtacatattgagctggatctctgtcatgtgggggaacctccgtagagaaaattttctctccggcatagcccggagagaagtcgcgggaaatgcgagggataggacttcctgttccggaaatacaatgaaagggaacaggaggggatgcgcatgaactgccgctttgccgacttccgctgcaaggaggtcatcaacatctgcgacggctgccgcctgggctatgtgggcgacgtggaatgcaggctgccggacgggcagctcaccgcactcatcattcccgggccgtaccgctttttcgggctgttcggccggggagaggaatactgcatcccatgggagtgtatcaagcagatcggggacgatatcattctcattgacaagccctttccgcgccaggagatcccgcgcagagagcaccgcacgcgccgccgccggtactgaaaagggcggcggacgaaaagtcccccaatagcagacctaccacattataaagattttcgacatttttgcaagcctaaattttagaaagacattattaaaaaaggaaaatgacaacttctgggtgcaaaagcgcgggaaaacgacgcgggaaaggcggcaaaaggaaaagaaagcgggaaaaacacaggatttttcaaaaagtgcttgcaattttgaaaatagcggggtataatacccgggtattccgcatggagaccggacttcttgtctgtgccatcaggttggcaggagggatgaaggctccagaggtaaaactaaatttgaaggagaaactacaagcaatggcaaacgtcgtatccatgaaagccctgctcgaagcaggcgtccacttcggccatcagacccgtcgctggaaccccaaaatggctccctacatctacaccgagcgcaacggcatctacatcatcgacctgcagaagaccgtcaagaagctcgaggaagcctacaacttcgtccgttccgtctctgagagcggccagaacatcctgtttgtcggcacgaagaagcaggcgcaggaggctatcaaggaagaggcttcccgctgcggcggctactatgtcaacgctcgctggctcggcggtatgatgaccaacttcaagaccatgcgtacccgcgtggaccgtctcaaccagctcaagaccatgcaggctgacggcacgttcgatatgcttcccaagaaggaagtcatgaagcacctcgccgagatcgagaagctcgagaagtacctcggcggcgtgaaggaaatgaagaagctccccggcgcgctgttcatcgtcgacacccgcaaggagcgcaacgccatcgccgaggcgcacaagctcggcatccccgtcgtcgccatcgccgataccaactgcgatcccgacgagatcgactaccccatccccggcaacgatgacgccatccgcgccatcaagctcatctcctccgtgatggccaacgccatgatcgagggcaagcagggcgaagagaccgaggagaaggccgagggcgaggctcaggcctgattttcccaatcaagcgagaaaagaaccttacggggcgaggcaaagcctcgccccgtctcatttttactacactatttttcaggaggatatcagaatggctatcactgctgctgttgttaacgagctgcgccaggccaccggctgcggcctgatggactgcaagaaggccctcatcgagtgcgagggcgatatggaaaaggccgtcatgtatctgcgcgaaaagggcctcgcctctcaggcgaagaaggccagccgcgtggctgctgagggcatggcttacgccaccgtcatcgacggtgtcggtgttgtggtcgaggtcaactgcgagaccgacttcgtcgccaacggcgagccgttcaacaactttgtcaagggcgtggctgctgtcgtcgccaaggagaaccccgctgacgtcgacgcgctcatgggctgcccctgggtcaccggcaacggcaccgtcaaggatgcgaaggacgagctgttcctcgccatccgcgagaacatgagcatccgtcgcttcgcccgcatcgctgacggcttctccgtcccctatgtccacatgaaaggcaagatcggcgttatcgtcaacctgaccgtcgagggctgcgacgccaccgagatcggcaaggacatcgccatgcagattgccgcgctcaacccccgcttctgggacaagagccaggtcacgcaggacgttctggacgaggagaaggaagtcatgctcggccagatggccaacgacccgaagatggcgaacaagcccgatcaggtcaaggaaaagatcgtcatgggcaagctcaacaagttctatgccgagaactgcctgcttcagcaggccttcgtcaaggacggcgacgtctctgtcgagcagtatatgaacaacgctgccaaggcgctgggcggcaaggtcagcttcaacaccgccgttcgcttcgagaagggcgagggcatcgagaagaagcaggagaactttgcggctgagatcgcttccatggtcaacggcaacaagtaatttccaaattacaaaatatgatgaaaagaggttcggcgaaggccggacctcttttttgtttccgcgcggcagacagaattttctgcgaaataaaaaatttacaatttcctaaggtgaatattattgtgtatatcttgcatattcattttgactggtgtataatagacaatgctaagcagcggcgcagtatcctagtcggagctgccgtttcctaagaagggcctaaaaatcctttaaagggcacaactgtgaagcctttggtgcctgcttcttacgcccagtttggggtgggtgctgaagggaggcgaaagcgaaagctgcgcctgcggactccgggcgacccctaatggcatgggggaaccgaccctgtttctgcggagactcgttgctgtgccggagcggactcccggtttcgggtatcgacttcggtacgggacgggatatgaacctgcattgcggtgctacccggcctttgtgccgcgaacgctgtgtgcagcgtagcctgccttgcgtggggaattcggataggagaacaacgtacagactccggccaagagcgaggtacgatcgctccttgaaatttttcctgcaaaagaggataagaaacggcgtgactccggggtggaaatcacctaggctgtcgcaagggcagcgaaagggttacagtgcggactaagtggcaatcgggtacctcgtctggtaacaacggggtgcagcgcctaagggggaaccgcctccatcggcaacgagaggtgcgctgcggggaaagccaacccgacctatgccgcaggattaccttttgctgctgccgctgattagcatgattatgaaataactgtggagaagaaagccttggaaaacgaagaagaccgaaagcagaagaaaacggaaaagacgcccagccacgcgcgctgggtcatccgtgtgtttttgatcgctgtggcgctttccgcctcgatgagcctgtgctcgggcgcggtgcttgaggatgcgggctatgtgactgcaacgctgatcctgctgctgttcattgcgctgggcatcatgttcgatatcatcggcgtcgccgtgacggcggcgaatcccaagccgttcaattcgatggccgcgcaccgtgtcaagggcgcgaaggaggcgctgtaccttatccgcaacgcggaaaaggtcgcctcgttctgcaacgatgtggtcggtgacatctgcggcatcgtcagcggctcgaccgcgacggtcatcgtcgtgctgctgcaaaacagcttcggctggcgcagcatcgtcgtatccaccgtggtcacggcgctcatttccggattgacgatcggcggcaaagccatcggcaaaaaggtcgccatgaaaaagagcaaggatgtcatctacctgacggcgaaggtgctgtcggtgctgcatcttgtcagataaagaaggaaaccgtattgattcttgaaaccatccatgatccccgggacatcaaggccctgaacgactcgcaaacgcagcttttatgtacggagctgcgtgaatttttgctgaaaaatgtgtcgaaaacgggcgggcatctggcctcgaacctcggcgcggtcgagctgacggtggccatccaccgcgtgttcgacacgtcgcgagaccggctggtgttcgacgtggggcatcagtgctacacccataaaattttgaccggccggcgcgagcagttttcgtctctgcgccagtacggcggcctctcgggctttcccaagccgcgcgagagcgggcatgacgcctttatcgcgggtcatgcctccaactccgtctccgtcgcgctcggcatggcgcgggcgcggacgctgcagcatcaggattattccgtactggcgctgatcggcgacggcgcgctctccggcggccttgcctacgagggactcaataatgcgggttcgtccggcgagccgctcatcgtgattctgaacgacaacggcatgtcgatcgacggcaatgtcggcgcggtgagcgagcatctgggacttttgcgctcgaagcctgcgtactatgaattcaaaaaagcctatcgtgatctgctcgaccgcaacgcggtcggccgcgcggtgtatgattttaaccatcatctgaaaacgaacgtcaaaaaggcgctgctgccgaattcgacgatgttcgaggacatgggctttacctacctcggccccgtgaatggacacgacgtggggcagctcaccaacacgctcaaatgggcgaaggacttgaactgtccggtgctcgtgcatgtgcacacgaaaaagggcaagggctacccgcccgccgagcgcgagccggagcgctatcacggtgtcggcaaattcgacccgcggatgggcgtgccgcgcgagcataagcgagatttttccgcggtgttcggcgacgaactctgtaagctcgcaaaaaatgacgaaacgatctgcgctatcaccgccgcaatgcgcgacggtacgggcctgcacgatttttccgagcagtatcccgtgcgcttttttgacgtcggcatcgccgagggacatgccgtggcgatggccgcgggcatggccaagcaggggctcacgccggtcgtggcgatctattcgagctttttgcagcgcgcctacgaccagctcatccacgacacggcgctctccgacctgcatgttgtcttcgcggtcgaccgcgcgggcatggtcggcgcggacggagagacgcatcacggcattttcgatgcgacattcctctcggaaattccgaatatgacggtgctgtgtccgtcgaactttgcggagctgcgcacgatgcttgaccgtgcggtgaacgagatcaagggccccgtcgccatccgctatccgcgcggcggcgagggaaattataaggaagacagcgggcggcagaaccttgtcgtgctgcgcgagggagaggacatcaccctctgcgcctacggcacgatgatcaacaatgtgctcgacgcggcggaaatcctgcacgagcagggcatcgaggcacgcgttgtgaagatcaacgccatctcgccgctctatgaccgcgacatgcgcgaggtcatcggcaaaacaaaggcgatgctggtcgccgaggagtgcgcgggcgtcggctgcatgggccagcgcatggcggccattctgggctggaacaaaatttcgcccgaacggctggagctgtgcaacctcggcaagaagtttcccgcgcagggaacagtggaggagctgtaccgcgagttcgggctggacgcggaatcgctggcaaaaaaggctgcggaggtgctgcgatgagcaataaaacaagactggacgtgctgctcgttgaacgcgggctggaacagagccgccagcgcgcgcaggcgatgatcatgagcgggctcgtctttgtggacgggcagcgcgtggataaggcgggcaccgccgtgccgaacgacgcgcagatcgaggtacgcggcaacacgctccgatatgtgagccgcggcggcctcaagctcgaaaaggcgatgacgacgttcggcctcaagctggacggctgtatctgcgccgatattggcgcttcgaccggcggctttaccgactgtatgctgcaaaacggcgcgacaaaggtctacgccgtcgacgtcggctacggacagctcgattggaagctccgctccgacgagcgcgttgtgtgcatggaacgcacgaacgcgcgctatctcgaccgcgaccagattcctgacgagctggattttgccagcatcgacgtgtcgtttatttcgctgaaattgatcctgcctgcggtgcgccgcgtcttaaaagagggcggacatgtcgcctgcctcatcaagccccagtttgaggcgggacgcgaaaaggtggggaaaaagggcgtcgtccgcgacccggacgtacaccttgaggtgctggaaaatttcctgatacatgcaaaggattctggctttacagtgcttgatatcacattctctcctattcgcggacccgagggaaacatcgaatacctcgggtatctcgaaagcggtgattgggtggagaagacgtttgacctccagggccttgtggagcagtcacacgcggcgctcgaccacgggaaggagggcgcgggatgctgagaaaagtcatcttatgcccgaatccctaccgcgacgcgcagcttcgcgtcgcgaaggaggccaagcgcgtgctcgacgaggttggctgcccgaatgtcgtgtgcctgccgtttcgcaatcaggagccgccggagggctacgggctcaacattgagccgcttcagcaggagatccgcggtgcggacatgatcatcgcgtttggcggcgacggtacgatcctgcacctttccaaaaccgccgcgcaccgcgacattccggtgctgggcgtcaacctcggcagcctcggcttcatggccgagcttgagagcaaagaccttttgcgcttgcgcgacctgtgtgacggaaagtatgagatcgagagccacatgatgctcgacgtgagcgtccagcgcgacgggcgggtcatctactcgaaccttgcgctcaacgaagcgctcatcgcgcgcggcaacatctcgcgcgtgatccggctgcaaatcttcaccgagcagggaaagctcgtggacgtggcgggcgacggcgtgatcgtcgcgagcccgacgggctcgacggcctactcgctctcggcgggcggccctgtggtcgagccgacggcgcggaacttcatcgtttcgcccatctgcgcgcatagcgtgcacgccaacgcctacgtgctctcacccgagcgggtcatcactgtgcagacggaaaaaaacagctacaagcccgtccttttgagcgtggacggcgggcgcgcattctcactgcgcagcggcgacagtattgaagtgcgccgctcgaaattcgacaccaagctcgttcgactgagcaaacgcagtttctgcgagatcttacaaaagaaaatgttgatgggaggaaccagcaatgaagaatgaaagacaggaaaagatccttgcgatcattgccgcttcggcgatcgaaacgcaggagcagttgatcgacagcctgcgcaaggagggaatctcctgcacgcaggcgaccatctcccgcgatatcaagcagctccacttaattaaggagccgaccggcaacggcacctaccgctacgccgtttcgacgcagaagatgcgcctgaatttggctgaccgcctgcagaccatcctgcgcgagagcatcgtttcggtcgactgcgcgcagaatctggtgctcatcaagacgatggcgggcctcggccccgcggccggcgcggcgtttgacgggatggatatctccgccaaggtcggcaccgtcgcgggtgacgacacggtgctgatcgtgatgcgcgaaaacgagtccgccgccgagttctgctcggagatcgaggacatgcagagacagcgccagaccaagtaagaacaaaatcttgcaggagaatgagcgatgcttgagcttttgcacattgaaaatatcgccatcattgagcgggcagacattctgttcggccgcgggttcaacgcgctcaccggcgagaccggcgcgggcaaatccatcgtgatcgacgcgctcggcgcggtgctcggccagcgcacgtcgcgcgagctcatccgcacgggcgcggagaaggcgtttgtcagcgcgacgttcagcgcggtcccggcagatttgccgggactcgccgaaaacggctttacgccggaggaggacggaacgcttttattgcagcgcgagctgtacggtgacggcaaaaacgtctgccgcgtgggcggacggccagtgacggtcgcgcagctcaagcgtatcggcgcgagcctgctcaatatccacggccagcacgacggacagcagttactcgacgaagagcagcaccttgtctacctcgaccgctttggccgcgtggaaaatgagctggcagcgtactgtacgcgctatgacgtgatgaaagagacgcgccgcgcgatcgacgcgctcaagatggacgaggccgaaaaagcgcgtcgtgtcgacatgctgcaccatcagattggcgagctcgagcgcgcggacttgcaggagggggaggaggagatgctccttgcccgccgcaatattctgcgcaacggcgaaaagttcatttccgccatctccgaggcggacgcctgtctgaacggtggggacgagggccttggcgcggtgtccgctatcaaggaggcggaggatgcgctgcgttcgctccgcagcctcggcgatgaattcatcacgctctcggagcgcttggaagcgctgcgctgtgaagcgtatgaccttgccgaaacgatccgtgataagaaggatgaatacgacttttctccgcaggagctcgacgccgtggagtcgcgctgcgaccagctttaccggctgaaaaagaagtacggctcaagcgtcgaggagatgcttgcatatcttgaaaaatcgcgtgaggaattggaccgcatcgagtatgcagacgaccgtgcgcagcagctcgagcagacgctcaaaaagcaggaaaaggctgcgcgcgaagcggcgcaggccctctccgaccgccgtcacgcggcggcaaaggaacttgaggagcgtatttcccgggaactgcgcgagctcgatatgccgaagctccgctttgccatcgactttcaggaaaaggacatgggcgaggacggtgtggacgccgtggcgtttttgatgtccgccaatgtgggcgaggcgctgcgccccatccagaagatcgcgtccggcggcgagctgtcgcgcattatgctggcactcaaaaacgtgctggccgagcaggacagcgtgatgacgatggtgttcgacgaggtcgacaccggcgtttcgggcagggctgcccagcgcgtggcggaaaagctcgccaagctctcgcgcacacggcaagtgctgtgcgtgacgcatctgccgcagctcgcggcgatggccgacacgcacttcggcgtggaaaagggcgaggaaaacggccgcacgctcacaaaggtcgtcgcgctcgaccgcgcggcgcgccgcggcgagatcgcccgcctaagcgggggagaccacccgagcgagacgatgctcttaggagctgaggaactgctctgcgcggcggagaactttaaaaatcaactactgtaaagcaaaatcacatggtagagaaaagcgccgcgatgcggcgctttttcgaagaaaggaacattagatgaacgaatttgctgagcgcatcgagcgggattttccggtgcggcgcaaggaaaaagaaaaagtgaacttccgcacctggcttgtctacacactcaaggagctcggctattcgccaaagctcgagagcgggacgtcggcgctctcggcgggcggcaatgtgacgaatatggtcgtcggcgacatcgagaaggcaaagatcgttctcgcggcgcactacgacaccggcgtgcgcgaggtcctgccgccgctcatttgcccgacgcgaccggcgacgtacatgctctacgaggcgctgataccgctgctggcgctggcggtgagcttccttatttcgttcggcgtgacgttcgcgctcaacatgccaaatatgacgctgcctctctttttactgctgctggtcgtgacgctcttttaccccaaatatggcaagagtgagacgaacaacaaaaatgccaacacctccggcgtcatcgcactgctcgaggtcgcaaaggcgctgacgccgcgctaccgcggtgaggtgtgcttcctgtttcttgacggcggcacacaggggagcaagggcgccaagcgcctgatccacgcgcaccccgagcttaaaaagaagagtgtcgtcgtgctcgactgcgtgggtgagggcgatgagctgctgattttgccgggcaaggcgagccgttggaacgacaagctgctcgatacgatccttgagcagttcagcaacagcgagagaaagacctgctttttgaagaccgacggacttgttcactatccctcggacaaccgcgcgttcatgggcggcacggtcatctgtgcgtgcaaaaaggtcaagggctttggccgctgtatcctgccgcggaaaacagaggagatcgacgaggaaaatctgtcgcttctgtgcgacgggctgtgcaagctcgtgatgtattacaatccgcagaatacttgatacttgacaagaccgattctttacgttacaatatccgcgtttacggtgatgaagcggagaagtaagcagcgatttcctgcgcagagagccttcggccggtgcaagaaggagaggaaacgtgccgaaatacaccgcggagccggcgcccgaacgaaagttttccagtaggcgcgccccgggagcgcccgttatcgcgcgggagtgtgtcagcactccgtgaggccgtttttgcgagaaaacggcgaaccagaggtggtaccgcgaatttgttcgccctctgtccaaacggacagagggcgttttttgctatccgaaagcgtctcaaaatgtccgaaatgaagtaaaatagaaatacaggaggaatcaacaaatgggaatttatgaagagctcaaggcgcgcggcctgatcgcgcaggtgacggacgaggagcagatccgcgacctcgtcaacaacggcaaggcgacgttctacatcggctttgactgcacggcggatagcctgcacgtcggacacttcatggcactgtgcctgatgaaaagactccagatggcgggcaacaagcctattgcgctcatcggcggcggcacgaccatgatcggagacccctcgggccgcaacgatatgcgcaagatgctcaccaaggccgacatcgaccacaatgccgaatgtttcaagcgccagatggagcgcttcatcgacttcggcgagggcaaggccatgatgctcaacaacgccgactggctgatgaagctcaactacatcgagctgctgcgcgaggtgggcgcgtgcttctctgtgaacaacatgctgcgcgccaagtgctatgagcagcgcatggaaaagggcctttcgttcctggaattcaactacatgatcatgcagtcctacgacttctaccacatgttccaggagtacggctgcaacatgcagttcggcggcgacgaccagtggtccaacatgctcggcggcacggagctcattcgccgcaagctcggcaaggacgcgcaggcgatgacgatcacgctgcttcttaattccgagggcaagaagatgggcaagactgcgagcggcgcagtgtggctcgacccgaacaagaccacgccctacgacttttaccagtactggcgcaacgtgggcgatcaggatgttttgaagtgcatccgtatgctcacattcctgccgctcgagcagatcgacgagatggataagtgggagggcagccagctcaaccgcgcgaaggagatcctcgcctacgagctcactgcactcgtccacggggaagaggaggccaagaaggcggaggagtctgccaaggcgctcttcggcgcgggcggcaataacgccaacatgccgacgagcacgctgacggatgccgactttgaaaacggcaacatcaatgtcctttcgatgctggtcgcgaccggcctgtgcccgtcccgcggtgaggcgcgccgccttgtgcagcagggcggtgtgacgatcgatgatgtgaaggtcgcctccatcgacgagagccttgcacgcgagcgctttgagggcgagggcatcatcgtccgcaagggtaagaaggtcttccaccgcgtgaaggcgtaagcaaggctgattacaaaacgtaaacgaaaaagcgaaacagggctctgcgcgttttcagcgcagagtcctgctttttgactgaatgcacaaagcaaaacggtagaatgaatacagtaaacatttgatgaataccgcaatgaatattacgtgaatacaaaatgaatacacgatgaatattgcataaacgagaaataagaaccacttataccgaggatcggaacggctttagcgcactggatagctgttccaaatgacgctcagacatgcggcacaacggcagccgcaattcgccgctgcacaggcccaagagctccatggcggccttgacggggatggggttgacctcgcagaacagcgcacggatcagctcgtgcagcttgagctgaagcgtgcctgcctccaagaagcgattttcaaggcagagctgcgtcagctcgtgcatttcgcgtgggacgacatttgcggcgacggagatgacgcccttgccgccaagagccatgatggcggcggtggagccgtcgttgccgctccagacggtgaagtccggcgggcagaggttgagggtgtcctgaatgaggtcgaagtcgtcgctcgcctccttgacaccggcaatgttcggatgcttggcaagcgcttgataggtctgcgccgtgcagccgacgcctgtgcgggagggaacgttgtagaggatgaccggaatgtcgaccgcatccgcaatggcggagaaatgctgcacaagaccgctctgcgaggccttgttgtagtacggcgtgacggtgagcagcgcgtcgacgcccgcgctttgcgcggctttggagagcgcgatggaggacgcggtgctgtttgtgccgctgcccgcgatgacgggcacgcggcggtcgacggtgcgcacgcagcgctcaatgagcgccatgcgctcattgtagctcagcgtcgcggcctcgccggttgtgccgcagacgacgatggcgtcggtgccgccttgaatctggcgctcgatgagacggtcgaaggcttcgagatcaacaccgtcgccgcaaaacggtgtgacgatagcgacggcgctgccggtaaagacgcagggtttcataaaggactcctttccatgacgcttgaccgccaaaacggtaggggagagcggcggccaaaaagagatacagttttgcttgaaagcagagggaaactgtcgtataatgtaaaatacgattcatatggatatgttcagccgggcgcagagcgatcgcttctgcaaaactggctgtggaggatactatgaaaaaatggtgcagaatgttcctgctttcctgtctgctgtgcctttcactgtgcacgctcgcgcaggcaacggacggtgagacgctccgcgtggggctcaagtacggctcggacgcgatgagcgcggcgaaccttcagaattattcggccttcggcggctacgcgctggggtattttgacgcggacggcagctttgaggagctgggcacgctgccgcagttgtatgaaaagatcacggtgacgacggatacgacctatcatgtgcagctttccggcacgttttacgattacgacgacgcgtcgcgcacagcggcgcagtacagcggcggcttcgctgcctacgaggatggcgcgttctatgcgcgcgctggcagctacacgagcctgagtgcggcgcggtccgcggcagcccaatacggcggcactgccgtcggcggcagcagcacgggcgtgacggtcatcgtgacgggaacggatacgatcctctttgaattcgactgcggtgggagcgaaaacctcggcatcctgccgatcgagacgcgtgaaaagacggtcacgtggttccgcggctaccgctactacggcggctttgaataccagcgcgtgagcggagggaacatcaatgtcatcaacgtggtggatctcgaggactatgtcaaatgcgtcattccctgggaaatgagcaaggactggccggtcgaggcgctcaaggcgcaggcggtctgtgcgcgcacctacgcggtctgtcagacgaagcatcgcgcgcagggctttgacatctgcgcgacgacgcactgtcaggtctatcagggcacggcggcgagcggtgcgaattccgatgctgcggtcgaccagacggcgggggagttcctctactacagcggaagacttgtgcaggaggctgtgtattattcaagcaacggcggcgcgagcgaggacagcctgaacgtctggggcaatgacgtcggctatctcaaaggtaagatcgacccctatgagggcaagatcgcctcgatcatcccacggtacaactggtcgacgacgtttaccgcgtcggaactcacaacgcttctcaacaaccgcggctatggcatcggcacggtgaaaaacgcctatgtctcggcctataccgacacaggtaacgtctattccgtcacctttaccggtacgagcggcagcaagaccgtttcacgcgaggcatgccggacgctgctgaatctgcgcagccagcgctttacgatcggcggcggcgggggcgagaacgcttacagcgtgaatgacacgggcgagagcgtcgcgctcggctctatgagcgcgatcgacagcagcgggaagagctcggcactgtccggcaacgtgtacgtcatcacgtcgagcggcacatcgcagcttgagcagcggacgacgacatcgtccggcagcggcggctttgtgatctccggcagcggttacgggcataatgtcggcatgagccagtggggggcgtactcgatggcaaacctcggctattcctaccgcgatattctgcagttttactacacggatgtcagcatccgatgagggaagagaaacaacatgaagacaaaagattttgattattacctgcccgaggagctgatcgcgcagacgccgctcgaaaagcgcgacgaatcgcgcctgatgtgccttgacaaggagacgggtgagctctcacaccaccatttttatgagctgccggactttttgaaccccggcgactgcctgatcttgaacaattcccgcgtgctgccggcgcgccttttgggccagcgcctaccgggcggcggcgcgtgcgaggtgcttctgctcatcgaccgcggcgacaaaacatgggagtgcatcgtgcggccgggcaagcacctgcgcaagggcgcgaagatgcagttcggcaacggtgagctcaaagcggaggtcgtggacgtgttacctgacggcaaccgcatggtgaaattcgactttgagggtattttcctcgaggtgctcgaacaccttggcaagatgccgctgccgccttacatcaaggaggaattgcaggatcaggagcgctaccagaccgtctattccaaggtcaacggcagcgccgccgcgccgacggcgggcctgcacttcacgccggagctgctggaaaaaattcaggcaaagggcgtgaacatcggctatgtgacgctgcatgtcggcctcggtacgttccgtcctgtcaaggaggacgacatcgagcagcacgatatgcacagcgaatactgcgttatcccgcctgagacggcgacgcttatcaacgagacgaaggcgcgcggcggacgcgtgatctgcgtcggtacaacgtcgtgccgcacgctcgagagctgggcacaggaggacggacacatggagccgtccgcaggctggacgagcatctacatctacccgggctaccgcttcaaggtgatggatgcactcgtgacgaatttccacctgccgcagtccacgctcatcatgctggtttcggcgctcgcgggccgcgagcacgtactgcatgcctacgaagaggcggtaaaagaacgttatagattttttagttttggcgacgctatgttcgtttcctgaaacgggggaagactatgttcaaagtgattaaatacgagggcaaggctcggcgcggtaagttcaaatgcgcgcacggcggggaagtgcagacgccggtttttatgaacgtcggcacgcaggcggccattaagggcggcgtgagcgcgctggacttaaaagacctcggctgtcagatcgagctttccaacacgtaccacctgcatctgcgccccggcgacgatgtggtgcgccaaatgggcggcctccacaagtttatgcactgggacggccctatcctgaccgacagcggcgggtttcaagtattttcccttgcgggcctgcgcaaaatcaaagaagagggcgtgacattcgcctcgcacctcgacggccggcgcatcttcatggggccggaggagagcatgcgcattcagtcgaatctcggcagcgacattgcgatggccttcgacgagtgcgtggaaaacccggcacgctacgagtacgcgaaggcatcctgtgagcgcacgctgcgctggctggagcgctgcaagatcgagcatgacaagctgaataccttgtcagatacggtcaacccgcagcagatgttatttggcatcaatcagggtgcgacgttcgaagatcttcgcatctggcacatgaaagagatcgcaaagctcgactgtgacggctacgccatcggaggcctcgcggtcggcgagccgacgcagacaatgtacgacatcatcgacgcggtcgagccctatatgccgcaggataagccacgctatctcatgggcgtcggtacgccgtcgaacatcatcgagggcgtggcgcgcggcgtggacttttttgactgtgtgatgccggcgcgcaacgcacgccacggcaagctcttcacgtggagcggctcgatcaacctcaaaaacgagaagtacaggctcgacgagcggccgatcgacgagcagtgcgactgcccgacgtgccggaatttctcacgtgcgtacctgcgccacctctttaaggcggaggagatcctggccctgcgtcttgcggtgatgcacaatctgtatttctacaacaagctgacgcagcgcatccgtgacgcgctcgacgcgggagagtttgcggctttccgagcggagtacagcacgaagctgtcggaaagagtttgattctttggataaaccccttgcacaaaagtgaaatatccgttataatatcaatatcttttgttttggaaaggaacttgtactatggatagcatgattttactggttgcgatgatcgcggtgttctacttcctgatcatccgcccggaaaacaagcgcaaaaagcaggcagaaaacatgcgcaacagcctcaagaagggcgagcgcatcaccaccatcggcggtctggtcggccgcatcgttcaggtgaacgacgcgacggtcgtgttcgagacctctgaggaccgcgtccgcatcgaggtcgccaagtggggcatccagtctgcggagtcgatggagcaggcggctgcgcccaaggccaagaaggctgacaaggcggagaagaaggctgaggaaaagcctcagaccgaggaagaggccaagactgtggccctgccgattgaggacaaggcggacaaggctgaaaaggccgaggataagccctcttacgatcctgagatcaagtaagatcgacaactgcatagcataaacaaacctcccctgacatacgctcatgtaggcgaatgcaggggaggtttttgcgtggaaaagacggtgaacaccgcgtggtacgcgaaaaaatgcgcgctgggtacgcttgtgtgctgcggcacggagctggtgcttttggtgctggcatcggcgctgatactgcgcggtgcgatcagcgaggagatggcgaacggcgcggtgctggtctgcgcggcggtcgcggcgtttttgggttgcatgatcggagcgaggaagacaagcaagcgtgcgatgatgacggcgggctgcgcggcgagcgcgtgggtcacgatgcaggtgatcggcttttttgtttatgatgggttgacgccggagcggtcgctcgagctggcggcggcgatggcggtcggcgcggtggcgccgctcctactacaaagaaacgggaaaaaggggagaggcgccaaggcacgcgctcgccgcaagcgcaggtgaacataaagcaataggcgtattcaaacgtttttgatcagcggtggaggaaatgcggcgcgaaaagctgtaacaacttg

SEQ ID NO: 10170 - DNA, 11545 bp, Unknown
  gut microbiota DNA sequence
tggagcaagagcgacgggaaaatatgactttttctgacttgggtggtgaagcggagaactgcttccagatatggggaacgggtacgaaaaccaccccatatcttggtaaaatgccgccgctttttcaatttgtttcaatagtttacataatgaactttacataatattttgacataattaacaaaaatgggaaaagttggcaattccgcttgcgaaaagagtgcaaacggcctatatttataggtgcgttctatcgttttgctccgcgggcagaatgccgcttcccttcacgaggggtgacatacttgctgagtcgaacgaacagaagagaccgccgcggcgcgctgccgcagcgcgtgcctgtgccgatgctggtgttatcggcgtttattgtgttgggtgtgatccttgggtacgtgtttgcgctccggtcgctgcagagcgcgggcggcgagctgaaacagtatttcgacgcgtttttatcgggcggcgtgaacaggccgttttcggtaagggcgctgggcgaaacgctgttgtgctatttccgcgcgccgggtatcgtgtttttgctgggctttgcgtccatcggcattgtagcggtaccgctcgtgtgtgcgtgccaggggtttcttctatcgtactcgctgttctgctttgcgctctcgctcgggcgggggagctttccgttgctgctggcgctgttcggcatccggcttctggcggtgctgccgtgcacgctgctgctcgggaacgcgtcgcttgacaagtcccgcgtgctgctgtcgctttcgcttggcggcgggggacggggacgcgcagtcagctacgggagcgcgtactggtaccgctttggcatttgttgtgtgtgtttgttgtttgccgctctgctggagctgtggctcgtgccgcagtttttgctgctggcggcgtcttgagctgttttttaggaaggaggggtgcgatcatggccgaccttttggcgcaatacgaagaatatctggccacggaaaagcacgcctcccagaatacgctcagctcctatatgcgcgatctgcaccagttcgccgtgtatttggacgagttccaccccatgccgctgccgcaggtgacgcaggaggtcatcagcggctatgtcgcctggatgggcggcaagggcaagtccgccgcgacgatcacgcgctccatcgcgtcgatcaagtcgctctacacctacctccagatggccggagaggtcagcgcgaacccggccaagggcgttgccgcggtgaaggtggagcacaagttccccgagatcctcacgggcaaagaggtcgagctcttccttgaccagccacagtgcgtggacgctaagggctaccgcgaccacgcgatgctcgaactgctgtacgccacgggcatccgcgtctccgagctcatttcgctcaatgaagaggacgtgagcctgagcgcgagcttcatccgcgcgcagagcaagggcaaagagcgtatcatcccgctctatcccgccgccgtcaaggcactttcgcactacatgaaggaggtgcgtccgcagcttttggctgatccggaggaaacggcgctgttcgtcaacatgaacggagagcgcatgagccgccagggattctggaagatcgtcaagcactatcaggagaccgccggcatctcaaaggacatcacgccgcatacgctgcgccactcgtttgccgtgcacctgctcgaaaacggtgcggacctgcgctccattcaggagatgctgggccacgcggacatttcctcgacgcagatctacacgcatgtcgtcaaaaagcacctcaaggacgtctatcagaaggcgcatccgcgggcatgaaaagaaaattggaaggccgctctttgagcggcctttttcatgctgtgatttctcgttgcatttcggacagttgtttgatataatttctaaataagtatcgtgggaggtgatgcgcatgcggatactcggcatcgatccgggcatcgccatcgtgggctttggcctgatcgaagcggaccgcggcagaacgcagctattgaattacggcgcgatcaccacgcccgcgggactgccgctggcgcgccgcctcgtgcagatcgagcaggacatggaagcgctcatcgcgcagttaaaacccgatgccatcgcggtcgaagaactgttcttttcgaacaacatcacgaccggcatcgccgtggcgcacggccgcggcatcattctgtgtaccgcggaaaagagcggcgtgccgctctacgaatacacacccatgcaggtcaagcaggccgtcgtcggctatggccttgccgaaaaaagacaggtcatggacatggtcaagcggctcttaaagctcaaggccgtgccgcggcccgacgatgctgccgacgcgctggccattgccatctgtcacgcgcgcagcgccacgtcgctcctgagccgcgtgggcgggaacgacgtcaagcagaccatttaagcaggagagaggcagtttatgttttattatgtcagcggaacggtcgtgcatgtggagccgtacctcgccgtgatcgactgcggcggcgtgggctacgcctgcaagaccaccagcacgacgatctcacagctgcaagtgggtaaagcaagcaggctttacacctatttgcacgtgggtgaggggatctttgacctttacggttttgccacgcagggtgagctcgggagcttcaagcagctcatcggcgtctcgggcgtggggccgaaggcggcgctcgcgatactttcggtctgcacgccgcaggggcttgcgatggccgtcatcacgggcgatgaaaaggcgctcatcgccgcgccgggcatcggcaagaagatcgctcaacgcatcatcttagagctcaaggacaagctcaccaaggagcagcaggagatcggtatgccgaccgcccccggcatcgttgcgggtgagaagagcaaggccgtcgaggccgccgccgcgctcgcggtgctcggctacacgcagcaggacatcgcggtcgcgatgaagggcgtggacgtggaaaacttaccgctcgaagagatcgtgcgccagagcttaaagaaaatggtaaaataggagaaacgataaatgaacgaaaatacaaaagaggctgctaaaaagggcattacctttggaacctgccttgcaatggtcatctcttatgcgaactggcatagcgtgggttgggcgattgtacacggccttttgagctggctgtatgtgatttattttgtgatcaggtactgattattccttcgcaaagcacaaaaaggagcgtgagcgcttgagcattgattttggaaccgacatttatgaagagccgatcgtggccaagaccttcctgagcgaagacgcgcaggagggctcgctgcgcccgaagacgctctcggaatacatcgggcaggagaaggcgaagggcaaccttgccgtcttcatcgcggcggcgaaaaagcgcggcgaatcgctcgaccacgtgctgctgcacggccctccgggcctcggcaagacgacgctcgcgggcattattgcccaggaaatgggcgtgaacatccgcatcacgtccggccccgccattgaaaaggcgggcgaccttgcggcgcttttgacgaatttgagcgagggggacatcctgttcgtcgacgagatccaccgcctgaaccgcagcgtggaggagatcctgtaccccgcgatggaggactacgccatcgacatcatcgtcggcaagggcccgagcgcgaactccatccgcctcgatctgccgcacttcacgctcatcggcgcgacgacgcgcgcgggccagctgtccgcgccgctgcgcgaccgcttcggcgtcacgctgcgcctggagctttacacgccgcaggagctttcgaaaatcgtcacgcgctcggcgagcatcctgaatgtcgacatcgacccgacgggcgcgctcgagatcgcgcgccgctcgcgcggcacgccgcgtatcgcgaaccgcatgctgcgccgcgtgcgcgactttgcggatgtgcgggccgacggcgtcatcacgaaggaggtcgcggacgaagcgctccgcgcgctcgagatcgacgacctcggattagaccccatcgaccaccggatgatgcacgccatcatcgaaaactacggcggcggccccgtcggcatcgagacgctggcggcgaccatcggcgaggaagccgtcacgctgctggatgtttacgagccgtatctcatgcagctcggctttttgcagcgcacgccgcgcgggcgctgcgtcacgcgcaaggcatatgagcacttaggcctctccgtgccgaagagcatggacgaagtgccggaacagcttagtctataaatgcaaactactttacggcaaaacttcaaatctttttgagaagaggaatcaaaatcatgggaaaactgtttggcaccgacggcattcgcggcgttgtgggagaaaatctcacggctgatcttgcgttccgtacgggcaaggccatcgcggccgttttgaaggaagaaaagggcagaaagccggtcatcaccatcggcaaggacacgcgcatttcgtccgatatgctcgaaagtgcgctgatcgcgggtatctgctccgtcggcggcgacgtgatgccgttcggtgtgctgccgactccggcggtcgcgtacctgaccgtgctcaaaggcgcggatgcgggcatcgtgatctccgcctcgcacaacccctacgagcacaacggcattaaggtcttcaacgaaaagggctacaagctgcccgacgcgatcgaagagcaggtcgaagaaaaaattctcaccgacatctatcccgccgcgacgcacggcgagatcggtgtcctgcgccacggtctgcggcagtcgcgcgaggcgtatatcgaccatttagctggcacgatcgaaggagacctgtccggcctgcgcgtgctggtcgattgctcgaacggcgcgtcgtccgcgacggcaccggagctctttggccgcttccgctgcttctgtgacttcatccaccgcgagccggacggcgtgaacatcaacgaccactgcggttcgacgcatctcgacgaccttgcacaaaaggtcgtcgcgggcggctatgacatcggcgtcgcgttcgatggcgacgcggaccgctgcctgctcgtcgacgagcagggcggcgttatcgacggcgacaaggtgcttgccgtctgcggctcggacatgaagcgccgcgggaagctctcgggcggcacgatcgttgcgacggtgatgtcgaacctcggccttcacgagttctgccacgaaaacggcgtcggcctcgtctgcacgagcgtgggcgaccgcaacgtgctcgaaaagatgaatgagtgcggctacaagcttggcggcgagcagtcgggccacacgatcttcgccgactacgccacgaccggcgacggtcagctgacggcgcttcagttcctcgacgtgctcgcgcgcagcgggaagaaggcctctgagcttgcgtccgtctgcccgcagtatccgcaggtgttgctcaacgtcgccgtttcgcatgagcgcggcgtcaaggatgccatcatggcgtccgatgcactctccgcggccatcgcggaggaggaggggaagctctccggcgagggacgcgtgctcgtccgcccgagcggcacggaagcgctcatccgcgtcatggttgaggcaaaaacagaacaaatcgcccttcttgcggccgagaatttggtcaatgtgataaaaatgctgtaaaatcgttagcgctaatactgaattttcgtaaatacttgacaaaacctgagcacagaaggtataatacatgcagtatcatcagagtgagagccatcataaagagcttgcagcctgcacggatgagcagctgtgcgccatggccgccgcgggcgacagggaagcagaagagcttcttgtcacgcgctattacggaatggtgcgcgcgtgtgcgcgtccgcttttcctcgccggcggcgacggggaggatctgattcaggagggcatgttcggtctcattcaggcgatacgggagtatgacgctgacaaggcggcgtcgtttcacacctatgcagagatctgcattcgcaaccgcctgttctccgcgctccgtgccgcctcccgcggcaagcattatccgctgaacgaatccatatcccttgataccccttcctttgacagttcttcttacaccgccggtactttagatcccagccacacagaccccgagctcctcatcgcggagcgggaccacgtggagagtctactcgaaagtacccgcaagcacttgtccgagttcgaggcgaagatcttagggtactatttggaaggcctttcctgtcacgagatcgcaaaggccgtgggcaagtctccgaagtcggtggacaacgccgtgcagcgcgttcgccgcaaggctgcgcagcacattttttccggcgatatcagcaaacgctgaacgcatatatttttttctgattcaaagagagggtaaaatcatgtacgaagacaagactttagtttgcaaagagtgcggcaaagagttcgtgttcactgccggtgagcaggagttctacgcggagcgcggcttccagaacgagccccagcgctgcaaggcctgccgcgacgctcgcaagaacgccgctcgtggcccccgtgagtacttcaccgcagtctgcgcagcttgcggcggcgaggccaaggttcctttcgagcccaagtccgaccgtccggtctactgcagcgagtgcttcgccaagatgcgcgctgagcagtaattcttgtaaacgttttgatcgaaagacgtccgctaatgcgggcgtctttctttttggctttatggcagtttctttttttatatttcctattgaaaaagtgcgaaaaatgggataaactatttccagctattttcacggaggtgaatcaaacatgatcgaaattaagcgcgacactatcatcggtgacattctggacgttgcgccgcagaccgcgccgatcttcctgtcgatcggcatgcactgcctgggctgccccagctcccgcggtgagacggtggaagaggcctgcatggtccacgggatcgacgtggagaagctgctggctctcgtgaacgaagaggccaacaagcctgtcaaggaataagaaaaggacgcatacgggtcttccgtatgcgtcttgttcgctcagcgaaaggagggcggcggtggaaaaggaattacagcttcagccgcggctgcaatgcatcgcaagccttgtgccgcagggcgcgagactggccgacgtcggcaccgaccatgggtatcttcccgtgtggcttttgcagcacgggcgcattgaaagcgccattgcgtctgacatcaacgcgctgccgcttgaccacgcgcgcgcgacggcgcgagaatacggcgtgacggagcgcatggattttcgcctctgcccgggccttgcgaagatcaaagcagaggagtgcgacgccatcgctatcgccggcatgggcggcgagacgatcctcggtattctcgaggccgcgccctggacgcatgaggacgtgcatacgctcattttgcagccgcagacaaagatcgaccttctgcgctgctggctctgcgggcacggctaccgctttttgagcgagacgctcgtgcgcgacaaggagcagctttacgtcgtcttccgtgtgagagcggggatggggcaggagctgagcgaagcggacgcgctgacaggcttattgctgcggtccgacccgctgtacggcgaatacctgtcgcagcatcttataaagctcaatcgggcgagagatggcctcgccgtctcgtcgctcgcagataaggaggcgcgtatcgcgcatcttgaaaatctcatcgaagagatcgagagaagaaaaggggagtgggaacatggcaacggtacatgagatcgaacagaggcttttttcctgggcgccgcgcgagagcgcgatggactgggacaatgtcggccacctcgtcggcgatcccgagcaggaggtcgagcgcattttagtcgcgctcgatatcaccgagcgcgtggtgcaggaggccatcgactgcggcgcgcagctcatcgtgtcccaccatccggtgatgaacgtgcgctggcacgagcgcgagatgcaaacccttcggcccgacacgcgcctcggcggcgttttgaccacactcgtcaaaaacgacatttccgccatctgcatgcacacgaatctggatgctgcggacggcggcgtgaacgactgtctggcgaaaaaactgggccttaacgatgtttttttgctcaacgacgaaaaaatcgggcgtattggcacactttcctgcgaaaaagggcttgaagagttcctgcgggatgtgatagaattactcggctgcggcggcttgcgctattgccgcggcagcgggcgggtgcaccgcgtagccgtcggcggcggcgcgtgcggcgaatacatcccgcaggccattgcgcagggctgcgatacgttcgtgacgagcgatctgcgctacaacgattttctggatacgcggggactcaacctgatcgacgcagggcattttccgacggagaatgtcgtctgtccgacggtcaaggcgtatttggaggagcatttccccgaggtgaaaaccgtaatatcgacgtcgcacagagacgtcattcaatactatctgtaaggagagatcacatcatgtccggacattccaagtggcacaatattcaaaagacgaagggcgcagctgacgccaagcgcagcgccgccttcaccaagatcgccaaggagatcatcgtcgccgtcaagcagggcggctcgggcgatccgaataacaactcccgtctcgcgaccgtcattgccaaggcgaaggctgccaacatgcccaacgacaacatcaaacgcaccatcgacaaggcgctcggctcgggcaacaccgacaactacgagtccgtcacctacgagggctacggccccggcggcgtggccgtcatcgtcgaggcactgaccgacaaccgccagcgcaccgcgccggaggtccgccactacttcgataagtacggcaagggcatgggcgcgcagggctgcgtcagctggtcgttcgaccgcaagggcgtcatcatcatcgacaacgaggacggagactacgacgaggacgccgtcatgatggatgcgctcgacgccggtgccgacgatttcaacgccgaggataacgtcttcgagatcacgaccgaccccgacgcgttcaacgacgtcgtcaaggccctcgaggagaagaactacgccttcgtcagcgcggacatcagccttgtcccgcagacctacgtgaagctcgagagcgacgaggacatcaagaacatggaaaagctgctcgacatgctcgacgacaacgaggacgtgcaaaatacctaccacaactgggaccaggactaaaccccttgcaaatgctgactttttcagcagtgtgatacccgcagttgtgacatatctttgtcctgctatggcgtacacggcggcttctgttgtgacatacatcatggagattaaaaagagcttgagaagatattctcaagctctttttctatttcaactttcggtgcgtgaatgaagaactcccttgtaagggcaggatcttatgaaagggtgaacggttaaaagataccgtggttgtacttgatttgtccatatagaatgaaagataagccgatcaccagcgccggaagaacgatataatcgatggcatctgcattccagaatgtgacgagataggatagcacgagggaaacaccaatgacaagcgttcccatgccaacggccttgccgtatttgggaacatcttcctcttttactttccgacggttataggaatggatcgtgctgatatttccttttatatttacggtgccaagggttgacaggaatatgcccaatatcagaagcaataaatgatccatcgtgacctccctaaaaataaaataattcttcaaatttcttgtccaaagcgatacagagaatgagagccaacttggcagttgggttaaattgtccggtctcgatcgaactgatcgtgtttcgtgagacgcctaccatttctgcgagctgcgactgtgagagctttttttcaaaccgcgcctctttcaatctgttccgcaattttaactcatcgttcatccctttgactcaataagccgcaaaacaaaaaagacgaagcagaggatgaacattgcgaaatacaagacggtgatcgttaagtctgttttccgttttgctttgataaatcttaccagataatgcgtaccaagaatgctgaagtagatgatccatgggctgaaaagcatcgtgttagcagcccaaacaaatagaaccgaaacgaagcagcacgtgccggctccgatgcggctggcaatgctgccggcttgcgcggatatttctgcctctgccaggtctctgtttttgttttctctgcggctgatcgccaagatatcttctttttccatagggtacctctctgccaagttttcttgtcaagattataaatgcgccaagttttcctgtcaatatattctgctgagattcttgctgctgacgcactgaaagtcccgaatttgacgtattggaggcgaacgcctgtatgggcgttgtacgttcgaaaaggcgaaatggccaacattcggcattgactcaacttatatggatatcctataaaaatatataaatattccacttgaaattgtcgccgttgtttggtattatatctcggcacgtcggacgtccagtttcggcagaaaaacaaggtgcgctgtgaggaggagctttttccgcggcgcgctcctgctgtaacacctgtatagccccccttgcacggacggccgggtgaaaggagaaacatatgagtaagaacaacaacacgcagaagatcgttggtctcggtctgttcaccgctattgtgatcgttctgcagctgatgggcagctttatccggtttggcacgttcagcatttcgctggtgctggtgccggtcgttatcggtgcggcgctctacggcgcaggtgctggcgcgtggctcggctttgtgtttggcgtggtcgtgctgctcagcggcgacgcggcggcgttcctcggtgtcaacgcgcttggcacgatcctgacggtgctcgtcaagggcacgctggcgggccttctctccggccttgtctacaaggcgcttgagaacaagaaccgcacgcttgccgtggcggtggccgcagtggtctgtccggtggtcaataccggcgtgttcctgatcggctgcctgctcttctttatggagaccatcggcggctgggcggatgcgatgggctttggtgcaaacgtcggccagtatatgatcgttggccttgtcggcgcgaattttatcttcgagctcctcttcaacgtggtgctgagtcctgtggtcgtgcgtcttatccgcatcggcaagaaggaagtttgattcataaaaaagaaaagcggcgggagctcccgccgctttttctgcattttggacagtctatgt

SEQ ID NO: 10171 - DNA, 4651 bp, Unknown
  gut microbiota DNA sequence
atttccgccgtccctctcatattttgcacgagcatgactgtaagccgggttctgtatttgacagtcatctatctacgcgccgcgttgccgcggtactccagccaccccgggagcggtcgggccaacctatatgctcccataccggtgttgctccggatagagtttacagcatcggacactctcgagccgacgggtgcgctcttaccgcacctttccatccttacctgagatacttgcatacctcgggcggtctatttctgttgcacttttcctcagatcgctctgggcgggcgttacccgttatccttgccctgtggagcccggactttcctcacagcgggcctttcggcctcgccgcgcgactgtctgtcatactcgcacaactattttagcccatggcgcggggcttgtcaacggaaaatgcattgctattttggcgttcctgcgctatactatatattgaatttgtatgtgcagacgaaaggatgaacgtctatgacgatacaggaatatctatcctccctgcggggaaaaacagcggcagtgctcggcatcggcgtgagcaacacgccgctcatcgagcttttgtgccgaaacggtgtgcaggttatcgcctgcgacaaaaagagccgcgaagacctcggcgagcgcgcgaagcagcttgaagcgctgggcgcgcacttgcagcttggcgaaggctacctcgatgatctgcgcgcggacgtcgttttccgcacgccgggcatgcggccggacgttccggcgctgctcggggcgaaagcgcgcggcagcatcgtgacgtcggaaatggagatctttttcgaggtctgcccatgtacgatcatcggcgtgacgggcagcgacggcaagaccaccacgacgagcatcatcgccgaaatgctgcgcgcggcggagaagaccgtgtatctcggcggcaacatcggccacccgctgctgtgcgacgcggagaagatgcagcctgaagacttcgcggtcgtcgagctctcgtcgttccagctgcttgatatgaagcgctcgccgcacatcgcggtgatgacgaaccttgcgccgaaccatctggatgtgcacaaggatatggacgagtacatcgcggcgaaggagaatatctatctccatcagcacgaggacgacatcgccattttcaacgaggacaacgacatcacgcgcaagctctcgaaaaaggcggcagcgtggacgcggctcttcagccgccgcgaggaagtcacggacggcgcgttcctgcgcggagataccatcgtcctgcgccatgacggatgcgaggaagcggtcatgcagatctctgacatccgtctgccggggatgcacaatgtcgaaaactacctcgccgccgtgacggcgctcgacggtttggtgccctacgaggtcatgcgcgagactgcgcgtacctttgtcggcgtcgagcaccgcatcgagccggtgcggacgatccgtggcgtgcagtggtacaacgattccatcgcgtcgagcccgacgcgcaccatcgcggggctcaacgcgttcaacgaaaaggtcattctgctcgcgggcggatatgacaagcatattccctttgcaccccttgcacccgaggtggtaaagcacgtcaagctgcttattttgtgcggcgcgacagcggacgccatcgaaaaggccgtgcgcgagtgcccggactatcacggcagccccgagatcgtgcgctgcgagagtctggaggattgcgtgaagaccgcctataagcgtgcagtgcgcggcgacatcgtgacgctctcgcccgcgtgcgcggcgttcgatcagttcgcgaacttcatggagcgcggcaaggcgttcaaaaagctcgtcatggggctgggcgaatagggaaaagcccgcgcggcataggcttcactggaatcggggtgaggctctgtgccgaaatggagacacagaagactttcaggaaagaagcgggcgctgctgcttgtgctttttttgatcgcggcgctgctggcgctcgccatcgtggcaatgacgcacctaaaacccgtgctcacgtcgctcgcaacggcgcgcgtgtcaaatacggtcaacggcatcgtgaccgccgccgtgaacgagacgatctacagcggcggcgtagattacgaccagctcatctcctttgaaaaggacaacgagggaaagatcacggcggtcaagagcaacatggcggagttcaaccgtttgcagtccgccatcatcgacgaggtactcgaaaagctctccgaggtgacgacgaaggaactctccgtgccggtcggcacgctgctcggctcgccgtttttggcggggcgcgggccgctgatccgcgtgcggatgcagtcggtcggctcgtcgagcgcgcattttgaaaatgcgttcacgtcggcgggtatcaaccagacgaagcaccaaatttatcttgtggtggacgtctacgtcagtatcctgctgccgggcttttccacaacgacaaaattcagcaacacctattccgtggcggagaccgttatcgtcggctccgtgccggacaattacacctatttcagcaatggcgaggacatggagcagaacgcggaagattacatcatgaacaacggctgactgccttttgcgcaccgccggagagagggaacgcactatggacaaaaatatccggatcgacgagatcgtaacacggctgaatgccgcctccgacgcttactacggcgggcaggaggagcagatgacgaactacgagtgggacgctctgtttgacgagctgaccgctctggaaaaagcgaccggctatgtccggcccgacagtcccacgcaggtgacgagccattccggaaacgaaatggacggcgagggggagaaggaagcgcacgagtaccccgcgctctcgctcgccaagacaaaaaaggtcgaggaattgcaggactgggcgggcgagcgcgacatttggctctcgtggaagctcgacggctcgacgctcgtggcgacgtatgacggcggcgcgctcacgcgcgttttgacgcgcggcaacggcaccgtcggcacgaacatcacctatatggcctccgccatccgcggtattcccgcgaaaatcagcgacaagggccacctcgtcgtgcgcggcgaggcgaccatctcctatgcagatttcgaggccatcaacgacacgctcgaggacgcggacgaccgctacgcaaacccccgcaacctcgccgccggcacgctggcgctcgacaagacgaatctcgacaaggtaaaagagcgcaacgtgacgttcaacgcctttacgctcgtccacacggatgaagtgatccgctcctggggcgcgcgcatggactatctggaaaagctcggcttcatcacagtcgagcgcgagcacacggatgcgaaaaatctgcccgacgccatcgcgcgctggacgaaaaaggtcgactccggcgagatgggcattcccgtggacggccttgtcatcacctacgacgacacggactacgcagcgaccggcagcgtgacgggtcatcacgccacgcgcgcgggtcttgcctacaagtgggcagacgtctctgccgacacggtgctcgaccacatcgaatggtcgtgcgcggcctcgaccatcacgccggtcgcagtctttgaccctgtgcagctcgagggcacgactgtcacgcgcgcgagcctctgcaacgtcagcgagctcgagcgtctcggcatcggcaaggaccgcaagaccgagcttcgcatcatcaaggccaacaagatcatcccgaagtgcatcgcggtcgtcagggccgagggcagctatgaagtcccgacggcctgtcccgtctgcggcgcggcgaccgaggtgcgtatcagtcccatcagcggcgtgaagacgctgcgctgcaccgatccgaactgtcccgccaagcacttgaagcgctttgtccgctttgcgagcaagggcgggcttgatatcgacggcctctccgtgcaaacgctgcacgagttcgtcaaccgcggctatctgcgcgattttgccgacctctatcatctggacgcgcacgcggacgagatcgtaaagctcgaaggctttggcgaaaagtcctgcgcgaacctgatggcggccatcgaaaagagccgcaaagtcgaccccgtccacctgatcttcgccctctgcatcccaaacatcggcgcggacgcgggcaagaagctcatcgcagcgctcggcacgaagggctttttatcacgcatcgagagcggcgagggcttcgaggacgtggacggcatcggcgtcgagcgctcgaacgcgatcctgaactggtttgctgacgatgaaaacaaaaacctcttcgaccgcctgatggcagagctcacattggaggacgtcgcccccaagcaggaggccgacggaacctgcaaaggtctgagcttcgtcatcacgggcgatgtgcacctcttcaaaaaccgcagcgcgttcaaagcctacgtcgaacagcaaggcggcgccgtgaccggcagcgtctcggggaagacaacgtacctcgtcagcaacgacggggaatcgaattcgtcgaagacgaaaaaggcaaaggaactgggggttcctattctttccgaggaagaatttgtctctcggttcggaggtcccgaatctgct

SEQ ID NO: 10172 - DNA, 229 bp, Unknown
  gut microbiota DNA sequence
gaaagcagattggaaagatacatcaacctatcaaagttgaattccatcagccgatttgccgcaagcagtattcttccctctggtacggcggcctggtggtatctatcaaggtgcgcgggtgtgtttttgccattcacgcctgcggagatatctacgccacactttacgataagagtgatggtacagaattactctatgtcaaagataagagtaactctggacgttttgg

SEQ ID NO: 10173 - DNA, 1246 bp, Unknown
  gut microbiota DNA sequence
ggtgttggaaaaggactgctcccacttcatccccggtctattcggttccctcatctccacggtgctcattgctctgagcctgttcgcctttgacggacggatggctctggcagcattgtgggtcatcccggtatccgttgccatcgtggtgggcagctaccgggtgcaggacaaggtgcaggccaagaccatggcggcgaaaatggcctgtgcggacggcattcaggagtacatcgagactctccgggacctgaaagccagcaatgcggagcagcgttatctgtccggtctttccggcaaaattcgggctgtggaaaagcagtccatcgcagcagaactggaaacagcgctgtttgtgtcctctgcgagcatggtgctcaagctgggcattgcgtcggtggcactcaccggctcggtgctgctggtgcagggcagtatcgatgtgctgaccctgtttctgttcctgatggcggcttctcggatgtacgaccccatgcagggcgcgttgcagaatctggcggcggtcattgccatgcgcaccaatgtggggcggatgaacgagattctggacgctcccctgcagaccggcagcgagcagctgaccaatcagggctgcgatatcgtgttcgaccatgtgggctttgcctaccactccggcgaaacggtgctgcgggatgtctcctttaccgcaaagcagggcgaggtcacggcactggtgggtccctccggcggcggcaagactaccgtttcccgactggcggcacggttctgggactaccagaagggcagcatcaccgtgggcggcatggaggtttcccgaatcgacccggaaaagctcatgagcctgtattccatcgtgtttcaggatgtgaccctgtttgataacaccattctggagaacatccgccttggccgcaaggacgccacggacgaagaagttcttgcggcggcaaagctggcaaactgcgaggaatttgccgaaaagctgccggacaagtggaacaccaacatcggggaaaacggctgcgccctttccggcggcgagcgtcagcgcatctccattgcacgcgccttcctgaaggatgcgcccatcattctgctggacgaagccaccgccagtctggacgtggaaaacgaaactgccattcaggaggcactttcccggctcataaaacacaaaactgtccttatcatcgcccaccggatgcgcaccgtagccggggcggacaaaatcgtggtgctgtcc

SEQ ID NO: 10174 - DNA, 5929 bp, Unknown
  gut microbiota DNA sequence
catgttttcttattaggaggcggggaaaccgtgtcccttgttttttgagaattacactccgcttcgtgccttgccgcccaaagggcggcttcgacacgcgcggagcgagaagagttttttggcacgcgcatgtcgcgccaaaaaacgattcgaaatcatttcgcgtctgcggatgcgaaaagctgtgacgctttcattatttgtggtaaatagttacaaatgggaacaaaagcgccaaaggtgtagtcaaaagaagtgaagtctgctataatgaccgcgcagttttgagagaggagattttgacatgaaacacttttttgcactgctgctcagcgcgctgatggtgctgtcgctgctgactgcctgcggcgacaaggtgacgccgtccgacggcgacgatcagaccgtcacggacgagaatggcagcgacaccgacaacaatactgacgatacaactgatccctacgacgccgtgcgcagctactggtccgaggaccagctcacgcaggcctgggggccggatcaggtggtggagcacctctttttccacccgatcatcgcctacccgcagtgggccttccatgactgcaatgccagtcaggaccagcgctacggcctcgacgactggatggtgacggtcgacgaatacaacaaaattttgcagtccgtgtacgacaagggctacatcttagtcgcgatggaagacgtctggagcgaggtgacggacgagtccggcacgcacatggtgcgaaacaccctgatgctgccagagggcaaaaagccgctcatcatcagctttgacgacgtgaactactacccctacatgctcgacgagggcttcacgagcaagctcgtcgtcggcgaggacggcgagatctgggcgcagtgcaccgatccgtacacaaatgagacctttttgaccaaggaactcgacgcaacgcccattctcgaccagtttgtctacgagcaccccgacttttcgctgaacggcgcgaaggccatcttctcgctgacgggctatcagggtattttaggttaccgcacgcaggatgaccgcgacatcgcggcagattcgcccgaccgccccgcgttcgatgcctaccgcgcgagcgagatcgaggccgtcaagcccgtcatagcgcgtttgaaggagaccggttggacgttcggcagccacacctggggccacatccgcctcgacaccaaatcgctccagaccgtcatcaacgacaccgagcgctgggcggacgaggtcggctcgctcgtcggccccacgcagattttgttctatccgcacggcggccgtcccgacggtgatgactggcaccagaccggtgagcgcttcaagtacctgcaaagccagggcttccgcatcttcgcgagcgtcggcacgagttcgttcagctatgtgaagcccgacatttccgccgtcatctgcgaccgtctgcatccggacggcaccacgctgcgccactcgcgcagccgctatctgcaattctataacgccgaggacatcatggatacgcaagtgcgtcccgatcttggcgtagactggtgaggaggcgtttttatggcaacgttagaagaactcaaggcgaaggccgtcgccatgctggacatggcgtatgtgccgtattcccactttcccgtgggcgcggcactcgaatgtgaggacggcgcggtcttcaccggctgcaacatcgaaaattcgagctacggcctgacgaactgcgccgagcgcaccgcggcgttcaaagccgtgagcgaggggcaccggcgcttcaagcgcatcgtcatcgctgggcgcagcgacgactactgctacccctgcggtgcgtgccgtcaggtgctctacgagttcggccccgagatggaggtcatctgcctcaacaaaaagggcgaggagaagcgcctgtcgatccgcgaactcctgccctatggcttcgaccagacgtggcttgcgatcgacgagaaataacgaaaaaagagagcggcgccgccgctctctttttttgctcgtttcagttgccgccgggggaggcttcgatcgtcagcgtgccgctgaccgtcgaaatttccagctcgctcatctcaccgccctcgagcgcgggcacggagtagtgcgtttcgcggtcgccgcaggcgatgagcgtgccctcgcgctcggtgagcgcggagcggaacgcgccgcttttcgtttcatagtcgagagtaaagccgtcctgcgcgggaagggtcagatagatgctgccgctctccgtttcggcatcaaggcgcagcgcacgctcggtagccaaaatcaggttgccgctgacgctttcgaagtccagcgcgccgagcgcgccggcgatatccaccttgccgctcgcggtttcgatctcggcgctctccgcatcgcccgccagctcgatcgcgccggagagcgtcgaaatatcgacccttgcccacgtgccgtccaccacgcccacgctgccgttcaccgtctcgatctcgaccgcggggcagcttgcgcacatcacgcgtgcgtcgccgccgacggtcgaaaggtcgatcttctgcgcatcggcgctcacataggcgtaggcgtccgtcgtttcgacctcgatcttctcaaagtgaccggcgttgaccaactccgccggaagtcccacgtcgagatacttttccccatcgtagctgccgcggtaagcgtcgccgaggaagcggatgcgcagcgtgtcgccgtcgatcgcgcagaccatcttctcgctctcggcgagcggcgcggtggattcctccttcacgctgatctgcgcgctctgctcggcggcatagatgttcacgccgccgctgcgccacgagatgtcgatcttacggatgtcttggctctcgccgatgctgagcaccgcgcccgtgtggagctcttttgtcccctccgcctgcgtgcagaaggtgtaggtcgcgctgctgccgtcccagagcgcgtcgacggcgaaaatgccgtcgctttgcggtagttctgcgcggaatgtgccgttatcctgccgctgggcggtcacggtctcggacggcatgccggtgctgccccaagcatcggacggccagcagcggagactgacggaatcgggcgaattatcgctgaaatcgagcgttacggtgtagaaataggcggccgacactgtaaagggcatttccagtacaggcgtgatgtcacgggaggtttcgtccagcgggtgcgcgccgcaggcaatgacggtcatgctctgtaggccctgggggtaggtccagtcgtagctgccgcttttgagggtgacgctacaagcgtttgcacttgtcaccgtcagtgtcggcggggtttggcgcgcggcctcgtctgcgcttttttcgccgcaggcggcgagggaaagggccagcgcgagggggagcaggagggaaagaagcttcttcatcgttcgttcctcatttctttcggatacttctatagacgtatgatagccgaaaaagttcccacgcacaacggggatcgttgcacaaaacgcggcaatttgttgtatcgtgaattctaataccggaggcggtacaactttttgccgcgttgtgtgcaacgctgcttcatgatacggcgtatcatgaaaaggcaaatcatgcatcagtgttcccgcgtttgcaggggggtgtgggctgccttttccaacattatcaaaatttgggggaaagagcatggagacgacaacaaattacaaacttccgcaatgggtcaaggaggacccgatcaaaatgcaggacttcaatgccgcgtttgcgagcatcgacgcggcgctcaaggcggagaccgacgcgcgcagcgaggccgacggcacggcggcggagcgcatcacggcattggcgcagacgatcgcaaacggcaaaatctgccgcatcaaatacggcagctacgccggcaatggtctgagcggcgcggaaaatcccaacaagatcgactgcggcttttacccgctgcttgtgatggtgagcgagcagaacgacacgcagcactgggcgctgcgcggcgtcagcgggttttacaactcgaataaccggggcaacgcggcgatatgggacaacagcagcgtaagctggttctgccagcaggaagaggatcagtatttcgccccgcctgccatccagttcaatgaggcgggcaaaacatatcattatgtggtgctcggctgcgacgcggactgagacgcagaaaaacaaaaaacagcccccggctcaaaagagccgggggctgaaactctattcagagattttttgcgcttacgtcaatgattagttggcgtagtaagcgttgagaacaccagaatcagtgagcttgccaacagtgctgtcgatggtgagggtgatggagtcgggaccgaaagcggtgagcttggcggtagagacgccgaactcagtagcagcaccagcaagggtgatggtgtaggtgccattaccgggattcttaacagtcttggcgtaggactggagaacagcaccggtgtccttattcacgatgttcagggtgtaggtgtaagaggtagcgagaggatcggggttggtggaggtgtcgaccttgttcacagcgtaaacctggagcgccagacggttgagggtggcggaggtggcagaggtctcagcgttgtaaacaacgatgacgttctgcgtggtgacatcgccgagagccagaggcatcttggtcaggccgtcaacgccgttgccggaaaccgtgtagaacttgtcgccagtgatggtgccatcgacatagtcggtgtagacagagttcttgtaggtgtccttgtcagcgcccacgatggagtcgaccttaacggtgtagccggcgtaggcagcagccatgggatagccggtgaaggcggtgatgtcaacggagctgatggtctcagtgccgatcgcagcgatggcgacataatccttgacgtagttgttgctcagagcgaccttgaagagaccgccggcgaccttattggtagcctgggttctgagggcgttgagcagggtgaggacgatagcgtcgtccttggagccgtagatgttgcccttcacgccgtcaacgtagccggggatggtgtagacaccggtcttggcgtcataggagacctgctcgttggcatagtagaagaggctggtgaccttggcggcaacgggatcggcgatgacgtagacgtaatcggcgaccttatcaccgttcagatcgacgaagtcgacctcagcctgagcatagttgtcgatgttgccgagaccaacgatggacttgaaggtgtagggattggtagtgttgttgcggaccaggaagacggtggcatcgtcaacgatcaggtttttgccgttgtactgggtgttcttgctgacgaacaggttctcgttgaagaacttggcgtcaacaccggtagcgacttcgacagcggcgagagtgccgtttgcctgggtggtgaactggaagaggtggccgttcaggataccgttgacatcacagacagcgttggtgttgatgtaggagtcaacgtagaagtagtcaccatcaaccttcatgaccttgttctggatgccggtgctgtgggtgaccttaccgctcgcaatcttgggggccacaacgccggaagcagtatcgtcgaagtaggtcatcttgctcaggtcgaccacagcggtggtgccgtccatgtaggtgacattcgccttagcaacgccggaaccgtccgcagcgttgccagcccaccagatggagttgatgacgccgtagctggtagcagcagcgatctcaacgttaccgatgaggttgttgtactgatcgaagaaccaagtgaacttgttggtgctggccaccgcgttgtcgaagtagaacttggcagcatcgtcatagacagtgccctcgacgttgtgctgcttggcgttgtagtagatcacgctctgagcg

SEQ ID NO: 10175 - DNA, 5886 bp, Unknown
  gut microbiota DNA sequence
caaatggggtgctgttcgggagagcgtagttggttgtacgtttcaatgcaaaatcctccgttatgatagaaataaaaaagcactgccgaagcagtgctttcatgtttcgcaaacacgaaaaaagatgcagggcgaaatggtacaacgaagcaaaataaccctaaataactgagattatgacggatttcgcaagtcgaattatgactaaatatgcagacaaattttacaaatcgcccgacatgaagccgccgcggagccagttggcgagctcggcgggggtgccgggggcgccgacggtggcgaattccgtgcgcgaggggaccatctgcgcgttgtccgagctctctgcccactggacgcgctgcaaaatgtgctcggtgcagtgctcgagcgggccgtcgggcgcgggtttatattggaggaggatggtcacgtagcggttgtcggacgtccagcggccgaagttcgtcgtgggcttgcgccacttccagaggcatttgtcgccgcgctgctttttgagcttcaaatagccgttttcgatgtcctgcgtgcagcgcatgagccagatgacatggtagcccgcgcgctggaagtgggagcagacgtcgaaaaagtgctcctccatgagtaagccgtcctggagcatcatcacgaaatggttgatctgcacgtaggcggtgacggtcttatcgccgacggtgacggggacatcgcggcactcgggcgggacgatcgcgcgccactgctcgcgccacgcggaggcggaggactggacgagcgggggcgttttcttcttccaaaacagcatgggggctcctttttcgcaatttttcttccattatagcgaaaacgggacgaaaaggcaaggaatattggcattttacagggatttgacagagcggcgggcgacgggcgcttgctatttcggcgaaaacatgatattctactgtgattctaaggaaatcgacttttctttgcaaggagaacggctatgaagcttgaccacaagcgcacggtgctggtggggctggcgtttttgtccatctgcgcgttctggcagatgtacgacaacatcatcccgctgattttgacgaacacgttccacttagacgagaccatttccggcgcgatcatggcggcggacaatgtgctggcgctgtttttgctgccgttcttcggcgcgctgagtgatcggacgagcacgaagatcgggcggcggatgccgtttatcctcggcggtacggcggctgcggtgatcctgatgaatctgctgccgctttttgacaacggctacgcagatggcgcgagcacgggtaagctcgcgatgttcgtcgtcacgctggggctgctgctcgtggcgatggggacctaccgctcgcccgcggtggcgctgatgccggacgtgacacccaagcccataagatcgcgcgcgaacgcgatcatcaacctgatgggggcagtcggcggcatttcgtatctgatcgtggcggcggtgctgtatccgaacagcaagacggcgggggccgcgcatgtgaactaccaaccgctttttgtcgtcgtgtcggtgctgatggcggtttcggtcatcgtgctgtacttcacgacaaacgagccgaagctcgcggcggcggagaaggaatacgaggccgagcatcccgagcagcagctcgtggaggaggagccggacggcagcgaggaactccccaaagaagtcaagcgcagccttgtgatgctgctgtgctcgatcgcgctgtggttcatcggctacaacggcgtgacgacgtggtggacgacgtatgtcgggcgcgtgatggggcagggcctcggcggcgcgtcgacgtgtttgctcgtcgcgacgggcggggccatcgtgtcgtacatccccgtggggcagatggcgtcgaagatcggacgcaagaagaccattcagggcggcgtcatcctgcttgcggcgtgctttgcgtcggcgtactttttgacgacgcattatcagagcatcaacgccgtgatgtttgtcgtgtttgcgctcgtcggccttgcgtgggcggcgatcaacgtcaactcgctgccgatggtcgttgaaatgtgcaagggcagcgatatcggcaagtttacgggctactactacacgttttcgatggcggcgcaggtcgtgacgccgattttggcgggcacgctcttgaagcacatcagctacagcatgctgttcccgtatgcggcgttcttcgtggcgtgcagctttgtgacgatgtgctttgtgcgccatggcgactgcaaggtggaggccaaggccgggcttgcggcgttcgaggacatggatgcggactaaatcgaatacaagaagtgatctaaaatgaaaattttacggatcgttgtcggaatttgcctgattctggcggtcgcgtgggcggttttactgcgcgcgcggcgcggaacggagtcgatggcggcgctgcggaaattccgctatgcgcaccgcgggctctacgataaggaggcgggcattcccgaaaattcgctgccggcattctcgcgcgcgatcgcgcggggcttcggcgcggagctcgacgtgcacctgctgcgcgacgggacgcttgccgtgttccacgacagcgatgtgaagcgcatgacgggccgcgagggatacctcgaagacctgagcgcggacgaactcaaggactatgcgctggacgggacgaaggaggccatcccgcagttcaaggatgtgctcgcgctgtttgcggggacgggcctgccgctcattgtggaggtcaagagctttcgcgacaactttgccgagctgaccgagcgcacgatggcggaactcgacaagtttggcgtcaagtactgcgtggagtcgttcgacccgcggtgcgtggtgtggctgaaaaagcaccggccagaggtcatccgcgggcagctgagctgcgactttttgaaagaccgcggcaatttgagcctgccgatggcgtttgcgacgacgaatctgctgggcaacatcatggcacagccggattttgtcgcctataaatttgaagataagaaaaactgggcgccgcgtttatgccgtaagctctacggcgcgcagggcgtttactggaccatccggtcgaaagaagacttggagacggcggagcgcgagggcgcgatcgccatttttgagcggtttattccctaaagaggggtcccacttgtggaagggtgggggaaaagaagcaaaaccgaaagaaaaggaagaaggttttatggcagaacagaaaagacgctggggcgaccggcgcgacgcaacactgctgcgggatgtggattcgctgcactttatcatgggcatcatctatcccaaccgcgcggacaacgaggcgtatatcgcagagcgcgtgaatttagagcccatcaaggactacattgcgacgaaaaactatgagggcattccgttcaagtacacgtttttccacgtgatcctgacggcgctcgttaagacggtcattttacggccgaagctcaaccgcttttacgcgaatgaaaactactatcagcgcaataaggtgacagcgggctttgtcatcaaaaaggagtttgccgacggcagcgaagaggccatggctctgctggagataaagcctgagagcaccatcgacacgatccacgaggagatccaccaggaggttgcggcctgccgcgagcagaagaaggtcaacacgaccgacaacagcatgaatgtgctcaacagcctgccgcgctttttgtccaaggcggcggtgcgatttatccgctggctcgacaagcacggctggtgccccgatttcctgatcggcaaggacccgaactacagttcggtgttcatctccaacctcggttccattcatctcaaaagcggctaccaccacctgacgaactggggcacgagctcgctgttctgcatcatcggcgaaaagaagtggacgccgctgtacgacgagcacggccttgtcgaaatgcaggagacggtcgacctcggcctcaccgtggatgagcgcattgccgacggctactattacgcaaagagcgtgcgccttttcaaatatctgttagaacaccccgcccttttggaacgaccgctatcggaggaagtagaatatgagtgattccattgtcagaacgccctggaaggattacatgggcgaggtgccgatgcaccttgagtatttcgacggctcaatgttcgaggccgtggagcggatcgctaagaaatatccgggcaacatcgcttttacgttcatgggaaagtcgacgacctaccgccagatgatccgcgagatcgagcagtgcgccaaggcgctcaagaccatcggcgtgcgcgagggtgacaaggtgaccattgccatgccgaactgcccgcaggccatctatatgttctacgccgtcaacctcgtcggcggcattgcgaacatgatccatccgctgtcggcagagaaggagatcgagttttacctgaacgcctcggaaagcgtggcggcggtgacgctcgaccagttctacaacaagtttgaaaaggtgcgcgagcgcacgaaggtcgtgaacatgatcatcgcaagcgtgcgcgacgcgctgtccccgacgatcaaggcgggctatatgctgaccgagggacgcaagatcgagaaaattcccgaggatgcgccggtcatcatgtggaaggacttcatgaagctctcccgctcctgctactataagacctataaggtcaagcgcgagggcgcggaccccgctgtgatcctctattccggcggtacgaccggcacaacaaagggcatcgtgctgacgaacaagaatttcaacgccctcggccagcaggtcatcgcggcgaacccgatgttccgccccggcgaccgcatgctcgcggcgatgccgctgttccacggcttcggcctcggcgtgtgcgtgcacacgatgctctcgcagggcggacgctgcatcctgatcccgcgctttacggccaagagctacgccaagcagatcgtgaagtacaagtgcaacttcatcgccggcgtgccgacgctttacgaagcgctgctgcgcctgccgagcatggacggggcgaacctcagctcgctcaagggcgtattctccggcggcgacagcctgtcgatcgagctgaagaagaagttcgacaagttcctctatgaccataaggcgtccattcaggtgcgcgagggctacggcacgaccgagacggtcacggcctgctgcctgacgccgccgcacatgttcaaggagggctccatcggcctgccgtttccggatacctacatcaagatcgtcgagccggacactgaccgggaggttccctacgggcaggagggcgagatcctgctcgcgggcccgaccgtgatgaaggagtacatgaacaatcccgaggagacggcgcagacgcttcgcacgcacgccgacggcctgacgtgggtctacacgggcgacctgggcgtgatggatgaacagggctttatctacttccgcggccgtgccaagcgcatgatcatttcgtccggctacaatgtctatcccggccagatcgaaaatatcctcgacgcgcacgagtacgtgcagatgagctgcgtgatcggcgtgcccgatccctacaagatgcagaaggtcaaggcgttcgtcaagcttgcgcagggcgtgcccgcgaccgaggagaccaagcaggtgctcatggcctactgccgcaagaatgtggcgaagtacgccatgccgtatgacatcgagttcaaggaggatatgcccaagactctggttggtaaggtggcgtatcgccagctggaggaagaagaactttctaagctgaaggctcaggaagagaaataaggtttctcctgcaccatgcagggtggtaaatccctgcac

SEQ ID NO: 10176 - DNA, 9373 bp, Unknown
  gut microbiota DNA sequence
tttttgtctgttttgcacacatttgtacaacaaagttcagctacctttttcccgaaaaggggaagacaaaaaaatacgccatgatataatgattctgcaatgacggggcgcgagctccgaacaatacgatcacattttctgtggaggattatcattatggctatcaaagtgggcatcaacggcttcggccgcatcggccgcgtcgtgctgcgcatcatgatcgagcatccggagcagttcgacatctgcggtatcaacctgcgcaaagcggatctggattacatggtctatatgatcaaatacgattccgtgttccgtcagttcaacggcacggtggagcacaaggacaagaacctgatcgtcaacggtcacaccattcaggtcttcagcgagtccgacgcggcgatgatcccctggtccagctgcggcgcggagtacatcatcgagtccaccggcgcttacaacaccaccgagaaggcctcccgccacttcaagggcggcgcgaagaaggtcatcctgaccgcgcccggcaaggatgaggtcacccccacgttcgtcatgggcgtgaaccacatgctgctccattctgacatgaaggtcgtctccaacgcctcgtgcaccaccaactgcttagcgccccttgccaaggtcgtcaacgacgagttcggcatcgagcaggcgctcatgtccaccatccacgccgccaccgccaagcagaaggccgtcgactcccgcggcggcagcgattggcgcacgggccgctccattctcaacaatatcatcccctcctccacgggtgccgccaaggccgtcggccgcgtcatccccgagctctacggcaagatgaccggcatgagcttccgcgtccccacggcggacgtctccgtcgttgacctgactgcccacctcaaggtcaagaccacctacgccgatatctgctacgccatccgccatgccagtgagacctatatgaagggcatcatcggctacaccgcggaccaggtcgtctccacggacctgattggcaattcctgcccctgcatcttcgacgagaccgccggcatcatgctcgacaacgactttgtcaagctgatcgcgtggtacgacaacgaatggggctactccaacatggtcgtccgcctgcttgagcacatggtcgcggtggacgagggccgcgtgacgcctgaaaagcgcgtcgtccccaaggataagccgaaggaagagcccgccgccaaggaagcgtaacaacgaaataaaaaaggaaggacgctgcgcgtccttccttttttattcgtcctttttttctgctgcttttgcttcgagctcggcgacggtcgtgttgtcttccatgccgcgggcgtggaggacatcgtcgcgcgtgagggtcatcaaatcatcctttgtaaagctctccatcttcgcgaggcggttggcctgcgcggtcaagatctgctcgaagaggttgcgcacgccgcgcgcgttgccgaacgtcacaccgtcggcgttctcatcgtagatgaagtccttgacatcctgctcggcgtcgggagagagggtgtactgcgacttgcggcactgcattttgaaaatctcgagcatctcgtcgagcgtgtagtcgtcaaagtgcaggtagcggttgaagcgggactcaaggccggggttcgattggatgaacttttccatcaagccatcgtagcccgcgacgatcacgacgaggtcgtcgcggtgatcctccatcgccttgagcagcgtgtcgatggcctcctgaccgaagtcgttgtcgcccttgccgttgagtgcgtaggcctcgtcgataaacagcacgccgccgagcgccttttcgatgaccttgctcgtcttgatggccgtctgaccgacgtagcccgcgacgagcccgctgcggtcgacctcgacaagctgacccttggaaaggatcccgagtgagcggtagacgcgcgccatcaaacgcgcgatcatcgtcttacctgtaccggggttgccggtgaagaccatgtggagcgagaagtccgcgttcggaagccccgtctcctcgcgccgcttgaagacagtcgccatgttgatgaggttattcacctcgcgcttgacctcgccaaggccgatgtagttgtcgagttcttttttaaggtcctcgatcttctcgggcgggggaagcggcgcttcctcttcctttttctcgtccgcgccggtggaggcggcgggcctgttcggctttgcgccgtccgcgctcttcggcgcgtttgctttgggcgcagcttccttcgggacggcggatttcggcgcgtccggcgtcagcggcgcgccccagaagtcgctgcccatgcggtttaagttgttctgcgtcatcgtgcggataacgtcgagctgctggagaatgatctcgtcctttttatccatgttgattctctcccttcgttccgtagggcgtgtgcgccatcgcgcggaacaagaatgcagtgatcaggccgctgagcgcgcccgtgaagagcgacaccagcagcaaaaacggcagatagtagagcggcgcggtcgagccgagcgtgatgagcgcggcgcagacctgcccgcagttgtgcgccgccgcgcccgcgatcgagacgccgaaaatgctgagctttttcgccccgctcaaaagcgccatcaccaaaagcgccgacagcccgccgagcagcgagaataaaagcgccgaggcattccccgcaaacagcgcgccgagcgtgcagcgcacgagcaggatggcgagcgcgctcggaaatccgatggcatagagcgcgtagagcgtgacgatattggcaaggccgagcttgacgcccggcagcggcacaatgagcgcgagcggaaaaaacgactccatgtaggacaacgcaagcgcgagcgccgcgagcaccgcgcagagcgtcagctctcttgttttgatcttcatgcgctcaccccgcgatcagatcgtagtcggacgccgcgccctcgagcgtgacggccacgcgggcgggcaggcagacgatgctctgtcccgcgcgcgagatcgcgccggagtgcacgcagtcctgattcgggcagtcgctttcgctcacgcgcaccgcaccgttttccacagcgacggtaagcgtgtagccgcggctctcatacgtgccgccttcataattgctgagtgcgcagcgctcaacggtctcgccgtcaacactaatgctgaccgtcagctcgcccgccgattttgccgcgaaatacggccttgcgccaagtccgagcgtgagcagcagcaccgcgagcacgacgagcgcgtcccacttcgtcggcttcagcttaggcgagcgcttcatacgtgtacccgctttcgtcgttcggcgtgaaggcatcggcaaggccgtcggtgtaaagcacgcggccatcgtcggtgactaaaatgagctcaaaatccgtcccctggtcggcaagatcgtcgcgcagcgcaagcgcgccgtcggggccaaggacgaagcacgccgtcgagagcgcgtccgcccacgcgccgttctcgcacagcacggtcacgctgacgagcccgctttccgcggggcagccggtcttggggtcgagaatatggtgatatcgcacgccgttttcttcaaaatagcgctcgtacacaccggaggtcacgatgaacttatccgccgccgatacgacgccaaggtagctctccgtgtccgcagggtccttgacagcgatgcgccaatcgctgccgtcggtctttcgccccatgacgaacacatcaccgccgaggtcgagtgtcgcggacgtgacgccctccttttcaagctgcgcgcgcagaagatccgccgcgtagcccttggcgatgccgccgaggtcgagctgcgcgccgtccaaaagcgtgaccgtccagccgtccgccgttttttcgagcgcgaccttgccgcagcctgtatgactcagcaattctttaagctcgtctgcggacggcacacggcgctcgtccttcgtaaatccccacgcgtcgagcacaggggcgagcgtcgggtcgaacgcaccgtccgtcgcgtcagagatcgtcagcgccgtttcgatcagcgcgggtaagatatcgtccgcgccgcattcgaccgtctcaccgttcgatgcgttgagcgcataaagctcactgccctccgccgtgcgcgagaggacggcttcgtccaacgtgtgcagttccttttccgcgctctccagcgcggcagcggcgttctcgccgtaaaccgtcaggttcatcaccgtgtccatcgcgtacaccgtgcgcgtctcgctctcggcagccgtttcgccgcaggcagtgagggacagggcaaaaatcgtcagcagcagcgctgcaagttgtcttttcataggttctcctgcgaaagcaatttatcaagcgtagcttatcaaatgtattttacccgcgtctgtgcggtctgtcaaaagaaaaaatttgaaccgccgtgcggaacatttataaaaggggagagcctcttctataataagaggctctccccgatctgcgtctgcgcgcaggcaaaattattttctctcgagcgagacgcggtacgtgagccgcaggaacgtggcgttcaaaatgacgctcacgacctccgcgatcgggaaggcgagccacacaagctcgagccgccccgtgagcgagagcagatacgccgccggcagcagcacgacgatctggcggcagacggaattgatgagcgcatagatgggcttgccgagcgcctgacacgcgctgcccgcgatgatgctgaagcccgcgagcgggaagtgcacgccgatgatgcgcagcgcaacacgtccgatggagagcatttcgtccgtcggcgagaacatccccagcagcgtttcgggaatgagctcgaagagcgcgcagccgacgcacatgatgccgatggccgtgaagactgtcaggcggacggtcttgcgcacgcggtcgaatttctgcgcgccgtagttgtacgacacgatgggcaccatcgcgttgttgaggccgaagcacggcatgaagatgaagctctggagcttgaagtaagcaccgaacaccgcggtcgccgcctcggtgaacgagatgagaattttgttcatgccgaacatcatcaccgagccgatggactgcatgatgattgacggaatgccgatggcgtagatgtccgccaccgtcgcgcggtggggacggatgtccttgaggtggatctgcacctcgggatttttcttgaggttcaggaaaaggccgaggcccgcgccgacgaactggccgacgatcgtggcgaccgccgcgcccgcgacctccatgcggggaaagcccagaaggccgaaaatcaaaatcgggtcgagcacgatgttgcacaccgcgcccgcgatctgcgagatcatcgaaaggtccgtccgccccgtggactggagtaggcgctcgccgtaaatttgcaggaacagtccgagcgagccgccgatgcagatcatcacatagtcgctgccgtaggcgatgatctgcgcattctccgtctgaaagcggaaaaacggcgtggcgagcgaaaagccgaggacagcaaagacggcggcggtgcagagcgtcaggaaaagtcccgtgcccgcggcgcggtcgaccgcctgcatgttcttttcacccagcgaacgcgcgagcagcgcgttcataccgacgcccgtgcccacggcgaacgcgatgcacagcgtttgcagcgggaaagcgagcgacacggcgttcattgcgtcctgactgagccgcgcgacgaacacgctgtcgacaatgttgtagagcgcctgaaagagcatcgatatcatcacgggccccgccatgttggccagcagcttgccgatgggcatcgtgcccattttgttttctctgatgttttcctccatgtttattcccctttggatcagtgtttcggcaataaaattccggcgccgcagcgccggaatcgaaatcaaatcattttttccaacgacatgtgcgttggaaaaaataccccttagagcgcaagcgtgcgaacggagtgagtgcgacgcagcgctcggcaaaacccaaatcaaaaatgcaccgcagtgcatttttgaattacttttttaattccccattcgcagacttggtgagatacgcgttgatgaagccgtcgaggtcgccgtccatgacggactggatgttgccggtctcgtagtcggtgcgcgtgtccttgacaagctggtagggcatgaaaacgtaggagcggatctggctgccccattcgatcttgagctgcacgcccttgatgtcggagattttctccgcgtgctgctgaatcttgagttccatgagcttggatttgagcatctgcatggcgtagtcgcggttctggaactgcgagcgctgggtctggcaggcggtgacgatgcccgtcggcttgtggatgagtcgaacggcagagctcgtcttgttgacgtgctggccgccggcgccggacgcgcggtagacctgcatttcaatatcctcgggacgaatttcaacctcaatgtcgtcgggcagctcaggcatgacctcgagggctgcaaagctcgtctggcggcgggcgttcgcgtcgaacggggaaacgcgcactaagcggtgcacgccgttttcgcccttcagataaccgtaggcgttctcacccttgaccatgaccgtcgcgctcttgagaccggcctcgtcgccgtcgagatagtcgagcatctcgaattcaaagccgtgcttgttcgcccactgcatatacatgcggtagagcatctgcgcccagtcctgcgcctcggtgccgcccgcgccggcgtggaaggtcagaatcgcgttgcagttgtcgtattcgccggaaaggagcgtcgtgagtcgcgcctgctccacatcggcttcgagctttttgtagccctcttcgagctcgggcagcaggctcgcgtcgtccatctccgttcccatgtcgatcagcgcgagcagatcgtcgcgcgtggaaacgagcttttcgtagcggtgaattttattttgcagctgcttggagcgcatctggtttttctgcgagcgctccagatcgttccagaagccgtcctcgtgcgcctcgagctcgaggcgacccagctcctggcgggcctgctcgatctccagcgccttgaagaggttttcaaatgtttcgtccatcgcaagcagcttctgcttgtaggaatcgtattcgatcacagccatggcgttctctctccttacttttatccttcattagccgaaaaagtatatcacacacaccgtgcaaaggcaagaaaaatccgcctctcgggacgaaaattcccgtggaagcggccctttttcgcctttccggcgataaaaacaaaaaagccacgctttcgcgtggtcgatacaacggatctcagcgctcgctgatgatctgcttggtgctgccgaagatcatgtcgtcaacatcctgcttgatgaagttctcaaacatattcgttttcacgctcctttctctcatttacttcagtttgtattatagacgcgggaaacgcaaatttcaatcgtcagctctcatggctttgcccaaaaaattagcggctttttcatgcaagctgctatatctgcacttgcatttccgttattttccacttataataaaatagaaatgatatttgaagcggaggagtcggactatggcggctttcgtcacatttgaggatgtttccaaagtctaccacagcggagagatcgaaattcgcgcggtggaccacatcagctttacgatcgaaaagggtgaattctgcgtcatcgtcggcccctcgggcgcgggcaagacgacggtcctcaacatgctcggcggcatggacgcctgctcgggcggcaccatcacggttgatgggacgcttgtgagcggcttcaacgcccgccagctcacgacctatcgccgccacgacatcggctttgtcttccagttctataacctcgtcggcaacctgacggcgcttgaaaacgtcgagctcgcggcgcagatctgtaaagacccgctcgacgcagcgacggtcttgaacgaagtcggcctgtccgcgcgcgcgaacaacttccccggtcagctctccggcggcgagcagcagcgcgtcgccatcgcccgcgcgctggcgaaaaatccgaagctcctgctctgcgacgagccgaccggcgcgctcgactatgtgaccggcaagcagatcctcaagctcttgcaggacacctgccggcaaaagggtgtgacggtcgtggtcatcacgcacaacagcgccatcacgccgatggccgaccgcgtcatccacatcaaaaacggcacggtggagagtatgcagtgcaatgagcatccgaccagcgtggaactgatcgaatggtaacgaagaaatcggaacgaaagggggcggcgcgatgaaaaacgccatgcagaaggacttctggcgcgagatccagcacacgcgcagtcgctttttctccattatgatcctggtcgcgctatcggtcgcgtttctctccggtctcaaggcgaccgcgccggacatgaagcgcacgggcgacgactatctcgattccctgcacttggcggacattcaggtgctttcaacgctcggtctgaccgatgaggatattgccgcgctgcgcgcgcaggacaaggtcgaggacgccgagggcgaatacgtcatcgacgcattcgcctcatccgcctcgctcgacgcggtggtcaaggtcctctccctcacgggccgcggaatcaatgaggtgctgctgcgcgacgggcgcatgcccgagcgcgcggacgagtgcgtggtggaggaaaacatgctctcgctgatgaacattgaaattggcgatcgcatcaccctgacgccgggggacgatctctccgacgcgctcgcgcaggacacgtatacggtcgtcggcacggtgcgctcgccggtgtaccttgcggtggagcgcggcacgtcgacactcggcagcggcacggtcaaggcgtatctgtacctgccgcgcgaggcgttcacgctcgactactacacggcggcctatgtgcgcgtctccggcgcggcggagatgaccgcgttttacagcgactatgacgactatatcgacgccgtcatcgacgagctggagccgttcggcgacgcgcgcgcgcagctgcgccacgacgatctcgtcgatgaggcgacggaaaagctcgacgatgcgcaacgtgagctcgatgacgcgaaggccgaggccgacgaaaagctcggcgacgcgcagaaggagctgagagacgcacgcagaaagcttgacgatggctggaaggattactacgacggccagcaggagctcaaggacgcgcgcacggaactggatgacgcctat

SEQ ID NO: 10177 - DNA, 1882 bp, Unknown
  gut microbiota DNA sequence
aaaaagctgcctatactggcgatgcgccgtatggctggtataaaaaccagccctttgccccgttctatctgacggagtacaagttcaatgaagaatctctggggctcagcaacaacagaacaaaagcgctgaactgtacgatcaacaagggcgaaacagtcaacatctccctgcagtctaccacgcaaaacagaggggatcagcggtactggctgcccttccgactgtatatgaaaagtgtacagggcgaaatccaaaattcctgggccaccaccaagaacagcaacgtcaccgccaggctggtggacacggacgcccccaccattcaaagcgtcacggctccggcgggaacctatgccagcggacagcatgtgcccatcacagttacctttagcgagttcgtggatcttagaaatgccagcgtgaccatcaacggcaaagagtatagcgccgctgatctttccatgaacaactacggtgtcacggcaatgctctggtacccagtgcaggatacagatgccactacggtcaccgtcaatggtatgaccggcgtgaaggatgttttcgatcatacgctggatcccacacactatctaagcgagccgattaccggcgttgcgctggagagcgtcttgatgcgcaacgcccccaccgcactgaccgccgactacgacaacggcaatgcatcgttcacgatgaacgccaacatggcgcaggcctacaagaccgtatacagcgattatcacaccccggaaggcacagagccgaaggaagcccctttccgcctcgaactgagggacaactccacggatgaaacaatccatctgcaggtctatctggacacagagaaggaagccttcaccattagcgactatgcaatcgcacccgcagcttacacccgcacctatacggtgacgctgcaggccaacgagggcacgaaagacgctcctgactgggtgaatgttcttcccctgacccggcagttcacggtggcaaagaaagtttccgcgcacacggtgaccatagtcccggaaacgaatgacgccgactatacgatttccctcgccgattccgcccgccccacgcttcaggccaaggttttggggaaaaacggtgagcaggccagctacaccaccggtaaatggagcagcaatgacctggacattgccaccatcgacgagaataccggccttgttgccaccacaggaaccaaggtgggaaccgtcacctttacctttacggcggacaacgggactgaggaccctgccgatgatgtgacgggccagtcacagccctataccgtgacggcaggcgattccctggcactggtgattcccggcggctcgtccatcgtgacgcgggtaaatcagcccgccaccgtgctgtggagctccaacgccgcgctgatggcaccgaacaaagagttcgattacaggattgacctgtatgagggcaactacgcgaatgaggcggcgctgagcggcctcaagcccgttgcgacttataccgccggcaaggatgaaaacagcgtgcggatcgaggagaatgtgctctccaagctctccaacggcaatatccctgcctacacggtattggtctccatgccgcaccccaacgccgggggtgaggacgtccgcctgtcggcacttgcctggatcatcgtgcaggcaccgcctgccacagccaagctgacaccgccccagagcatttacctcaaggataccgacggccccgtcaatatcgactggtcggtggaaaacgccactgagggcgcccctccgcagcccacgctgaccattacccgggtcacagaggacaacaacacccaagtggtggacagtaagagcctatccggtgcctccggaagctactccctgtcact

SEQ ID NO: 10178 - DNA, 1759 bp, Unknown
  gut microbiota DNA sequence
tggaagccggcaatctgaaggacacctatcaggtggttttgagcgtggagaaccctggtgaggaatctcccagcaccgactccttccccctgtatgtctacgatgccgacgcactgaaggttcaggacggcaaaggagacacgatttctaagctgaccatggacaacacctccaaggtcagcggcaccctgcccgccgatacagctaaaattttgcagctgcgccaggagctggggctgatcgagtacataggcatcaactataacgagtacggttggaactcctttaaagacggcatcaagtgggcctccgacaacgatgccatttccgtcaactacaagcagggcggactgtatgaggacatcagaaacttctcctttgattcctaccttcccgaaaccaaaatggcgctgtccggccgggccgacggcaccgcaaccgtcacggctacccatgccgccacgggcatgagcgccgccgtacaggtgacagcgaaaacgctgcaaaataagttctatctcttccagctgacgcctgcggcggaaactacgctgcaatacaccgacggcaaaggtgtgcccaaaacggtcacgaccaacagtgaaggtgtgctggcgctttacgaacccaacgggatcgccagtgaggtgtctctgcggtccggctccggcgcggatatttatctgggcaccatctataaagaaaatctgcgttccggcgagcgggatgccacaaaactgcagctttatcccttgaataccttcagccttcggcgagtcgcccgggcatctgtgacgctcatcacgccgggcggcgatccgctggcgaacaagacggtgaccgttcgcggcggcgtttataaaaacggaggctactgccagacagctctgctgggctccagggcaggagcacttgtcagcggcatcaccggcgacacctataccacggatgcggcgggaaatataaccgtctatctggattccacccagttctggtcggccgaaaagggcgagagcaacaccacggcgctttccgctctggatcagctggagtacattctggagatcagcgcaattgacggcgacaagtactatccactgctgctgactgtcaacggcaagctgggcgtggacgatgtaatgcgcaccgcagagggcgttgtctctctggagcgcgtgccgacgggggaggaaaacaagcccttcattgtggcgcaaagcgttgattacggtcttgccaacggtcagaaggtggatgtccgcagctcgaccgggaagattggccctaacagcagctttaaaacagcaaccctgcacaccaccatgttcctctggggcgagaagattgccgacgcgcggaattacagtctcaagctggcggacgaatacggcgttcttcctgccgcccagagcagcagtaccaagcagtatcctttctcatccatccccgtagcggaaaacgatctgaccctcaccgaggccaccatgaccacctctggatggatcgccgacggcaaggatgtgggtatgaaaacgcagctgagcctgaacggcagcctgctgcaggagaaaataatgcccttccgggtcgttgatctgacccgagtgcccaaggtgacagaggataagcgcgtcaccggtattctggcgacgatgagctcctccagtggagtgagtcaagtcgactttggcggagtgggcgacagtaacattctcaaggtgctgaccggacggctggatgatctgagcggtccggtgga

SEQ ID NO: 10179 - DNA, 3968 bp, Unknown
  gut microbiota DNA sequence
accggacggctggatgatctgagcggtccggtggacacttccgtgttcaaaatgatcatcacccccagcgaagatccctccgtgttccgtgccatgatttgggccgggtacaacacgctggagatggaggacatggactattccgaggacggcgtggcgttgggtgcgaatgtgctgacgcagaacctggaggtgggcgtgcccggtaccggggatctgagccagatggcccagggaacctatgatcccaagggggactacaaaaccaactccttggccgacaatgtcaccagcacggatctcaacttgcagttggagggcttttacgaagcggagatccgctataacgccgaaaaaaaggagtgggaggttttcaccgtaggcggcggctttacctccggcgttggcgtgggcttctccttcagcgtgaacgccatggctggccccgtgccgttgacagcaacctttgagctgggcggtgccattcagctggatttccgtaccgcagtgcgctacggccagcagggacagggcacagagcttgcctggagcgatcccacggccacggcagtgaatgactttttgaccacgctgcgtatcaacgcctatgtccacgcgtttggcggcattggctttgactattcgatcgtggcgctgaagatcggcctattcggcaatttggatgtggacagtcagaataagttcctttcccgcacctatcttgccgacgagacaaagcgccagatcaacggtcaggccctggggatccaaagcgaagtgggaatcaaatttgtggccaccttcctgtttatctcctacgaggcggtgatcgcctccggaacctttggagccaccaagacttttaataactggaaaacaatcgacgactactggaatagcgccaccagtgggctgagccttgcctcgctgcggatggcggcggcccagagcggaatgcaggtggcttctgccagtgcgacgctccaaagccgggactatctggagcaatatgcccgtacttggggccagccccagcggcggatgatgctgttctctctgaactccaccaatgagctgcaaaacatccagtccaatgccaaccccacatcctatccacagctcagcgatgacgggaaggtattggcctacatcaacgacggcaacatcggcaatatttacgccagccgggcacatttctccacccttaatggcggcgtctattctgtctccagccaaattgccgatcccacagggttccccggctacggcgacacgagcgtttctctgtccggcactgacagcttcgcggcggcggcttgggttcgcatgggcaccgagctaccgggtaaaaatgccggtgatcccgtgacattggaagagcaaaacctgctgatgaacagcacggagatcgtagcgtccgtctataacggcacaacctggacttccacccgtctaaccaacgacggcacgccggatctggccccagccacggcagtgggcggcgatggcaaggccatcgtgttctggcgcagcgtctacacccccgatcccggtacgcagggcagcaacaacctgctgaacttcacgaccagagattgtatcatgtaccgttgctatgacagcggcacctggagcgagtccaaaatgctttataacggtgctactggcagcgtgaaggcgttgcaggcggccatgctgcccgacggaaccgctatggcggtttactcgctggaccgcagcgaaaccggaaaaatctccgactacgagatcgcctattgtaccgtggatgctggcggaacgcccggtacagccatgctggcaacccgtgacagcaatcttgacgaaaacccccaggtcgttgcagccaacttcggcggcggggacgaccgatttgtcatcggttggcatagtgtccgagacggcagcagcgatatccagctgttggctgtggacggcggaggcaccatgtccaacagcttccccggctctctgtctgccctgaccagcagcggcaacgccgtcgtgggcggagacttccgcttcgcttccctcagtggggatcatcgcagcctcaatgatcttaccatcgtctggaatgagactgtcaatgacgccaacggcgcggtagatcacggcattttgaaggcggccaagctgcgctatgccgcaaatacctacacgctctccgcaccattggaactggcagagctgccggatcgcacgctggctgaccactttgatgcctatgtcagcggcagcaatcaggtgcaggctgccattcaggccacccggtatgacgatgaaaagccggaggtaatcggcggcgtgaccgttccgggtgaggaaacgatcctctataccgctacctctaattttatcaccgatgcggtggcagtggaacagatcggtgtggattatgcaacgctggcgctgaacagcctgacacccattcgctttaccatccgcaacactgggctgaacgatgtgacaaacctaacggtcaagcttggcagcggggaaaccgccacccttacggaaaaactgctgcccaatgaaagcaccacccttaccgtctggcaccatgtgagagaccgcgtgaccgacccgagctataccatcaccgccgccggcggcatcaacgaaaacggcacagtgtatctggattatcccgacattggcatctcgcaaatggaagtgattgcggagagcgccggcaagcgcacggtgcgcatgaccctctataattcctctgccgccacgctggccggcggaaagaaccgcgaggtgaagcttgcgttctatgcggatgatctgcataccaagcctgcagaggtagcctgcgccacaaacggcgtatcggttcgcgataatgaaatcaccatttccgaagacagcgccctcgcccgcatcgatcagggaacctttacactggacctgacctatgatctgggcaggtatatgacatccattggcaaaaccgagatccccaatgtgggtacctatctgtacgccgaggcgtgggcggaaggccagatcggtggaacgggaggcaatcagcgcctcccggagtatgacggcagtgacagcgaggccagcgtccatatgaccggcgcactggcccgcaccggagagcagctgacgatggatgtgacacaggggaacgacggcaacggtcacagcaccgccgccattaccctgcgcaacaactgcctgcagcctcagactagcgcagagctggtggccacgctgctggatgctgccgggaccgttctggaaacgaaaaagaccagtattggcggtgccatctccggggaaaccttccaggcggaaaccgtcaccttctcccggcttggcacccgcgtagtggtgcgagccgcagtgcccggtaatgaccttctgacctttgacggtctggcagtggggctcggcgattttaccgccaacggaacgaactattcctatacgctgcaaaatgatagcggagcaacatctacgctagtcacagcggtgtctggaaacggagagcccgtgagcatcaacggacaggctctgtccaccggcggcagcgcaaccgttgccatccccaacagcggcacaaccgacattgtcgtggagatcggcactaaaacctacacgctgacgattctgcgcaatagcggcacaggcggcggagcgaccagctacacgctgaccttcaacaccaacggcggcagcgccatcgcgcccatcactcaggactacggcactgccatcaccgcccccgctgatcccaccaagaccggctacaccttcgcagggtggaccccggccatcccggccaccatgcccgccgagaatatgaccgtcaaggctaagtggaccgtgaaccagtacaccctcaccttcgacaccaacggcggcagcgccatcgcgcccatcacccaggactacggcactgccatcactgcccccgccgatcccaccaagac

SEQ ID NO: 10180 - DNA, 8271 bp, Unknown
  gut microbiota DNA sequence
acacgtttgcgggctggcccccggccatccccaccaccatgcccgccgagaatatgaccatcaaggctaagtggaccgtgaaccagtacaccctcaccttcgacaccaacggtggaagtaccatcgcgcctatcacccaggactacggcaccgccatcaccgcccccgccgatcccaccaagaccggctacaccttcgcagggtggaccccggccatcccggccaccatgcccgccgaaaacctgaccgtcacggctcagtggcgctacaatggcggtggaagcagcggctacagctactacaccatcaaggcaactgccggtactgacggttccatctctccctctggcaatgtcagcgtccgcgagggcagagatcagaccttcaccatcactccggataagggctatgctgttgccaatgtcaagatcgacggcaagagcatcggcgcggtgaagtcctacacctttgagaatgtccgcagaacccataccatcgaggtcatctttatgaaagccaacggcaacccccaggccggcgtgtttgtggatgtagcctccggcagctattatgaggacgcgattgattgggcagtggagaagggcatcaccaacggcgtgagcagtaatatgttcgctcccaacgatccctgcacccgcgcgcagatcgtcaccttcctgtggcgtgcggccggttctcccgcccccaagagcataagcagcttcacggatgttcccgctgacgctttctatgccaaggctgttgcctgggctgtcgaaaacggcattaccagcggcacaggcgagagtaagttcagccccaacgctacctgcacccgtgcgcaggcggtgaccttcctctatcgtgcctccggcagccccgcagtcagcggtagcgccgagttcagcgatgtttccgccacagccttctatgcagacgcagtggcatgggcagcgaagaagggcatcaccaccggcatcggcggcggactgttcggcgccgacaacgactgcacccgcggtcagatcgtgaccttcctctggcgctgcaagaagtaagcggctgacatacggctaaacatcaaagccgctggcatgaccccataagcgaacatcggacagcgcagcggacgggcatctcgccccgaagctgcgctgttccttttttgctacaggaaacattttgtccgaacacacaacactttgagccatgccgctgctccagcgcggcaaggagacagcattatgaagagaatcacaagaatcattcgtccgatcatctgcatgtccatccttctctttgctatgaccacggcggtcatgggctgctatcaggaagagacggagtctatcgacattcccggcagaacgccttccggcacctacatcgaacgcgcgacctacgagctgcgccgcgaacgccgcgtgcgcgtggcgacatccgacggccccgagcagatcatcatcctcggccacggggcgctgcgcgtctccgcccgcgcgttccatgccgaggtcgaagccgccgaggggcagatcagcgccgtgctgcaacgcctgacgaaccgtccgcgcagcgaacgcaccatcagaaacaacgtaaagctcaagcaataattcagtcaaaaagcggtggcttccggccaccgtttttttgtcgaaaaatgagtgcattttcctcttgcaattcgtttttaattgttgtatcctaagcactgtcaattcaaagtgatagtcaattcaggttgactatctaagtatttttaagaaaggagaaccacatgcagaccaacgagatccaggaactgctgctcgacacgatccccgcgtggcactactggtttgcccgtccgttcaagcgcatgctgaacggcggcgtcagccttgacatgtactactgcatccagtcgatgcgccgcagcggccgcacgatgacgatgacagagcttgcaaactttgcccgcatgcccaagcagcagatgagcaagctcgtcgacaagctggtcgagggcggctttgccgagcggctgagcgaccccgacgaccgccgcgtcatccgcctgcgggcgactgagaaggccgacgaatacgtggcgagctttttagagaaggatgcggcggagttccgcgcgtttttcgaccagctcgaaggcgaagagcgcgagaccttctgcacggcgcttcgcaccatccacgacacctttgaggccaaacgcaagcgcatgatcgagcagggcaagctgcccgactgtcccccacaaactaagaaaggaggccactgccgatgaatatgatccatcgcttcatgggctgcatccgcgagtataaaaagcccacgatcctgacgctcttgtgcatggtcggcgaggtcgcgatcgaagtgctgatcccgtttttcaccgccaatctcgtcaatgagatcaagggcggcgcggagctcagcggcgttgtgcgcgtgggccttgggctcatcctgatgtcgctcgtgtcgctcagctgcggcgcgctcggcgggctttacggctcgcgcgcgagcgccggctttgccaaaaacgtccgccacgatgttttcacccgcgtgcagagcttcgcgtttgaaaatatcgacaaattctcctccgcctcgctcgtcacgcgcatgacgaccgatatcaacaatgtgcagatgtcctttatgatgtgcatccgcatcgcggtacgcgcaccgctgatgttcctcttcgccgtcatcatggcctatatcatgggcggcgcgctggcgacgacattcctcattatcattcccgtgctggtaatcggacttcttctgatcgcacgtaaggcaatgcccgcgttccgcgcggtgttccgcaagtacgataagctcaatgaatcggtcgaggaaaatgtgcgcgcgatgcgcgtggtcaagggctttgcccgcgaagggtatgaaaagcagaagttcgccgcggcctcgcacgatatcgccaaggacttcaccttcgccgagcgcgtcgtcgcgctcaacgcgccgctgatgcagttctgcgtatacttcaacatgatcttcgtgctatttgtcggctcgcggatcatcatcacgaacggcggcacgaccatcgacgttggccagctctcggccatgctgacctacggcatgcagatcttaatgtcgctgatgatgatctcgatgatctacgtgatgatgacgatgtcgtatgagtccttcgtccgtatctgcgaggtactcgaggaagagcccgcgctcaccgatcccgcatctcccgcgatggacgtaaaggacggctccatcgactttgaaaacgtcagcttcaagtactccgcacaggcgaagaaattcgcgctgcaggacatcaacctgcacatcgactcaggcatgaccgtcggcatcctcggcggtacgggctcgagcaagtcgaccctcgtgcagctcatcccgcgcctttacgatgtgagcgagggctgcgtcaaggtcggcggcagagatgtgcgcgaatacgacctcgagatcctgcgcggtgcggtcagcgtcgtgctgcaaaagaatgtgctgttttccggcacggtcaaggataacctgcgctggggcaacgaaaacgccaccgacgacgagatgatcgaggcgtgcaggctcgcgcaggcggacgaattcgtccgctccttccccgacgggtatgacacctatatcgagcagggcggctcgaacgtctccggcggacagaagcagcgtctctgcatcgcccgggcgcttctcaaaaagccgaagattctgatcctcgacgactcgacctccgcggtcgacacgcgcaccgacgcgctgatccgcgagggcttccgcacctatatccccgagacgacgaagatcatcattgcccagcgcgtcgcgtccgtgcaggatgccgacctcattctcgtgatggacaacggccatattgcggacatgggcacgcacgatcagctcctcgcttcgagcgaaatttaccgcgaggtctacgaatcccagacgaacggaggtgagcaggatgaagcgtgatcccaagaattcccgccgcccaaacgacggcgcggcgaacctcgccatgcttaagcgcacggtgaaaaagctcttttcctactatcctgtgctcgcgcccgtcacgttcgcgtgcatcctgttctcggccatcgtcacgtcgatcccgtcgcttttcgtgcagaatgtcattcaggtcatcgaaaagtggtacgtctcgcgcgactgggtctccgccaaagcagagctcatcctcatcctgtcgctgctcatctcgctctatgtgctctcgatcatcgcgatcctggtctacaagcagctcatggcctatatgacgcagggctttctcgacaagctccgtcaggagatgttcggcggcatgcaggatcttcccatccgctacttcgacacccaccagcacggcgatatcatgagcttctacaccaacgatatcgacacgttgcgccagctcgtgtccgaagccatccccgccttcatccagtctggcgcgatcgtgctggccgtgttcggcattatgctctatttcagcatctggctgacgctcatttcggtgctcggcgtgattctgatgatcgtcgtcaccaagcgcgtcggcggcggcagcgccaaattcttcctgcgccagcagcaggccgtcgccaaaaccgagggctatattcaggagacgatgaccggccagaaggtcgtcaaggtcttctgccacgagcagcgctccattgaggagttcgacaagatcaacgacgccctctttgaagacagctaccgcgcccacgcctatgccagcgtgctcggccccatcatcggcaacatcggcaacttcctctatgcggctctggcgctcgtgggcggcgtgctgctgcttatcggcgttccgaacctgagcctttccggcaaggcgctggatatctcgatcctcgtcccgttcctcaacatgaccaagcagttcacgggcaatatcaaccagctctcccagcagatcaattccatcgtcatggcgggcgcaggcgcgcagcgcgtcttctccctcatcgatgaaaaggccgagacggacgacggcttcgttacgctcgtcgacgcggacatcgcccccgacggcacgatcagcaagagtgaccatcacaccggccactgggcgtggagaaatccgaacgacagcggcaaggtctcttaccgcgagctgcgcggcgacgtgcgcctcatcgacgtggacttcggctacgagccgaataaagaggtcctgcacgacgtctccgtctacgcggagcccggtcagaaggttgcctttgtcggcgcgaccggcgcgggcaagacgaccatcacgaacctcatcaaccgcttttacgacattgccgacggccagattctctacgacggcatcgacgtcagcaagatcaaaaaggccgacctgcgccgctcgctcggcatcgtcctgcaggatgtcaacctcttcaccggcacggtgatggacaacatccgttatggtaaactcaacgcgacggatgaagagtgcatcgccgcggcaaagctcgccggcgcggacgatttcattacgcgccttccgcagggctacgcgacggagctcgccaacaacggcgcaaacctctcgcagggtcagcgccagctcatctccatcgcccgcgcggcggtcgccgacccgcctgtcatgattttggacgaggcgacatcgtccatcgacacacgcaccgaggccatcgtccagcgcggcatggatcagctgatggagggccgcacggtgttcgtcatcgcgcaccgcctgtccaccgtcaagaattccgatgtcatcatggtcctcgaccacggccgcatcatcgaacgcggcagccacgaaaagctgattgcggaaaaaggaacctattaccaactctacaccggcgcattcgagcttgaataactcaaaaaaaggacacatccgtacggatgtgtccttttttgagttggcatatcgtccaagtcctcccgctatattgtgttgaacgcaatttttaagggaggaattctatgtctcgttcctttttccgcacctacggctttctgagcgcgatgctgctcgccatcgtactcggatgcgtgctgggcgcgctgtggccgggggcgacgtgtctcgccccgctcggcacgatcttcattaacctgatgttctgcatcgtcgtgccgctcgtgttctgctcgctgagcagctccatcgcctgcatgaaaagcccgaagcgcgcggggaggatcatgggcacgacgcttttggtcttcatcgtcacgggccttatcgccgcagtcatcatgctctttgcgatgcgcctctatcccccggtcctcgagccgtgggcggacgcggcggcgggcgaggtcgatgaacaggcgagcgtcgcacagctgctcgtcaacttcttcacggtcgaggatttcgcggcgctgctgtcccgccgcgcgatgctgccgctcatcgtcttctccatcctcatcggctttggcgtcaatctgagcggcggcgcggactgcctgacggcaaaagtcctgcaggacatgacgaactgccttttgaaggtcgtctcgctcatctcctactacgcgcccgtcgcgtttttcggttttttcgcctcactcgtcgcgacctacggtgcacagatcaccgcggcctatggccgcgcgatgctcgtctactatccgctctgctttgtctacgcgctcgtcgcgtttccgctctacgcctatttcggcggcggaaaggagggcgtacgcgtcatgcggcggcacatcctgcgccctgcggtcacggcgctcggcacctgctcgtccgtcgcgacgatcccgacaaatttagaggccgcggaagacagcggcgtgccgcgtgacatctccgacctcgtcctgccgctgggcgcgacgatgcacatggacggctcgtgcttcagctgcgtgctgaagatcgcgttcctcttcggcgtgttcggcatcccgtttgagggcgcggggctcatcgtcaaaattctgcttgtcgccgtgttcagctcggtcgcgatgagcggcatccccggcggcgggtacatcggcgagtacatcatctgtacgctcttcttccccgcgcagatggccattgcctaccccatcgccgtgacgatcggcaacctagtcgacccgcctgccacaatgatcaacgccgcgggcgactatgttgttacatttctcgtcgcgcgcttcaccgagggaaaagactggcttgagcgtgcgcagagggaaaaggctgcacactaaattttccgtgcgctttccgcgcaggcatgctataatgctgttcgttaacgaaagaagaaagattcgcccgctgcgcgcgggcagaaagaggtttttatcatggaagttggtctttccatcgcgcagatgcagcgcggtatggacgtggaaggcttttatctgctcaaggccgcctttgccaaggtgacagccagcggcaagccgtttttgagcgcagtgctcgccgacacgagcggcacgattgaagcaaaggtctgggactacagcggccccatcggcgagcgcgacgtaggcaaggtgctcaaggtgcgtgggagcgtatcggactaccgcggcatgctccagctcacagtcgacaagctgcgcctcgccgaagacaatgaccgcgtcgacgtctcgaagctcgtgagcgtcgcgcccatcgaccgcgaggccggctatgacgaggtcaaggcactcgtttcgaccatcgaggacgcagactaccgtgccgtgtgcgaggaaatgctgcgccgccacgaggcagcgttccgcaccattcccgccgccaagagcgttcaccacggctttttgtccggccttctgatgcacacgctcaacatgctgcgccttgccgattttctgtctgcgcagtacgcggacaccgtgaatcgcagcctgcttctcaccggcacgctgctgcacgacttcgccaaggagcaggagttcacgttctccgagctcggccttgtgacggattactcgacgaagggccagctgctcggtcacctcgtcatgggcgcgcaggaggtcgcggcgattgccgccgagctcgacctgcccgaggaaaaggcgacgcttttggagcacctgattctctcgcatcacggccaaccggaattcggcgcggcggtgctgccccagtgcgcggaggcagagcttttgtcgctcgtcgaccagatcgacagccgcatggagatctaccgcgag

SEQ ID NO: 10181 - DNA, 10282 bp, Unknown
  gut microbiota DNA sequence
agcgagggtgaagttgtggtcgtactttttgtttatagaggtgcgattttggaacgaaaagcatgacggcgatggcttcaatttgctgcttcatttttcaaaaaaaccgtggcatactgcctatgccgcgagcgaagctgcagaggatgaagaaaccgtggcgctcaagtgggcgaatgccgactggtcgaaggcggcgaaggtcaaggtgttcttccttgacgcggaccgcaagcccgtcgccgaagcggtgacggcgctgatcaagggcaaaagccagaaaaactgagcggctacagcacaagaatgaaaaagggagcgcatcgggccttgcccgatgcgctcccttttagcgcgtttcttactttttcagaaaatacatgttgatctcggcgcgggcgatcagcgcgccggtgtcgtcggtgatattgacctcgaaaaagccgatgtgaccgccgaccctgaccggtcggccgacggcggtgagcgctttggactgcaccgtcgagcgcagatagttgatcgagccgttcagcgtgacgttgtgctggccgtagttgatgcgcgcgaacgcgcccgcggcggtgtcagccatcgcgtagagaaagccgccgtgcacgccgccccagatgttggaattttccggcgtgacgtcggcggtcagcacgcttttttcctcgtcgaccgaaacgacgcggatgccgttgtgacggataaagccgctgtgctcgctcgaaagcatttcctgataatttttgaccatggcgcttttgcctccttttggcgcggaatgttatacgaaaccaagcatagcagaatcgcgccggaggcgcaacagaaaaatgcgccgcgccgcgaaacggcaagatttgaggtcgctttccgcttcggaacgatttacaagcggtgaaaattctgctacattaaaagtgattcgaaccaagggagactgttttttatgaacgactatcaggctaaatttgttgcgccggagcaggctgtcaaggctgtgcagtccggcgactgggtggactacggcttcggtgcgggttttcccgagcttttggacaaggccctcgccgcgcgcaagggtgaagtgaaggacgtcaaggtccgcggcggtcttgtgatccgcccgcgcatcgaggttgtcgaagcagaccccgagcaggagagtttcagctattacagctggcatgtcggcgattatgagcgcaagctccagaagaatggccttgtgaaattcatgcccgtcatgctgcgctcgctgccgtacctctatcgcgacaagcacatccgctgcgatgtggcattcgttcccgtctccaagccggatgagaacggctactgcggcctcggcatttcgaactatgcctggcgcacgatctttgagagcgcccgcaccgtgatcttcgagatcaacgagcactatcccaagctccagggcgtggacggctcgcaccgtgtgcacctgtccgaagcggactacatcgtcgagggcgagcatgagccgctgcccgtgcgctcctaccgcgcgcccagcgagaccgatatcgccatcgccaagatcgtggtgaatgagatccccgacggcgcggtgctgtcgctcggcgtgggcggcgtgccctacacggtcgccaagatgctcgccgagtccgacaagaaggacctcggctgccacaccggcaccatttccgatgcgttccttgagctctacaaggcgggcaagctgacgaacgcgcacaaggagctcgacaccggcctttccgcgtggaacctcgcgatgggctctcgggaactctatgactggctcgacgccgagccgcagctcttccacccgggagacctcgactacatccactccgtcgagcgcatctcaaagttcagcaacgttatcagcatcaacggcggcgtgcagctcgacctcatgggtcaggagaacgccgagagcaccggcacgcgccagctctccggcgtcggcggccagatggacttcctcgagggggcgtaccgctccaagggcggcaagggcttcatctgcatcaactcttcccgtgtgacaaaggacggcgagcgcaagagcaacatccttgccaccatccccggcggcagcacgatttccgccccgcgcacgatgatccagtatgtcgcgaccgagtacgggattgcaagcctttccggcaagacgctgcgcgagcgcgccgaggcgatggctgccatcgcgcaccccgacttccgcgaggagctgatgaagtacgcgcaggagaatttcaagtaatttagatcaagataaaggacgatgtaggataacatggcacagacggttttgcagcaggttttgattctcgcagcgatgatgatgctcggctttttgctgggcaagttgggcaaagtggatcgcaagggagcagatattctgtccatgctgctgctggatgtgttttttccctgtaatattctggcggcagccagcggggatttcggcgatatgccgttttctcaggtcattaagatcgcactggcttatatgtcctgcttcattctgtttacacttctggccaagccgatcgcaaaactgctccggctgaatgaggacgattcgcttgttttcacccgcagcgtggcctatcccaacaacggctttgtcggcatcccgctctgcacggcggttttcggcacggagggaacggtactgggctcgctttccgtgccctgcgccacactctacatgttccttttcattatgcagagcttccggcgcgaaaaagatcataatctcaagcagcagctcaagagcatgcttacgccgatgaacatttcagctgttctcatgatcatcatgctggccacgggatggaaatttaccggtgcgccgctgcaattcctgagcagtcttgccaactgcgttttgccaacgtccatgatcattatcggctgccttctttccgacagcccgcttatcgacgtgctcaaaaagcccattttgtacctcatcacgcttctgcgctgccttgtcatgccgctcatcgcggcggtgatcctgcgctttaccggctgggatcgtacgacgtgcctgtgcattgtgatggtgctcggatgcagcgtggcgacggtcatcagcatcttcggcgtgcgctatgaccgctcgcccgagatggcgagcaagagcgtgctgcaatcgaatctgctgctgccggttacgatgccgctgatgatgttcatcgccgaacggatcttataaggagagacgattatggccttctgtttacccctgcaaagctcggcacatgcgagcttaaaaaccgcatcgtccgctcggcgacgaacgagcatctgtctgacgaaaagagtcaggtgacgccgctctgggcggatacgctcatcgagcttgtgaaaaacgaagtgggccttgtcatcaccggccatttctgcgtcgacaagatgcagcgtgccgacgcgggccagcccgtgctggacgaggcgacggacgagtcccttctccgccgcgcctgcgacggcgtgcaccggtacggcggtaaacttttcttccagctcagccacagcggcatcaagggcgttgagagcgtgaacggcgcgccgccgaagcaccccgaggatttcactcgggaagagctcgaccgtctggttgagcagtttgccttcgcggcgaaaaagtgcaaagagggcggtgcgcgcggcatgcggcgcggatttcccgatgatcgtcaaggccgacagcaacggctgcggcgacctgcctgcgctgctgcagctctacgaatgctgcggcgtggacggagcggaggtcagcggcatcgacttcaaccgccgcgcggggcagaagacgccgttctatctggacgcgctcatctgcgagccggactttgccgcaaagctcaaaagcggcgcgcaggacgggagcaaatgccttgcctgcaacggttgctgcacgatctaccgcaagcgctttgtgcgctgcgtgcagcatcaagacgagatcgagcagttcaaaaccatcccgtggtaaagaaaaacggcagagccggcgcattttgcgccggttctgttttcactgttcgatgacgctttatcatgttaacgaaatgaaatggccgcgggcctgcaattctatcgacattaccgattgcattctgtcggaatctgccatatactgcaataaaattcagcatttctacgcgccgcttgaaaaattgggctgccgcggcgatctgcaaggaggagtcacccatgaagcgaaactttattgccaagcgcttccagagcgcgggcaccggcctgacgctcgacaccgcggcgctggccaaatacaaggacattgtcgacctgagcatcggcgacacggactttacgaccgacgaggccatcatcaacgcggccttccgcgacgccaaggccggccacactcactacggcgaccccaagggcgaccccgagctcatctccgcggtctgcaaggcgtgggaagaggactttgaccagacccttccgcgtgaccacgtgctcgtgagcgcgtcgagctgcctcggcatgtcgctggcaatgtttgccatcctcgatcccggcgacgaggtcatcgtcttctccccatatttcgcgctgtaccgcgcgcagatcgagctggcgggcggcgtgtgcgtcgatgtgccgacctacgccgaggaggactatgccatcagcgaagagcgcctgcgcgctgccatcacgccgcgcacgaaggccatcattttcaataaccccacgaaccccaccggcatgggctacgatttgtccacaatggagatgcttgcccgcgtggcgaaggaatatgatcttctcatcgcggcggacgaaatttacacgacctacatctacgagggcgacttccgccccatccgcacactgcccggcatggctgagcgcaccatcacgctcaacagcttttcgaagaactttctgatgaccggctggcgcgtgggcgttatcattgctgagccggaattcctcgacgtgatgaaccgtatcaacggctcgctcgtctactccgcgccgtccatctcccagcgcgcggggattcaggcgcttgagatgcgcaaggagatccgcgagaagtacgtgaccgcgtaccgcgaccgcatcttctactctgccgaccgcatcgagaagatctcgtatctgagcctcgtgcgcccgaagggcacgttctacctcttccccggcgtggagaagacgggtctcgacgacaagcagttctgcaaggagttacttgagcgcgcgcacgtgctcgtcagcgcgggcagcccgttcggcaagaccggcgcaaaccacttccgcatcgcctgcaccgtcggcattgaccagctcaagcaggcgttcgaccgcatggagaagctggaattctgagaattccgcttgtgtccgtaagacgggcatggtaaaatcaaaagataacgaaaaagctgccgtttttcggcagcttttttcaaaaggaggggcgcttatgcaggaaaagtcgaaacctgtggataacctgcgcgcggacgcggagaagatcatcacgcgcgccatcgcggcggtgctgccggacgcggcggtcgagcgcgcgctgaaaggcaaaacctttttaggaagggtgtacctcgtcgcggcgggaaaggccgcgtggcagatggcgcacgccgcccgcgcgtgtttgcaggataatttctgcggcggtgtggtcgtgacgaagtacggtcacgtgaaaggtgagatcgcggatgtcgcgtgctttgagggcgggcatcccgtgccggacgaaaactccctgcgcggcacggacgccgcgctcgcgctgacggaagatttgaccgaaagcgacacggtcgtctttctgctctcgggcggcggcagcgcgctttttgaaaagccgctgcttccgcttgcggaattgcaggacgtcacgaatcagctccttgccgcgggcgcggacatcgtggagatcaacacgatccgcaagcggctttccgccgtcaagggcggacgcttcgcccggcactgcgcgccggcgcaggtcttcgctgtcgtgctgagcgatattctgggcgacccgctcgacatgatcgcctcgggccccgcgtatcccgacagctcaagctgtgcgcaggcgctcgatattgcgaaaaggtacggcctgcgcctgtcggagcgggcgtgggcgcttctggcacaggagacgccgaagacgctcgaaaatgtcgaaacacagatcaccggcagcgtgcgcgagctctgcgcggcggccgccgcggcgtgcgaagcgctcggctacgagccgatgatcctcaccgattgcctctgctgtgaggcgcgcgaggcggggagcatgcttgcttccattgcgcgcacgcatgcgcacgacgggaaaaaccttgcgttcctcatgggcggcgaaacggtcgtccacctgaggggaaagggcctcggcgggcgcaatcaggagatcgcgctctccgcagcgctcggcattgagggactttcgaacgcgctcgtcttctccgtcggctccgacgggacggacggaccgaccgatgccgcgggcggcatcgccgacggcgagaccgcgcagctgatgcgccaaaagggtgttgacgctgtgaagtcgctcaatgataacgacgcctgccatgcgctcggcgcagtcggcggacttctcaaaaccggcgcgacgggcacgaacgtcaacgacgtcaccgtcctgctgctgcgcacgtcggaatgagggaaaaatgcggagcgcttgacaacggggcgttccggcgttacgatagctgcggcaagcctttccagactgccggaatttttaaaatgaaggagccgttttttgaagtctaaaacgatgttactggagcgtgtgcgctgaccgggagggccggcaaatttactgacacacgccgttcctcccgagagccatgcttttcaggaggacaacatgaaccgcgagaacaaacgcaaaacctttgaaaaaggctattacaagacccacgcctgccgcgacaccttcacctgcaaggtctgtgggcggctctgcacgccggaaaacgccggcagcgaccatcgcaaccactgcccgaactgcttatcgagcctgcacgtggacattgagccgggcgaccgcgaaagcgactgcggcggcatcatggagcccgtggccgtctgggtgcgaagaggcggcgagtgggcgatcatccaccgctgcaagcgctgcggagcgctcagttcgaatcgtgtggcggcggacgacaacccgatgaagctcatgagcatcgccatgcggccgctcagcgcgccgccgttccccctcgagcgcatcgaggagatgaccgccctcatgggcggcgagggaagcgtgcgataagcccaaaaggaaacagaggaggcggcctgcgtcggcaggccgcctcctctgccgcttgacaaggacggagcggggagcaggacagcggtgagagcaggtgtttcgtttgtgtttcggttttgcacaggtgattgcaaaaccggcaaacctatggtacaataaaactacagaccgatcaaaagccgccttggcgtcgaagatacagccgttttttgcggctgcttttcttatatttggccgctttttgccgcagacggcgttttcagatcacaccaaatgctggaaggagattttttctatggaggtgagtcacttcttcaggacatgaccgcacgcgttttgcagcgccggaaacggacggtgacgcttatggcgcacaccgtctatgatgcggcggccctccgcgcagggagctttgggatcggtcagatcaacgcataataaaatattataatttaaggatgtgttattttgttactctcggggaaaagtctgaaacatgacttcatccgttttgtctccgccacgatggcctcacaggtcgtgttctcgctctactccatggtcgacgggcttatggtctcgatcggtgtgaacgaatatgccatgagcgccgtcaatctcgcgattcccttcaccaacgcgcttttttccatcgccgtgctcttcgccgtcggctcgtcgacgctcatcgccattttcatcgcgcaggagaagcggcgcgaggccaacgccctcttttctcagaattttgccacgctgctgacccttggcgcggtcatcactgcgctcgtgctgctctttttggagccgtttgcgtaccttctcggcgcagacgagatcacacttgactatgtcaagcagtatattctcggcatcgcgccgttcagcgtgtgctacctggtgtcctacaatctcgaagtgctcgtcaagacagacggctatccgcgctacgcgctcttcacggttatcggcggatgcctgacgaactgcgtgcttgactatatcgccatttttcacctcgacatgggcgtgttcggcgcggcggtcgccacgggcatctcgcagctcgtgacctgtatctcgtactttgtccactttttcagcaagaagtgcacgttccggctgtgcaaatttcgcttcgaccctcacctttacgcgcgcatcctgcccatcggcctgtccgacggcgtgacagagttgtgcacggggctgatgatcttcctcttcaaccgcacggtgctcaagtgcatcggcacggacggcgtcgtgacctacacggtcatcgcctacgtgacgaccattgtcattaacctcatggtcggcatctcgcagggctcgcagccgcttgtgagctatcactacggcaaagaggatcacacgggctgtcaaaaacttctgcgctacgcgctcacgaccgtctgcatcttcgcgccggcgctgtttctgctcgtctttttcttcgcgccgcagatcgtgcgcacgtacctttcgcacgcgggcgatgagctcatcgcctactccatcggtgcattccggcgctacagcgtttcgtatctgctgctgggcttcaacatcgtcatcggtgggtttatgaccgccatcgagcgccccgtgcccgctatttgtatctcggtcggccgcgggctggcgctgcaaagtgccgtgcttcttctcctcgcggcgatcttcggcggcgacgcagtgtggtatacgccgatcttctccgaagcgatgtgccttgtcatgtcgctcctgttcctgcgcagctaccgcagacagaccgatatgcaggcgtgagtccccgcccagtgcgataaaataagagaaaataaaaaggccctggaagcagcgcttccagggccttttggcatccccgaccagacgctaactggcggactgacgcttagaagccagctatctcatttcatgccgtgcagtacaccgtcatttactgccggccggttagttccgcacagatcgcttgaaaacaaagatttcttcgatcggcgcttcgacaacccttgcaatatcgatcgccagtttaagtgagggattgtattgtgccttttccagccgcatgatggtttcccgccgcacgcctacctgcgccgccaactgctcttgggtcaaatcttttaatagcctgtacttttttaatcggcattcaaaatcaggcacgtttattcctcacattcatcaaacggttcatcatggtcataatgatatagcagatactcactgaggaatagttcaagcgctatggaaagagcgatcacaataacaagagcaattagggtgtattcaaggcgccccatgagccttccctgtcccagaatcagtattgcaaaaaaataatggacagagcagttttgttcgctgtgctttgcgctctcattttgctttctttgtaccgttcgtctatcagggtatttgacattttcccctcatagaaaaatccgaaaaagccgaaaaacacaaaaaacacgaaggggaaaatggtctggtcgacgcggtaagtccaaaaccctaaaaatccggcaaaaccgaataagcctaaaaatcccagtttgggatttgcggttctggtggaccgagaggtcgatcctctgcgcttgtttgcggaggtagactggaaaaacaacacagcaaggtacacgatgcacaaggcaaggagtgtgccggaaatgggaaaatagagaaaacggttcgagatcagctggtggtgccatgcaggtgtttgacacgataacagctgtgaaatttgcttgataagcaaaaagaaaaaacgccgcaatcctttgagatcacagcgcttttggtacgcctgcccgggctcgaaccgggggcctcgggcttaggaggctcgcgctctatccaactgagcta

SEQ ID NO: 10182 - DNA, 57252 bp, Unknown
  gut microbiota DNA sequence
ttgtcgagagcagggtggagaaaagcgcttgtattcaccgccgccgtccgttataatgggacgcaagagcggctctgaccgcagacggcggacagagccagtgagaaatatggagaaaaggacggtaaacctatggacggaaagacgatcctcccgcgcagcgaagtgcccgaggagttcacctgggatttgagtcacgtatttgcgagcgacgataagtggagcgaggagcttgaagcgctcaaggcatatcccgagcgcatggccgcctacgccggcagactcggcgagggcgcgaagacgctgctcgactggttcacgctcagcgatgagatcacggtgcgcgtttcgaagttcgtgcagtacgcgagctgccgcagcgaccaggacgtgggcaattccttctatcaggggatgcgcagcaaggcgttttccacggcggtcgcgctgaacagcgcgggctcttttgaagccagcgagatcatggccatccccgacgagacgcttgcacgcttctacgccgaggagccgaagctcgagacctatcgccgcagcatcgacaagctgcgccgccgcaaggcacacatcctttcgcccgagtgcgaaaagattctcgccgccgcgggcgagatcagcgaaagccctgaccgcacgttcagcatgttccacaatgccgacatgcgctatcccgacgtgaccgacgcaaagggcgaggtccacacgctgacggacggcacgttcgtccccatgctgatgagcgccgatcgcacgctgcgcgaaaacgccttcaaggcctactacaagcgcgcgggcgagttccgcaatacctacgcctccacgctggacgcgcagttcaagcagctcaagttcttcgccgacgcgcgccattataactcgacgctcgaagcgtcccttgacgtgaccgaggtgccggtcgaggtctacacgaatctcatcgacgcggtgcacggcaatctcgacaagatgtaccgctatgtcgagctgcgcaagaagatcttaggcgttgacgagctgcacatgtacgatgtctacaccccgatcgtcgcagacgcggatgttgaaatctcctttgaagaggccaagaagaccgctctcgaagcgctcgcggtgctcggcaaggactatacggacgtgcttgaggaggccttcagcaaccgctggctcgacgtgtatgagaacaccggcaagcgcggcggcgcctactgcaccggcaacggctggccccacccctacgtgctgctcaaccacaaggataacctcgacagcatgttcaccctcgtccacgagatgggccacgccatgcatacgtggcactcctgcaaataccagccggtgaatacggcggagtacgtcatcttcgtcgccgaggtcgcctcgacctgcaacgagatcctcctgatgcgccacctgctcggcaagaccgacgaccgcaagcagcgcgcgtatctcatcaaccacttcctcgaccagttcaagggtacactgtaccgccagacgatgttcgccgagttcgagctccaaatgggcaagatggccgagagcggcgaggcgctgaccgccgacgcgctgagcgcgaagtatttagcgctcaacaagctctacttcggcgatacgatgatctccgacggcgagatcgcgcttgagtggacacgcatcccgcacttctactacaattactatgtcttccagtacgcgacgagcttctccgccgccgtcgccatcgccaaccgcatcctgcgcgagggcgagagcgccgtcaaggactacaagaagttcctctccggcggctgctcgaaagagccggtcgagctgctgcgcgacatgggcgtcgacatgcgcacgcccgcgcccgtcaacgacgcgctgtcgctgttcggcgagctgatcgacgagctgagtgcattgctgggctgacaccttcaaatcagtggtgaaccactgatttgagcaggtttcgcgtcgctttgcgcctcggttgcccgttaaaacgggcgattcgactttgcaccgttgcggcactacgattggcgcgcccttgcaggcgtgccaatcgtgccgcttcctcgaacccagctcgctgtttccgccactggcggcgcttcgctggtttccactatgcgcaaggtgttttccgccacgcaccggttgcggcggaaaacgatcaagaacatttgcgcctgcgggcacttgggcaaccgttagcagctttgctgctttacggatgcccataccccttgcgggtaaaaactgtgcgaggctgcctgcccgagaggacaggcagcctcttttcctaatttttctgcaaaagagacaaaaaaagtttcaaaaaatcttgcaaatgacgaagcggcagaatatactattacagttaaagacttacgatttgatatccctgcccagcggcaggaaggagagatcacctatgcagaatgaaaaacttcgcaatgtagccatcatcgcccacgtcgaccacggcaagaccaccctcgtcgacgaaatgctcaagcagggcggcgtgtaccgcgaaaatcaggaggtcgtcgaccgcgtcatggactcgaacgacctcgagcgtgagcgcggcatcacgatcctcgccaaaaacaccgccatccgctacggcgacaccaagatcaacattgtcgataccccgggccacgccgacttcggcggcgaggtcgagcgtatcctcaagatggtcaacggcgttatcctgctcgtcgatgccgctgagggccccatgccgcagacgcgcttcgtcctctcccgcgcgctggagctgggtcaccgcgtcatcgtcgtcgtcaacaagatcgaccgccccgaccagcgcatccacgaggtcgtggacgaggtgctcgagcttttgatggacctcgatgcgacgcccgagcagctcgattccccgatgctgttctgctcggggcgcaacggcacggcgtcctattcgcccgacgtcgtcggcacggacttaaagcccctgttcgacacgatccttgagtatatccccgcgccggaggccgatgtggacgcgccgttccagatgctcgtctcagccattgactacaacgagtatgtcggccgcatggccatcggtcgcatcgagcgcggcacgctcaagcagaaccaggagatcatggtctgcaactaccacgaccccgacgccgcaccgaagaaggccaaggccgtctccatgtacgaatttgagggccttgccaagaaccccgtcaccgagtccaccgcgggcaacatcatctgcctgtccggcatcggcgacatcacgatcggcgatacgatctgcgcgcccgagtgcgtcgagccgctcccgttcgtcaagatcagcgcccccacgatggagatgacgttctccatcaacgactctccctacgccggacgtgagggtaagttcgtcacctcgcgccagctgcgcgaccgtctcttccgcgaaacgctcaaggacgtttcgctccgcgtcaccgagctcgagggctcgacggacgcgttcaacgtcgcgggccgcggcgaaatgtcgctgtccatcctcatcgagaccatgcgccgcgaaggctatgagttccaggtctcgcccccgcgcgtcctgtatcagatgatcgacggcaagaagtgcgagcccatcgaacgccttgtgtgcgacgtgccgcaggagtatgtcggcgcagtcatcgaaaagctcggctcccgcaagggcgacctcgccgagatgacgccgatcggcagccgcatgaaactcgaattcctgatccccgcgcgcggcctgttcggttaccgcaacgagttcctcaccgacaccaagggcgagggcatcatggcgagcgtgtttgattcctacgcaccctacaagggcgagcttgcccgccgcaataccggctctctcgtcgcgtccgagaccggcacctctatcacctatggtctcttcaacgcgcaggagcgcggcgtgctgtttatcggcgcgggcgtcgacgtgtacgagggtatggtcgtcggtcagtcccccaagcaggaggacatcacggtcaacgtgtgcaagaagaagcagctgacgaacatgcgcgcttccggctcggacgacgcgctgcgccttgtcccgcccaagcagatgagcctggagcagtgcctcgagttcctcgccgacgacgagctgcttgaggtcacgcccaagaacctgcgtatccgcaagacgatcctcaacaaagagctgcgcatgaaggccacccacggcaacaaaaaggttttgcagtaatgcagatagagaagcgacggctgaaaaagccgtcgctttttgattttctgcatatcatgcagggaggggtggcagcgccgatggcgctgcacggggcaaagggggagattctctttcaaaagagaacctccccctttggaacccccaagagaaaggcagggggcgtttcgacttcgccccctgcaccccctaacgaccaaaagggaggggcatagcccctcctttttggattatcctccctgtggcacttccggtaagaactgcgcctgcttcggataatgccgtctcgataatgcctgccgaagcggcattgcttcgctcgccgcataacaaaaaacgaccgcagtggcggtcgttttattttaattcctgttcgagatcgtggaaatattcggggcagaaaaattcatcgacggtgatattcaggccgtcgcagagctttttgaccgttgcgacggtcgtcgtgtggtttcggccgctcataatgttattaagcgtggattgcgtgacgccgctgaggatgctcaagcggttgatcgtgatacttcgttcttcgcacagcgccaaaatgcgccgccgcacggcttcacccgctgtcatcacgaccaccccgctttcttttcataaagaatatcgttttcctcttgaaaagattaactcttttgagttaaaataaccgaaaagggttaaggaggtgtctgtaatgactgactatcagaaaatgtacaccacgctattcaacgcagtgaccgatgcactcgaaaaaatggaagtgcaaaactacggtgacgcaaaagaactgcttatctccgctcaacaaaagacagaagagatctatatcacagcacagaactaaaatagaagcaattctgaacgcggcgagcgcagcaatgccgcgctgtcagaagcaacagcggggaagataatccaaaaaggaggggcaaggtccctcccttttggtcgttaggggtgcaggggcgagatcgaaacgcccctgccgttctcttggggaatcaaaaggggggattctctcacgtgagagaatccccccttttaccgcactcccgcgcggcgtgggaattcctcgccgcgctgcgagcggcattattctttattcggttcgggatcgcccgccagcgaatcgagatacagatacaggggcatcagctcgcggaagcccgcgaggacttcgtctttgagctccggcgtgaacagcacgccttcgggattgtcatcatagccgacggcgatatttttcgcgttgtaccacgggttcaggagcttgccgacgtcgcccttcgggcgcttgaactgctcgccggagagcgtgaagcgggatttattcagcttgcgcacgagcttttcaagccttttggggtcggtctcgatgcggcggcggagcttggccatcgtggcgggggaggcgtcccagtagccgcagccatagctgaagtagttcggtgcgagctcgaaatacagcgcggggacgccctcgaagcgctcgtgcgggcgctcgatcgtgaaccacaggtggtccttatatgggccgcggccaaagagacggcgcgcgtcgcggtagatgcggcagacgtgcagcttgagcgactgcttgggatatgccgcggcgatcgcgtcgaacagttcgctgccgagctcgcgcatcggccggtcaacgagcgcgaggaactgctcttttcgcggcaggaaccactcgcggttgttgttgaatttgatgccccagaggaactcgacggcctcgggcgtaaaaccttgaaacatgatccacctcaaagaaaaatttgcaacgatggcagtataccaccgaaaacgcgaaaaaaacaagagggatctcgcaccagatccctcttgtctcagaggagcaccgtcctgtttttacccaaaaacaggaacagaaaaagcaaagttactttgtggcgtggtcgaccgagtacatgtgctcgatgaggtcgagcaccttgttggagtagccgatctcgttgtcgtaccagctcacgaccttgacgaacgtatccgtcagggcgataccggccttggcgtcgaagatggacgtgcgcgtatcgccgaggaagtcggaggaaacgacctgctcgtcggtgtagccgaggatgcccttgagctcgccctcgctggccttcttcatggccgcgcagatctcatcgtaggtggcgggcttttcaaggttgacggtcaggtcgacgacggagacatccagcgtgggaacgcgcatggacataccggtcagcttgccgttgagcgaggggatgactttgccgacggccttggcggcgccggtggaggaggggatgatgttgcccgtggccgcgcggccgccgcgccagtccttcagggacgggccgtccacggtcttctgcgtggcggtgacggagtgcacggtggtcatcaggccatccttgatgccgaagcagtcgttcaggaccttggcgatgggggccaggcagttcgtggtgcacgaggcgttggagacgaactgcatgtcgctcgtgtaggaatcgaggttgacgccgcagacgaacatcggcgtgtcatccttggacggggcggacatgacgaccttcttcgcgccggcgtcgatgtgcgcctgtgccttttccttcgtcaggaacaggcccgtggattcgacgacgtactccgcaccgatcttaccccagggcagatccgcggggttgcgctcggcgaagacggggatctcgcggccgttgaccacgatgccgtagtcgttgctcttcacatcggcggcgaatctgccgtgcatagtatcgtatttcaacatgtaggccagataatcggcggggcagaggtcattgatgcccacgatctcgatctcaggatggttcaggcttgcgcgaaagaccatacggccaatgcggccaaagccgttaataccgaccttaatactcataaaacttacttccttcctgtttatcggaatatatcgaatgtttggtacatttagatattatatagcagtagtttcgttttgcaagtctttttttgcaaaaattctatttttttcataatttccacaaattccttgctttttgaccgaaattttgctaccctcatactacaacgctgtacaacaaaacgttctaagcgtgagcttatcgcgaaaacaccaattctttccgcgcaaactccgccttcctgcggtgaatgctaccggtaggagaacttttattaggagacgctatgcgggattatactgaagaagaactgaaaatgctgtcggatgtgctgccgaatattgcattgcagctgcgcacctcgctttcgacgatctacacggcggtcgaccgcatggtaccgcaggagacgcgggagaaggacccgaagactgaccgcaccgccgcggcattttaccagagctattatcagctctaccgcgtcaccagcaatctgaccgacgcggggaacctgtttgagcgcaagcgcttcgagctctacgatgacgacattgtcggcgtctgccgcagcgtgtgcgccgaggtggacttcctttttgcgcagcgcggcgtggagctcgacttcctcgccgaccgcgacagccgcatcatcgccctcgacgccgaggccatccgcaagctgctgctgaatctcctctccaacgcgcttaaatttacgcccaagggtggcagtgtccgcgtgcgcgtgaaaacggaggggagatttgtcaagatcaccgtggcggacaccggcaggggcatggatagcgacacgctggcccatttgttcgaccgctttatggacggcgggcaggaccccatgccgccgcgcggcttgggactgggccttcccatctgccagcgcatcgcgcagggccacggcggcatgatcgtcgcgcagtcggaggaggggaagggctcgctcttcaccgtctcgctccctgcggtaaaggccgggcgcgtacagctcaaggaccgcggcagcgactacgccggcggcttcaaccgcacgctcgtggagatgtccgacgcgctttcgagcgaggcatttctgcaaaagtatctggattaagggacacagatgaagaaaaaagttttgatcgccatgagcggcggcgtggattcctccgccgccgcgcttttgctgcaaaagcagggctacgagtgcgcgggcgcgacgctgtcgctctgcggcaacgagacggacggcgcgaagcgtattgccgacggtctcggtatgccgttttacatcttcgacgagcacgagctttttgcgcgcgaggtgatggatcacttcgtcagcgagtaccgcgcgggccgcacgccgaatccgtgcatcgactgcaaccgctgcctcaaattcggtgcatttttggaccgcacgctggagatgggctttgactacatcgcgacggggcactatgcccgcgtcggctatgacgaagcgagcggacgttaccggctgctgcgcggcgagagccgcgcgaaggaccagagctacgtgctctatcagctcacgcaggagcagctatcgcatcttctgctgccggtcggcagctttgaaaagccggaaattcgagagcaggcggaggaggcgggccttgcaaacgcccatcaggccgattcacaggacatctgcttcatccccgacggggactatgtgcgctttctgcgcgactatggcggcgtgacgccgcagcccggcgactttgtcgacgaaacgggccgcgtgctcggccgccaccgcggtttggagtgctacacggcgggtcagcgcaagggcctcggcgtaagcgcggaccgcccgctctatgtgatatccaaaaatgccgaaaataataccgtgctgctcggcgacaacgaggaactgttttccgcagcgctgctcgcctcgcgcgtgaactggatcgcgggggagacgcctgcagaaaaagtctattgcaccgctaaaacgcgctacagccagaaagagtgtgacgccgtcgtcacaccgctggaaggaggctgcgcgcacgtcgagctcctcacgccccagcgcgccgtcacggcaggacaggccgtcgtcttctatgatggcgaagaggtcctcggcggcggcacgatcgaaaaggcgttataaaagtgagaaaaggctccgcgaaagcggagccttttggcatattatcgttcgctgacatgcgcctcgctgccgaagatcatgtcgtccacgtcgccatgacggatgttgtctttttccttcattgtaaccattcctttcagcttttctctcacccggctattatatgcgcgagcaaacgaaaagttgtacgaaaaagggcaatgggaataataggcgtcgcagactttcacccgcaaggggtatgcggcatccgtaaagcagcaaagctgctaacggctgcccaagcgtccgcagacgcgaaatgatcttaatcgtaaattccgacgtcaccgtcgcggcattacgattcccgcgcccgttcgggcgcgccaatcgtgccgcttcctcgaaaccggctcgcttcatccgccactggcggcgcttcgccgatttccatgtgcgtcagaaaaaacgcctctcagcccgcaaacgtgcgcgccttcggcgcgtgcgctgccgcgggctgcgatccccctcaaaaagcggctctgccgctttttttgaagttaatagcgatggtttaggatctccaccacgtccgccagcgcgccgtccttgcagtggcagacgatgtgcgcaccccattccttgacctcggggatggcgttttcgggcgcgaagccgatctcggagacctcgagcatcggaatgtcgttgttgtggtcgccgatgcagtagatgtccttgcgcacaacgccgaggagcttggcaagctttaagaccatgccgcccttcgtcgcgccgcggcgcgtcagctcaagcaggtgatcgctcgaaaaaatcagctcgtagcgttttccccactcctgagagacgataaaatcgcgcacctgctccaaaagcggcttttcctcttcaaagagcagcttgatgatcggcaggtccacctcgcggaagtccttgacctcctcggtcttcgcgcgcgtcaggtgctcgtggttgcgcgtgtagtcgttcgggtgcaggacgtggatgcggcggtcgtcgtggtagatctcgaagcacaggccggggaagcgcgcgagcagcgcgtcgacgtgatcgtagatgtccgcgtctaaaaacgcggtctccacatagcagtccttgttgaagtcatagatggccgcgccgttggcgatgacgcagggggcgttgcagggcagatccttggcgtagcgggcaaaggcgggcagcgcgcggccggtggagatcgaaaaatagccgccgttttgaatgaaatactcaactgcctcgcggttgcgcgcgctcatcggcgggatgtcctcgccgcgctccagcgcgccctgcgtatagacgagcgtgttgtcaaagtcgctggcgagcagcaccttgttgaatttcagcatgatggatcctctcttcttttctcgttgtttttcggcaaaagtataccacggcgcgggagaaatgaaaagggatgttttgcgtaaagatatcagccgatgatgccgaattttcctttgataaaatgacggtagtcgggctgcttttcggcatttttgtattcatgtttcatggtttgccatatccaggcgcggaacggatcgccggtctgcgcatagtacagaatgcgcagcagcccctcccgctctgcgcggagaatggcctcataggcatcggggacgaactcgcacgagacgactgctaccgcctcttcggacgtgaccgcgaacggcacatcggaaacaggggcggtatttgccggttccgcgccgtagatatagccggagacgccggcataggtctcctccagtgcgttggggtagtattcctccagccgctgcacgccgtctaagtcgaagccgtaaggcccccatttttcccaccggcccgtgtggacaaagccggtgtcgcggcagtatttttcaacggcattgctcagataaaccagcacattttcccgtttcttcgaaaagtagacgagcgggtggccatggttggagacgtgcggcgtgaggacggtgagaccgccggtgggggaggcatggtacagcatggaagcaattcctttccgccttttggcaaaaccgccgcgaaacaactgtgcttcgcggcggttctatttcttgtttacgcttcgctcttcggcgcgggactttcgccgccctgaccgccgcttctgcggcggcctctgccgccgcggtggctgcggcggcgcggcttgttctcgccgccctcaatcgcgctctcggctttcggcgggcggggcggacgcggggctttcggcgcgtcgggagtttcgctgttcggcttgctctggcgcggggcgcggcgctcgccgttcttgtcgggattgcggggcggacgttcgctgctcggcttatcgccgcgcgcggggcgttggcttcgcttttcggcgggcttgtcgccacccttttggggcgtgttttcactcttcggcgcggcggacttctcgccgccttcaccgctgcccttgccgcggcctctgccgccgcgatgcccgcggccgccgcggcgggaacggcgcttttccgtctcctcctcgtcagcggcgggggcgtccgcttttgcgacgggggccgtccactgttcgggcggcacgatgggcttggcagacgagaagaagttcagcgtcagctgcggctcatcctccggcggctcctgatagcgctcggggagcgtcgcggggagctcgatgccgtcgcgcgagcccttgccgttgcgcagcacatgaatttcgcaggtgcggtagcgcttggggctctcgttctgcccgtcgagacgcacgagcacctgctcgcgcagaatgtcgaccgagctcacgttgccaaggccgtcgggcgttgcgacaaacgaatcctgcttcgggcagcggcgcaccgcgtcctcgtaggcgttctgctcgtatttgaggcagcacatgagcctgccgcacgtgccggagatcttcgtcgggttcaggctcagattctgcgtcttggccatcttgatcgaaacggggacgaagtcgtccaaaaactgcgagcaacagaaaggccgaccgcagatgccgaggccgccgagcatcttcgcctcgtcgcgcacgccgatctgccgcagctcgatgcgggcacggaacacaccggctaagtcgcgcacgagctcgcggaagtccacgcgcccatcggacgtgaagaaaaagatgatcttgctgccgtcgaagttgctctccacgcgcacgagcttcatgtcgagcccgcgctcggcgattttcttctggcagacctcgaaggcgttcttttcgcgcgttttgttgtaggcgtaggtgcggtcatcgttctccgtcgccacgcgcacgagcgggcgcagcggttggacgacggaatcgtcctccacctcatggttgcccgagacgcactgggcgtactcgagcccctgcgcggtctcgacgatgacgaactggttgggttcgaccgtgatgccgtgcgggtcaaaataatattccttgcatccgccgcggaagcggactccgatcacttctgtcaaagggtttcctccaattcaacggcgaagccgcccagcgtgggcccgacgccgacgttataggtgcatttattgcggtagtcctgcaataaatctattgtgccgagtaatttggcttttgtcaagcgcgaagccagtgaccgcgcgatgcgaagatccctctccggtacgctcacgccgtactgccccagcagggcggacgagagcagaagccgcgtcccctcgaaaagcgaggacaggtcgtcgcgcgtgaccttctgcgtttcgagctttgcgaggaatgccgcgcgggacgcgcgcgacccctcggcgatgagccgcgcgagctcgagcgcgagctcgtcaggcgcgccgccctcttcgacggtgggggagagcttgacctccacgcagcgcgagcggatggtctggagcagaaccgccggattttccgcgcagaagaagaacgctgcgtaagcgggcccctcctccacgagcttcaaaagcacgttctggtccttttccgtcaggatggtgcagtcctcgaaaatgtagaccttgcgcgcgccctcgttcgggcggatgaacgcgtcggcgcgcatcgcgcgcaccgtgtcgatcgagagctccttgtgctctgcgtcgcgcacgaacgtgacgtcggggtggatgtcctgcatcaccttgcggcaggcagggcaggcgaggcagggcttgctttccgctgtgcactccatcgccgcggcggcatagcgcgcagcgctcacgcggtcgccgctgccgctgaaaatgagtgcgtgcgacagtgcgccgcgctttgccgcggcgcgaagacgcgccgccgtatcggtttttgcaaaatccaaaagctccattgcccgctccatgctctgtactctgcgcgcattttcagcgcaaatttaaaaatagtatatcgcaaaagtgcggcgcttgcaagaaaatccgcgccccgcgacggaaaaacagaacgattttgtgccaaattgcgttttgtgggagaaaaaatgcggaaagtcgacaaaaatttcacaacttgttattgaaagtcggggattttctgtctataataatatggcttgataatgatcacacagcgatacatttttaatggaggaaaaccaatgagcaaaaagtatgtctacctgttctcggaaggcaacgctaccatgcgtgagcttctgggcggcaagggcgcgaacctggccgagatgaccaacatcggtctgcccgtgccccagggcttcaccatcacgaccgaagcctgcacccagtattacgaggacggccgcaagatcaacgacgagatcatggcagagatcatggaatacgtcgcgaagatggaagagatgaacggcaagaagttcggcgatctgaagaaccccctgctcgtctccgtccgttccggcgcgcgcgcttccatgcccggcatgatggataccatcctgaacctcggtctcaacgacgacgtcgtcgccgccatgatcgcgggcaaccccgaccccaacttcgagcgtttcgtttacgactcctatcgccgcttcatccagatgttctccgacgtcgttatggaagtcggcaagaagtattttgagcagctcatcgacgcgatgaaggaaaagcgcggcgtcaagctcgacatcgagctcaccgcagccgacctcaaggaactcgccgagcagttcaaggccgagtacaagcagcagatcggcgaggacttcccctccgaccccaagacccagctgtacgaggccatccgcgccgtgttccgctcctgggacaacccgcgcgcgaacgtctatcgccgcgacaacgacatcccctattcttggggcactgccgtcaacgtcatgccgatggtcttcggcaacctgaacgacaactccggtaccggcgtcgccttcacccgtgaccccgccaccggcgagaagaagctcatgggcgagttcctgaccaacgctcagggcgaggacgtcgtcgccggcgtccgcaccccgatgcccatctcccagatggaagagaagttcccccaggcttacgccgacttcgtcaaggtctgcgacctgctcgaggatcactaccgcgacatgcaggacatggagttcaccgtcgagaacggcaagctctatatgctccagtgccgcagcggtaagcgcaccgcgcaggctgctctcaagatcgcctgtgacctcgtggacgagggcatgatcgacgagaagaaggccgtctccatgatcgacccgcgcaacctcgacaccctgctccatccccagttcgatgcggctgtcctcaagaaggctcccgccatcgccaaggctctgcccgcctcccccggcgccgcctgcggcaagatcgtcttctccgctgaggatgccaaagagtggaaggagcgcggcgagaaggtcgttctcgtccgtctcgagacctctccggaggatatcgagggcatgaaggcctcccagggcattctgaccgtccgcggcggtatgacctcccacgcggctgtcgtcgcgcgcggcatgggcaagtgctgcgtctccggctgcggcgagatcaacatggacgaggagaacaagaagttcgagctcgccggcaagacctatcacgagggcgacttcatctccatcgatggttccaccggtaacatctacgacggcatcatccccacggtcgacgccaccatcggcggcgagttcggccgcgtcatggcttgggccgacaagtatcgccgtctgggcgtccgcacgaacgccgataacccgcacgacaccgagcaggccgtgaagttcggcgctgagggcatcggcctctgccgcaccgagcacatgttcttcgaggctgaccgtattcccgccatccgcgagatgatctgctccgacaccgtcgagcagcgcgagaaggcgctcgctaagctcgagccgatgcagcagggcgactttgaagccatgtatatcgcgctcgagggccgtccgatgaccgttcgtttcctcgatcccccgctgcacgagttcgttcccaccgaggaagctgacatcgagcagctcgccaaggacatgggcaagagcgttcaggacatcaagaacatcatcgcctccctgcacgagttcaaccccatgatgggccaccgcggctgccgtctggccgttacgttccccgagatcgctgccatgcagacccgtgcggtcatcaaggctgcgctgaacgtcaacgccgcgcaccccgagtggaacatggttcccgagatcatgatcccgctcgtcggcgaggtcaaggagctcaagtacgtcaaggacgtcgtcgtcgaggtcgctgacaagctgatcgccgaggccggcagctccatgaagtacaaggtcggcaccatgatcgagatcccgcgcgccgctctgaccgcggacgagatcgccaaggaagcggacttcttctccttcggcacgaacgacctgacccagatgaccttcggcttcagccgtgacgatgccggcaagttcctcggcgcatactatgacaagaagatctacgagagcgatccgttcgcccgtctcgatcagaccggcgtcggcaagctcgtctccatggccgccaagatgggccgcgagaccaacccgcacatccacctcggcatctgcggcgagcacggcggcgatcccacgtccgtcgagttctgccacaaggtcggcctggactatgtctcctgcagcccgttccgtgtccccatcgcccgcctcgccgccgcgcaggctgcgatcaaggaaatgtgagcgatcttttgagcgttcacaaagcggctcgaaacttgcaaacctttgatgtaactgcgtttgcagatatcattggctgaaaacagacaaaaatccggtattgttccgtttggagcgataccggattttttgcatcttttgcggggcaggttgagaaaaaccgcgtcatggacagattccgagtgccgccggtactcggaatggcactctgaatggcacgcggaagcggcactcggaagggtcggcggcatcaacgaaagcgatgcattgcctttggtgtggtcgtgcggtacagtccgtgcagaggtgatgcagcatgagactttgttacaggcgcggaggaaagggcgcagcgccggagggctttgacagagtctacacggaggtcgatggggacggcaacgtcctgcgggagctgcttgcgtatgtgagagcgggcgacagtgtaaccgtggagatgggtggtgagctgggcggcacagccggtgcgttcgtggagatggcacttgccctctatcgacagcaggcaactttgctctgcaagtctccgaagattgacacggcggcaggtcattggcaggcggtgctttccgaccttgcgctgttgacaagcagggacaccggagatgcggcgcggctgtctcggtttatggaggagctgcaccggtgcttcgaccttgtggagagacgacagatgaccgtagcggaggtctgccggaaaatgagcattgggaagacaacctactaccgttattggcgtaaggtcaagagcgccccgcacagggagcgtcacacagagctttttgaagaattgcaggcaaagatagaagcaaatgagctgagtatttccgcggcttgcagacagatgaatatcggtgcgggaacgtattacagaatgagggatcagtataaaaagaacgcagcgttccaaatgttccaaattcagaatgatgtggttttgcagtcaacaggagatagtgattcggcaaattggggaggtatggaacgacatataggtgagaagccctcttacggtcggaaatggagggcaggagatcagtgcgcggctgcttcaatgagagtaaacatacattagtgcggtcggcgcagacagtcattgcggaagcacgggcatacacaacaacggaggtgcagtatgaaaaaaacgaatgggcatgacgaggggcatttctatatccggttcccgcgtacgagaggacttccgccgcacaagcgacggcacacgccaaatgccggaaatgccagaaaggactttacttatgcggcgcagccctgtataatcatttaagatggaaaatcgtcgaaagactatgctgcagggccatatgtctgagcgggagagcccctatgatcgaccgaccgcacccttaaggcaacaccgcgcagtgaaagctgcggtattgccttagcaggactgcggtcagtttttttctctgcgaaaggagggagcatcggtgaaccgcgtgttccgcgaggaaaagaaatatctgatctcgctgccggaggcgctgcaagcctgccatcggctcgcgcaggtcatgcacgaggacccgcacaacggcataagcggctaccctgtccgctcgctttacttcgatacgctcgacgacagggacttccacgaaaaggctgcgggcgtagagctgcggcgcaagctgcgcctgcgctgctatgatccggcggcagacttcgccatgctggagatgaagcagaagcagggcgcaagtcagctcaagcgctctctgcgcgtgacacgggaggatgcccaagcgctcacgcgcggcgactatgcgccgctgctgcggtatccggagtcttttgccgcggagtgctacgcgctgatgcacagccggtgctatcgccccaaaacgatcgtagaatacaaccgcaaggcatttatcgccaaggagaacaaaatacgcattacctttgacagccgcattgtttccgtcgagagctgcttcgacctcttttcgccgcggctgaacatgaaccccgtgctcaatccgtactgcgtggtgcttgaggtcaagtacaacggctttctgctcgattatcttcgcgagctgatcaacagcgtggatcgcagtgagctttctgtcagcaaatatgtgcttgcccgccaaaacggatgtcagacgaggctataggaggaaaacaccatgagacaacagatcctgaacctttttaccacaccccgcgatatgtcgtgggaggatattctgctcaatatcgtccttgccgccgtgctgggcttttttatcttcctgtcctacgccatctcccaccgcgggacgatctacagccgcaagttcaacgcctcactcgtcattctcgcggtgctgacggggacggtcatgaccgtcatcggcaacaacatcgcgctgtctctcggtatggtgggcgcgctgtccatcgtccgcttccgcaccgccatcaaggactcgcgcgatacggtttatattttttggtccatcattgtcggcatctgctgcggcgtgggcgattatgccgtggcctgcatcggcagcgccgtgaccttcgcggtgatcctgctgctcggctgcatcaagagcgataaccggatgctgctcatcatccgcgcccaccgcagcaagcaggagccgatcaaggcgcaggtctacaagctctttcgcgccaaagcgacgctgcgtgtggaaaacacgacggaggatacggtcgaactgatctacgagatcacgcaaaagctcctgcgccgcgcggagcagacaacgccggacattcccggcagcatctattcgctgggaagcatcgactatgtcaatcttgtcatgcagaacgacgaggtgtcgaactgagaaaccggaaagaggggagcggagacgaacatgaaatacaagcgaatggctcttgcggcctgtgcgctgctgcttctcctatccgcaacaaacctgtcagccgtgctgaccgatgagcacccacgctatcatcagcatcttgagcgccccgcctacacaccctgtgccgagcatgacggcgagacgctctgcacgcatctgccgctcgttctcatcgacaccggcggcgcggagatccccggcgttcccatccggagcggcggcagcggccgtgaggacgatgctttcaccacgaccgcagacggcagtacgctgctgcgcgcgtccgtctcggtggtggatcatgccgagggcaacaatcaccccaccgacacgccgacgcttcagagcgtcattgacattcgagtgcgaggcaactcctcgcgctattttgataagcacagctatcttgtcaagacgctgacggacgacggtgcggcctcgcgcgatgtcgccatgctggggatggatgccttcgacgagtgggcgctgcatgggccgtacctcgataagacgctcatccgcaattatatgtggtacaatcttgcgggcgagatcatggactacgcgccgaatgtgcgcttctgcgaggtactgctcaacggagtgtatcaggggctttatgttatgacggagactgtcagctccggcgcggatgcccgcttgaagctcacggagccgtcgaaggacacggtgcagacgagctatgctctgcgccttgaccgcggcagcggcaacgaggtcaaaaacatcgagaccttctcccaatacgccctgcgaaatctgcaggatatagacatcgtctatccgggaacaaaatggcttacgccggagcgcgcggcgtggatcgcacaggatttctccgactttgaaaagacactctactcctatgactatgataccgagccctatgcatggtgggagcaggcggacatgagctctttcgtggactactttatcctcaacgagtttacctgcaactatgatgcgggctggctttccacctatatctacagggatgtgcgcggcaaatacaaaatgtgcatctgggacttcaattccgcctgtgacaactacagtcatccggtcgcagagccgcagcattttgagctgcaatacaatgtctggtactatatgctcagcaaagacgagaagttcataaacgccgtcatcgaccgctaccgcgagctgcgtcagggcatcctcagcgacgagtatctctgcgcctacatggacgacgttaccgcgtggctcggcgatgccgtcgagcgcaacttctccgtctggggctacacgctcgaaaaggatatgctctcccccgcgtggcgcaacccgcactcacacgcggctgccgtcgcgcagatgaagcgcttttgcatcgagcgcggcgcgtggatggacgagaatatcgacattcttcgccagtacagccacgaatccaaaaacaagaaattcaaccactgagccaccacaccatcgaggaaggagggcggcggcttgaaaagatttctcatcgtgctcaccgccctgatcttaggctatctcgcctacgacaccgcgcgctactacctcggctggtacatcgaccttcagccggacgcgccggtcagcgctttcatgtccaccgacgcgcagcacctttatatggaccgcggcgcgggaccggaggagttcaccgtcaagggcgtgaacctcggcgtgggcatcccgggcgagtgggcgacggactacgccgtcagcaaggagacctatctgcgctggtttgcccagatgcaggagatgggcgcgaacaccgtgcgcgtctacattacgctccacgacgacttctacaacgccttctacgagtacaacaccgcgcgcgaggaggcgaacgaggaaccgctctggctcatccacggcgtatgggtgaacgactatatccaaaactcccaccgcgacgcctatgacaaggactttcttgagaccttcgtcagggacgggcgcacactggtcgacgttctgcacggcaacaagaagatctcgctcgggcggggcacgggatcgggcttttacaataaggatgtttcccgctgggtcatcggctatattctcggcgtggagtgggaggatgtgaccgtcacctacaccaaccacaaataccccgatctgccgccctatcagggaacgtacctctccgcgacggaggacgcctccgcctttgaatccatgctcgcgcaggtgggcgatcggatcgtctcatatgaaagccgccgctacaagacccagcgccttgtggcgttttccaactggccgaccaccgaccccttcctctatccggaggatatcacgactttctttatgaagtgcgcgcaggtggatgtggagcacatccgcactgaggatgccttcctcgccggtcagtttgcctcctaccatgtgtatccctactatcccgactatctcaactatatcctcaaccccgcggcgatggaccgcacgcccatctgggacggcaaggccgtcatctcccgtgcggagaccggtcccggcacgcccatcggttccgtgctgcgccgatcggacttctacgatgagaccggcgcggcgaacacctaccttgcctatctgcgcgccctgcggcggcatcacacgatgcccgtcgtcatctccgagttcggcgtttccactgggcgcggcatggcgcagatcgaccggaacaccggacgcaatcagggccatatgtccgagcaggagcaggggcaggcgctcgtggactgctggcgcgacatcaccgcggcaaactgcgcgggcggctgcgtctttacctggcaggacgagtggttcaagcgcacctggaacaccatgcacgcggtgaatctccagcgcacgccgtactggagcgactatcagaccaacgagcagtatttcggtctgctctccttcgaccccggcgaggaggaaagcgtctgctatgtggacggcgacctctcggagtggatggaagaggataaactcttcgataccggcacgcgcgctctttcgatgaaatacgacgagaagttcatctatctgctcgcctatgaaaagggctttgcgaacggacagaaaacgctctacatccccatcgacaccacgcccaagacgggcagcacctactgcgaaaacttcggcctgcgctttgaggacccggtggacttcgtcctcgccatcgacggcagggacaacagccgcctcctggtgcaggagcgctacgaggtgctgcgcgccatgttctaccacgaaacgcacgacgcggacgcctaccttgacccgcccgacgcggacacaccgcttttcaagcccatcgaattgatgctccagacggcgacgccgctgctcacgggcaactggcaggcaagctctgagacctacgagacgggcgatcttgcctacggcaacgcgaaccccgccgcgccggactacgattccctcgcggacttcatcttcgcgggcgactatgtggagctgaagctcccctggcagcttctgaacttttcagacccctcgcgcatgaccatccacgacgattactatgaaaactacggtgtggactacatcaccatcgacacgatgtaccttggccttaccgacggcgcggcgcaggagcgcacgccgctctatcccgcggcgctcaagggctggggcaatacggtcagctatcacgagcggctcaagccctcgtactacattctgcaaaagctctggcagtaaaacacacaagaaaggaagaacgccggtgtttgttcaaatcctgatctacgtctatctcggcatctgcgccggcatgatcctctttaacattgtaacggcgctcctttcgcggcgcagggagcatcggtccttctgcgacggcatccgccttgagctgacggtctcgcaggagcttgaccgtctcgcggagaccggagcggtcagcgagaggcatctgcgcttcatggagcgcagactgcgccgcgtgaacggcatgccggcctttgacgccgcgctggagcgcctgtgcgtgaggcggccagagctgacccgctcctatctgacggcgcttaacggtgtaatgatcgcgctggcagaggattactgccgccgcgaggagatcgaggcggcgtacttcccctacatcatcaagaaataccggctgctcggcggcgcggacgacgcgccgctcaaggaggtgctgctcgaactgctgcacgagccgagcatctactgccgcgagaatgccatgcaggcgctctacacggcgggcgatcccgccgtccttgtgcgtgcgctgcggatcatcgacgcaagcagcctctattatcacagcaagctcctctccgacggcttgctgaactacacgggcgacacatgggagcttgccgacgcgctttgggaggcgtttgatgcgtttcagccgtggatgcaggtgacgctgctcaactatttccgcttttcctccggcgcatactgcgagaaaatacacgcgctcctcaacgacggcgcgcgggacgacgaggtgcgcttttcctgcctgcgctacctcggacactacccctatccccccgcctacgccgatctgctgcgctatgcgacgccctcggaaaacgcgcgctgggagtatgcagccatcgcctcgtcggtgctggcgagctatcccggggcggagactgcggcggtgctggagaggaacctctatcatcccaactggtatatccgcttcaacgcgtcaaaaagtctggagcagctcggcttcggctaccgcgatctgatcgacgtgatcgaggggcacgaccgctacgcctccgagatcctgcgctatcgctttgatgtgcgggagctggaggagcgaaaggaggacgcagtatgtacgacggtataaagctgtttcttgagtgggtgggctatttctttatcgcttatctgatcggctactcgacctttctgtttctgtcggtcgtcgtcggctcacttgagctgtacaagcaccgccggcaggaaatgttcaaaagcattctgccctcggattactacctgcccatcagtatcatcgttcccgcctacaatgaggaggtcaccgtggcagacaccgtgcgctcgctgctgacgctggaataccgcgcctatgagatcattgtggtggacgacggatcgaaggaccgcacctcggaggtgttggccgagacatttgatatgcaccttgttcaccggcccattcgccggcagatcaactgtcagcgcgaggaatacgtctatgagacacgcgcacagaaggtaccggtgacgctcatccgaaaaaagaacggcggcaaggcagacgcgctgaacatgggcatcaacgccgcaaatttcccgtactttatctgcatggacgcggactccgttctgcagtacgactctctgcgccgcatcgcccagccgatattggaaaacggcaatgtggtggcggttggcggcatcgtccgcatctccaacgacgtggagctggaaaacgggcgcgtcaaacgctaccgcctgccgcgcagcatcctcgctttcatgcaggtgctggaatatgaccgttcgtttcttgcctcccgcattctctttgaccgcttcaacggctcgctcatcatttccggcgccttcgggctgttcaaaaaggataccgtcatcgcggcagggggctatgacagcggaacgatgggcgaggatatggagcttgtggtcaagctgcacgaatactgcacggtcaacaacatcgactatgccattcgctacgcatccgacgcgatctgctggacgcaggcgcccgagcggctgcgcgatctgtgcaagcagcgcaagcgctggcatctgggcctgttccagagcatgtacaagcatcgcgtcatgttttccaatcacaggttcggcgcggtgagctttgtatcctatctctatttcctcatctatgagttgctctcgccgtttatcgaggtcttcggcgtgttcacgatggtgctcgcatggtggtgcgacctcatcaacgtgccgttcatgctgctcttcttcctcatctacgccgtcttcggcggggtcctgacgcttaccgcctttttctcgcgcatctacacggcggacctcacgctctcgttcggcgacggcctcaaggccgtctgtctgtgtctctttgagctggtgttcctgcgctttattctcgcatgggtgcgctgcacggcctttatcggctataggaagaaaaaactcagctgggggcgcatcgagcgccgcaagatcgatttgaaataaaggggggtgtcgcctgtgcgccgaaaaaaactcttggaaatcacgctctgcgccgtgctgacgatcggagcgctgctgtgctgtatgcaggatgcaagcgcgagggagacgcttctgatctcgggaaacgccaatctctatcccatcgagtcctatgaccgcggcagagaatgctatgtcggattgctgccggagctgtacgagcgcctgagtgagcagacagggtacgatcttgtctatcttccgtacagcaagaacacaacgcaggcgcagcaggcggagaaccggcaggcggacattatttccgcctatccctccggcacggtcgacagcggcgcgatgcgccgtcaagtgctgctctgcacgatagaacatgacggcgcagagcgcgcgatatatgttggctttaccaacgcactcacgccggaactggccggcgcgctttcacaagcgctggaggacctctccggcgcggagagcatcggcgtcctggcagactatatgaatagcagcggcgcggaagcctaccgtaccaggtggctcattacgctcgccgcattgatcgcggcgatgcttgccgcggcggtcgcgctgatagtctttgcgcgaaaaaagcgtgccgagcaaaagaccaacgccctcatcgacccgcgctacggcatcggcaacgacgggtattatctgaactgcatggaaacgctcatccccgccccgctcagaagcatcgtctatgtcttctgcatcggctgcgatatgccctcgctcgaacggcgctttggcgaggcggagcgcgaggagatcttctcccgcgcggcggagtatctgcgccttgactgcggacgcgaggaatacctcgcctgcgtggggcgcgggatgttcgcgctcgtgtgtcagtgcggcagccgcgaggcggcacagcagcgcgccgaggggcttatccgcgagctggacggctaccttgcgggcttccgcgccgaatatgccggcgcgttccgcgcgggcatctgctcgctgtcggaaaaccccgactgcagcgccgaggctgcgctctacaacgcgcgccagggctgtgcccacgcgttccgcacggaaacgccctgcgcgttcagcacgcgcggcatgatcgacgagagcgagcagctcgagcgtctgcgcggcagcatgagcaaggcggtggaaaagggcgaatttgagccgtacctccagttcgtcgtcgatcgcgccggcacggtcgtcggcgcggaggccgtctcgcgctggcaaaacccggaggagggactgctcaagccctcaaaatacatcgacctgatgatccgcgccggcacgatcaccgagctggatctctatatgctccgctgcgcgtgcgtgcagctccagacgtggaagcgggaggggcgcgggacgctgtggctctcgtgcaacttcacgcgccagtccatcgcagacgaaaagatcctcgcgcgcgtgcgcgagatcgtcgagcagtacgactttacgcgcgaccgccttgcggtggagctgacggaggactcctacgcgcgcgaccgcgaggcggcgctgcggacgatcgaggggctgcacgcgatggggcttcacatcgtgctggacgatatcggcgcgggctattcctcgctctccgacctgagcacctacccaatcgacggcgtgaagatcgaccgcagcatcgtgatcgagtccgccttgccgcgtgcccgcgcgctgctggagggcatgatccgtctttcgcacgacatgggcatccgcgtgctgtgcgagggcgtggaggacaaggcaacgtgcgacgccgtgcttgcggcgggctgcgacttcattcagggcttttatttctcgcgcgtcctgcccgggcgcgaagcggaatccttcctgcgcagcctggcggcgcgcgacagggaggaaggataaaggagaaatgaacatggtcaacaaaaaacgagtaggcatgatgatggcggtcacgctcctgatcggcgtgctgctcttttgttcggtctttttcctcgtccggcgggcgaatcgtgagatcacacagcgctcctttgacgaattggctaccgcgacgcgccagatcgcaaaggatcttgccgacgcggcgaacgcggaccagaccatcctctccgccatggcggagctgatcgcggtgcatgacgagcgtgacaatgacgcggtgctgcgcatcatgaaatccttcagcctcagtgagacctttgtctccaccgtcgcgctgctgcggcccgacggcacgctgctgctgaccgacggcacccgctacgacgtttccgacacattcgattttgaaacagaggcggcgcggggcgcgtacatctcagaccgcgtgacaagctactttgcgccggaaaagctggtggtgcgcaacgtcgtgccggtggtgcgcgacggcgagaccgtcgccatcctctacggcgtcgtcctcctgcaggagctttcccgaaactatcagatcgacctctacaacggcaatgccttcctccttcttgtggacggcaacaacggcgacatcctgctggatacctggcacgactcgctcggcaacctctcggagctgcgtggccgcaaaatgctcaagggctacacctacgagcaggcgatggaaaaaatccccaacggcatcggcggcgatatgtgcaccgtctcccaatccacggggctgacgctctacctgcactacgagcctgtcggcatcaacaactggagcgtcgtgctcggtgtgagcgaggcggaggcgctggcgggcacgcgcggcgtggtggagacgctttcgatgatggcgatcattgtcaccgcgctgctgctgagctatcttggctttatggtctggtatctcacctcggcgcggcgcggcgtttaccgtatgagcattacggaccagggcacgggcctgatgaaccgtgtcgcctatgagaagtgtctgcgcaagaacgaccagcgcgtcatcgctccggccgcctgcatttatatcgacgcgaacggcctgcacgagatcaacaacgagcgcggtcacgaggcgggcgatcagctgctgcgcgcggtcgcagagcgtctgcgggagcagtttccgagggacgatctctaccgcgtcggcggcgacgagttcgtcgtgtttcccgcgccggcggcagaggcggaatacgaggcgcggatgcgggcggtttctgaaagccttgccgcgcagggctacagcatctcctacggcatcgccgtctgcgaggcggcaaacgggctaagagagctggtccgcgaggcggacgagaagatgctcgggagcaagcgcgcctactacgccgagcacgatcgcagaaggctgagataacgccaagacgataaaatgaccgccggacgataccggcggtcattttgtcgtccaaccaacaaaaccgctttagaatatcgttcatgataagtccccctctccgcataatctcaacccttattttcttagagatgagcaaaacaaaccctaaaacaaaagggcgaatggtcatcttattttttatacgcattgaggcttaaagtaactgtgatatcggtgattggaaaagagtgtccatttgcaattctaaggggtgcccacgatgtttgccgcgaaaacctgtggaaagcgtgataggggtgaaattttcaacgactggcaaaggcattttaaggggaaatagtcaataaccaaggcactgcttctgcaagaattttgagcaaaaaggcttgcaattcaagaaaatctcgtgtacgatgccatcccaattttgaaagcggaggtatggtttatgtgcaaagagaaggaaatcactgtgctcaaggtcagccctcataagaaaccggaagtagtcaccctgaaaaatgagttgtcggctctgtaagaagccgtgagcagtggagtgaaggactaccatcacctgatccagttggtcggcgcggaagaaggcgtagtcctgctcctgaacgatgagggtaccttcttgtcgcggccgcggtcggcgggatcgttgtgctgatcggcaaaatttgacagcggaagaaaaaaggttcccaagccattggcttgggaacctttttcgcatcgccgcacgatacagaggatcaaaggagaggttcataaagaagtttggaagagatcgtttcagatacggctgcggatctccgcacccatggccttgcagccgacgagttggcagttttcctgcatgatgtcgccgcagcggaagcccgagcgcagcgttttatccaccgcgcgctcgatggcgtcggcctcggcggccatgtcgaagctgtagcgcagcatcattgcggcggccaggatcgtgccgatggggttcgccttgtcctgtcccgcaatgtccggcgcggagccgtggatgggctcgtagagtccgttcgtgccgtcgcccatgctggaggacgggatcatgccgatcgagcccgtgatctggctcgcctcgtcggagaggatgtcgccaaagagattttcggtcacgatgacgtcgaactggctcgggtcacgcacgagctgcatcgccgcgttgtcgacatacatgtggcgaagctcgacatcggggtagtccttcgcgacctctgtgaccgtcttgcgccagagacgcgaggtgtcgagcacgttggccttgtcgatggaggtgacgcgcttgcggcgcttgcgcgcggtctcgaacgcgacgcgcgcgacacgcttgatctcgtgctcggagtaggccatgatgtcggtggctttctgctcgccgttcgcctcttccgtgcggtgctcgccgaagtacacgccgccgatgagctcgcgcacaacgacgaggtcgatgccgccttccgcgatgtcggcgcgcagcgggcaggcggcggagagctcggagaacatcttcgcagggcgcacgttcgtgtagagacccatgccctcgcgcagcttgagcagaccgcgctcgggacggttggcggcgggctgatcgtcccacttcgggccgccgaccgcaccgagcagcacgctgtccgcgttgcggcaggtcgctaaactcgaatccggcagcggcacgccgaatttatcgatggcggtgccgcccatcggcgcgtcgacgtaggtgaaggtgtggccaaacttcgcggccacggcgtctaaaacgcccatggcctcggtgacgatctcggggccgatgccgtcgcccttgatgatggcaatggtcttgttcatttcgccgcctcctttgccttgcgcgaggccatcaggccgccgtgcgcgatcatgtccttgataaacggcgggaagggctcggcctgatacgtcgtgccctttgtcacgtctgtgatgacgccggtgtcgaagtcgactgttacctcgtcgccgttttcgatctccgcgctcgcggcggggcactccaaaatggcgaggccgatgttgatagcgttgcggtagaagatgcgggcgaaattcgccgcgatgacgcaggagatgccgctcgccttgatggcgacgggcgcgtgctcgcgcgacgagccgcagccgaagtttacgcccgcgaccatgatgtcgccgtctttgacgcggtggatgaagtccttgtcgatgtcctccatgcagtgggaggcgagctccttgtggctctgggtgttcagatagcgcgcggggatgatgacgtccgtatcgacgtgatccccatacttatggacaatgccgtgtgcattcatttgttcatgacctcctccggatgagaaatgtggccggtaataccagacgccgcggcgacagctggagaggcgaggtagacctcgctgtcgacgtggcccatgcggccgacaaagttgcggttggtggtggaaacgcagcgctcgccggcggcgagaatgcccatatagccgccgaggcacggcccgcatgtgggcgtggagacgatgcagcccgcgtcgaggaaaatatcggtgtagccctcgtgcatgcaggcgcggtaaacttcctgcgtggcggggatgatgatgccgcggacgttcggggccaggtgatgcccctttaagatcgcggcagcggcggccatgtcagggagctggccgttcgtgcacgagccgatgacgatctggtcgatggcgatgtcgctgccctcgcgcgcgctgtgcgcgttttcgggcaggtgcggccaggcgaccgtgcagtcgaccttgccaaggtcgatgtcgatgacgcgctcgtattctgcatcggggtcggcctcgaacgctgtccaggggcggtccacgcggccctcaacataggcgcgcgtcacgtcgtcgacggggaagatgccgtttttgccgcccgcctcgatggccatgttgcagatcgtcaggcggtcgtaaatcgtgaggttcttgacgccctcgccggaaaattcgatggactggtagcgtgcgccgtccacgccgatcatgccgatgagcgtcaggatgacgtccttgccggagacaaacgggcggagcttgccggtgagattcaccttgatggcggacgggaccttgaaccacgtctcgcccgcggccatggccgcgcccatgtcggtcgagccgacgccggtggagaatgcgccgagcgcgccgtaagtgcaggtgtgcgagtccgcgccaatgacggcctcgcccggggcgacaagcccctgctcgggcagcagcgcgtgctcgatgcccatcgtgccgacatcgtagaagtggtcgatgtcgaagcggcgggcaaaggtgcggcactgcttgcactgcgtggcggacttgatgtccttgttcggtgcgaagtgatccatcaccatcgcgatgcggctcttgtcgaagaccttttcaaagcccgcggactcaaactcgttgatggccacgggggtcgtgatgtcgttgccgaggacgagatcgagctttgcctggatgagctggcccgcgcgcacgctctcaagtcctgcgtgcttggcgagaattttttgcgtcattgtcatgcccatgtcgcgtttctcctttcagttgccggattccatgatcttgttgatgccgttgacgtaggcgcggatcgacgattcgatgatatcggtcgagaggcccgagccggtgtacgagcgcccgtcggggccggagaccttgaccacggcctcgccgatggcgtcctcgccgtccgtgacggcgttcaggctgaagctctcgagcttcacgtccatatgaagcatgcggttgatggccttgaacgaggcgtccagcgggcccgtgccgatggcgacgtcttcgatctgctcgtcgccgcgctggagcttgatgcacgagatgttcggcacgccgtggcccgtgttgaccacatgactcacgagctggcagctgccctgcaccgcggcctgacggtggagcacgagcgcctcaatgtcgctgctcgtgatgctctttttcttgtcggcgagatccttgaagcgggtgaacacactttcaagctcctcgtcgctcaattcgtagcccatggattcgagcttttcacgcagcgcgtgcttgccggagtgcttgccgagcaccatcgtgttctgcgggatgccgacgtcggtggagttcatgatctcgtacgttcttgcattggcaatgacgccgtgctgatggatgcccgactcgtgcgcgaaggcgttcgcgccgacgatggccttgctcggcgggatgggcacgcccgtgatgttgctcagcagcttgctcgagcggtagatctgcctggtgttcacgccggtctcggcgtcgtagaagtcctttctcgtgcgcagcgccatgacgatctcctcgaggctcgcgttgcccgcgcgctcgccgatgccgttgaccgtgcattcgacctgcgtcgcgcccgcgcggacgcattcgagcgaattggccaccgccatgccgaggtcgttgtggcagtggacggagatgtcgacatgctcgacgccctcaatgttttcacgcagatacgtgatgaggtcgtacatctcctgcggcgtggaatagccgacggtatcgggcacgttcagcgtcgttgcaccagcggcgacagcggtggaatagcactgtgccaaaaacgtccagtcggagcgggaggcgtcctcggcggaaaactcgatgtcatcgcaatagctcttggcgtaggcgaccatctcgcggatgcggtcgatgacctgctcgcgcgtcatcttgagcttgtactccatgtggatgtcgctggtggcaaggaagacatggatgcgggggtggttcgcttccttcacggcatcccacgccgcgtcgatatcgcccttggcgcagcgcgcgagcgaggcgaccgtgcagttcgtcaccgcggcggagatggcctgcacgctcttgtggtccatcggagacgcgatggcgaagcccgcctcgatcacgtcgacgcccagcttttcaagctggcgggccatttcgatcttttccgtcagattcatgctgcagccgggggactgctcgccgtctctcagggtcgtgtcaaaaattttaatgcgcttcatggggtgttcctcctgctcttttttctcccgcatagcaacaaaaaaagcctccgtctcttcccttgaagagacgaaagctcaaaacttccgcggtaccactcttgttggcataaaatatgcccgctttctgcatcggcttaaaatcaagcgaatgcgcctcgttggtaacggtgaggagatccggctgcgcctaaacgaaaatcgtctcagcggagctactcaggggccagtgacatcatcccgctctgcattgcctcgcagcgaccggcaactctctgaagcgtctgtaggacgaatttttccccgtcatggtatttgtgaactatgagatttaatgatgctactataatcgcccgcccccgctttgtcaagcagggaaaaagaaatttgcacttttgacaaaaaacgcgcggcggaaaaacatattttgcgtactttgaacggagaaaaaggcgggagagcaaaagaaaagggaacgcgcaagcgttcccttttttgccaaaatttcttatctgccgccgaagatcaggctgccgagccccgtggaggtcaaaaacagaatgagcatgacaacgggcacgacatacttcatcatcacgctgtagagcttggcgcggccaaagtgctcgccgtttttctcgacctcggcaatgatccatttcggacccacgacccagccgaccaaaatgctcgtgagcaggctgatgaacggcatcaggaagctgttgctgatgtagtccatcacgtcgagcagctgcgcggtcgagccgttgggcagcgggagctcgaagtagagcgcgttgtagccaaggcagatgagcacggccgtgacgagcgaatagacgcccacggcggcgcacatctccttgcgcgacttgtggaaaatctccatgcagttggcgacaagcgtctccatgacggacacgcagctcgtcagcgcggcgaagccgagcgcgaggaagaacaccgcgcccacgacgcggcccacgccgcccatcgcggcgaagaccttcggcaggctgatgaacgtcaggctcgggccgctggccatgccgtcggtgccgagaaagacatagacggcggggatgatcatgaggcccgcgaggaacgcgacgcccgtgtcgaaaatttcgatctggttgttggccttgttgaggtcgacgtcgtccttgacgtagctgccgtaggtgatcatgatgcccatgctgacactgagcgagaagaagagctgactcatcgcgtcgagcgcgatgttcaaaaagcgctggacggtcaggcccgtgaagtcgggcttaatgtagacgagcaatccttcgatacccgtgcgcgtcatgccgctctcgtcggtgtaagagagcgtgagcgagaagatggcgatgccgatgatgagaaggagcagacccggcatgatgtagcgggagtatttttcaatgcccttttccacgccgcagtacacgacccacgccgtcagcgccaaaaagatcagcatgaagacgatgggcgagacgggggaggtgatgaacgaggtgaagaacccgtcctgcgcggcggtatcgccgcttgagacgaggtagagggtaaaatacttcgtgatccagccgccgatgacggagtaatacgtcatgatgagcgtggggacgaggaaggtgaggtaacccaaaaacttccacttcttgttgagcgttgcaaaggcattgagggcgttctgcttcgtgcggcggccaatggctacgtcagtcgtcagcagggtgaagccgaatgtcagcaccagcaccagatagacgagcaggaacagtccgccgccgtccttggcacagagataggggaagcgccagatattgccgacgcccaccgcgctgcccgccgcagccagcacaaagccgagcgaaccgctgaaactactgctttttttcatgttcgattctctcttttctttcatgtaaatggaatgactaatgccccattatagcagaagaaaccgaattggcaaggggaaaagcgctgaaaatgcaggaattcttgcgaaaatgtgaaaaaatatctcaccagcggcttgctgatgagatattttattcatagcaggattagattttgtcatggccggcggcttcgtcggtgaagacggcctcgaattcctcagcgctcatcgtctcgtgcgcaagcaggaattccgccacggcgatgaggtgcttctgatcgcgcgagaggatgtcctcgcagcgctcgtaggccgcgtcgacgatggacttgacctcctcgtcgatctgtgcggcgacctgctcggaatacggcttggcctgcgccatcgagcggccgatgaaaatttcatcgtggccggattcaaacgagatcgagccaagcctgtcgctcatgccgtacaccgagaccatcttgcgcgcgatctgcgaggcgcgctggatatcgttcgacgcgccggtcgaaatgtcgccgagcatcagcttttccgccacgcgcccgccaagcagcgagacgatctgctcttccatatagcgcttggactggtacgagcggtcctccgtgggcagcgagatcgtcatgccgcccgcgccgccgcgcgggacgatcgtgatctggtgcacagggtcgtgcgtcggcagcgcgtgcatcacgatggcgtgaccggcctcgtgataggcggtcagcttgcgctcgtgctcgctgacgacgcggctcttcttctcaggacctgcgatgaccttgatctccgcctcggagaagtcggacatcgtgatgagcttgctgccgcggcgcgcggcgagcagcgccgcctcgttcgagaggttctcgaggtccgcgcccgtgaagccgggcgttcccttggcgacggtggagaggtccacatcctcggcaaggggcttattcttgacatggatcttcaggatctcctcgcggccgcggatgtcgggaagccccacgtagacctgacggtcgaagcggcccgggcgcagcagcgcggggtcgaggatgtcggcgcggttcgtcgccgccatgacgacgacgccctgattcgtaccgaagccgtccatttcgacgagcagctggttgagcgtctgctcgcgctcgtcgtggccgccgccgaggcccgtgccgcgctggcggcccacggcgtcgatctcgtcgatgaagatgatcgcgggggcgacctttttcgcctgttcgaagaggtcgcgcacgcggctcgcgccgacgccgacatacatttcgacaaagtcagagccggagatcgacaaaaactgcacgcccgcctcgcccgcgaccgcgcgggccagcagcgtcttgcccgtgcccggagggccgacaagcagcacgcccttggggatgcgcgcgccgaggtcgatgaacttgcccggcgctttcaaaaagtcgacgatctcctgcaattcctctttttcctcatccgcaccggcgacgtcagagaacgtcgtggggcgcttgttgtctccgccggtcttgaacgacgctgtgccgaattttgccatgcggtcgccgccgcctccgcccgcggagcggacggagaggaagtaccagatggcgaaaatgccgagcaccgctaaaatataaggcgcgaacatcgcgacatagttgatcgagtggtcggcggtgaagtcgtagtcctcgatgatgccgtcggccttctgctgctcgatgagctcgcctaagtcgtcatagaagagcgtcacgctgaaaaggtcctttttgagctccgttttgccgtcgatgggctcgcgcagcttcatgcgcagcgtggtgtccgtcaccgtgaaggccgagacctgctcggattcgaacagctctcgtacctcggcatacgacggttcggcctccaccggcttgttcataaagccgtagacgccgacgagcaccagcagcaccagcagatacggcaaaagattgggacgcttggtctgttgagtcaatgggtgttcctccttgctgattcaaaaaaagaggcaaggcctcttttttgagaaagattcgctgcgttttgtgcctcggttgtccgctgaaagcgaacaattcgacacaacactccgcgcaaggtgttttctgccacgcacatgtcgcggcagaaaacagatttgaattgatttcgtgccgtgcgcggcacgaaactctgcgaggctttttgaggagccagaaagatcaattttcagaataaacctcgggcttgagcacgccgatgtacggcatattgcggtacttctgggcgtagtcgaggccgtagccgacgacgaattcgtcgggcacttcaaagcctgcgaggtcggcggcgatgggcttggtgcggcgggcgggcttgtcgagcagcgtcacgacggtcacgctggaagcgcccttggtcataaagtaattcttgaggaagtagagcgtgttgccggagtcgagaatgtcctcgatgacgacgatatcgcggcccgtgatgtcctgctggagatcgcgcgtgatctgcacgacgccggacgaggtcgtcgcgttctgataggacgagacggcgatgaattcaatgtcgctcttgagctggcaggcgcgcacgatgtcggccatgaagatgaaggagcccttcagcacgccgagaaacaggggatttttgcccttgaggcgctcgtagagctcgtcgcccatctcctgtacgcgcgttttgagctgctcctcggaatacagtaccttcaggatgtcctgatccatattgctcttagccatagcttttttctccactttctttttattcgtatttgttgtatctgatgcggcattccgccgcaggtcgcacaaattggcgttatcgggggacgacgcgcacaaaacgcgcccttttgccgtctttcggcagaaaagcaacgtccgtccccagccgccacacggcggcaagttggctgcccacgtaaagggcagggagcgcgtcgcgctcggtgagggagagctttcggtcgacgcacagccgcttgacgctgcgcgcgccgttcgcgccttgaagcattaagcgcgcgttcaggtcgcacggggcgacggtgatgatctcaccgtcttccggcacgcggagcgaaatgccctcgccgtcgggcttatgcagcagcgtcagctcgaaattgccccatgggaggggaacgttttccacaagcgccgcctttggcagcgcggcgggggagaacgccatcgtcagcgcgccgtccgcgatgcggacagtcgcgctctgcggcagcgtatagcgccgctcggcgctgccgcctctctgtgcaagggcgcagatcgcgtcgagctgcttgcgcccgatgtccttgcgcccgaggccgagcgcgtcggccaagtgcagcaggatacgtggctgcacgacttcatcggcggcaagaaagcagtccagcgacagcgaaataccgccgtcctgcgcttttgcatgggaaagtgcggcttccgccgcctgctcaagcgcatcgtcgagcgcagtcaatgaacgcgccgttgtggcgatatgctgaggcgcgcggggattgagctccctgagccgcggcagaatttcaagccgcaggtagttccgtgcggcggcgttcgggtccgcgttcgtgtgatcctcgacatgcgggatgttgtgagcgcgcgcataggtgacgagctcttctcgcgtctgctccaaaaacgggcggacaatgtcgccctgcttgggccgcataccacacaggccgcgcagatccgtcccgcggacgaagtttaagagcaccgtttccgcgttgtcgtccgcatggtgtgccagcgcgatctgggcgccgggcatttgcgctgtttcacggagaaaggcgtagcgcaggtcgcgcgcagcttcctcttccgatttgccggttgcgcgcgcgtgggcacgcacgtcaccggtgcccagatagaatggaatgtcctctttttcgcaccacgcgcggacgaagccttcgtcacgcgcagcctcttcgccgcgaagctggtggttgaagtgcgcacaggagacggcatacccctccccgcgcagaaaatgcagtaaacacatcgagtccaaaccaccggacacggcggcgagcacgggccggttcttgtcgagatagcgcgcgcagagtgcttccgcgcgcggcagctcagtcctcttcatgccggtagtcgagcgacgagaacgtcgtatactgcggcgaccaggcgagctcgaccttgccggtttcgccgtggcggttcttggcgatgatgcactcggcgatgttgcgtttttccgagtcctcgttgtaataatcgtcgcggtacaggaacatgacgatatccgcgtcctgctcgatagcgcccgattcacgaaggtcggagagcatggggcgcttatcctcgcgcttttcgttcgcacgcgagagctgggaaagacacagcacggggacctgaagctcctttgccatgatcttgagcatacgggaaatatcgctgaccacctgctggcggctctcgccgctgtagcccttcgtgccggaggacgccatcaattgcaagtagtcgatgactaccaaacctaaattgtcgatacggcggcacttggcgttcatgtccgcaacggtgagcagcggattgtcgtcaatgagaatgtcaagccccgagaggacagatgcggcgtttgcgatgttgacccagtcctgctcacgcaggttgcccgtcacgagacgctggttctcgaccgtcgcctgattcgataagatacgcgtcacgagctgctcgcgcgacatttcgagcgagaacacggccacggcctgcccgcttgagcgcgcgacattcagcgcaaggttcagcgccatactcgtcttacccataccgggacgtgcggccagcagcacaaggtccgatttgttgagaccattcatcttgtcgtccagtacgccaaagcccgtggggaggccgggcagcgtcttgccgccgttggcgctcagctcgctcaaatggtcgagaacgccctgcaaaacaaccccgatgctcgccatgctctgcgcgctgcgcccgcggcgcacggcgtaaattttctgctccgccgcgtcgagcacgctggcagcgccgcctgtgccgtcctgcaccatggtggaaatttcccccgccacggtatagagcgcgcgcagcagcgccttgtcgcgtacgatgccgacgtattccatcacgtttgcgctcgtgggcgtcacgtccatcaattgggcgaggtacgggcgcgtcgtgctttcctcataggtgccgtttttctccatctcgcccgcgacggtcacgccgtcgatgggcttggagtagacgaacatggagtagatcgtctcgaagatctcgcggttctgctttaagtagaaatcatcgggacggagctgctccatcacgtccttgacgcagtttgcgtcgatgagcatcgagccgagcacggactgctcggcctcgagcgaatgaggcatctgccggtagaagatatcttccacgagaagacctccttaattgcgtaatcttgcgccttactcctcgctcacgctgacggagaacctggcgctcacttcgtagccgagcttggccttgacctcgtaggtgccgaaggccttgatgggctcgtcgagcacgatcttctgcttgggcacgtcgagctggaactggctcgcaaggccctcggaaatttccttgctcgtgatggcaccgaagagcttgccctccttgccgcccttggccgtgagcttgacggtcacgttcttgagcttgccgcccatttcgacggcggcctgacggttcgcggcctcctcggcgcggcgggccttttccttcaggttcatggtgttgatggcgtcagccgtggcgagcacggcgagcttgcggggcagcaggaagtttcttgcatagccctcggctgcgtcgatgagctggccctttttgccctgacctctcacatcctgcgttaaaatgactttcatatctgtttcctccttgtggggtgatttacgttgtggggaagagcgtcactcttccatatattcgtcgatggcgttgagcagacgcgcccgcacctcgtcgacgctggcatcggccacctggccgccggcggtagtagagttgccgccgccgccgagtttttccataatgaactgtacgttgatctcaccgagcgagcgcgcggacaggttcacgcccgtgccgttcttgaacagcacgaacgaggcgtgaatgccggagagcgtcagaagctcgtcggccgccttggcggcggtcacgcggtcgatctccttttcaaccgcggccacggcgatgtcaccgtgcacgagctcggcgtgacggatgatgtcatagcgctcgaccatgccggcaaggtcgctctggaagagtcgctgtacgtccgacgtgtccgcgcccgcgcggcgcaggaacgcggcggcctcaaacgtgcgcccgccggtgcgcatcgtgaagttcttcgtgtcgagcacgatgcccgcgagcagcgcctcggactccgcgcgaagtaaatcggtcgggtcggcgaggtattgcaaaagctccgtcacgagctcggacgcgctcgaggcgtagggctcgtggaagttgagcgcggcggattcgatataattcgcggctcttctgtggtggtcgatgaccgccacgcggttgcacgcatcaagcagctgctcggattcgacaaggtcggggcggttcgtgtccaccacgacgagcagcgcgcccggctgggcggagatgaacgcgtcgttgccggagataaaggcgtccttgtattccggaagagccgcaagcttactgagcagcggctttgcgacgttgtcctccatgtcgatgacgatctgcgcctttttgccgcgcttgcgcgcgatgcagcagatgccggccgctgcgccgaccacatccatgtccgcgtgcgcgtggcccatgacgaagatctggcctgcgtcggaaatgagctcgccgagggcgttggccatcacgcgggatttgaccttcgtgcgcttttcgggggacttggccttgccgccgtagaattcaaagtcaaggcggttgcgcacgacgacctggtcgccgccgcgcgagagcgccatttcgatcgagagcatggcgttctgatagagcgtttcgtagtcatccacgtccttgcccacgccgatcgagagcgttgcggcgacgccgtcctcagtgacgacgcttcgcaccgcgtcgagcacggagaatttaccctcaagcagcttttgatactcctgctcggtcgtgacgagcacgtagcggttacgatcgaatttgcgcagcaggctgtgcgaatccttgagccatgtgctgatcttttcgtcgatggcggcgagcaccgcgctgcgcgacgcctcgctgccagccttcatcagctcttcgtagttgtcgatcacgatgaccgagacgatggggcggcggctctcgttctcctcgcgcagcgagtcctgctcggtcacgtccgtccagtacgttgtggcaagaaggctctgtccgccgcggcgggaggagggatggctcagattgccgaacacgcggaagtggcgcccgcccatcaccaccgtttcggggcactcgcttttaccctcgagcagccagtgtgtcggaaaatcggggagaatatcgtcgatgcggttgtcaaagatatcctcgcgcacgccggtgagctgcatgaagctgtcattgctccataggatctcctgcgtgtcggggcggaagaccatcatcgcgaacggggccgagagcatcgaggccttgtcggcggtggtcatgtcgtcggtcacgtcgtcgatgtactggcggatgccctcgcggcgcttctgcgccgtgtggcggaagtaccaccagagaaacgccatcgccgcagcctcgcagatcgcgagcgggatgctcacgcgcaccgtgacggcggcaaagagaaagccgacaagaaagtagagccggaagctggggtctaccagtttgctgatctttttgttccgcataatgaagctgccctcccgttatgatcgacattactgcggcaaaccgcgggaataatccatttcattataacacggcggggcgggcggatacaatatcaatattttatttttcggcgtcgacaaaaaatgtggtatacttttggtggaaaacgtgctatactatcccgtaatagcggatggccgcgctggaaaaatacgcgcaagagcctccgcgacaacgggttttgaccgcattttcgcggttctcatagaaagtccatagggaaccaaaaggcgccgcaggtgcgatcgcttcgtgaagcagggcgaagtgagagtacggacgtctccaatgctttgcgctttttggcccggacgcacatgacaaaatcaaaacaaatctatcgttattctattgtgaaacgaatcaaaaggagttgatccagcattggctgaacagttaaaaatcatccccctcggcggtctcaatgagatcggcaagaatatgaccgtttacgaatacggcggcgagatcatcgtggtcgactgcggcatggcgttccccggcgacgacatgtacggcatcgactgcgtcatccccgacgtgagctatcttgtcaagcacaagaaccgcatccgcggcatgttcattacccacgggcacgaggaccacatcggcgccgtgccctacatcctcaaaaaggtgaatattcccatctactgcacgcgcctgaccgcgggcctcatccgcttaaagctcgaagagcacggccttctcaaatcgacgaagatcgtcacggtggaaagcggcatgaccgtcaaggccggcaagttcagcgtggagttcatccacgtgaaccactccatcgcggactctgtcgcgtttgccatccacacaggacttggcaccgttgtccacacgggcgacttcaagatcgactcgacgcccatcgacggcgaggtcatcgaccttgcccgcttcggcgagctcggcaagcagggcgttttggcgctgctcgcggattcgacgaacgttgagcgcccgggctatacgatgagcgagcgcacggtgggcaggaccttcaaccgcctgttccagggctgcaagcagcgcatcatcgtcacgacgttcgcctccaacgtccaccgcatccagcagatcatggacgccgcggcggagtgcgggcgcaaggtcgccgtcacgggccgcagcatggaaaacgtgacaaaagtcgccatggacctcggctacatgaagccgccgaaaaacaccgtggtcgacatcaacaagatcaagtcgatgccgcttgaaaaacaggtcatcgtcacgactggctcgcagggcgaggagatgtccgccctgtaccgcatggccttttctcagcacaagcagatcgaggtcggccccggcgaccgcgtcatcatctcggcgagcgccatccccggcaacgagaacaccgtctcgcgcgtcatcaacgagctcttccgcaagggcgtggaggtcatctacgaccgcgcggatatgctgcacgtttcgggccacgcctgccaggaggagctcaagatcatccacgcgctgacaaagcccaagtactttatccccgtccacggcgagcagcgcatgctccagatccataaggatctcgccctccagatgggcatggaccgcaagaacatcgtcatctgcgacaatggcgacgccgtcgagatcggcgcgcgctcgatgaagtgcgtgcccggctacgcgcccgcgggcgaggtgtttgtcgacggctatggcgtcggcgacgtcggcgcggtggtgctgcgcgaccgcaagcaccttgcagaggacggcatggtcgtcgtcgtgctgccggtttccgcgcagaacggcgacctgctcgcggagccggagatcatcacgcgcggcttcatctatgtcaaggattccgaggaactcctgcaagatctcaggaatctcacgatgtccacggcggaggcgttccgcggcaagcgcggacgcgacataaacgagctcaagggcgcgatccgcagcgcggtgagcaactatctttttaaggcgacgaagagaagcccgatggttttaccggtcatcacgaagctttaaaaaagaggcacggtttaccgtgcctcttttttaagtggggatgcacttcgcttcgtgccttgccgcccggagggcggctgcgacacgcgcgaagcgagaagagttttttggcacgcgcgtgtcgcgccaaaaaacgaattcaaatttatttcgcgtctgcgaacgcgaaagtctgcgacgcttttttgatgcagatggcgtatgccccttatgggacgtttgccgcttgcgggcggcgggataagttattttagcagggaatgcgagagcgtcccctgcctttttgtatttgcggaaaactttgggcgatggcagggagggcattccgttttttcagttgacgggatacgaatgatatgatactctgtcggtagacgatatatcggtttacgttataacggaggccgaggaaagaaggataccacatgggaacgacggcgctgaccgaagcggtcttttacattttgctttcgctggatacgccgctgcacggctacggcatcatgcagaacgtagagcatttgagcggcgggcgtgtgcggctcgccgcgggcacgctctacggcgcgctcgcgacgctgaccgagcgcggctggatcgtctcgctcggcgacgagagcgagggacgcaaaaaggagtaccagatcacgcccgcgggccgcgaggccgtgcgcgcggagctgcgaagactgcatgagctgacgcaaaacggcgacaagctgacaagcgaatggaactgagaggggggtcgcacaatgctgaaacaaaaattctgcctctggtggatctggtatctgctgtttgacaacgcgcattttcagcgctggctcgcatggcaccgcaggcgcgggtgggaactggcgcacgtcggcgggctgtttttccactttacgcgcggcgacggcacggattaccgctactatgtgcaggtgatgaaggacttcccgtggacggagcagggcagggcctatattgcgggcgtggaggagctgggcgtcacctatcttggctgctttctgcaccgcgcgtacttccgctgggtggatgacggcaggccggaggagatgttttccgaccttgcgtcgcaggcgcaggaggcaaggtgcgtgcgcagtgcgcagatttttgcggcggcgctgtgtgcgctcggcgcggcgatgcaattttatactgcgtgggaatatctgtacgcggcgcaaatttatgaagagctctatgccgagctgatcgccgcgggcgggccgagcgttgtggcggcctggatgccgcggatcgcgctggaggcagtgctcggcctttcgtggctcgccctcgccgtatggggcgcgagcgcagccgtgcgcacgcacaaaaagtggaagaagatcaaagacgagcagtgtatctgcgaatgaaaggagagcagaaatggcaaagacgatgacgaagaagtggaacagagcgccgtttggccccgagcgagtggaagagatggagcgctatctcaacaagatgtcccacgagggctggcagtgctgtgagatcgtgcgcgatgagctgcgctttgtgcgcggggaacaggacgagtacatctaccgcgtacaatacttttacgaatcgcgcgacggcgaaaaggacgactatctgcgcacgctcggcgagacgggcgcggcgctggtgggcgagtacggcgaggtgctgatcctgcgcaaaaagacggcggacggcgcgtttgagctgtactctgacttggactccaagatcgcggcgctggaaaagcggcgctcgcattaccgcagcgggatgctcggcgcgctggtgctggtgctgttaagcgggagacatgcttacaaggcaatctcgcagtacggcttttcaagctggctggacacacagcttgattcacctgtgtatatggtgctgactgtcctgatcgtggcgggactgctggcgggtggtattgccggtatgatttccgtgcggcgcgaggggaaaaagattaaagagctgaagcgcagacgcatgatcgaggaataagccccgcttgcaaatcccgtctatccgttgtagaatagccctgctatcaaacagacaagcgggaggaaagccgacatgatccaggatatcgagccgaaacatctttacaacgagtggaagaaaaacgccgtgccgaaaaagagcagcgccgtggtgcagttccgtgggcaggaccttttgtgccgtatcgacgacaacggcctcaagttcccgtcgcgcgcgcagtttaccgagcccgacgaggcgttcacttatctttttgagctcgacgggcgggagtattacctgctttttgacgaaaatgagcgcgcgctcgacggctactcctaccgcaacatcggccttttccgcacggaaaagcccaaggagctcgcctatgcggcggtcagcgcgtggcacctttgctcgtggtaccgcgacgcgcgctactgcggccgctgcggggaaaagctcgtccacgacgtgaacgagcgcatgatgcgctgtcccaagtgcggcaacatgatcttcccgcgcatcaacccgtcggtcatcgtggccgtgacgcacggggactacctgcttttgaccaagtacgccaaccgtcccggcgcgcagcgcacggcgcttgtcgcgggcttcaccgagtttgctgagagctttgagcagaccgtacaccgcgaggtgatggaggaggtcggactaaaggtcaaggacctgcgctattaccgctgccagccctggggcatcagcggcaacatcatgatgggctactggtgcaggctcgacggcgacgacgataccatccatctcgacaactttgagctggcggacggcgcgtgggtcagccgcgaggagttgcgagagaactatacgggcaacggcatcgcccttacctcggagatgatcgccgaattcgccgcgggcagagatccctacagcctggacgcgaaaaactgaacaaaaaacgtctgtctcgaccgagacagacgttttttcatatggatttcagatggggccgatcgacagcaggcgcatgttgtcccactgcgcgagctcgcggagctctccgccctcgtactcgtacagcgtgcacggatcccaccagttgacgttgagcttaacaaaggcaaagtagcgctggccgttcacgacgatgatctgaaaatcgaagatcgcatggtcgatctggtctgcggcggcgtgcatcatggcgatcatcgtctcgtcgggttcaacgacattgccgacagaatcatagagcgtggtggcgacaagtgtgttgaccctgtgcgagcgaagcgcggaggtgtcaaagtctgcgtagtcggcggtgtaaaagacgcaggtgtcgggcatgaaggcgtcgcaggcgcggcttttgccgcttgcatagaccgtttcatagacgtaagcggcgtcctgctcgccggctggtttcagcgcgacgtgcaggatcggttcatcgggctcgcttcggatgaagagtagcagcgcgagacacagtgcgaagctgagcagcgaggcaagtatgcgtttcatcgtaagcctccttgcactccggcgctcagaagagcgcggggacatagtcgaccgcgtcggtgatgccgcccgcctgaccggcgagcgacagctcgaagcggtagaccggttgatagaagcccttggaatcggagaggtagtcgagcgtgcaggagcgcacctcaatttgctggacgctttgcgcgaaccacgcaccctcgaagctcttgcccgattgcagcgcggcgagcgcctgcgcgggggagagaatagactcttcgcgcacgggcgcgagcgtggtgatgcggttttcgagctgcgagagcgtcgattgaccgtcgccttgtgttctcagatcacaagtgagcgtgccgtggaggaagcctccctccgcagggagaagatcggcggagaacaccgcgcggtaagaggtctcgccatacggcgagagcgtgaacgcggcgccggcggggatggaaaagccaaacttgtcgagctcttcgcgcagcatgtcctctgtgacaccagacgcgggcgcatcgaaaacgggcgtgtgatcgcgcccaaagctgtattcccacgtgccgtcgtgcagggtgacgtcgaggaagtcgccggaagagtggttggcgtagatcacaaggtcatcgtagtagtacgcatccggaaattcgacgccgtgcgcggcggcaaattccgcggcgaagcggtcggcgcccgcgttgtcgagcgcctgcgcctgatagacataggcggtcttgctgtcttcgtcgagcgcaaagtcgaccgaccagcggacgccgcttaagtctgccgtcgtgacggaggcgtcgcgcaggttgccgtagggctgcgcggcgtaggagatgaaaatggcggatagtgcgagtgcgaacgcggcgggcagcgcgcagtagcgcggccacgtcctgttcttttgatgcagcgcgagcatgagcattgctgcacaccagccgagcatcgcgccgagcgtgttggtgaagaggtcgtccacatcgcacatgccgcttccggtgaaaagctgcgccagctcgatcaggagcgaaacgccgaagcccgcgcccagcgcggcataccacttgcgaaacggtttccacaagagcgacagcagcacgccgagcgggacgaagagcgcgatgttgagcagcacgttgagccagatttgcagcgtgaagcgctggtacgcttcgcgccaagcaaggaaaagctgcaaattgcactgccgcgcggcaaattcattcggctcgctgcgcagcagcgtgacgaagaccgtgaccgccgcccagccgacaagcagcaccgcgcagaccgcctttccccacgggaagcggcggccctgcctgcggcagacggcatagcagacggccagaataaggccgcagataagcgcagcgggcacggcaaagcgcatcccgcgctgcagcagataaaaaagataggaaacaaagtcgtgcatgagctccctcccgatttgatttatcagttggtttcgccgttcgcggttttgtcctcttcgatgcgcgcgctcacattctgccggaaggcgagccacgcatcctcgttttccacgtagtatttggggcagatcttgcccgtcacgtcgtagtgtcgaatgacgtccgcgtcggggtcaagagaaaacgtctcgcacagccacgcgacgagctgttcaaggctctccatcgtcgcgtcatcaaacttgcctgtgtcgtcggggtggcagacctcgatggacacggtgtagtcgttcgcggtgttcgagcagtaggcgatctccgtcagcggcacgcactgtaaaatctccccatccagcccgacgacaaagtgcgcgctcgcgtaggtctcgtgcgtcaaggcgaggtttgcaaaaaagctgcggttattggcggcactcgagccgggattgccgacatagtgcaccaccacgccggaaatttccctgagcggcgtgccgggacgggaatattcgttgaggggcagatagtcgaccgtgacaaagtccggcgcgctgacattcgaaccggggagattccggtgggcgagcgcatagcgcagcttcacgccgccgagaacgagcaaaacgagcgcgagcaggacgagaaatgctttcttgttcccagtgcggcggcgcttgcgccgccgctttgcgttttctgccatgtcagttcacactttccgtggcggaaacgtcctctgtggcggggagagtgtgaatgccgtcgtcgctgggcggcgttacggtgttggatttcagctcgggcagcagctcattcagtacttgcagggtgttgggcgttgagctattcacatgggggccgagcgaatacacctccgggcggcctttttcattggtggactcaaagtacagctcgagccagaaggagatggggggatcgtactggtcttcctgcacggcgaagatgtcgctgccgccattatcggaatcctgaacgtcctgcatcagcgcggcgtagacctgttcggcctgcgcggcggtgagggcatagtcctttgtgttggagttctcatcgtaatagtagcagtagctgtcgaggaaacgcggcgtgtcgccgaggtgctcgcagccgtagccgaggacgcggcggagcacggactctctgcacatatagagcgcgttcacgcgcgctgtgacggacgagggcacggtgaggtcacttctccgcaggtagagcgaataggagcgcgagagctgcgagccgtccttgaggtagtaggtcaggcgcagggagaagtgttcgatgtcgtcatgatcgctctgggagagcgtatccgcgtcccatgcgtctgcgatgcgcgcctgctcgttccggtttttgacgatggcctggtgtgccgcggtgagacggcggatggtgtcggcatcgtcggtcgtgacgttcgtcatgccggagaaggtgtagtaaacggattcgatctcgctctcgtccggcacgtgcttttcatagcccgtgaggtcgaagctcatcgcaacgccgagcagcacaagagcaagcgcgacgatggccgcgccctttgcgcccgcgcggaagacgcggaagctctttttgatgagcatctcggcggcaaagtagcccacaagccccgccgccgccatgcagaggatcgtgccgggcagggaatcgctgccgctcgagcggtactggccgaagaggaaatagtagaggaactggccgagcgaaacggcggtgcagaacgccacgccgtacttgaagatgggcgtcgcccacgggaaggcgaccgtcgagccggtcatctcgctcttacgcgtgcggtagagaagcagcgcgatgagggcgatgacaagtcccgcgagcgcgtaggcggcgaggatcatgaaagaacggtgctcaagcgcgtaggcagtcacatagtacgagccgctctcgcaggtctcgatcgaggcgatgtccacctcggggtacatatagaggggcggggagaggaaaccgagcgcaacgtcggtgtgcccactgtagccgtagaggaaattgcccgcaaagttgcgcagcagatattccattcccgggacgaggatattgccgacgaaatagaagacgggcgcggcgaggatctgccccgtcatcatcatgcacagcgcggcgaaggagtagaaaaagacggcttcgagcatggcgctgcccatggccgcgccagtgacactccagaagcttaagtgcagcggggcggagaccgccgcgccgagcaggaacgtgacgagaatggtggaaagctggcagaacagtcccgtgaggtaggcggtcagaaagatggtctcgcgccgcacggggagcgcgtggaagccgttcgtcgcgcggctctgcgtcaggtgcgagaaggcgagcatcgcaaagaaaaggccgaagaagaaggaaataaagatgccgccgcgcacgccggtattgagcagcaggtaggatgcatccgctgcgctgtaaccgccctgataggcggaaagctctgaaaagagcatgaccggcacgaggaaaagccacaaggcggtgtagccgagccagagcggccaggtgtgcttgagctggctgcggaataaagtcttatcaaagaacgatgtcgcggatcgcatagtcctcacctcccagttcatagatgaaaatttcttcaagtgacagcggcaccgcgtcgataaagatcgggtgcagcgcggagagctgctgttccagttcctctgcactgccgcggcagatgagcgtgtggacgcgcccggtctgcgcgtggtgcagcaccttgatctcctgtggcagctcgggcagctccgcgccctcgaaggcgagctggagcttgacggtatagtcctgcaattcgctcagcgaatgctcaagcaggagcttgccgcggctcatcacgcccacgtggtcgcacacgtcctccaattcgcgcaggttgtgcgaggagacgagcaccgtcgtgccgcgctcggcaacgtcctgcaagatgaggctccacacctgacggcgcatcacggggtcaaggccgtccaccggctcgtcgagaatgagatagtccggcatcgtgcacagcgcgagccagaaggccgcctgcttctgctggcccttgctcatgcggcgcagcggccgcttttcatcgagcgcgaagacctcgcggagcttttcaaagcgctcctgatcgaacttcgggtacagcccgcggtaaaagcgcatcatatcgcgcagccccgcctgcataaagtagaaccagtcatcggggatggaggcgatgcgcgccttcacgcccgcattttcccagacctcctcgccgtcaaagcgcacgctgccctcatcctgacggtaaacgcccgtcaggtggcgcagcagcgttgtcttgcccgcgccgttcggcccgacaaggccgtagaccgcgccgcgcggcacgctcagatccgcgccgtcgagcgcggcaaagccgtcaaaggtctttttaagacctcgtacttcgatcatttctcttctccctccctgcacaatgcttgaatgtcttcctcgctcacgcccatggcgcgcagctcctgcaaaagctctttgagctgctgctcaagcgataagcggcgcgcgtcgtcctgcgcgcggtaggtgtgcacggcaaagcagcccttgccgggcacggagcagcagtagccgctcgtttccaactcgttgtaggcgcgctggatggtattggggttgatggcaagctgcgtcgccagcgcgcgcaccgaggggagcttatccccgtcggcgatcgcgcccgagacgatcagccgccgcagtccgtcgcacacctgctcgtagatcgggcgcgcgtcgcggtaatttaaggtgatcatggcattcctcctgcattcatcggctgcacagcacggcgagcagcaaaatgccgagcagcagtacaacaagaaccgggatcagaaatatcaagtggaacataggcgcctcctgctgtattaagtgtgttagtacagttaggatagcatggcggacaccggttgtcaagcggggaatgcaaaaattttccaccgttttgctgtgcaaatcactaaatgcaggtaaagaatacattaaaatttatgcagaatgtatgatttgccatgcgcgcacgacaaaaaacgacacttgccccgttgacagcgggcggccgatttggtattctctgagatatgaaagaaattcatcaaacgttttacggaatgtgatttttgggaaggagaagtgtatggaacagtttatgaagatcaacactgcggtcaacggcttcgtctgggggccggtgatgctggtgctgctcgtcggcacgggcgtctacctgagcatcgctgtgggctttatccagttcaccaagattggctactggtggaaaaacaccatcggaaagatctttaagaagggcgaggccggcgacggcgagatcacgccgctgcaggccgtgtccacggcccttgcctccaccgtcggcacgggcaacatcgcgggcgtcacgggcgcgatcatcttaggcggccccggcgccgtgttctggatgtgggtgtcggcgcttttcggcatggtgaccaagttctctgaggtcacgctcgccgtcaaataccgcgagcgcaacgaaaagggcgactggtgcggcggacccatgtactacatcaaaaacggccttggccccaagtggaagtggctcggcggtgtgttcgccgtcctcggcgcgatcgcggcgttcggtatcggcaacatcgcacaggtgcactccatcgcggattccgtcaagtccgttgccgtcgcgttcaatgaaaacgcggcgagcagggagacgatgatctgcctcatcaccggcatctgtgtcgccatcttcgtcgcgctggtgctgctcggcggcgtcaagcgcatcggtcaggtcacggaaaagctcgtgcccggcatggccgtcatttacatcgtctgcgcgcttatcgtcgtgtttgcgaatatcagcgccgttcccggcgtgttcgcttccatcttcaagggagcttttaaccccgctgccgtcaccggcggcgcggcgggcatgtccatcaagctcgcgatgaccaagggcgtcggacgcggcgtcttctccaacgaggcgggtctcggctccgcgcccatcgcgcacgccgccacgtcggaaagaaaccccgtcaagcagggcctttacggcatctttgaggtctttatggataccatcgtcatctgcacgctcacgtcccttgttgtcctctgctccggcgcggcggacggcaattacggcaacgcggcagctgcgggcgttcccacggcggtcgcgggcttctcgagcgtcttcggcgcgaaggcgggctcggtcattctggcggtcggcctgctgctgtttgccacgtccaccatcctcggctgggcgctctacggcacgcgctgcgcggagttcctctttggcagcaagatcatccgcccctatcagatcatcttctgcctcgtcgttgtggccggcgcggtcgcggacctgacgctcgtgtgggatatctccgacacgctcaacggcctcatgtccatcccgaacctcatcgcgctgctgctgctgagccccgtggtcatcaaggtgacgaaggagcatttcgcgggactgagaaaataatcaaaaaacggcatgccgctttttgagaggggattgcagtccgcggcagcgcacgtgccataggcgcgcacgtttgcggcctgagaggtattttttctgacgcgcttgtcgtcagaaaaaacgattcaaatttatttgccgccgtgcgcggcagcaaagtctgcgacgctgaaaaa

SEQ ID NO: 10183 - DNA, 9844 bp, Unknown
  gut microbiota DNA sequence
gttttgctttacaataggaaaaagctgtgctatcataattcagcacgcttatcgtgcgcattcccgcacttaggacgtggaggattcaccgacccgccgctcagtgttgggagaatttatgaaaggtggatatcacactatgatgctcaaagaccagaagacggctatcatcgaagccaaccgcacccacgaaagcgacaccggttctccggaggttcaggtcgctatcctcaccgagcgcatcactcagctcaccgagcacctcaagcagcacccgcaggacaaccactcccgccgcggcctgtacaagatgatcggtaagcgccgcagcctgctcgattatctcatgaagaaggacatcgagcgctatcgtaccctgatcgccaagctgggtatccgtaagtaagtttgaaaacagggtggtgtgcatgcgcaccacccttctttcacactttcacccttggcactttccccgcgcgtatgagagcctgctatgctttagcagttgaaaaagcggcggcgtgaccgacgctttttcaagtgctaaacggtcggctcccatacggaattttacaaaaaaggagatcgacaaatgtctaccatcatcacccacagacagttccccaactaccacaagtacgagatggagctcgctggccgtcccctcacgcttgaggtcggcaagcttgctgaactcgccaacgccgccgtcatggtcggctacggcgacacccgcgtgctcgtctgcgccacggcttccgcccgcccgcgcgacggcatcgacttctttcccctctccgttgactttgaggagaagctctactccgtcggccgcatccccggttctttcaaccgccgcgagggccgtcccggcgaaaagggcatcctgaccagccgcgtcatcgaccgccccatccgcccgctcttcccctccgacttccgcaacgacgtctccatcatggcgacggtcatgagcgtcgaccatgactgctctcccgagatcgcggctctgatcggcacctccgccgcgctcgccatctccgatatcccctggaacggccctgtcggcgcgctcaaggtcggccttgtgaacggcgaactcgtgctcaaccccaactccgagcagcgcaaggtcagcgatctcgacgtcacagtcgtctccaccggcaagaaggtcgtcatgatcgaggccggtgcgaacgaagtcgacaacgacaccatgtacaaggccatcgagcttgcccacaacgagaaccagaagcaggtcgagctcatcaaccgcatggtcgccgagatcggcaagcccaagttcgactacccgcacgcgagcttcaaccaggagctgttcgacaagatcgtcgaaaacttcatggacgaggccaaggccgcgatggataccgacgacaagaacgtccgcgaggcccgctggaacgagatgatcgagcactggcacgagaagttcctcgaggagtatcccgacatggatcagttcctcgacgagatcacctacaagttccagaagaagatcgtcaaggcgtggctgctcgaaggccaccgcgtcgacggccgccagaagaacgagatccgtcctctcgctgccgaagtcggcgtcctgccccgcgtccacggctcgggcctgttcacccgcggccagacgcaggtgctctccgtttgtacgcttgacacgctttccgccgcccagaagctcgacaccatctgggaagagaccgaaaagcgctatatgcaccactataacttccccggctactccgtcggcgaggccaagccctcccgcagccccggccgccgcgagatcggccacggcgctctcgctgagcgcgcgctgctgccggtcatcccgtctgtcgacgagttcccgtatgccatccgcgtcgtgagcgaggtcgtctcctccaacggctcgacctctcagggctccatctgcggctccacgctcgcgctgatggacgcaggcgttcccatcaaggcacccgtcgccggtatctcctgcggcctcattcaggacggcgacgacttcaccacgttcatcgacattcagggcgttgaggacttccacggcgaaatggacttcaaggttgccggtaccaagaagggcatcaccgccatccagatggacctcaagaacgacggcctgacgatggccatcatcaagaacgcccttgagatcacctatgacgcgcgcgtgcagatcctcgaccagatcatgctgccctgcatctccgagccgcgcgccgaggtcagccagtatgcgcccaagatgatcaccatgcacatcgaccccgagcgcatccgcgaggtcatcggtaagggcggcagcgtcatccagaagatcgttgccgataccggcgccaaggtcgacatcgacgacgacggcaccatccacatcgcctccgccaacgccgccgcgtgcgacgctgcgaagaagtgcatcgacgatatcgtcttcgtgcccgaggtcggcaagctctactatggccgcgtcgtgcgcctgatgcagttcggcgcgttcgtcgagatcgccccgggcaaggacggcctggtccacatctccaagctcgaccgcaagcgcgtcgagaaggtcgaggatgttgtcaccgtcggcgatatgatctgggtcaagttcatggagatcgacgagaagggccgctggaacctctcccgcaaggacgccctcatcgagatcgaagcccagcaggccgccgcaaaggccgccgagcagcagtaattcggcttcctaaagatgataaaaaagcagcgccaaccggcgctgcttttttcgcttgcggcgaaatcggcggcatggtatgctggatgtggaaaagttgaaagcgttacggggaggaaacttgccctatgagaagcgatagtatgtttgtcgaggcggccaaagaggatgtgccggagatcattgccctgcggcatcaaatttggggcactacttacagagggatctaccccgatgatatgatcgacaactttgattgggcgtggcatcaggagaaagaactgctgcggatcaatgatccggcgtattctgtgtatctgctccaaaaagacgatcaaaatatcggctatttgacgataagcagaaccgacgggatcgtcttgcagtcactgtatattctctctgaatatcagcggcaggggatcggtcgggcggcatttgattttatcaaggcgtattgcagggaacacggggcgaagttttttacctgccactgtgttcccgagaatctgaatgcccgagcattctatgagaagatgggcggcgaggtgatcaggacggacttggcaaacgaggagccatggcagaactcggtcacctatcggtttgcggcggcgtaagcgaatctgaaagatcgacagctgtcgggctgagaagtaaggggcggcgcccgcagggggcggagaatttatgaaatatccgggaggttctttcgatggactatatccgaatcaccgatgataatattgagaaagagcacatctgctgtgcgatgtccggcaagcagggcgtcatcaaaaaggagtggctcaagcagcgctttaaagaggggctggtcttctgccggagcgcggagcgcggcaagtgcttcattgagtatattccggcggaaaacgcgtgggtgcctattcaggcggacgggtatttttatattgattgtctgtgggtctccggctcgctgaaagggcacggatattccaacgatctgctggaagagtgcatccgggacgcaaaggagcagggacgaaagggactgtgcattctctcgtccgaggggcgaaagcgggagttcctctccgacccgaagtatctggcatataagggatttgccgttgccgatacatcggaatgcgggatcaatttgatgtatctgccgcttgcacaggatgcagagccgccgaggttcaaggcctgtgccaagcaccctgcggtggaagagagcggctttgtcctctattataccgaccagtgcccgtttacttactactgggtgccgcgcgtggaagaggccgcgagagcgtaccacgtgcctctgaaggtcatccacgtcaccagcagggagcaggcacagagcgtacccgccccggtgacgacctacgcgctgttcaaggacggcaagttcctgactcagagcattcaaacggacaaaaaatttctgaagcttgcgggaatacaggtggagcagtgctcggatacaaaataaaagcacggtagggggcgcggcatggccgcgcccctttgcaaattccatgcggctatgccgaagcggaagggaaaataaatttcacggcatatttacaggctgtgggggaatttggtataatatggcatccgacaggatacaaaagacaaaaacgtgattttcttccctgaaaggagaagtgctgtaatgcgtgattatatcattatgaccgatagctgctgcgatctgagccagcaggaggtcgaagaactcgagttgacggtcctgccgctctcgttcaccatcgagggcaagacgcttttgaatacccctgaccacgcggacatgtcgcctgaggaatttttcgccaagatcgccgcgggcgcggactgcacgaccgccgcggctaatgtcggccagttcaccgacgcgatggaaaaggtcttgcaggagggcaaggacatcctctgcgtctgcttttcgagcgcgctgtccacaacgtatcagtccgcctgcatcgcggcggaggacctgcgcgaaaagtaccccgaggcgaagatcttagtcattgactcgctgtccgcctcgcgcgggcagggcatgctgctctatcgcgccgtgcgcgagcgccgcgagaagaatttgaccatcgacgagctggatgcctacgtccgttccatcatccagagccagtgccactggttcatcgtcgacgatctgaaccacttaaagcgcggcggccgcgtgagctccacggcggcgctggtcggcacgatgctcggcatcaagcccgtcatgcacacggacagcgagggccgcttgacccccgtgagcaaggcccgcggcacgaaggcggcgctgcgcgcgcttgtcgacaaggttggcgagatcggcgtcgagccggagaaaaaccagcccatgctcatctgccacgccaattgcccggagtccgtcgagtacgtcaaggggctgctcaaggagcgcttcggcgtgacggatgtgcgcgatgagttcatcggccccgtcatcggcgcgcacaccggctgcggtacgttgggcctgttctttgtggggactgagcgatgaagtggctggaattacaccttgacacgcagcccgcgggcatcgaacccgcgacggagcttttgagcgagtacggcatcgacagcctgatgatcgacgaggagggcgacttcaaggacttcctcgaaaataaccaccagtactgggactatgtcgacgacgagctgatggagcagatgcacggcaggagccgcatcacgttttatttggaggacagcgccgggggctacaacaccctcgcgcagtttcgtatcggtctgtcggccttcaaaaagcagcatcccgagtacgcgccgctgatcctcagcatggaaaatgtcgaagacgcggactgggagaacaactggaagcagttctacaagcccatggagatcggcgagcggctgctcgtcgtgccggaatgggagcaggcgcaggaggacgggcgcgtcaagcttgtcttaaatcccggattgacgtttggcaccggcagccacgccacgacgcggctgtgcttacaggcgcttgagcagcatatccacggcggggaaaaggttttagaccttggctgcggcagcggcattttatccatcgccgcgctgctgctcggcgcgaaggacgcctttgcctgcgatatcgacgacaagtgcgtcggcgtcgcgtatgaaaacgccgcactcaacggcgtcggcaaggagcattacaccgtccgcgcgggagacgtgctcagcgacaaaaggctccagaaggagttcggcggcgactatgacgtgatcgttgcaaacatcgtcgcggacgtcatcattgcgctcgccccgcaggtggggaagctcctcaaaaagggcggcattttcctctgctcgggcatcatcgacgaccgcgcagaggaggtgcgcgagaagctcgtcgaagcgggatggacgatcgaagaaactcgcagcagcgaggggtggttttcttatctttgcagataagaggaggcttttcacgctgcgcgtggatggggaatagcagtgccgatggcactgcacggataaaagggaaaagggggatactctctttcaaaagagagtatccccctttcaatcccccgagagaaattttgcattggcagattgtagcttgaagagctgcgcggcctgcggaattgggtgcggtgtacatggcttcgccatgaatccctgcgagtcgcgaccggtcgcaaccgcgccttacttcgtgaggcgcgagtgacagtagcacggcgacagactgcttgcggaatgcggcattgctggcgctcgccgcggatgaaatagtgaaagcgctcccgtagggagcgctttaatcgtctaatagggattcgtaggaaacgttgaagaccttggcgagggctttgacttcgtagtcggggacaaagcggtcgcctttttcgatgcggaggatggtgaggtcggagcattcgcagccgagcagctgcacttttgtcgccaaatcgtgctgcgaccatttcttttccaatcgcagcgcgcggacttttgcgccgattatatttttcgagtcgcccgaccagtaaattttcatcacgcaccgccagcttcataagatgaagttttttatcttgattttaacggtgacagatgataatatacttctaaagatgaagtataaggagtttaattttatgctgacatacaaaaatctgtactgtgcactggtgcgcagcatgagcgaggccattgacctatacgacgaaggcaaaggcatccttgcccgcgaggtgcttaaaaaagccctgctggacgcagaagaccaagtcatctcccacgacatcatccccgacgaaccaattaacggcgattcggcaagagactaaaaagcgcggcgagcgcagcaatgccgcgcccgcaggcagtctgccgccgtgctgccgtcacacgcgcctcatgatagtaaggcgcggttgcaaccggtaacaacttgcagggactcatggcgaagccatgtacaccgcacctgattacccgcaaggggtatgccacatccgtaaggcagcagagctgccaacggctgtgcaatgcgtagcgcgtgcagttcttcaagcccaaaactgccaatgtgcggggtcgagggggaaggcccctcgtcctttctctcggggattgtaaagggggatactctctttcgagaaagagagtatcccccttttacgcactcccgcacggtacgggaatcatcctcctgcaccagtgcaggaaaaaagctcttttacgcctccggcgtaagaacgcccttctctgtaaccagcatcgtgcagcgcatatcatgctcctcgaccggcacctcgggcgacatgagctgctcgcggcagatgagcaccgtcgggcagtggagctgcggcaacaggcggtcatagtacccgccgccctgaccgagacggcggcccttgcggtcgaacgacaggcagggcacgacggcgaagtcgatgtccgccgcggtgacgagcgcgcagttcttcttcggctctaaaatgccgtaggcgcccgcctccaggtcatccatcgaacgcacgacgcataggtcgatggcatgctcggcggcgcagcggggcaggatcagcgtcttgcccgcgacaatggtctcgttcataaagagcgaggtgtcgatctccttttcggtgccggcaaaggcgaagacgactttcgcgctcttgtactcgtcgagtgcgagcaggtggcggcagatggcctcggagctctcggccttgtagacggggtcgagcgtacgctctttcttgcggataaaggttctcagtgcttttttctcttcgatcacagacatgggaatgcccctcctgatgctttcaaaatttgtcgctcctatcgtagcaaaaagcgaggaaaaaggcaagctgccgaagaaagtaaaataatatcccgccgcgcttgtcaaaagaaattgacagtaaattttaattttgttatcctaatcatggataggaacgcggatgaccgcgtcaaacagaggaggaatttttaccatggctatgctgctcaagggagctgaggtcgccaaggcgctgaccgaggggctccatgcaaagacggaagaactgaagaaaaacggcgtagagccctgcctcgccatcctgcgcgtcggtgcacgcgaggatgacctggcctacgagcgcggtgcgctcaagcgctgcgaaaaggtcggcgtcgccgtccgtcaggtcgtcctgcctgaggatgtgacgcaggaggtgctgatggagaacatccacgcgctgggcgcagatgaaaaggtgcatggcgtgctgatgttccgcccgctgccgggacaccttgatgacgaggcggcgcgcgcggcgctcgacccgaaaaaggacatggacggcatcaccgacggctccatgaccgccgtgtacgccggcaccaagggcggttatcccccctgcaccgccgcggcctgcgtggcgctgctcaagcactacaacatccccatcaaaggcaagcgcgtcgtcgttatcggccgcagccttgtcatcggcaagcccgtttccctgctgctgctcgccgagcatgcgaccgtgaccatctgccacagccgcagcgagaacctgcccgagatctgccgcgaggccgacatcctcgtcgtcgccgccggtaaggccggtatggtcggcgcggagagcgtgcgcgccggtcaggtcgtgctggatgtcggcatccacgtcggcgcggacggcaacctctgcggcgacacccgctttgccgaggtcgagcctgtcgtcgaggccatcaccccggtccccggcggcgtcggcaccgtgacgagcacgatcctcgcaagccatgtcgtcgaggcggcggagcgcgcggcgaaccagtaattttcgcattcaaccggcatagagaggaaagaaactgatcggacaagagaacaggaggaaacttatgggactttacgattccgttgaccgcggcaagccgaagcccaagcgtttgaccggccccatcgcgctctgctgcgcgctgtttctgttgttcggcggcctgacgtactgggcctgtcactaccagttccgctttcatgcctttatctccgatttgacggacagcacgcgcgatgcgcgaagcgcagagacgtttcgcgtcacagtgaacggaagcgaaacggacgtatcgatcgacgatctcagtgaccttttataccttatcgacaaggccggcgcgggccgcaccgccgctgcgccggaggagatgccctacgccgtgatcgactacggcgacggctcgacgcttgagatctggaaggtcgagctcgcgaatccgtccaacgactggacggaggggccgtttttccgctacacggacgcgaaggggaagtcgtatggctacgacacggaccagctccgctggaaaagcgttgtccgactcttgggagagtgaaaagagggagcacccgcagggtgctcctttttttgcgcgctctccagcgcgcggagattttgcagcccgaaagggctgcttctgtccctgcaccgtgcagggggacgattaagggggatattctctttccacggaaagaga

SEQ ID NO: 10184 - DNA, 662 bp, Unknown
  gut microbiota DNA sequence
ccgccttactacaggtgagtatccgaccgacccggtcgcgtaacgcctcaaattatgaaagggttaaaaccatgaaaaagcgaatcacatcattgatgctcattcttgtcgtcgcagtatccatgacgatgggagcgagcgcgacatcgtacattccggacgatgtcacctaccagaatttgaacggccagcagcttgccatcaagacctatacgcttcttccggatcaggatccctccgacctgtatgaagacgacttcgagtatgacggattcctgtattctatgagcgatattgtcaaagaagagcagcgctaccaggaagagaacgcacataccgaggttgtcactgtcacaaccgcaagtaagaacctcgaagatatccttgctgagctgaaacctacgatcgagtacgatgacggagtctcctccggcacactttcgctcgatcatagcactctcaaaacggaggcagccggctataagcgcagttcctatactgtgacagcgacaaagaactacaccggcctcgaccgaaatgattcttcttacatcgataagaccgtagagaagaatggcagaactttgagcctctccaatgtaacttggagcgttgagagtactgctctggtcggcgatgagctcgtcccggcaacttactct

SEQ ID NO: 10185 - DNA, 15265 bp, Unknown
  gut microbiota DNA sequence
ggtatgttcgctacaacacccatttcctcggtgtgcatgaccttgtcccggagggctatgacggcgatccctatgagcggctgatgcctgggacgctcaccgcttcggcggagcaagccgtgtaccgcaaagtctgcatcgagctccttcgggagctgttcgataccctgccgaagaaggacagggacatccttggcaaagcctacggcgtttttggatactcggaagcaactttgaaagagattgggatgtatcacatgatgaaggagtccgccgtagagaaggcaaagagccgcgcgatcgagaagctgagagaagcctatcccggcagcaggcttcaggtatggagggctgttcatcgtatgatgcggagaccggttccgccgccgggggagggcagtgagctgcggcgcaattttccgcagtatgttcgcgctttgacggaggtctatggcgtgctgaacgaagccacctcagatatggatcaatttgctgagtaaaaaaactatacaaatatttgtacagccaactatgttattatcctatacaagctcatccgcagatgctatactcaagtaaagtaagcgaaagaagggatatgtaccatgctgacggaaaaagccaatgccatctgccttttggaggttctaaaagagtattccgatgcagagcacattctgcccatgcgggagatcattgcaaaaatgcagtccctctacggcatcaaaatcgaccgccgtaccgtttacggggccgttgcgcttttgatcgagctcggttacgacatttccatttacgaggacaatggtgtcggctattacctccgcagtcgggaattggaacagtcggaagtccttttgctgaccgacgcggtatattccttcccgttcattcccgcaaagcagacggagcagctcgtccaaaagctgcaaaagcagcttagcgtccaccagcggaagcggtaccgttacctgaccatatcgcggcatggacgcaagaccgacaaccgccaggtattctggaacattgagcagttggacgaggcgatcgcgcagaagaaaaaagtccggctcggctatctccactacgggctggataaaaaacagcacgaggcaaagacctacacgctcagcccctacgaaatgatttacatgaatgagcggtattacctcatttgtgttcccgaccacgcgccaaatacacgtctttaccgcattgaccgcatgaagaatattcaaattttggatgatcctcgcagcgaggctgtcgcccgtcaggaggcacaaaatgctgtctatgcctatgtcggcactccggagcgcatcatcatgtactgtgaccgagccatcttagacgatgtgatcgaccgctttggcacagaggtacagatccgtgaacacgacgaaaatacctttaccgccagttttaccgcaccgccgcgcggcgtcaaattctgggcgctgcaatacctgccgcatgtggaggtcgtagagcctgcgtggctgcgggaggagattattgagagccttggaaagaacaagtatttggcgctcattaaggaggtctgacagatggatacgtttgtgggaaaatcgcaaaaaattcgaatcgatgtatcgagtattgaaattgagagcaaaaaatcttcgacttttggcagcaagcatatttcttgtgataagatcaccaaggttgaccaacgagggaactccgtttttattagcgtaggcagtggcttttacgcatcgcctacagaaattgagtttaatgaccgcttcgaggcggaaagagcctaccgtgctgtctataatgcaacgcctatgtcttggccgcttagcattgaaggtaataccctatacataggcggacgatatagctttcatggaaaaagtatccgcatatcggacattcaggaagcttctgctaacggtgaaggaaaactaaccatacggtgtaagcgtagctatgattctttttccattcaaagaagagatccgtatgaagcaagaaaagaagctgacatgatcaacgcccggctccaaaaaacgcaagatcgttccaaccaaagtgattttgcttcatgggttatcgcatcgggaagatcatcctcctcaagtacgcgggcatcgcaaacctctcaggaatcaactcaaacacaagtgcagcccaaggtcaggcaaaagaaaacatctgtatttaggaatgttgtggcgattgttattgtcctcatcctttgcagccttctcaatagggtaatagataacgacagatctgcttccgtttcagtctcggcccaagcagcgatgatcgattacattggcttgacggtcggcgatattgaagatatgtttggagccgattatactaccgattactgggaaggtggatacaatatgtactactctgataccagtggctgcccatatgttttcatttataatccgccggatatgtctacttacgacggacaccccaaccgggattacaccatcaccggtatttcctgttccactttgaatagcgttgtatttggagatgcaaagattggaatgcctcacagcgatttcgaaaaagccattgggcaaacgtacaaggttgattttccaatcggctggagttacacgctgcctggcgatgttctgaccgttaatgcgcaaggagcaaacgggcttcaaaacggagcacacaaattgattgttttggaggacaatagcactgtagtctttgctttgctatggagaatttctgaggactcataaagaaaaggtgggttttgtaatgtcaggaagcgagagtaagtggaagcaagattacctctaccgtatgttttcgcaccataccaaggataaggaaatggaaaactacgttgtcaacgcgatatgggcgaggctggacgatctgaacgtcaaacccataacgcagcaatatgtccgccgccccaatggctatgcgttgatcgacctctatttcccgcagatcaactacggcgtggagtgcgacgaagcgtatcacaaggacaatacgctcaaggacgccgcacgcgaaatcgacctgcaaacagcactgtccgcctgcagcgaagacggattgacgatccgccgtgtggatgcaacgctggacgcagatgcgcttcacgcccgcatccgcgagatcgtctgcgagatccggcaaaaggtcgcagaaaaaggagaacagctctctccatggcttgagcaagaagaggaatggcgcagtatcaaagagcgcggtattctgcggacagaggatgcctattcctttaaaacgattgccgacatttgccaaaaatgcttcggcaaggatgcgaactatcgcatccagcgcagctttttccatgtggccgatgatcggatgctttggtgtcctaagttggcgattgaactgcctgacggctcaaaggtggcgcagtctcgcggctggatcaatgagctgtccgctgactggaatgtgatcatcgaacataatgacagcggcgctaccccagtaaagcacccggataagccacgctataccttcgcaaagagcaaggacgaacgcggtgaggacgcttaccggtttatcggtatatttgaatggagcgagaccacgccgagcggtgaacacatctataagcgcatggcaagcgatatgaaactgaaatagtaccatgcacagcgtccctgtacagacatttgcacagggtgccgtgctattctatcaacagaacagagagcatacggatagtgccgtagtacggtgccaagaaaggatggacaaaatgaaatatacttctgcccaggccaataagctgctgaaaaagctgaatgacgaatattccgccctgctggataaagagcagcgcagccgcgacttccgcgctgcgatgggcgaggacgtggagtccgtacgccccgcctacgattacgcggaaacacaggcgcgcctcgcagaactcgaagggaaaatccgcgccctcaagcacgcgatcaactgcttcaatatgacgcattttgtcgacggctttgaaatgaccatcgacgagatgctggtctatatcccgcaactcacaaggcgcaaaaataagcttcttgagatgaagagccgccttcccaaggagcgcgttgaggagcagtacggccggcagtcaaacatcatcgactaccgctatgcaaactacgatattgccgcagtggaggccgattacgacaaaactgtcgacgagctttcccgcgcgcagcttgcgcttgacgcgatcaacgggcgtgaaaccttcgatcttggcgaatgatctttttccgtcatttccatacgaatgtctgactattttataacagagttacgatctccgttcgggtttacagttcggtgagagcatcggttattttgatggttatttgttatgctgccccatgttcaaggttcgggggaccaaccattacggcatcgatggagcgagaaaacttttttgggaggcggaagtacggttatatgcctccttctaaaattgtggaaaaagcgcccctgtacagacaaacgtacaggggtgcgggctatacttcttaatgacaaactcctatgttaccaaggatatccattaaaatggtctatttgaaaaatttcacaatactaagccgcgaacaggaagaaagaattcttgattcgatcagagaaacctgttataccacgcgatatccgttcaacatcttccgttatcgcgatgtgccgcagctcgaatttgagcctctaaccatattctatggcggtaacgggagcggtaaaacaacgctgttgaacatcattgcagaacgattgcatctttcgagagagaccgtttttaatcggagcagcttttttgaagattatgttcgagaatgcagctacaagatgacattcgggaaaattgctcctccgggtagccgcatcataaccagcgacgacgtatttgactatttgcttgacatcagatacgtcaatcaaggaatcgacacagaaagagtcaaactctttgatcaatatgtaagcgacaaatatgagccgttccagttaaaagggcttgatgactacaaggaattcaagcgtaactgtgacgccaaatcaaaatcgcgatccagatttatcaaagaacgtttaatggagaatgtccaagagcaatccaacggggaaagtggtttatattactttaccaactcaattaaagagaacgccctctacctgctggatgaaccggaaaacagtttatctgcctcactgcaattgaaactgaaaagttttcttgaggattctgcgcgattctatcactgccaattcatcatctcaacacattcaccgtttctgctttccatgcaaggtgcaaaaatatatgatctcgactcagatccaatcgatgtaaagccatggactcagctggaaaatgtcaaaacgtattatagcttcttcaaaagtcatgaaaaagagtttttctgataacaagcccaagtgctttttcaattgattatattagcggctgcgcgtcatcataattaaaccctaacaacaaaagacatccaagagattctgtcttggatgtcttctatgtcagcaactcttttcattctgtttcatcttgtacgcttcgtttcaccgaagcgctggaagtgcacgatctcgcgcgcacgcaggaatttgatgacatcactcacgtccggatcgtcggaaaggcgcagaatgttgtcatacgtcacgcgcgccttctgttccgcagccaggtcctctgtgaggtccgcgatggtgtcgcccgtgacctgcatggtgctcgccgaccacgggtaacccgaggcgaactgtgggaaaacgcccgtcgtgtggtcgacaaagtacggctcgaacccagcctccttgatctgctcctcggtcaaattgcgcgtaagctggtgaacgatcgtgccgaccatctcgagatgccccagctcctctgtgccgatgtcggtcagcaggcccttgagctcggggtagggcatagagtagcgctgggagaggtagcgcagcgacgcgccgagctcgccgtccgggccgccgtactgcgagatgatcgccgcggcaagccgtggattcgggttcttgatcctgacggggtactgtaactttttctcatatacaaacattacttttctccctccagatcccacggccacggatcattcagccacttgaagctgccgggcgtcacgtccgtctgcaaaatcgggccgtactgcttttcataggcctcgcgcccctcgcggccgagcttgatatacgaccagtagaggttcagaacctcggtgtcctccgggtgtgtggtgagataaagccccagctcgtcgatggcaaaatcgagcgccatcagctctgagagcgccgtgttgacggcggggaacttcgtcttcatctgcgcgtgaaagggtaggttcagccccggaaacagcgtgccggccttgagtgcgtcctgttgggaatagcgctcggggtcgtttttctgcacggggacatagggaaaagccagcggcgcgcagcagccgttcggcagtgtacccacgccggactcggcgcgcatggctctgttgtcgtccaaagaagtctcctccttgcaaagaaatcgggcatccgcccacaccatcctatgcagcgggagaaaaaagggaagcggggcttttctttttgttcaaagtcctgtataatgaaaagcacataaggccgcgccgcggggcatacattgttccggggtgaggggtattttgtttatcgtgttcggaaaaaaggcgttttacgccatattcgcgctgctgctcgtgctgacggcggcgaccgtcagcctgcttctgccgccggaggcggtggagacgagtgtgtcggcgccgacagggaagaccgtctgggtcatcgacgcggggcacggtggggaggacggcggggccgtcgccgccgacggcagcaaggaaagcgacatgaacctcgccatcgcgcagcggctcgacgcgctgctcgtttttctcggcgaggagacgcgcatgacgcgcacagaggatatctccatccacgatgccagtgcgtccacgctgcgggaaaagaagcgctccgaccttgaaaaccgcgcgggactggtcaacagcacgcaaggttctatccttgtcagcatccaccagaacagtcttccgtcatccaagcagacgcacggcgcgcaggtgttttacggcaaaaaagaggggagtgccgaggtcgcgaatgcggtgcagctcgcgctgaatcagactgtcaatgcgggcaatgagaagacagagaaggccatcgacgcgtcgatcttcctgatgaaaaacgtcaccgcgcctgcaatcctgatcgagtgcggatttttgagcaatgaaaacgaaacggcgcttttgaaaagtggcgaatatcagcaaagactggccgttgtgatcgcgtccggccttttacagcagcagtaaagcaaaagaggtttacaatatggcaaaggcaaaaagtgtatttttctgcacggagtgcggcaacgaaacgcccaaatgggcgggccgctgcccgagctgcggcgcatggaacacactcgtcgagcaggccgtcggcgacggtgcaaaggcaaaagcgggtggccgcagccgcgcgctgcgcgccaaggcgcacccgatcgcagagctcgacacggcgcaggagatccgttttcccaccggcatgggcgaactcgaccgcgtgctcggcggcggcgctgtgcagggttcgctcgtgctcgtcggcggtgcaccgggcatcggcaaatcgacgctgatgctgcagatctgcggaaaactgagtgaaaccgccaaaattctgtacgtttccggcgaggaatcgccgcgtcagctcaagctgcgcgccgaccgtctcggcgtgcagtcggacaacctgtacgtgctgtccgagacctgcctcggtgatgtgctggaatccgtcgaagaagaaaagcccgacgttttgatcgtcgactccatccagacgctctatcaggactcgctcgaatcgcccgcgggcagcgtggcgcaggtgcgcgcctgcacgctggagctgatgcagctggccaaaggggagggcatcaccgtctttgtcatcgggcacgtcaacaaagagggttctattgcgggcccgaaggtgttggagcacatggtcgactgcgttttatatttcgagggtgaggcgcacatgagctatcgcatcctgcgcgcggcgaaaaaccgcttcggcgcgacgaacgagatcggcgtattcgagatgcgcagcgaaggccttgtcgaagtgccgaacccgtcggaaatgctgctttcgggacgacctgacgatgcgcccggcacgtgtgtgacctgcgtgatggaaggccagcgcccggtgctggccgaggtgcaggcattgcttgcgcccgcggcgcagtcagtctcgcggcggacaagcaacggctttgactacaaccgcgccgccatgctgatggcggtgctcgaaaagcgcggcgcgctcaaggtgtccggctgtgacgcgttcttgaacgtcatcggcggattgagcgtggacgagcccgcagcagaccttgccgccgtgctggcgctcgcgtcgagttatctcgacaagcccatcggcaatcacgtcgccgccatcggcgaggtcggcctgaccggcgagcttcgcagcgtgaaccatttgagcgagcggctcagcgaggtgcaccgtctgggctttgaaacatgcatcatcccgaagcagcgcaaggatcagatccgcgcgccgcaggggctcgcgctgatcgaagcgtgcaacatcgccgaagcgctgcgcgccattgtgcaggcgtaaacgccgatgcgccgattgtaaagcagtttctataatctataatatagtagcaaaaccggcagcgttttcacactgccggacccatagaatcccatgatcctgacaaaggaggtttttgtcgccagccacgccaaaacgctcatttccgcaaaaatacgcttttccgctcccctcaattgaacaaaatttttattttgttcaatttggtatagacttcaaaatgcccctctccatcggctcctttattgaataccgccgtacagccgatcaacggcatgtgcgctgtgcatcccgttcaaaggatcaatctctgcgcagctttgctctgcgtcgcgtttgaactgccaacaacgctcacagatcaaagctgctgaatttttctttgccgacataccgacattttgaaattcaattttggagtatctctccgtattatttttgttgtaacgaatgagctcgcgtgaaaatgcggcttactttatattatgaacgactaccgcttggaatcgccgccgattttgcgcgattttctatcctaccacgagaccatcaaagcccactcgcagaaaacggtcgatgaatatttcctcgacctgcgcaactttttccgctatttgaagcagtcgcgcgatccgtcgctgcgcggcctccctctcaatgaaatttccatcatggacgtcgatcttgactttgtgaaaaaagtaacattgaccgatatttacgcctacatgacctatctgagccgtgaccgcgtgctgcatcaaaacagcgacatgtccgactacggcttaaatgccgcgtccagagcgcgaaaaatcgcaacaattcggtctttttacaactatttggtcaataaagcgcatcttttggacacgaatccctgcaaggacctcgattcccccaagatcaaaaagtcgctgccgaagtacctgacgctcgacgagagcgtgcagcttttgcagtccgtcgacgggcagaaccgcgagcgcgactactgcattctgacgatctttctgaactgcgggctgcgaatctccgagctctgcggccttgatctgcaggatattcaggacgacgcgctgcgcgtgctcggcaagggcaacaaggtgcgcatcgtctacttaaacgacgcctgcaaggatgcgctcaagcgttatctcgccgtccgccgccccatctccggccgcgatcacaatgccctcttcctctcgtcgcgcaacgagcgcatcagccgctcgagcgtccacgcgctcgtcaaaaagcacctgagcgccgcggggctcgacgcttcagaatactcctcgcacaagctgcgccacacggcggcaacgctcatgctgcaaaacggcgtggacgtcaaagccgtgcaggaggtgctcgggcatgagcatctgaacacgacggagatctacacacacattgataacgacgcgctgcgcgtggctgcaaaggcaaatcccttgtcgcatgtaaagatgaaaaagaacgaggattaaaattgactttcccggcttcatccgatatacttaatagttgatgaaatgtatttttcaaggagggtttccatgaatacaaaagagctttcccccatctgccggcaggtgcggcgcgacatcatcacgatgaccgccaacgccggcagtggtcaccccggcggctcgctgtccgcggtggaactgatgaccagcgttttcttcaatcacatgcgcgttgacccgcagaacccgcacgatcccgaccgcgaccgcttcgtgctctccaagggtcacgccgccccctgctactatgcggtgctcgccgccaagggcttcatctcccgcgacgagtatgcaaacttccgccagctccactccatcctgcaaggccaccccgacgcgaaaaaggtccccggcgtggacgcctccacgggttctctcggtcagggcgtgtccatcgccgtcggcatggcgctgggcgccaagcatctcggcaaggatacgaaggtcttcgccctcgtcggcgacggcgagagccaggagggccagatctgggaggcttacatggccgccgcgcactataagctcgacaatctgaccgtcatcatcgacaacaatggcctacagatcgacggcacgaacgaccaggtcatgagccttggcgatctgcccgccaagctccgcgcgttcggctttgacctcgtcgagctgcccgacggcaacgatctcgacgccgtcgaggccgcactctccaagcccgccatgcccggcaagcccaaggccatccttgcacacaccgtcaagggcaagggcgtttcgttcatggagaatcaggtcggctggcacggcaaggccccaaatgccgagcagcgcgagcaggctttgaaggaattggaggactaagaacatggctgataaaattgcaacccgtcaggcttacggcgaagcgctgatcgaactggtcgaaaagaacgataaggtcgtggtgctcgacgccgacctcgccaacgccacgcagacctgcaaggtcgccaaggcgcaccctgaaaaattctacaactgcggcattgccgaggccaacatggtcgacatcgccgccggtatgtccacgatggggctcatcccctactgctcttcgtttgcgatgttcgcggccggccgcgcctatgagcagattcgcaactccatcgcctatccccacttcaatgtcaaaatctgcgcgacccatgcgggcgtcagcgtcggcgaggacggcggcagccaccagtgcatcgaggacatcgccctcatgcgcgccatccccggcatgacggtcatctgccccgcggacgccaacgaggccaaggccgccaccatggcgattgccgagatgaacggtcctgtctacatgcgccttgcgcgccttgccacccccgttttcgagggcgatatggtcaagccctttgagatcggcaaggccaacgtcctgcgcgagggcaaggatgtcgcgatcttcgcgaccggcctgatggtcagcgaatccctcgccgccgcggagaagctcgccaaggagggcatcgacgccgccgtcatcaacatccacaccatcaagcccatcgacgctgcgtgcgtcaccgaatgggctgaaaagtgcggcaaggtcatcaccgtcgaggagcacagcgtcatcggcggtctgggcgacgccgtggccgacgtcctgatgggcaaggtgaactgcaagttccacaagatcggcgtgaacgaccgcttcggccagtccggcaaggcgacggacgtgctgcgcgaatacggcctgacggccgatcagatcgccgagaccgtcaaggcgaacatctgatgaacaccgcgcccgagtgcgtcgacatgacggaatcactgcgccgcggcgcaggccgcctgctttataacggagatgaaggctctctcgtcctcagcacggacggaacgtttctgctgagcgacatacaggacggtgcgcttctgtgcgaaaagattcgcacgctttgccctgccgctcccaagctgttcaccgtcaaaagtgacgatgccgcagcagcgctgatgcgggaattctccctgcacgattccatgcgctgcacgcagtgggtctatgaaaagggcgagctgccctgcccgtcacggcggacatccgcccgctgacgcaggagcacgcggcgctggccgcgtccgtctatcacgacggcgacggtgcgtacatccgcgaccgcatcgaacacggcgcactcttcggcgtatttgagagcgatgccctcgcaggcttcgccggttttcatgacgacggcagcatgggcatgctcgaaattctaccgccgttccgccgccgcgggtatgccgcgcagctggaagcatttctgatcgctgcggcgctgaaggagggccgcacgccctactgccacgtggtcgacggaaacgaagcgtcgctgcatttgcagcggaaaatgggcctcacctgcacccgccttcccgcgatctgggtcaattaagcaaagaaaggagacaaagcgaatcggttttgtctccttttttcaaaaatatcgcaaatcctcttgcaaaatcaaatttctgtgttacaatacaattagttccaaacgtaccaaacatttgaaataactttttatcaaaggagaagatattatgccgctcgtaacatctactgaaatgttcaaaaaagcctatgacggcggatacgccatcggcgcgttcaacgtcaacaacatggagatcgtgcagggtatcaccgaggcctgccaggaagagcacgcgcccgtgatcctgcaggtcagcaagggcgcccgcgcctacgcgaaccacacctacctcgtcaagctcgtggaagctgctgtcgagtgctgccccgatatccccatcgtgctgcaccttgaccacggcccggacttcgagacctgcaagtcctgcatcgacggcggcttcacctccgtcatgatcgacgcctcctccaagccctttgccgaaaatatcgagatcacgaagaaggtcgtcgagtacgcacatgaccacggcgtcgtggtcgaggccgagctcggcaccctcgccggtatcgaggacgaggtcaaggtcgccgcgcacgaggcgtcctacacccatcccgaagaagtcgaggaattcgtctccaagaccggctgcgactcccttgccatcgccattggtacctctcacggcgcttacaagttcaagcccgagcagtgcaccgtcaatgagcagggcatcctcgtcccgcccccgctgcgcttcgatgtgctgaaggaagtctccaagcgtctgcccggcttccccatcgtgctgcacggctcctcctccgtcccgcaggagtatgtcaagatgatcaacgagcacggcggcaagatgcccaacgctatcggcgtgcccgaggatcagctgcgcgaggccgcaaagctctccgtctgcaagatcaacatcgactccgacctgcgccttgccatgaccggcaccgtgcgcgccttcctcgatgaacatcccgacaagtttgacccgcgcgagtatctcaagcccgcccgcgccaacatcaaggagctcgtccgccacaagctcgtcgatgtgctcggctgcgctggcaaggcctaagcgataaggagaactgctatgagtgaattgaaaggcgcgtgcatcatcggccagtccggcggcccgacctccgtcatcaacgcgagcgcttacggcgtcatccgcacggcgctcgattccggctgcatcacgaatgtctacggtgcagagcacggtatcaagggcgtgctcgaagaccgcctgttcgacatgagtcaggaagacccgaaggagctggagcttttaaagtacaccccctcctccgccctcggctcctgccgctacaagatgaaggaccccgacgaggacgacaccgattacaagcgcatccttgaggtattcaaaaagcacgacgtccgctatttcttctacaacggtggaaatgactcgatggatacctgcaataagatcagcaagtacatgcagaaggtcggctacgagtgccgcgtcatgggcgtgcccaagacgatcgacaacgacctttatggcaccgaccattgccccggctacgccagcgccgccaagtacatcgcgacgagcctgatggaggtctatcaggacgcgcacgtctacgacacgggcatgatctgcattgtcgagatcatgggccgccacgccggttggctgactgccgccgccgcgctcgcgacgaagtacggcgcgggtcccgacctcatctacctgcccgagactgatttcgacatggacacgttccttgccgacgtcgagcgcatctacaaggagaccggcagctgtatggtcgccgtatccgagggcatccactatgccgacggcagctttgtctccgaggccaagaccagcgcgacggacggctttggccacgcgcagcttggcggcctcgccgcgctgctggcgagcatcgtgaaggaaaagaccggcgcgaaggtgcgcggcattgagctgtcgctgctccagcgctgcggcgcacacctcgcaagcgagaccgatatcgaagaggccgtcatggccggtcgtgccgcggtggagaacgccgtcgccggcatcaccgacaagatggtcgcctttgagcgtgagactgtggacggccactacgtttgcaagacgaagctgctgccgctcaccgaggtcgcaaacttcgagaagaagattcccatcgagtggatcaacgactctcacaacggcgtcaagcaggagttcatcgactatgtccttcccctcattcagggcgagcccaagctcacgaaggaggactccctcccccgtttcgccaaactcaaaaaagtgctggccaagtaaatttttcagtaaaaaaggaaccgattctttcgaatcggttcctttttatatcattccgg

SEQ ID NO: 10186 - DNA, 5629 bp, Unknown
  gut microbiota DNA sequence
aaccactcaccgagaacatctgtggtaagcggcagcgtcgtttccttcgtgccgctttccgtgtagagcgtcagcgtaacggtattgtcctgtgcgtgataggtctccgtccgcgcggtcacgccgaggggcgcactcaggcgcgcaagctgcgcgcccgccttatcccagtcgacctcactgcgctgagagcccccctccgcggcgttccaacggtagacaaaaacacacgacatgccgtcgccaaaggtgctgcgcgtaatgagttcgctgcgcccatctcccgtgagatcaagcggccacgcgccgtcgccctccgccgcatcatcaaagtcatagccaaaggtcctgcccgcatagacgaagccctgctccgtcagcgcatagaagtcacaaactgtcataactatgccttggatcgtttcaagctcgaagcccggaaatccgagcacatcgtcccgtgcggtgagggagactttttcggcagcgttgccattcccgatccaagtgccgcgattcacgccgaacggtatgtcgatctccgcaccgtccgcgccaaagagcgcgtagcgcgcatagccagcctcatccggctcgtagaccttcagcgtgacagtctgaccgccggcctcctcggtctgcgtgagcagcgcggtgggcgcgtcagcctcctccggtggcaattcctctatgatgggctgcggggtgcggcttgctaagatgatgctgacaagcgccgctgccaccagcagcggcagcgcgatttttcggctcatatcctcttcctcctgttatccttcttatagaacagcataacagcgggcagaggaaatgacaagttacaaagtgatgacattccagttacaggaatgtaacaaagcgagaggaacctcctctcgctttgtttctttacaggatgatacagataagaccgcccgtgccctcgttgatgatgcgctcaagcgtctggcggagcttgaggcgcgcgtcgtccggcatgtgcttgagctttgcctgcaagtcttcgttcacgatctcgtggaagctgcggccgaagatgttggactgccagatcttcgtcgtgtcgccctcgaactcctgcaagaggtagttgaccatgtcttcgctctgcttttcattgccgacgatgggcgaaaccgtcgtttcgatgtcggcgcggatgatatgcaggctcggcgcgctcgccttgagcctcacaccgtagcgcccgccctgcttcatgatctccggctcctccaagttcagctcgtcgaccgtcggcacaacgatgccgtagcctctctcgcgcgcgtcggacaccgcctgcgccaccttgtcgtactccgccttgaccgacgagagctcagtgagaaggctcagcagatcgccgtcatccttcacatcgaagcccgactgctcgctcagcgtccggtagaacagtgcgcgtgggagctgcaattccgccgcggcgacgcccgtgccgagctgaatggacgtgatgcgcgcgctgctgacgctttcgcagccgccgatggcgctgatcgcgccctgcacctctcggatacagtggaggctgcctgtgttctcgcggatggcctgatagaggccgcttttgatcgggtgatcgtcggcaagcgcctcgacccacggcgggatgaagaggtccagctcgcagagcgggaactcgtaaaggatggccttgagaatcattcccactgcgttgtcgtcgagcgtcaggcagttgacgggcagacatgtcacgccatagcgtgaagcgatatcccttgccattgcctgcacgcgatcgctttccggctctgtcgcgttgagcagaacgagaaatggcttgccgatctcctgtaattcgcggatgacgcggccctcggcctctatgtagtcctcgcgcgggatatcggtgatactgccgtcggtcgtcacaacgacgccgatggtcgaatgctcgcggatgacgcgcgttgtgccaagctccgccgcctcactcatcgtcaccgcgtggtcgagccacggcgtcgagaccatgcgcgggctctcgccctccatctgccccgtcgcgcccgggatcatgtagcccacgcagtcgatgagccggaccgagcagctgctgccctcgtcaagcgcaatatccaccgcctcttccggcacgaacttcggctccgccgtcatcaccatgcggccgctgccgctctgcggcagctcatccttcgcccgctcgcggcggtagacattgtcgatgttcgggatgacctgcgtctccatgaagcgcttgatgaacgtcgacttgcccgcgcgcacggggccgacgacgccgatgtagatgtcccccgccgtgcgggtcgaaatatcctgatagatctccgtattcatgctcataccctcttcctccgttcctcatcgcctgcgcgggatcagcagcagctttccgatcaccgcggcggattcctccttgagctcgttggccgcgaggatggcctcgaccgttgtgcggtacagcttggcaatatcccacagccgctcgccctgcttcatcgcgcggagcacgagcgaggggacgttctcgtcctttttcccgcactcctcggcctcaagcgactgaagacaaggataacgcggcgtttccgccacgctgacggcaaacgttacggggaagcgcagctccacgccgtccgcgccgacggacgcggcgatctcgcccgcgtacatgtcctgcacccgcgcctgtccgctgcccggaaggtcggtctcgagcagcacctcgctccgccgctcggagagcagcggcacggcgttttcgtcgagatacagcacgcgcagattcgccgtcgcgcgcagcgacgcgctctctcccccgccgctcacgcccgcgctgctgaagatcacgtccgtcgccagcaccgtctgcacctcggccccggtctcgatcttttcgcgcacgagctgctcgcgcagcaccagcgccgcgctgtcgcacagctcgaccgtctccgtcttcgcggtcaggtcgtaggccgtgctgtaaaggtccaccacacagcaaacgcttttcacctcgcgcaccgctgtgaacgcgctgatgtagagccgcagcgagatggcgcggttgttgtccggctcgctctcgctgccgacatggatctccgcgcctgtcaggcgcagcgacgcgcgcaccgtcgtctcgccctcctcttcggcaagtccgtcgagaatctgcgaaaacggcaattcactgctcatcgacgcaaggttcccgctctcatccaagtagatggcatccagccgcgcgacgcccttgagcacgatcttgttgccgatcgacttgcagtcagtcacgcgcagcgcgcactttgtgcgtaaaagctcctgaatgggctccttcgtgcccgaaagcagcacttcatcggaaaacgtgaagtccttttcccgaatggcgcggataataccgatgtcctttttctcgcacagcgtttcgatcttgtaggcttcctgctccttcacgccgctgcacacgctcagcgacgcgggcacgtagggcgtaagcgtcagctccacgttcacgcgcgtgaacaccttgcgcggattgagcatgcgcacttcgcacgagcagagccggccgtcgaggcagctgtccgcgctgccgctcagcgcgcgcccctcgatcgtctcgtcgagcggcagcgtgtattcaaacgacttcatcccctgcgcgtcctcggccacgtacaaaagcgtcatgcggattgtgcccgacacctgcgcttttccgtctgcgatctcacggctgcgcaggaaaaggcacccgctcgcatccacgatgcgggcgatgtccggcagatagtccggcacgatggtctccgttgtctcctcgcggttctcgctgagctgcggtaacgcctgataacaggcaaactgctcctttttcaattccagttccattgcagtccctctccttcggctaagtggttactgcactctatgcactgtggacgcgcgttatgcttcctccctgacgccaaatacgcgccgcagcagcgacgagaggaccttgggtgacttccaaacgacaattttcatgcttttccctcccaatattcatacccttttcaaccgatgttagaatctgcgcaggcagccgatgccgcaaaagatgagaagaaatgcgaccagaaacatcagcgcccccaccggaaaaacagccgcgatgaaaataccgagccccagcgccagcgcgcaaacacccacgcagcgccacgggccgaacagcggcggtcccggcgggcgcggcggcggattcgaatacatgcttttcccctcctctcccggcgttcgcctgctccattctatacaaaagcggccgccgcgttcctgctttatcgtgacaaagcgtcgaacttcgtcatgttgtcctttgtaatacttgacattttctcatctttatgtaatattaagaacaacttcacttgatcgcggctctgcgagcgtgttccgcactgaccgcaacggaaaggacggcacacccatgcaggaaatgagcagaagaaatcagcactttaccgactccgtcattcgcagaatgacgcgtatctccaacgaatgcggcgcgatcaacttagcgcagggcttccccgattttgacccgcccaaggagatgatggaccgcctcgaggtcgtgagccacgaaggcccccatcagtatcccatcacgatgggtgcgccgaatttccgccaggccatcgcgcgcaaatgcggtcacttcatgggccgcaccatcgaccccgagaccgagatcgtcgcgaccatcggctcgaccgaagcgatggtcgacacgctcttcgccctgacgaatccgggcgaccgcgtcgtgatgttctccccgttcttcgaaaactaccgcgcacaggtcatcatggccgactgcgagccggtctttgtccctctgaatccgccgacgttctcctttgacccgaacgttctcgaagatgcgttccgcggcggtgcgaaggccatcatcatctgcaatccctcgaacccgagcggcaaggtcttcaccgaggaagagctcaagaccatcgccgacctctgcatccgctacgacgtttacgccatcatggacgaggtgtatgagcacatcatctacgacggccgcaagcacatctacatgaacagcatccccggcatgtgggagcgcacggtctcctgctcgtcgctctccaagacctactccgtcaccggctggagactcggctatgccatcgcgccggagaacatcatggcgcgcatccgccagtaccacgacttcaacgccgtcggctgcccgtcgcctctgatggaggccgccgtcgtcggcctcaacatgccgctgagttactatgacgagttcggcgcgcactacgcgcacatgaaaaagatcttcaccgagggcatgcgcgacatcggcatccccttcaccgatccagagggcacgtatttcgtgctggccgacatctccccgtacctcaaaaagggccagagcgacgtcgacttctgcgagcagctggcgagaaaagccggcgtcggcgccgtgccgggcagctcgttcttcaatgaaccgatcaacaatattgtgcgtctgcac

SEQ ID NO: 10187 - DNA, 8240 bp, Unknown
  gut microbiota DNA sequence
gcctgaacagcctgcacacaccagcgctgactggaatctccggcaacgcaggtaaggagagtcattcggttatccgtggtagaggacaaatagctccaatcgctgctgctgattttggtcacagtctccaccagataggtgcgggtacccatggatgtggtataggtgatcttatcgcccacatcgagatctttgatgctgccgatcacatatttggcgccgcgattatgcccgcagacagccacattgccgttccagacgctggtactggtgaaatgccccagcccctttttcatgctggcagtcgtttcaccttcccagagatagtaattcttaactccgatggcaggaatggagatctttccgacggcaccgttggagagcagaaaatcctgtgtcagctccgtgaaagcgggcatcgcaggagtagctgtggagccgccctgcagaaaaccggggatttccacagttccgccgccgggagaaattccgtaaatgccgctgccggatgcagagatgctctgaagaccaggcagcatgattttctccatcaccccggtttgggtggtgctgagctgcccgtactccagcccggggatctggtagtccaccatattttttccaccgtaattgtagcgggagccgtagacgtcctcataggaagatgagggatagtattccggggtgccatcggtttcaaaggaataatcggcagcctgtgcgctgaccgccatcgcagaaagcatggcagccagagtcaaagtcaatgagaaaaacttcttcatacgggagcctcctgttcttcttcagcgggaacggtaaattcatgccagtcattgtgcttgctggcttggatcgtgtaagtatggtcactctgcgggaaagaaacggtgaactcgcgcccagccagatgcctggcaagggattttttcacctcaaccgcgacggtatctcccggattcagtgtgagagcgcctgcatcgatagcgggaacctcgctgtcaggctccacacggaactttgcaatcagccggtactctcggggcttgctgtccggaacatacacatagacatttttgcggcggcacagcaggatgagtgcagcggcggcgatgcccgcgcagagcagcacggcagcgatgatcagcagcggagcggcaaggctgccgttatcccagatatgtgtttttacggggacgatctcacttccggtgtaaaccacggtataagtgatgctgtccacgccttccgaagtaacggttccgtgatattccgccgtggtgacatagcctgtggcagcctgatagctgctggaggcggaataggtggcgaccgcctgatactgggcaggaaccagtgcctcgccgacgagcgccgtgccggtgacctgccattccacattggcaagggagagcgtttttccgtttttgacggtcgtgggcggcacataggacatgtcgttgcgatccagattgccgatcacctttgtctcggtggttttgctgtatttggtggtgtagccggacgcctctgtggaaagcgtggtatgatccagcgccaactcgccggagaagccgtccttttcatagggcatactgggcgaaagctctgcgaggatctgcgcaaggtcatttttggcggtattgaccgtgacggtttccgttacggttttgctttccagatacgggtgttccaccttggtggtgtaggcccaggtataaagataaccgtcgtaggaaaagtcctcttccttcagctcatctgggtcaacctccggggaaagcgtgtaggtttttacaagccgctgctggccgttcaggttttccgctaccaatgaatcgggaacctgagcggcaaaggcgctgaccgtcagcgacatggcaagcagcaggcaaagggccagctttgataagctcttcatggtggcctctccttttttacaaattctgtttgatgattctggtgatgatgccgacggcgatgccgcgttcctcatccagacgggtaacggcaaagctgacgtcgtctttttttccaggcattcgccggtcatagcaggtgtgggcaaccgcgttgacaccgttgttgagccggatgaacacaacgccgtgccgcacatcggtcactctgccggcatatttgccctgcaggacgcatttatccagattgctctggttggcggcggacgaaacgctacggatatctgctgtgatggaaatatggttgatgtcgctgcggtcaatggtgagcacacggacaagaacacggtcgccgacgctgtaatactcgcgggcgtcaccgaaccatgcggcagacagatcgcgggcgaaaatcgcacactccacgccgaacacttccgcacgcaggactttttccgcaacgccaatgacgcgcgcctgtacgacgcgcccttcatagatcatggggacgccatcttcgttggtgtccagatagaaggtctgacgcttacggagcatagcggccttgcggcttgccacaacgctgcgggcggtgttatccagaccccggacgatgaaatcgatctccgcggtgagcatggttgcaaggatactgttcatccgctccataaacggcttgtatttcgccccatacggaacgggtccggaatagagcatcatttctttcagcgggatcgcaatgcgataacccttgtagtcaacgacaacgatagtacggccggaaggggtctgctccacgccgtccaacgttccggtcaaaatacgaccggcaatatgcgaggtcttgatctcatgccagatgacctcacggcgttcttcttccgtttcgatacggtcttttgcatcaacggtcagaatgtaggagtcacggcgtccggcaggtgcgggaggtgcagtggactgcggagcagcttcaccatctgcggattccgtttcatcttcagtgggcggagcattttccgcatttccttccagcaaaagcgcatccagagcattttcgccgctgctgtcaaggggtgccggagtgctgctgttcagctcctgtaaaatgctgtcgtactccggatcttccgctgcttcatcggaaacagggaccgtctctgcggcatcagcggtgttttcggcatccagctcgttttcctcaacatctgctgtgccgctcacatcgccggagccgagatcaacttccgggggtcctgccagcggagtttccgtgttgtcgctgccggcggcctccacctgctgctcaggaagttctttggtggattcggtttccatgaactctgaggagaaatcatcagggggcggaatcgtttttttcttgggcattaagtatcctcctttttcttcataatggattctttggttacggcaacgactttttcagccgacgcaggctttttcttttgcgccggcttcttatccgctgcctgagatggcggcaccgatggagtttgcttttcctgcggctgatttgcccgccatgcagggacatgggaggcggccttgctcggccgcagcttcttcgcctcgggatgtttggaatagtcgtacttatccacctccagtacattcttgccccgaatgaggatcagggctttatcaatatccatacgcagcacctcgtccatggtcatcagcttgcgccggccgacaccgctggtttcccggtattcaggcgtgtaattggatacacgccatgttccgagctgtttggctttactggtgacagagatactggcctcgccggtccggtcagaaataaattccgccgtcagagcatctgtacagccaagaaaaagctgcacatcgcagttgcccagaatttcctgccactggttgtagggatagcggttctgaagacctgctaagttctggaacacacatgacatggacaggtttctggaacgaatgaccgaaatttttctcgatagatctgggatcactccacaggcacacagctcttcaccaagtacatgaacaggaaccggaagcgccccaccggggcaatgttcgtccgcatagcgaaccaggcggataaacacgaaggaaagaaacagcgaggaaagaaagtcaaatgtgctgtcctgatcgctggtaatgcagtaatacgcgcatggctgctttcccggaagttccagatcaatctcgttgtaggatgtgatgttgcgaatatcccggttttggaaaacctgcagtctggagccgagcccgatgataacgccgccgcgcacaccctccgacgcctgcttgaaaatgctgtatggcgctttggcaggatgcgtgagggaaagaacatcaaaaagcgcattcagttccttttcggaactggcggtgagcaattggtacacttcgccgatgttttgctttttcttgggatagctggtggaaacatagaggaccagcgccttgagcagattcatttcggcgctgtcccagaagtggtcacgttcttcgccgccggtattcttgatgatgacatcacaaaagagctgcgccattagttcctgatcgccgatttcagcaagacaattccatgaatcggaggctgatggtgtgaccagattgaacacacggacggtgtagccctgatcccgcaagtactcgctggtcttttcgtaaagttcggattttgggtcacagatcacaaggcttgacttccgcgctgcgcattggagaatcatgttgacgcaaaaggctcttgtcttcttggagccgctggcgccgtaaaccgcaagattcccgttaaatcgagtctttggaggaatacaaatgacctgatgatccagctctccgagaatcgtaccggaatgcttgcgaatatccgggacaaggtcaagcacctcggtcagctccttgcgggacataaagcctgcggtgccgtaggttcccttgttggaatagacaaggttgcgccgccggtcgtattcgccgccttcgctgtagcccatccgcatgaccatgaggatcagcagcgccagcgcaccgatgcagaggccgaggccatacagcccatacggaaagtggaaggctgccgcaaggcagggaacgaatccggcgtccgggaatgcgggagacgtcccaaacacggcgccagcctcctgccatgcacggtaattggaaaaaagctgcgagaggtagccgctcccatagagcagcgccagcgcagcgattggaatgataatgaaaagctgaatcagcttctttttaggaatagagcacgctcctttcaaactgttgaaaatcaatgctttgcagcatcacacactgcccgcagatctcccgcaaggcttcttcctggtaatcgaagcagatcaatgtccccgtcattccgtgcagctccagcgcggtatcgaaacgccggatgcgaggaaaatcacaggtgtaggcgaatagaacaggattcccctcgctgtcaatggcgtcgttctcgacgcgccaatttggtatcccctcatggagcccgtctgcaaggattgcatcgagcgtcctgcgctgctgcgtgtcgcataagaggcgaaggatcgcttcgccataacggtcattggtcagatagtagaaatgcggaaagcttccatccagcaggaaatagctgtgcgcgtccggctgcgtcaggatagaaagttgttccatggtggagccgaacacgatcccggaaatctccgcatcgggcatgaccccttcggtttgcagcagagctttgaaccgcagttcagccttgtactcccatttcatctgcgctttggcggtgttataggtcaaaaaaataccgccatccgtcagcaggatgccggttgcgcgtgaacttttgattttcgccccttgcgggccgagctctttaacctctctggaggtgtaataggcggggattgccgcactttggctggcagcggaaaaaggagccttttcccatggaaaggaaggaatgtcagcgttgtgcatgatggtcaggatctcagccatccggtgaagccggagccgtctgggaatttcgcttttgagcttgtttggctcagaactgccggtcaggtaggctgaaaaccattcgggagcatcagccaacagcagccgtttggctgacgaggtgagccgaagtccacgcaggccgtctttggagaaggtacgcagcagcccatctcgccggagagcggtaacgacactttcgaggtatgcggaaccacccggcaggtggctgatttgacggatggggtattcaccgcagagggcggttaatgtcaaaagaagatagggcagcgtattttgagctggcagctgccggggctttcgaggcataaaccgtgctgcctccttgtacgatattttaccgtagggctttatagcttgggtaatttcgcggctggagagccttgaaaaaacgcagtattttcagcgctttcagggcgctttttgtacctaggaaaataagcgcccataaaaggtcaaaaatccgatatgctttttacaccattctggcgctctgcaagccaggccggaaactgcgtgctgtccatgagaaaaagccgtgtgcaatcctcttcgcccagctccgtggtgttgtaggcgtcgcacagcagcccattgtcatccgtcaagatgaaggaggccgcaacatccagaaactgcttcagttccagattgtcataatcgcggatacggcgctctggcagctcctgtgcatagatatgggaaaagcagaccacacaatgctgaaattgcggcatggtgtggtgggcggcgtaatcggagagcgcggaggtaaacggatctaacaggaactccgtgctttggcgctgcctgcgctttggcagaaggcacgggagcttgatctccagaatgccgtcattttcgctgatctcaataccctgcatggtttcagcagaccgcagatattcctcttttttgatgctggtagtggcatagatcaggtggcgcagccggcaggtgatccgctcggcccgcagcgccgcatccgtggacaacacctcgtagttgtcgggataacgctggatatccgtcgtgttcatggcatagagcgcattgttcagccgttcgatctcagccagaatagatgtaattctttgtgatatgatggccctgttcaagaaaaaactccttattcgatttgataatactgcacttcgccgcccgaagagacggtacagtagccactggtgtttggcgtgtggatctcggcgatctgctccggctgctcaatcagaacgatgtatttgggcggaacctcttttaccgcggagagcatttggttgataagctgctctttacccggctccgcgtaaatgatctcgtaaacttcgccatccgcaaaaaagatgattttggcgggatagtcactgacagaatgatattccacctgctccataaagtcggtaagaacccaaacggcctttgaaagcccgtgatcgatgctcgcctccacctcagcgggaatgcggtaatactcgccgcgctgcacaatgcggccctgcttttgcaggtaggacagcagattccgaattttactttccttgtgcggatagagcttcaaaagctgcatctccgtcagagcgcggtacatggaaacatcccgcaggatgccggcggcttcctgcccatagatctgttccctcgttttcattgaaacatctcctcgttatgcgtattgaagccgtataatcgccgtattgctgttggttgtggagcgttatacgtcttaaatgcgtattgtgtacggattagcatggatgctgctttggcgcagcacgctgagcaagctcggccagctcccggcgatccgtggtgatcaattccttttccatttgactgcacttgatctccacggcaatattattgttatttgtactgatgagagcgctgccgcgctcaaagtgcgtaatttccatcagctcagcttcggaaaggtgcaggacaccttggacacgctgggcttcttcctcctccagattcagcaggatcttcgttttgctgttgttgatgatgcccttgccatatttaccgtcgtccagcgcaaaaaagtcattgaggtcctgtgtggcgcagacaaggctgccgccatagccgcggatcgtcttggcaagctccagaacggattcggcggcctgccggttgctgctggcgccgatgagctgccagcactcgtccacgaagatggctttttccgctgtgcggttttcttttgccttgtcccacacgaaatcgagggctacgaacattcccacagtcagtaggtctccggtcagctca

SEQ ID NO: 10188 - DNA, 1200 bp, Unknown
  gut microbiota DNA sequence
agaacgatgtacttgttgtccagcgccacattggtttgctgattgaaggagcgggcagagccgttgaccagccggttcaggatgttggcaaggcgctttgtttccggagaggcggcgagaatttcatacaggtctcccaggatcggcatttctttatagcaccctggatttttcggctgttccagagaagcattgtcatgtgtgatgccctttgtcccgtaggtacagatcatggcatcatccagaagctgccgctcctcgtgggacatgtccggaattaagaggctgaaaaacgtgtgcagccgctgaattttggctgccagcagagatttttccgcgctggggccatccagcagatcgtccacggacttatctgccttgcggatctccatgatgttgatgcagttttgagaagccggagatatggagataaactgtccgccgatgttggaacaggcccggtgaaactcatgccctttgagcggcgcgatgataaagacctgaattcccttgcggcgcatacgcagagccatcagctgaagtgtaaaggtttttccggctccgctggttccgagaatggcgatattggcattcttgtagacgcgggaatcgaagatgtccacgatgatgagagaattgttgtgtttattgacgccgagaagaataccgttgtcatcgcacatctcatagctggtgaagggatagcagctggcggctcccgttgtcagaacattccgcttagaccgctcatagagctggcgctccagagaaaccagagggagagaggacaaaaaagcctgctcctgacaaaaggaacaggtctgtacatccatatcctgcgagagcaggagctttttcatttctgcgaccttccattcgagatcatccacgctgccggctgtcacggtgataagcaggttcagataataaaaatcctcgttgttggaaaggccgtcttttagaaaatagccgctgcggatcgcaccgtcgagatcgtcaaaatccgtattggtatcgctggtttccttgattttgctgcggttgatacggagctgctgccccagctttctgaccatgcggtcctttggctgccgcgtcagaaagacgtccagatcgatcccgtcacctgcgttgaccaatagactgagccagccagcaggcactcgtgctttatagccgtccgaggggaccagaagataa

SEQ ID NO: 10189 - DNA, 3009 bp, Unknown
  gut microbiota DNA sequence
tcacccgctggtagaacggctcactgctggctctgcggcagagaatgttataaagaatctccgccgtggcgtcgtcctcgttctcaggggaaatgacctcgttgccgcactgccgcagataatttgccgccgtgcgtgcggccgtttgcagggaagcgattgcatcctcttcctcatggccgcgtttggtgccgggcagcggctcatactcgaaaacgagaaaaaagcgcctcgtgattgcctcacgggagccaagctgccgaatgagcttcaggtagtcttcctgcaggacacggcagcgcggatcctgctcatgctccagctccctgcggacggtatccagatgccggttaatgtccgcacgttttgtcaatgccttgaattgcaccttgaccggggcaattttcagataggaaataaaggagtaaatgatgctgcgctgctctctcgcgctgcgcagcaggaagttgacgggaaccacctctacaaccttgacatagcggtgatctcttgtataaatgacgccgtgctcaatcttctcgatagggatatagtccgccagggcattgagcggctgaacggcttcttcctcctgcaagaaggtcttgaactgcgtcacgctgcgctgcttcagatcaacagaaaatcggctgcggcttttggggagcggaggatcttctgcttcgcagtcgcttttccgctgctgcgcccagctgggcagcagcgtttttccatttttgccgccctgcgtcccatcgcgtgaaaggattctgcggttgtgcagaaagcaaaaaaacaggcggataaaagcggacaggctcatgccggatacgccaatcaaagcgagaagcaccagcggaagagctgtcaggcataaaatcacgacgcggacggtgagggaaaacggaaggtgcagaaccggtacgccaaccgcgaggccaaggatgaccgcctcaatcgtattgcgggttttcaaaagcccgccgaagagtgtgccgccctccataaagttgggaggaatcacataaacctcaaattcttccggtttcatagacagcctcccttatatccggtctttccgcttcggcgggtcgggcatcttcttgacgatctccttatgatagtcgatttcaccgtccggtgcggtaaatggcttcttgattacagtatcaacagcatactgcttgtaccattgggcgccatcggcagagaagactttctggtgttcaccgtccggcgcggcatattgcccggtatggtacattccaaaggaaatgccctccggatgctccggagaatgctctgtgccagtgatgcgcccgccgccgatctcaatgttggaataggatatttgcggtgcggcgtctccctgagcggtaatgcccatgtaggaggacaacgcctgtgacgcaaactctccggtgatggagccggtggagtgcaggtctccggctgcgaccataccgatcacatcgttggcaaaacgcccgccctccagcatggagttggtaaaaatacgtccgccgaggccaacggaatgctgtgactccctgcggagtgaggaaaccgaggcggttcgggtactggaagcgacttgctgatgggtcacgcccatctgcgacttttgagaagcgctttcgctgcgcgtctgctttgcctgatgaacaacgcttgctgcctgccgctcggcatttacagtacgctccgtggcctgatgcgcggcggacatggtggaggaagacgctttctgtgtcgtttgcgtcgcagttcttacggcgtcattggtaattttccgactgacaacgccggccagaccgccttgcagaaagccggaagatccggatgcggcggtgcctgtgcggctggaggctctgtcggcaaagttaccgacaacttttccagccatgccggcagcgagggagacacccttgaatgcgaccatcgcttcacccagcatagaaccgccggtgtgccctacattgacaccgatgcttgccatgaagctgtcgattttctgcgagactttgagaaagccaaccgcacagagaaaccagaccaggacgttccccgtcacggcctcgcggctggaactgctgactgcggcttcaacatcgctttcctccagagcaaacgcaggtaccgccagggcaagcgcaagcaaaagaacggtgcccagcagcggaatgattctatgatatttcttcgtggtaatgacctcctacatggaaagcggatttgagatgaatgtgccgaccatcgtgataaacagccgaagacaccatgcgttcatcagcagcaggaatatctgcccgccgaacatccggcaccagctcttaaaaatatttgcggtggattgcgatgcgcccatggcaaaggctaccggtgcggtatagaccaggacgcccagcagtacataccgttctgccgcttcaaacagcagcttaatgtagttccacgcaagaatcagtgtcagaatcagaacgatcagcgcaacgccgccgttggcacagacgccgatgatggtcagcagaacagaattgaagctggcaaagtccaaagaaggaagctctgaggacagtatccacgcataaggcgttccgcctatcgtcagcgcaatgtttacgatttcatctgcatagtacgcaagcacaatgaacagaatcgccttggcggtcagcttgaccggatcctctgcgtccacgcccaagcccagtccatagttcttgaacagattccagacccagcccaacaggatcagcccgatggcaagtgccaccagaaggctatacatggtttccgctgcgggaaaatatcgcagaaatgtgttcatgtcacagcccaatgcccccaaaacagaggtgttgatcatatccagaccgtacatgatctgctccgcgatccactctacaataccgtctaaaattcccatagcttttacggggcggtccactgcccgccgctgaagaagggcgtaacatagctcataatgaagccgagaccgttcaaaac

SEQ ID NO: 10190 - DNA, 12498 bp, Unknown
  gut microbiota DNA sequence
ctcaaaaattcattggcaaaactgctttgcaccgaaaaagagcaaattttgtgcggagctgaggcgcgacggtgcgggcatgctgacgcatggcaagacggcgcaacgaaggagcccgtgcaaaatttgccttttacggcgcatgttttcttatgcggagtcggccaaagccgccctgcttggtgcaaagggaatgttgtgttacggcagcgggatctccttgctgtcgaagagcgtcttgagctcgatcgaggtgcgcgagtcgccgaacttcttgatgagggagagaagctggtcgagctgctgcgtgtcgcgcacggcgaagcggagcagcgcgttgaactcacccaccacgtgatagtggctgatgatggcgctctgcgaggcgcagaaatcgcagaatttgtcgtacttgtccggctcgagcgcaacggagataaagcccgtgatgttacagtcgagcttcgtgcggtcgacgtcgatgtgatagccgcggatcacgccgctttcctccatccggcgaatgcgttccgacacggcgggcggcgtcagccccacaaggtctcccatgcggcgcagcgtgcaacggctgtcgtcctggaggaggttgaggatttggtagtcagtccgatccatcatgttctccctctaccgttctctcacacgatctcgccgcgcttgatgacggtttttgcaagattgctgccaacgcggtagcagatgtagtcgaggtcgggcgcgtcccagatgacaaggtcgcccagcttgccctcttcgacagagccgaccttgtcggcaaggtcgatcgccgcggcgccgttgagcgtgacagctgtgaggacctcctccggcgtcagcttgtacttgaggcagccgaggttgatgacaaactgcatgttcaggcacgggcaggagccggggttgaagtccgttgccattgcaacgggcacgccagctttgaccatgtcgcgcgcgggcgcgaacaccgcgccgaggttgaaactcgtcgcgggcagcagacatgcgatgacgccgcccttggccatggaggcaatgccctccggcgggcagacgatcaggtgctcagccgagatcgcgccgatctcaccggcgagctggctgccgccgatggcctcgatctcgtcggcgtggatcttgggacgcaggccatacttgagacccgcttcgagcacctgacgggactcttcgacggtgaaggtgtcggcctcgcagaagacgtcgcagaacttggcgatgccctgctccttgaccttgggcatcatctcctcgcacacaaggcggacgtactcttcgcggttggacttatattccgcggggacaaggtgcgcgcccatgaaggtcgcgacgaggtccatgcggtggtgatcgttgaggtccttgatgacctcgagcgccttgagctcatgctcggtggcaaggccgtagccgctcttggcctcgaccgtggtggtgccgaagcccatcatctcgtcgagcgccttggaggccttggcggcgagctcctgctcgctggcctgacgggtggcgttcgtcgtggactggatgccgccgcccgcgttctgaatgtcgagatagcttgcgccgtggagcttgagacccagctcgttctggcgccagccgccgaagatgaggtgggtgtgggcgtcgacaaggccgggggtgacgaggtggccctccgcgtcgacggcttccgtgccctcgacggcgggaaccgcgccggtaccgacggaggcgatgatgccgtcctcgatgagcacccacgcatcctttaagaatttgatcttgccctgctcctcgccgcgatgggcggatttaccctccggcgtcgccagcaggccgatgtttttgaccagtaactttttcatagtaaatgttgtcctttctcactgttggaaagagcattctgttcgatggcttgtcaaaaaagcctcgcagagttttacccgcaaggggtacgcggcatccgcaaggcggcagagccgccagcggctgcccaggccgcccgcaggcggcaaataaattgagatcatctttccgacggcatgtgcgtcggaaagattctttgcgctccgcaagtgtgcgagcaaagcgagcgcgcgcagcggagtgtatccagctcaaaaaaggggcatatttctatgccccttttttgaagtaaattttagtgcatgtattccttcacggccttctcgcagagctcttcgtccgcgacgtaaggcatggtgatgtgatcctgaccctcgtacatcttgttgtactcggcgacagtggtcatggcgttctcgttgcgcgcccagctgcggcgggcaacgccgaccatggtatcccaaggcatggacatgcgcaggatggtgtcgacacgctcggagccgtcgagaaccataccgaagccgccgttgatggcgcggccgatgcccgtaccaccgccgttgtgcagggcgatgtagctcatgccgcgggcagcgttaccagcgtagcactgggtcgccatctcggccatgatgttggagccgtccttgatgttggaggtctcacggaagggcgcatcggtaccaccggtgtcgtgatggtcacggccaaggatgacggggccgatctcaccgttgcgaaccatctcgttgaacttgagcgcgaggttcatgcggcccatggcatcctgatagaggatacggcactgggtgccgacgaccagcttgttcttctcggcgtcgcggacccagacatagttgtcgtagtcctgatagcggcggttgtgggccttgatgtactcggcggcagccatgtcggtcttgtgcagatcctcggggttgcggctcaggcagcaccaacggaacgggccatagccgaagtcgaacaggcagggaccaaggatatcttcgacgtaggaggggaagatgaagccgtcgaggtcgttctcgccgttcttgcagatgctcttcacaccggagtcgtaaacagccttgaggaagctgttgccgtagtcgaagaagtaggtgccgcgctcgtggaacttgcagatcatctcatagtgatgctgcagcgtcttgtcgacgaggacacggaagccgtcgggatccttgtcgagcatttcggtgcgctgctcgaacgtgaggccctgcgggcagtagccgccgtcataaggcacgtggcaggaggtctggtcgctcatcaggtcgacatggacgttgttgttgtacaggtactcgagcaggtcgacaatgttgccgcaataggcgacagcgcagggcttgccttccttctggtggtcgagagcgatcttggtggcctcttcgagggaggcggtgcggtggctgacccagccctgggtgtaacgggtctcgatacgggaatcgtcgacctcggcgatgatggaggcagcgccggcgatctcagcagccttgccctgagcgccgctcatgccgccaagaccggcggagacgaacagacggccggcgaggttctgatcgttggggatgccgagcttcagacgaccggcgttcagcagcgtgttgaacgtgccgtggacgatgccctgggggccgatgtacatccagccgccggcggtcatctggccgtagttggcaacgccgagcgcggcagcgcggttgaagttctcctggtcatcgaaggtaccgaccatcaggccgttggagatgatgacgcgcggagccatcttgtgggagtggaagaggcccagaggatgaccggacatgacgacgagggtctgctcatcggtcagctgctcgaggtacttcttgatcagacggtactgcatccagttctggcagacctggccggtctcaccgtaggtgacgagctcatagggatacagagcgatatcgaagtcgaggttgttgtcgatcatgacctgaatggccttgccctcgatgcacttgcccttgtattcgtcgatgggcttgccgtagagcttgccctcgggacggaagcggtagccatagatacggccgtgctcttcgagctcctgcgcaaactccttggccatctgctcatgatggtcggggtggatgtaacgcagggcgttcttgatggcgagcgccttatcggcctcggtcaggtgggattcgcggcggggtgcgcgacggtagccctcttcgaacttcgggtactcaggaagctcgtagtccagcttgatcgtcatcgcatcgtctgcaagattgatcatggtgggttcctcactttcataaaaatatttctgtaaaaaccaataaaaatgaaaacggaattctcgcttttctttacaacttgcattataacaaagatgtgctataatgaaaagtacttaatttatctgcataccataccacaaaagtatgacatggaggacgagcgatgaagatcagacagctggaatacttctgcgcggtggcggaggagaaaagcatctccgccgcggcgcgcgagctgcacgtggcgcagccgccgatctcgcgccagatcgcgcagctcgaggaagagctcggcgtgcagctcttcctgcgcgacagcaagggcatgtccctcaccgacgcgggacaaagcctgtatcagcagacgcagcagatctttcaggacatccgccgcgtggaggacagcgtgcgcagcgtggggacgggcatgagcgggcgcatcaagctcggcgtcatctactcggcgatgtcgtacgcgttacattatataaatgaatatcacagccgctatccgcaggtggagctcttcatccgtgtgggctcgccgcaggagctcattgaatcgctcaaccgcggcgagctgcatgcgctgttcctgcgcaccgccgcgcgcgagccgagcggattgcaggagcgcattctgggcgaggataagctcgagctcatcatgcgcgaggatctggaccccgcgccagaactgaacgaggtgcccatcgagcggcttgagggtgtgccgatgtgccttctacgctcggacgacctgtggagctacaacgactttttggtgcaggagtgccagcgcagcggctttacgccgaatgtgacctgccactgctacgatacgcccatggcgatgcagatggtgctctcgggctttggcatcagctttctgccaaagtccattctcagcacgcatccgggcgcgcctttaaaggcaaagcctgtgcgcggtctgccgatccgctcgtatgccgttttggcatggaacagcgcggtgctcagcgccccgtgtgtgcagcgcttcgtcgaggagaaaatgacttaaaaaaattaagccgccgctgaaaaaagagaaagaaaacctgtttactcccccgttgggccgcgatataatggcgacgctgaacaaaaatggacgggcgcagcgcgcctgtctgagcaaaatgacgatacaaaataaattgacggaggaaaacaaccatggcaaagttgatcgaatgcatccccaatttcagctgctccaaggaaaaggacgaggccacctataacgccctcgtcgagaccgccaagagcgttcccggctgcaccctgtttgacgcccagaccgacggcaaccacaaccgctgcgtcttcaccctcatcggctctcccgaggccatcgaggaggtcgccttccagctgacgaaggtcgccaccgagcgcatcgacatgaacaagcatcacggcgagcacaagcgcatgggcgctaccgacgttattcccttcgttccccagatggacgtgaccgttgaggaagctgtcgagatgtccaagcgcgttgcccagcgtatctgggacgagctgaaggtcccctccttcctgtatgaggacagcgccacccgtcccgagcgccgcaacctcgccacctgccgcaagggcgagttcgagggcatgcccgagaagctcctgcagcccgactgggctcccgactacggcgagcgcaagatccaccccaccgccggcatcaccgccatcggcgcccgtatgccgctggtcgcgttcaactgcaacctcgagacctctgatgttgagatcgccaagaagatcgccaaggtcatccgcggctcttcgggcggcttccgcagctgcaaggccatgggcttcatgctcgaggaccgcggcatcgcgcaggtctccatgaacatggtcaactatgaggataccccgctgtatgtcacctatgagatgatcaaggccctcgccgagcgctacggcacccgcgtcatcgagagcgagatcgtcggcctgacccccgccaaggctctgatcgattgcgccgagttctacctcaaggccaaggacttcgactgcaagaaccaggtcatggagtatcacctgatcgacatggaataaaatacttcaaaaatgcgctgaaagcgcatttttgagcgcaaccaggaaaagcggcaggccgtttttcctggttggtttacagtccgctgcgtcgcactcgctttcgctcgcacgctggcggactgcaaagtgtttttctgacgcacacgtcccaggacggcttctcttgccgctttgcggcaattcaccttctgtcgtcagaaaaaacgatcaaagctatttgccgccgggaggcggcaaagtctgcgacgcttttggctcgtgcgggcgttggctgctccaagaggggcggctgaccgtaaaggtgcggcgatgcccgcgcgggacgaaaacggcgcgaaatgatgaaaggaaatattcaacatgatgaagttagctgatatgaccgttaccggctttgccgataccgttgcctccgatgctcccgcgccgggcggcggctcctgcgccgcactctatggctccatcggcgccgcgctgaccgcgatggtcggcggcctcactcagggccgcaagaagtatgccgagtatgccgagcatgctgccgaggtcgagaagaagggcaacgagctcaagacccgcctgctcgacgttatggaccgcgacaccgaggcgttcaacgtcgtctccgccgcgttcggtatgcccaaggcgaccgacgaggagaaggctgcccgctccgccgccatccaggagggcctgaagggctgcaccaagaccccgatggagatgatggagctcatcgacgagaccctgacgcttgcacagtccctgctgggccgcttcaacgacacctccgcgagcgacctgggcgttgcgttcctgtccctcaaggccggtatccagggcgcatggctcaacgtgctcatcaacgtcggctctctgaaggatcaggagttcgccgctgagtaccgcgccaagggcgaggccctgctcgcgcacgctctgccccttgccgacgagtgctacgctgagatcgtcaagctcatcgagggctaaacgaaaagattcatcaaaaaatggcttcggtgcgcgcacaccgaagccatttgcagtttgcaaaggagttgtatttccatgaccatccagcatttaacgccgagtgactacattacgaccaagtggtccggcggcctgacgacccagctcggcatcgcgcccgcgggcgcggtgtacgcagaccgcgactttttgtggagactcagctctgcgaccgttgaggacgcagagtccgacttcacggccctgcccgactatgagcgcctcatttcgacacttgagggcacgatcgagctcaatcacaacggcggcgaaaagctgacgctgaatccctacgaggtccaccgcttcgacggcggcgacgacacgcactcctggggccgctgccgcgacttcaacctcatgctccgcaagggcaagtgcgagggcaggatgcgcggcgaaacgctcgccgccggcgagagcaagaccgttcacggcagcgagggcatgatgctcatctactgcggcgtgggcgaggttcacgtcatcgtcggcgaggagagcgtcgaactcaaggctgacgaggccgcgcgcctcgacggttttgcgggcgaagtgaagctctgctccaaagagggcgcaaagctgatgctcgccaaggcgaaagccatttaaaaagaaacgaaaaaggagaggcaaaagcctctcctttttcagtcttcaaagtcgttcgggtcttcgtcggtctgcttgcggaagcggtcgagcgcgacgaggatggcggccgccgcggcgatgacggccaaaacgccgacgagaatggatacgcattttttcatagtgattcctcctgttgtgataaagtgtggaatgggttacggttcagcggaaatgatgtcatagacctgctgcaaaaacgcgtcctgatcctgcacggtgcagcggagcgttttgccgtctatggcggtgaaaacgcgcagggtgtcgtaaaaatccctgcactggataaacgtgcctttgccggtgctgccgtctgggaaatcagtcgggccaaagttgaagctcagatcccagatgaaatcgccgtccttcggctggtgggtgctgccgccgtccggcgacagcagattgatgagcgagcggcggaatttctgctgtgcaaaaaggtcgatgagctgcgagcagcgttcatcctctgcggaaagctcaaacgaggtgaactccgaatcgggggcacggcggtgatagccggaaacggattcgcattgcgcgatatccaccttgccgatctcttgcagcgtcatcggacgcgtgtagatcaaagctgcgaggacgagaacagccagaatgccgagggggagaagccgctttttcttcatggggaaacctcctcaaaagtacttctactctattagacgcagaaaatgcaaaaaggtgtcacaattttgcagattttttcaatgaagtatggaacaggctactaccatcaacataacatgaaaggctgtgctttgcaagtttgcaggcgcagcctttcagaaaaattaaaaagtgggtcatccccgtccgcggccgatcaggcagcagaggaggaacgccgcaaggtcgcagacaacgaccgtcgcaccgacgggggtggagagcagatacgaccccgtgagcccgaggcagaagcacatgaccgagagccccgcggcaaagcacacgacagagcggaagctcttgaacacccgcatcgcggacagcgccgggaagatgatgaggctcgagagcagcatcgcgcccatcatgcgcataccgagcacgacggtgagcgccgttagaacggacaggatcgtcttgtacgtgccgacgcgcacgcccgtcgcgcgggcaaaggactcgtcgaacgtgacggaaaagagcttgtggtagaagagaatgtagagcgcgagcacgcagagcgcgagcgtgacgctcaggatgacgtccgagcgcgacatcgcgaggatgctgccgaacatatagctgtcgacatccgtggtcatgccggtcgtgagcgaggtgacgatgacgccgatggcgagcgccgaggcggagaacaccgcgatcatcgcgtctgcgctgacgcggctcttttcggcgacgtgcatcaggatgaacgccgcgatgacgacgatggggatggagaaccacagcggcgcgaagccgcacgccaccgcgaccgacagcgcgccgaacgacacgtggctcagcccgtcgccgatcatggagtagcgcttcaaaacgagcggcacgccgagcagcgacgcgcacagcgagaccagaatgccgacgacgaacgcgcgcacgatgaaggggtaggcgaacatcgaaagaagcagcttcatgcgcgctcacctccaaaccgttttccggcgggcgaagacaaaaactcgcttaccgtgccgtaaaagcagcccgcgcggtcgacgcagaggatgtgcttggcctcgcgcagggcgttttcaatgtcgtgcgtgaccatgatgatggccatgccctcgcgctcgttcaaatagcgcagcgttttgtaaaggtcctgcatgctcgcggggtcaaggcccgtgacaggctcgtcgaggatgagcaggtcatttgccgcgcacagggcgcgcgcaagcagcacgcgctgctgctgcccgcccgagagctcgcggtaacacttgtccttgagttccagcacgccgagcttgccgaggttcatcagcgccgtcgagcgttcctctgccgtgtagaaaaagcgcgcgcggcggtttgaaaagcccgagagcacgacctccgtgaccgttgcgggaaagtcgcgctgcgtgggcgtctgctggggcagatacccgagccgcccctcgcgctgggcagggcagtcgatcttgcccgcgagaggcgagagaaggccgaggagcgagcgcagcagcgtcgatttgccgctgccgttctcgccgacgatgcagaggtagtcccccgcgcggacggtgagggtcaggtgctccaggagcggtttgtgctcgtagccgagcgtgacgtcctcgcacgcgaggacgatgggcgattcattcattcgttgatcccctttctgagtgcttcgtagttgcgctccatgagcgtgaggtaggtctcgcccgcgtcaaaatccgcgcgcgagacggtctgcatcgaatacagggtgtcgaccgctgcgccggtgcactcactcaccacagcggcgacctttttcgtgccgaagtcgatggtgtagaccacggggatgccctcgtcctccaccttgtcgatgaggtacttgatcgtcgcgagcgacggctcggtgtcgcccgagcagccgtggaacgctgcgcggtagtccaagccgaattcgcggcagaagtagagcatcgggaagcggtcggcgaagacgagaagtttacgcggcgcggacgcgcagaggtcggcaaagcgcgcgtcgagtgcttcgatctgcgcgcagtagccatcacagttcgcgcggtagaaatcctcgtttgcgggatcggccttgcagatcgcgtcgcagacggcgcggcagaggacaacggcgtttttcggcgacgtccagatgtgctcgtcgtattcgacctcgtcgctgtcgtgctcatcttcttcatgatcgtggtcatggtcatcatggtcatcgtgatcatcgtggctgccatgctcatggtcgtggtcatggccgtccgcgccctgcatgccctcgacatattcctcgtcgagcgcgtcgacgtagtccatcatgcgggcgatgacggcgatattttcgcccgcggcgcccagcatactgtcgacccagtattccccctcgccgccgttgtagaggaaaacatcggattcggagatcgtgacggcgtcgagcggcgtgggctcgaagctgtgcgcctcgcgccccggcgagagcagaagcgtgacgtccgcgcggtcgccgacgatggcgcgggcgaagtcataataggggaaaagcgtcgcgacgatctggattttgccgtcgtccgccttttccacaggcacggtgcaggcggtgagggaaaatgccagcgcgagcgccaaaaaaaaggaagcaatgcgtttcatgcgccctcctgacactcgcggcacaggccgtagaacatcgtcttgcggggattgatggaaaagccgtgctcatgctccaaatgctcgtagagcggcgcgagctggtggcagtcgaggtgcacgatgcgcccgcagcgctcgcacttaaagaggcagcagtccgatgcgcagccgtgggtgcagaactgatagtacgcgccctcgtccgtcgtgaccttgtggacgctgccctgccgctcgagcttttcaagctgccggtacaccgtcgcgatgccgatgtgctcgccctgctcgcgcagcgcgtcgacgatcgccgccgcgctgaccggcgagtccgcgcgctcagaaaggcagtcgagcaccgccttttgctgtttggtcgtataggtcgccatagtggcctcctgaatttgaaaatgaaaatcaatttcaaattatagccgaaaatttttgtctgtcaagtattttgtgcaggcaaatcttgccattttccggtaaaaatggtaaatttaaggcgaaagcataggaagtgagagactgcgtacaagaagaacatcctgtggaaaaagaaaggagatttcgcatgaactgcccctactgtgcaaaagagatggagtccggctacctgcgcggcggcagcggctacgagcttctgtggacggaagagccgttcaagatgacctctctcccgaccggaaacgatttcttcgtctgcaaagcatccgacgtctaccgccccatcgcccacctttgccgcacctgcggcaagatcgtcctggacatcaaaaaataagaaaagcgccgcggcccaaagcccgcggagctttccacaaggatttatcatgccgcattcgccgcaccgcggcgaacaggcccgcgcgccccgccgcatttgccgcccgcaggcggcaaataatcttaatcgttttttctgacgacagaaggtgaattgccgcaaagcggcaagagaagccgccctggggcgtgtgcgtcagaaaaacacttctcagcccgcaagtgtggaatttgcccgccaaggcgggcaaattatgcgcgcagcgggctgcatccccctcaaaaaagaaaggctgtcctttcg

SEQ ID NO: 10191 - DNA, 10265 bp, Unknown
  gut microbiota DNA sequence
ctgtaatttgatgtgaggttaggatatttcggcacaaatctttggcagcttagcaagggctccttttttgcgttgatttgatttatgccttttgctaatataagacaacaaaactttagaattgcaacactattttgagctataagtctgaaagatgggatcgaagaattccatttttgttgcataatggcgggattgaaaacagtggttttaactgaataggagggactaaagagcccctcctattcaattaagttgtgtcgtaatcttacacgttacctatttaacaacaacccaaaaggcttgaaaactgttccgagtaacagtatgactgtcattttcaagccatgaaatcagcgcgtcttcgtcgtttccactgactcttgcaaagtacgcaattctccatccttctactagccagtatgcgcaaggatcactaacctcaagcgtaccattgtcaatttgttcaagcagattatcgacatcggtgtccatgatctcgacatattttgcttcgttaccgtttttgtctacaaagtcgaatgataactcatctgatagttcatcgaagtcagtaacttcatgtaatgtagaaagatcgatagacgctgcctgccgtttatgtcctccgcagcctgacaggcaaataaatagaaagaatattacgacaacccaacatttttttcgatatttcatctgtagtgcacctttcatacaaacttggtaataaagcttccggtgacagtctgatagcaaacatatctactctcagagatatacccagctttgaccttgaagaagtccatatatgtgccaactccagacacatggaatcgtgtccaagcgaaagcagttacggtatggtcactatactggtcactgcttgcgatgctaagcaaaattggccgtccgttagaaatttctgatgttcctgtcgaccaagttagcatagagctactgattgacttgtctagattatagtaggcggcgcactctcttgcaaaaggtgccaaattacctaagctaatgtagtagttccacttttgttcgcctctatcattatatgcgagggttgcatagcccttgtcacgagcaatttgttcacagtgtgaggctattgtattgcacgaatatgtgggtaaatagtagtgaataatagctgcaactccatatacagcacatgcgttccactctttgattttatacccgaaaatggagttgtctccgatgttgtaatatcctgcgtttctaatggtcgcatcgggataacgtgcttctaagtattcgattggatccacaattccattatcctcgtcatgggtactcacggaaggaatcaaaccatactgcttaattaactcgatgtatttaactgcgttttgatagttagatagctcgctactattctcactcattaccacaggtacatccattttggacgtactgtaattaagcgggccataataataaatgcgggaatccgagttattagcaagatgagaccttgaaacggattctgtatttaatccatcactaatatctatcgattccgtgtcagaatattcttgaatcagcggctcatatagatttgtagagacaataatgtagcctgcatttgtactcccgttttttaagttaatacaatatgcacacacttcatcgctgttgttgtacatcgggatgatattgtcaacggttgtctttcgattccattcgctttcgccgatatttgcccaaacaaaaagcattgcaattgtgacagcgacatcttcgtcaatttcgtgttcttctggtgcataagttgccgccgctgagattggagaaaaggtcaaaatgagtgccattgcaaggaagaaactcaacaatcttttccgtgtgatatgacgcataaacaatacctcctaattattagatagcagtgattaaattccgagttgaatattataatgcacgactggtgtgatattttttgatgacaagattattaaattattgagtcgcttgagcagtagtagagataaacttcttctaaactaatgccggatgctggttcaaactctgtaggaagttgatcacctactaaccgcagtaattgtcctgcctgttgctgcaacaacaggccaaggccgtattgctgctgatacgctgctgcttcttcctctgtacaaagccgttgagctactttgctttcgatagaagaaataagttccgcagctgttcctgcctttaataagttccctttgttcatcagcaacacttgattggcgatacattctatatcactgacaatatgggtggccaacaggacaatgtgattttgggcgactcgggcaatcaggcttcggattcgcactcgttcataaggatctactccagcggttggttcatccaagatcagcagtggtggattgccgagcatagcctgagccagcagtgcacgctgacgcataccacaggaaaaatggcctaatttctggtttgcagaggtagacaaatctacctctgtcagcagatgctccgttctttgctttagaaccttgctgggcaggccttttaatttccccatatagtagagaaattctgtggctgtcatctgagggtaataaccttgaacttggggcatatagccgacctttgcccggtactcccgccccaatttcagaatatcaacaccgtcccacaagatctccccggagtctcgtcgcacggtatcggtcaaaagcccgaagagtgtgctttttccagcaccatttgcccccaaaatcccatagattccaggggcgaactcgtaggtaaactgtgacagcgcacagactttcccatagttttttgttaatcccttgatcgtcaatttcatccgcgatacctccgccactgatgccgcgaagcggccagcgcagctgcgcccatagcaatccagagtccaagacaaagagcgtctgtccagtgaatagccaagccattccccatgagtttcactgcccaggacacgtattcaaggaaagaaacatccatctgagtcagcagagtgggaaacaaaagcacaagaacgcttatcccagcagctggaagcaaggaagaaaatatggaggatatccacatcaccacgctgccagctgacaaaagtcccgccaaacggaagccatagaaacttagcagatatgccagtaatgaaccactccccaagcgggagtcccaatggtgcagactggctgcattggataagcagacgtcccaagaaccaccgaggcgttgaaacagaaacagctcatgccagctccaagcaagccagataacagcggatacgcagagaacgagtatgactttccatcgccagagggtattacgtcccgttggagtgctgagtaacaccaactccataccataacgtcgttccagccagaagacaccgggaatcgtcaggcatagggctaacagggcggcacaggcggatgcaagtcgaaaatttgcacctgtctcaccgtaaatctgatcaaagggcagctcattcaccaatttcagccctttttcccctgcggtttgcaaatccagtagttcctcgtaccgtatgctcaactcgtctaacgcccagcaccgcgccgcataatattccaggaaaagagccttgctctcatcttccgatgcttcggcatagatttgtgcggcaccttgtctgtcaattttaatctgtaccagcacttccttgtctaccggccctgcataggtacagacgtactgggttagttgggattcctgcatactctgagatataggaggtgccatctgtgtctgcagaaataccacagctactgctaagaagagcagtccgccgctgtacagcagaagctttttcgcctcatataccaacgctggcttggggcggcaagataaatgcaccctgttggccaaggcgtagaaagccttggccacagtgccattttttcgattccccaaggcgaaatgaacagaaagcaagatcacggtagaacaggctaagatcagcgttgccaaaatgatggaaagagcagttcgctctcgtactgggaaaccaaataaattatagttcagatagcgttctgctgcttctgccggaaagagcaggcggaaaagattaaagccagacagaggatacagagcatcgtttaccccataccgctgaatccagttgtactctaggaataaaattccgccgcatagggttagcccgactggaagagatggcatccgagacagaaccagccacagtagtagtccgatggcccagagtcctgctgcactgaataataaataccaaagtaagaagactcctaccgtagttggagctgcccagtgctggagaagcggtatggattgcacaggagcgtttaacgctatcggctgttggtagagcagcatccccagcaaaaacattccgccctgcatcaacactgtagtcacaaccgcggacacagcgactgcaccaatcctccatccggccagagtttccctgccgctggcgcagctttgttccagggcttccagccccagcctcttaggttccacaattagtgcgatagttaccatcattaaaaacagactgaaaaccatggcaacatggttctccaataccgactcaatcacatcgcctggtaacagttttagatgtatttctgtcgttgatagatagtctgcttccgtccgatctgcgttgcggtatacaaaggtgttggaatcagagaacattgggctgcgtcggatggcggcagcctgcgtcgacaccgactgcacaaactcagcatagcccatctgataaaccagccgatctatccagcgggccaccgactcttgagcagcaatgtccaactctggcgcagtttcgctccgcacggcgtggagcatttcatccagattttcgtactgctcccgatagcggttcagtatttcctcgtctatttgcccttgccattcttccaactggactagcatccttgcagtattccatccctgcaaggtctggttttcccgctctaacagagcaaggccgtcttcgggggaaacaacagaaagaatctgcgtccattgatttgtatgctccctgtaagcgagcaccgaactacccacccgagaggattgagccgttgcgtaaatgaccagactaaacaaaagagacagagccgcagttcccagccagattcggttgagaaaaatccttttccattctgacatcgcaattactccacagggagcatcttagccgaattggaggctatagcggatttttctatataccaagctggatgacaggagtgtgtactgtcatcatagaagaagacgtaatccggggtagaaaggaggaacatggcatttcctacttcctgtgtcatgggaatgaactgctgcaaatttccatgaaaatcatataccatgatccccctgccctccaccgggacggtgccctgataatccatatagcgaatcgcgtttgtcagatagagatactggtcatcataagctgtagcaccgtactccaaaacagggtctaaatcccggtactttactatagatttttcctctatatccatggaatagattccttcgccggtcactgtccaatagagcacattgtcctgcatggtaaagctgttatttatatcccagccttccacaagggggactgcactttgcttcgagagatcataacccaatagagtatttgttcctgcggcggtatttttctccgccacaaacatccagtcttcccggaattctatggcagtatataacacatcgccgttttcgtttccttcaaacacaaaagcgccctcacttctgtcatcaattctcgtaaggtaaatcatgctttgccgcgaatcattctttagaagattcaattctacagccaagtaggaaccatatacccggaaggagtagccaaacgtggaaattcctggccaatactcgttttctaatatttccagatcttttactcgttctcgcctgccgccactgagatccatacgatacagtccgggcgttttgcttttgtccgaatcgatgtaatataggttatctcccgaggcatagatagcccttgatggcgtattaagccaagaggtgcaagtgctgctcctgtggttgcagtccgcttgaaagcacagaggggacgattgggatggattggagtaatctatgcaggttagatagccgttctcaaagaaaatatacaaattttccgtgtaggcggctgctccgtgtgcagaaatatattgattatagtcaacagccgctacattctgaccggtaggctgcccacaggaagaaagcaacgtcaaaagcagaaacagcaatgcggctattccatatttgtcacctctgtgcgacattttaccaccacccacttacgctaagcgtatctacggttgtaccgttaattactccagagccagtcgctgaaagggctacgaaatctgacccgtcatcccagcggctataacatgtagatgcggagcgattcgtattgtgaagcgtatagtagtcatagtgaccccaagtggccttgctgcgttcgacaacaagattagtttcaatcagagttgcagttccgccataattcagacgagtccaacaggatgcaccgcttccgtagagttccaacttccaatattgataatcataggaaccttcggatgatacagtttttccctctccaatgacgccatccaacagattcgtagtatctgtagcgtcctctgtcgttgcttcagcaataatggaatcatccaactgagatgtttcgcctgtcacaggttcggacgttacttcggatgtaggcagggatactgcgtaagcgcttgtagtgaaaatagaaagtagtaatgctaatgctaatccaagagtggacaatttcttagtattctttctcatcagttttacctcctgcaatttttgcgcctatttttaggtgttcgacactatctgtgacaaaatataactatagttcttcgaagatagttgattttcgtattcgaattgcaactacagcaatttctgaacatagtcaaaaactgcgacgattactgatacattggcctcacctcccccatgattttatgttaatcctattaatagaaacaataactgaggaagtttgcaacacctttttcgataattttactaaaattttgagggggcaccttcgtgcaggtgctccctcttttgaatggactattcttttgctaacagtgcatatgcagcttttcgagctcgtgtcaatgccattctgacactgtccggcttgattcctaaatttgctgctatctcatacggcgatttttccaatatataatggctttccaacagataacgacttcgccaatctaacttcggccaaactttggataaatgctccagttcatctgtgtacgctaatcgcatttcaatttcatccgctccatcatgggggtttggcgtatcaagatactcatcaatggagtattctgcgtgcctgttcttatctctcatataatttcgtgcttgattcttgcaggcagagataatgtagttgatcagatgattccggtctttagtgcgcaaatcttgtaccttgtcaatgagtttcactaaggtagtttgcatcaagtcttccgcagcccactcgtcttggacaattttagtgatttgctgttgcatcaggcggctgtaatctaaatacaaccgagtcataaattctcggtcatcttcattttctatagctagtatacaaaagggaaccatactttgagttattgaacctcccctaagatcgtgcttagttttttcatgtcatttatgataacagcaagtgcccgcttctgttctgagcttaaatttccaatatctcgaattacactggcagctgtcttatgcggtaaaagttccgcattcaatgaatctggagaaacagacacatcgcagcgtcccaagagataatctgtcgtcacatgaaagaagtctgctaagcacaccaatttatcaagcggaggtaactgctgcccacgttcataacttgagattgtgcttttggagagatgcaaaatatccgccagttcttcctgctttagaccccaatcatggcgaagttcagctaatagttcccccaagtttgccattgctaactcccccgttttgtgataatttaatattatatatttccaggagttcgatacggcaaaatcacactatttatgctctaaactctaatttttttgaaattattctgttttaccgtacttaaatacggcgatagatgtccgtgtagtatgcgcgttattttgtgctgttgcaaatagccaacttgcagtgtctcctcccttataaggcagaatcataccaggagtcaattttatgcttgccattatcaatacatacatagacgatccagatgacaaaagttatatgatctggctttacgaagagttccatagactaatgttttcaacagctaggaagtacacatcaaaccaaacagattgcgaagatattgttcaaaatgcgctggttggactaatgcaaaaaatctctaaattacgccagtttgaccgttgcattttgacggcgtatattgtctctactgttagaaatgccgccataaattatttaaggcagcaagcattagagggcgaacattctgattcgctcgacgaagatataccatctttggaagatctatcgttgatagtctctcagcggaatcttttatccgaagtctggtctcagctttcgcaggaggatcggttcttgttggaaggccgctacataatcggagcttcagataaagagcttgcgagcacattaaattgtaagtcagacagtatccgaatgaaattaacacgagcgcggcgcagagcgtttgctctggttatgaagtttgaggaaggtgcgttgtaaatatgaaccgacgtgatgagttgcgagaaagatatgaagatgcgctttttgcctttttaatggaagatgtcatcgaaactgaaggtaaaaagatgttggaggaaaatgaacggctgaagcaggaccccttagccgcggttccggaggctgtagactatcgctgcatccaaacgatcaaacgaggatttgcaaaggagcgccgccacaccgtaggcagaattacctatcgggtgctaaacagggttgcaatgatcgcagtcatatgcgcattgctatttgttacagcgttcgcagccagttcggaaattcgctcaaagactattaatttgttaattgaagtatctgatacctttagtaccctgacattaagggaaagtcagatgactccaaatcaaacagacttttctgatttgtctacagaaacaatgaacttactttgtggttaccattttccaaatgtcccagaaggctttacggttgaataccaaggcggtggtcaaagcagcggatatattcaatacatcaatgcagatggagccacgattttgtttgatatatttgaaatatctgacggtgatgaatatattattgataccgaagatgctgaactgacaaatatgagaattcatggatatgaggggctccttgttgagaagcagaatgagttcgatagtggtatcgttgtgaacagtatagatgttgtttggggagacactgatcagagcaaatttatactaattagaggatataatgttgaccgagagactattttaacactggcggatggggtgaaattcataggcacaagttcctaagagagtagttgcgttttttgttatttggtgtctccttatatagaggtataacctcaatactaatatacggaggcattctacaaatgaaaaaacgtacattcacttatgtcttggctttgattactatcgtctgcttgttggcttcgtctgcttctgctgctgcgccagacacgctaaacggcgacactattcaacgtaggctaacctatattcacagtcttgctacgactgtaaaaatttctgattccggtcaggctatttgtcaaggccgagcgactcttaatgctattactaatagtgcttcacttaccatgaaacttcagcgtagtagtaacggaagttcttggaccacgctcaaaacatggactgcgaccgatactggtacaatttttatggaagagagttggcctgttgcgcctggttactattatcaaactgtggtcactgccgaagcgtatacgtcatctggctctgtagcggaaaccgtgactgcttcgtccgcagttgtaaaatacgtaagcgtcaaagctaacggcgacttgcggt

SEQ ID NO: 10192 - DNA, 5064 bp, Unknown
  gut microbiota DNA sequence
ctcaaaaatgcgagtccctcgcatttttgaattacttgccaaacgggcagatcggatagtggcacggcttgcacccaaggcatagcccgccttcaccgagcgccgcgagatccgcgcgtgtgacgggcacatccgccgcgatcttcggcagcaccagatcaaagaccgtcgcgcccgcatacatcacgcagccgggcaggcccataacgggcataccgtcgtcaaaatagccgagcaggaacatagcccccggcaggaccggcgcgccgtaggcgatgatattcgcgcccgcggccttgatgccgcccggcgtgttgtcgtcggggtcgacgctcatgccgccggtacagaggatcatgtcgggcttcttttcgcgcatcgtgagcaccgcgtcgcgcacattctccaccccgtcgccggagtagacgacctcgagcgtttcgatgccgtaggtcttgagcttgtcgatgacgaccggcgtgaacgtgtccttgatgaggccctttttgacctcaccgccggtggcgacgatgcaggcggtcttgcgcacatagggcttgagagacagcagcggctcatcgcccgcggcctgctcggcctttcggagcttttcttcctcgatgatgagtgggatgacgcgcatgcccgcgagcttgtcgccctcgcgtacagccatgccgcccttgcgcgtggcgatcatcacctcgtcctggctattcacggcgacaaggcgcgcggaatcgaccagaaacacgccgtcacaggcggccttgagctcgatcttgccctctttcacgccgctgcggatcatattctcctgcccgcagagggccagaagccgctccgccgcgtcgttttcgtgcaccatgccggacgtcatttcccagacatagaggtgctccttacccatgctgagcagcacggggatgtcctcttccgtcacgacgtggcccttgcggaagcgtgcgtccttatactggtccttgatgatctgcgtcatgtcgtggcagagcacatggcccaccgcgttctcggttttgataagtctcatttcttcagcacctcgatctcgtctccggcctgaatgcggccctctttgatcacaatggcaaagatgccttcggtcggcatcacgcatttgcccgtcgtgcgcttgatctcgcagtcgttgtggcactgcttgccgatctgcgtgacctcaagctccgtctcgcccacgcgcaggcgcgtgccgacggggagcgtcttgagctcgatgcctcgggtgttgatgttttcggcaaagatacccgcatccagctcaagctggcagatagcgcgcatcgtgtccacgctctcgtcggccagcaggctgatctggcgatgccagtcacccgcgtgggcgtcgcccacaatgccgtggcggtattttacgtcgatatagggcacctcgtgcttgcgcacgccctttttttcgctgatgttcacagcggtcacctgtgccatttcttcattcctccgcttcataaacgccgctcttgccgccctctttatagagaaggtggataccgtcgatgcgcatatcgcgctgcacggccttgcacatgtcgtacaccgtgagcgcggcgacgctgacagctgtcagcgcttccatttcaacgcccgtttcgccgtggcagcggacctcgctgcggatgtgcagggcggtttcttcgatttcaaatgagatgtccaccttcgtgagcagcagcgggtggcacatcgggatcagttcactgtttttcttcgcggccatgatgcccgcgacctgcgcgaccgccaacacatcgcccttgccgatggagccctctttgatcttgtccatcgtcgcttttgccatgcggaccgtcgcggcggcgcgcgccacgcgataggtctgcaccttttcgctcacgtccaccatgcgggcgcggccctgttcgttaaaatgcgtcagttccatcctcagcctccgatcgcaaacatgccgcggtgcgtctccgtgacgccagtctcgtccatgtggtggcgctccggcttcatcagaatgccgcggcggatggcctgctccaactcctcaccggacaagccccgcagcgtgatctctgcgtccgaatgcaggcacggctttaatttcccgtccgccgtgatgcggatgcggctgcactctgcgcagaacgcatgactcatcggcgcgatgaggccgacggtcccctttgcatccggcagacggtagcacgcggccacgccgtcgtgcgaaacggcctccaactccggacagcggtccaaaaccgcctgcgagggaagatacgtgccaaaatcctttccgcagcccatcggcatgcgctcaatgaagcgcacctgccacggatgctcgcgcgtcaaagcgacaaaatcggtaatctcgtcgtcgttgacgccgccgagcagcacacagttgagcttgatcttcgcaaagcccgcgcgctccgccgcctcgataccgtccaaggtatcctgcagcgtgccaaggcgcgtgatggcgcgaaagcgctcctcgttcagcgtgtcgaggctgatgttgaggtgcgtgacgcccgcgtcgcgcagcggctgggcaaactccttgagcaggctgccgtttgtcgtgacgcagagctcttcaacgccgggaatttctgataacatgcggcagaagtccaccgcaccgcggcgcacgagcggctcgccaccggtgacgcggatctttttgacgccgcacctgaccgccgcggcggccatgtcgcgcagcccttccaaagaacagatgtcctcgtgcgcgcacttttcaatgccgccgtccggcatgcagtagcggcagcggtaattgcagcggtccgtgatgctgatgcgcaggtatgtaattgatcttgcaaagccgtccagcatctgaaacgcctctttcttccatggtacagcatgatattttagcaaatatcacgctcttacgcaacacagtcgtccgataatgtcgaactgtatttttatattatcgtaatcttgactttttccgcagtattttttagaatacaagcaacgatttttgaccgggagggccgatttatgactgacggcaacaccatccgctccgtggcgaaggcgatggagcttttgcagctcctcagcgacgcgggcgaggcgatgacgctcagcgccatcagcgagcgcgcagggctgcccaagagcacagtgttcggccttttgaccaccatgcgcgactatgacgtcatcacacagcacgcagacggcaaatacgccctcggcctgcgcctttttgaatacggctgccgtgccagcgcgttctggaacatctcgtccctcgcgcggccttacctcgagcatctggcggaagcgaccggcgcctccgccatgctctccacctatgaaaacgggcacatcgtcgccctcgaccaggccgaggggcgcgacagccttcgcatcgtctccgcgccgggggcgcggctgccgctgcactgcacctcgcagggcaagatcgtccttgcctgcatgagtgagagcgaggcggcgaccctccttgcccgtgtgccgctcacgccctacaccccgcacacagaaacggacgcgggtgctttgctcgcatcgctccccgcctgccgcgaggcgggcttcgccgtggaaaacggtgagtataagatcggtcttcgctccatctccgcgccggtgttcaccggcggcggcgcgctcaagtacgtcgtcagcgtactggggatgttccgctccgtgcactcggacgagttcgcgcacgccgagcgcgcggtcgtcgccgcagggcagatgctttccgccgcactgggctatccgggaaagtgagacttttttccgcgcggaaaaatctacgcttgactctaccattgttatagagtttatgatgactccatgctatactgataaggggtcctttccgatgcaaaacgatctcaccaccggcagcgtctttcgcaacgttttgtccttttcgctgccgtatctgctctcttactttttgcagacgctctacggcatggccgacctcttcatcatcggccagtttgagggcgtcgccagcacgaccgccgtctccatcggctcgcaggtgatgcacatgctcacagtcatgctcgtcggccttgcgatgggcgcgacggtcagcatcgcgcaggccgccggcggcggcgacaaaaggcgcaccgcctctgccatcggcaacacggtcacgctcttcatactgctgtctcttgcgctgacggcactgctgctcgcgctgcgcgggggtaccgtctccatcatgtccacaccggaggaggccttgcagggcacgctcgcctatctcacagtctgctttatcggtattccgttcatcgcggcgtacaacatcatcgcctcgatcttccgcggccttggcgacagcaagagtcccatgtacttcatcgccgtggcctgcgtcgtcaacatcgcgctcgactactacttcatgggcacgctgcacctcggccccgcgggcgcggcgctcggcaccacgccgagtcgcccgcgcagtaccgtcgcttgatgcagttcatccgcgaggaaggctacaccgccgccggattttcgcgcgagattacagtcatcgactacggcttcacgaccgacacggaaaagttcgtcactgaaatcatgatccccctgcaaaaggtataaaaaaagttcccgcgttcattggcaggtgtgcgtaagacagtattgtgctgaaatcaacaaagcggcacgaaaccgcatggatctgatcgtgccggagctggcgaagcgaaacggcgtgaccgaacagctgaaagccgaaaaccaaatggaatgggtacggcagatgaacgcttgcaagacacaggcagaggagattgtgaaagcggaattgatttatgattgagcgagaaagtccgggcagaaaactgttcggacttttctcatatagtccaaagttgcggtagaaatgttcacaagttttatggtataatttgaatacgaaaagtgagcagacaaatcttgctaatgtttgtcaaggacttttttctg

SEQ ID NO: 10193 - DNA, 870 bp, Unknown
  gut microbiota DNA sequence
gtcgccggtgggcgcagtaggctttgccgtctcgtcccctacaggggccgtggtcagcaagtccttctgcccgctgagcaccttccccgtgtaggcgtccaccagatactcaaactcaccccatgctgtgtgcagctccacctcgtagtgcgcggggaattcgtccagctcggaatcgacctccgccgtgacggagtccaacgccgttgtcccggcatactgctccgcggcgtaagcggcggcatccttgccgatgggcatagcgggcgcgcccgcttccgcaaggtccttcagctcctccaccgagagctttgccagcgcgtcaaacttgagcgccgggttgatggcgaggacgcggttcaccagcgccgccttgccggaggaaatgttgttctcccgggcctgctgctcccgcgccgcgtcctgcgtcagcgtctgtgtcaggacggcggcctttgcttcgctggtctgcagcacgccgtccacggcgctggtcagctcacgctggagcttttccgcacgagcggtatccttgtcctccaccgagatcatgatggcggaggaaatgctgtcgagatagccgtttcgcacgagactgcccacgatggcgttcaccgccacatccagctttgcacccttgaggtcagcaccgttgctcatatccgcaaggatggccttggcatcctcgttgagcggcgtacagacgagaaccttttcgttcctgctgaccttcagctcaatgcttgggttcacatccagcgacaccacggacgccaccgcatgcgcccgctgatagaacacgcctccgccgcacagcagcatcaccgcgaggcaggcagccgccagcgttgtccattttcgatttgccgt

SEQ ID NO: 10194 - DNA, 2516 bp, Unknown
  gut microbiota DNA sequence
tcttccattgtcccctcctgaaaataaaaacgccccgagcagtcttcactgctcagggcgatcaatgaccgtggtaccacctggattcccgcattgtgcggacactcatgcctctgtaacgggagttcccgtccggcttactctcttttcagcgcggcagctccaaggcgacttccccacatcctgcacaagggcttacaccggccgccctctctcttcgctttcagatgcggatactgctcctcttcttcgcatttgtcacgctgaatcataccgttttttgcgccgcttgtcaactcattttgaggatttccttcttcagccgcacgatgatccgcttctcaaggcgcgagatatagctctgcgaaatgcccatcaggtcggcgacctccttctgcgtcttttcctcccgtccaccgaggccaaagcgcagtgtgatgattgttctctccctcgcggtcagcttgtcgaccgcgtccatcaggagttggcggtcgacatcgtcctcaatgggcttcaagacaaggtcctcgtcggtgccgagaatgtcggagagcagcagctcgtttccgtcccagtcggtgttgagcggctcgtcaaagctgacctcggacttctgcggcgcggtcttgcgcaggtgcatgagtatctcattttcaatgcagcgcgaggcgtaggtcgcgagcttgatgttcttgtcgctgcggtacgtgttcactgccttgatgagcccgatcgtaccgatggagatgaggtcttcgatgttgatgccggtattttcaaaccggcgcgcgatgtaggcgacaagccgcaggttgtgctcaatgagcgtgccgcgcacgctctcgtcgccttcatccatgcgcgcgatgagctcagcttccttctcccgttcgagcgggggcggcagcgtgtcgctgccgccgatgtagaaaattccccgccgcgcgatgagcccccagtcgatgagataaaagcgcagtctacgccacagcgttttgagcaagctctccatgcttctcccccttttcgcatccttcgcaccacagtcccgcatatgcaccgccgtcgccgagcgggtgctccgccagggcaacggcgcgcgggccgagtttgatttcgtcaaccgttattgcttcacagcgcagcagcggcagcgttccatctgcattgcccacgctgcaatacgcaatatgcggcagcgtcgcggtctcttcttcgctgatgaggtctcccagtgcgtgacggtcgatgaccggcacgccgaggcccgtcacagggtcacagagcgtgttgcccgtgtcgcgcagcagccgcacgcgggccgtttttcctcgataggcgatgaccacatccgccgtctcgctccctgtccgcgccgcgccgtagcggaacacgacggaaagcagcaaatacgacgtccccgccgcgatcaggaagacgccccacggcaggtttgctgtcaccacgccgcgcgcaaggcgcgccatcgaccccagactctgccctaagagcatcaccacgccagcgaggccgcacgaggcaaggaaaaacagcagcgtcagcttgaccgcccgcccactgccgcgatacgccgccgcgcccatcaaagcgagcccaagcagcaacaaaacgacgcttttcggcaaaaagagctgcactgccgcataaataccgccgaccgccgcgccgagcaaaagtcttctccgcgcgactgtccgccctgcgactctcgccgcgccgaacaacaacagatagtcgacgagaacgttaaacgcgaagacgctttctatgtagatgaccatggcacacctccctcaatggaagtccattatagcaatggacaaaaaaagaaaagggcgaaagatgcccttttcttatcttttccctcgcgggataaaatggcagcgcaaaagcgctgcggggttttccccacaccgtgtgggggacgcggttaagggggatattctctttctcgaaagagaatatcccccttacacccccaagagaaaggacgaggggccttccccctcgaccccgcacattggcagtttttatcttgaagaactgcacgcgctgcgcaatgtaagtgcggtgtacatggcttcgccatgaacccctgcaattcgtgaccactctcaaccgcgccttactgccgtgaggcgcgagtgacggtagaacggcggcagactgcgtgcgaaatagcggcattgctgcgctcgccgcattgtggagactggcggtagacggaaattaggctgcactcctacaagataggcagagcaacagcggataatagaagcaactcaaatcgtatagcaatgctaacgcggcaacgccgcgcgcaggcattttcattccggaggcataaaagtcatccaagcctgagactgccaatctaagtctttctcttggggttccaaaggggccattctctttcacgaaagagaatggcccctttgactcgctcccctgcgcggcgcagggaatagagaatggcccctttgactcgctcc

SEQ ID NO: 10195 - DNA, 3013 bp, Unknown
  gut microbiota DNA sequence
ataaccatcgatgcaacgagcgataagatcatcaccgcgaccagcaggatcgcgacggctctcgtcttcttattcatggggttcctccctttctacgattttcttgatgcccttttccgccttggcgcgcgggagcatcacctcgtggccgcagcgcctgcatttgagcttgatgtccatgcccacgcgcgtcacaagccagagcttttcgccgcatggatgcggcttcttcatttcgacaatatcgttcaacctcaggtccatgtgctcaccccttgatcgcttcccagtactgcgcggcggcgcgctcgaccttgttgtcgccgtagcggtagtactgcacgtttttgagctcgtcgggcagatactgctgcttcacccaatggttcgggtaggcgtgcgggtacttgtagttctgcccctgcgcgccgccggtcgaatcggcgtggacattctggaggcagcgcgggaaattgccgctcttgcccgccttcacatctgcccaagcagcgccgatgccctcgatcacgctgttggacttcggtgcggtggcgagcagcaccgccgcctgcgccagcggcagctgcgcttcgggaaggccgagctgcatcgcggtgtcgacgcaggccttgacgatggcgatagcctgcggataggccatgccgacgtcctcgctcgccgagcagagtaacctcctgcatggcgtgaccagatcgcccgcctctaaaaatcttgcaaggtagtggagcgccgcatcggggtcgctgccgcgcagcgacttcatcagcgcgctcgcgcagtcgtacatcgcgtcaccgcccttgtcgtagcgcatggtactgcgctgcgcgacctgtaaggcgtcttcacttttcagcaaaagttcgccgttcgtgacgtccgccgcctcatataaaagctcgcacgcgctcacggccttgcgcacatcgccgccgcactgctgcgcgatgacgcgcggcacgtcgtcctcccaggaaagcggcagctcgctgcgctctttcaaaatgccgagcgcgcgctcgaccgcggggatgatttcctccgcgctgacgtttttgaactcaaacaccgtcgaacgggataaaagcgcgccgtaaacgtaaaaatacgggttctccgttgtcgacgcgatcagcgtgatagagccgttttccatgaattcgagcaagctctgctgctgctttttgttgaaatactgaatttcgtcgaggtagagcagaatgccgcccggtgccatcatcgtgccgacatcggagataatgctcttgacatcctgaaggctcgcggtcgtcgcgttcaggcggtacagggtcttattcgtgcggttcgcgatgatgttcgcgatcgtcgtcttgcccgtgccggacgggccgtagaagatcatattcgcgcttgagccggactcgatgagccggcgcagcagcgcgccctttccgagcaagtgcttctgacccacgacctcgtcgagcgtcagcgggcggatctcatccgccaaaggtctcttttcactcatatcagttgttcctgctgcatttttccgcgtcgatcgccagcacgaccatcagcgcgcccagcgcgtccttgggatcggcgacgtcaatgacgtaggtgtccgtccagtgaaaaaactccttcgtgatcgtcgcgatacagccgcgcgaggcgctgtcgatcgtgtagtcccactccatgaagctgccgttcacttcccagtcgctgcactcaagcgtgaagcgcggggcgaaaaaggtaaattccttgcagatgcagccgtaatacagcttgccgatgtagagttcaaacttcgggaggaaggtcagcacccgctgctgcaccgttccgatgtgatcgcccatggcgttcagaatgtgcaggcaatgcccccaggcgagcttgccctcgaccgtaaagacggtgttgccgtcctcatcgtagatatcgtagctgtcgaaccacgaaaaaaagcgctgcttgaatagtagccgcatcgcacaagcctcctttttcacagatggaatgattatagcacattttttcttcactgcacagactttttctgtcgatttttccgtgtctttgtgctatactgtcggcagtatcgatgaaacgcaggaggtttcgccatgaaatccaaagccgccgtccgccgcatcgtggaggagctgaaggtcctctaccccaacgcgcgctgctcgctcgaatataaaaaggactacgagcttctgttcgccgtgcgtctttccgcccagtgcaccgacgcgcgcgtgaacatggtcacgccgtcgctctatcagaagttcccgacgcttgaggccttcgcgaacgcgacgtatgaagaggtcggcgacgcgatccgctcctgcggattttacaacacgaagtcgaaggacatcgtcgagtgcgcgaagatcctgctcgaaaagtacggcggcaaggtccccggcacgatggaggagctcacagccctccccggcatcgggcgcaaaacggcgaacctgatcctcggtgacgtctacggccagcccgcctacgtgtgcgacacgcactgcatccgcatcacgggccgcctcggcctgacggacggcagcaaggacccgctgagcgtcgaaaagcagctgcgtcaggtgctcccgccggaggaatcgagcgacttctgccaccgcatggtgctgttcggccgcgaccgctgcaccgcccgcaaagccaactgcgacggctgcccgctgagaaaagactgcgactacggcaaggcgcagaaatgatatcttcccaaaagcggctttgccgcttttgggagaaggccgcgctgcgctccgtgcctcgccgcctatatggcagctcgacacacgctccgcgagaggtgttttcaccacgtacacgccgcggcgaaaaacgatctgattttatttcgtgcctgcgggcatgaaactctgcgaggctttccccaataggagaaaggttccgcacagcgatgctgtgcggaacctttctc

SEQ ID NO: 10196 - DNA, 1183 bp, Unknown
  gut microbiota DNA sequence
aacgcttgagcttgccgataatctcatagtcgctggcgtagctgtacgcctcgccgccgacctcgcgtattttctgcatggtgtcaatgataatgagtctggtatcgggatgttctcgcacgaaattttcgagctgttcgtccaacccgtttccaatcttgcccgcagcagttgcaaagtgtagccggtcggtatcgttgacgccgtacatcataaacatccggctctggatgcgctggaagtcatcctccaaggcgaggtacagcaccgtaccgggatggacttcgtagccccacaacgccttgccggtgctgacatgataagcgatctgcgccaccagaaatgatttgccgatcttcggcgcacccgcaaggatatatgcgcctgcatagagcaagccatcgataatcggcggtctgctctgatacgcggtctggtacaactcggtcatggagatcgtgtgcaggtaatgcgggtctgtcaaccgctgcatcctacggtagatttcgtccagactttccgagttgttttgaaaatcaccgttgatttcttcttcaaaagcggatatactgttctcagttgaattgtgaagcggctgcccatcatctgcgccaacagatgtgtccggggcggtcgttttcattttgctattttcattctccataggcattttcctccttcatgccgtccatgatggcggcgatcatttcaatcacgtccagcagctcgtcatttacgcggccgcccgcttcaatgcgccgcagctcgtccagcacggcggcaagctggtcgcgcagtgccttgtaaactctcggattgccctgtactaccacgtccttacaggtcaaacggcgggtgatgtagtcctgcttcgtcagtccggagagtttgacaaaggtttcaatttgcgtatcttcctccggtgacacccggaaggcaacggtcttgttgcgccagcggttgtgattgtctcgatttttcagtgacattttcagttactcctttcgacgttcaatttatctgccatttctttctgcacagtaggaaacagatgcgcgtaccggtaggtgatctccacgctttcgtgtccaacacgattgccgatggcaacggcagaatagcccatgttgataagtagggaaacgtggctgtgtctcaagtcgtggattctgatgaccttgac

SEQ ID NO: 10197 - DNA, 1593 bp, Unknown
  gut microbiota DNA sequence
cgaaaatgttaagtacaattcaccaaaagtaaaaaaccgcccccggtgttgcagcaccgaggacggttatagggggcagcaaactgatagcctactgccctccaatcataacaaatgcaggaggaaaaagcaatgccaagaaaagcaaatacgcgcgccgcgtcgggcgcaggcagcatccggcagcggcctgacggtcgatgggaagcccgtgtgaccgtcggcaatgaccccggcacaggaaaaccgatccgccgcagtatctacggagacacgcagaaagaagtgttgaccgccatgcgcgacgcgcaaaaagcgatcgacgacggactttacatagagccgacgcgcctgacgcttgcgcaatggctcgatatctggcagagcgattatctgctctcgcaaaaatacggcacggtcaagacctacaaggcccaaatcgcaacgcacatcaagcccgccctcggcgcggtgaaactcaccaaactcacgccgcatatcatccagggcttttacaacgatctgctcgccaatggccgcattgttcccaaacgggacaagcagggcaagatcatcaaaaaggacggcgtcgccgtcacggagaccgcaccgctcaacgcaaagaccgtgcgcaatgttcacggcgttctgacaaaagccctttcacaggccgtcaaggtgggctacatcgcacgcaatccgtgcgacatggtagacctcccccgcgtcgagaaagtgcaaatcatgccgcttaccgacgaacaggtcaagtcttatctcgccgcagcggatgccgacaacgattatggagatattctgaaagtaattctctttaccggcctgcgtgaagctgaagcactggggctgacatgggattgtgtcgacttcaagaaaggcacgctcaaaatttgcaagcagttgcagaaacgccccgccgaggccggcggtttccagtttgccaccctcaaaaacgacaagacgcgcatcctgcgccccgctcccttcgtcatggatatgctgcgcgccgttcgctccaagcaggcgcaaaggcgtttacaggccggtgatctttggcaggactggacagaccccgccaagcagtatgccgcctgtcggcttgttttcacaaatgtgctcggcgaccacctgcacccacagcgactttatgcgcatcacaagaagatcgcagccaacgcaggagcgccggacgcccgtgtgcatgatctgcgccacaccttcgccgtgctctccctgcaaaacggtgacgacgtgaagaccgtgcaagaaaatctcggccatgcgaccgccgcttttacgttggacgtttacggccacgtctcagagcgcatgaaggaggacagcgccgcccggatgcagggctattttgaaaatctcaaaaaggcatgaaaaaagctccgtcgatctcatcatcggcggagctgcttttgtccccgttaaggggtaaaacttttaattggggtaaacttaggggtaaaacgtattctgtcaaaatgcaaatgcaacttttctgcgtcaaaaatgcttaaatcatgcgctaaaaagaaagaaccgtaacctttcggctgcggttct

SEQ ID NO: 10198 - DNA, 10484 bp, Unknown
  gut microbiota DNA sequence
tgcgttgttcgccgcgctgtgtcattcagcgaacatatgttattatagcaggaactttgcatttgtcaacaggaaattttctaaaaaatcaaaatttggaaaatttctgtctcttccccactttcccgtcacatccagatggcgaacaaacgcagcagcggctcgaacacgcggcgcaggacgctgcgcttggcccactcctccgccgtgacgaggtggctgtggtcgacgatcatatccatgtcctcgagcagcgattcgatcatcggcacgctgtagaccatcacgccgcactcatagtcgagctcaaagctgcggtagtccatattcgccgagccaacaaaggctgcttcgcggtcgaccatgatgctttttccgtgcagaaagccaggggtatagcggtatacctttacgccgtgtttgatgagctcgccaaagtacgactccgccacgcagtcggcgtaccagtggtcaggcttgcccggcagcatcagccgcacgtccacgcccccatcgcccgcgatgcacaatgcacgcatcaggctctcatcggggatgaagtacggcgtcgtgatatagaggaagcgccgcgcgccggagatcatctggaggaacacatcctcggccggattgtcggggttgttctgcggtccgtcggtaaacggctggcagaagccctcgcttttgaccggcgtatgggggcggtaatagtcgtgctcgttgtgcatcacgccgccgaggttcacacacatgcggataaagcttgccgtcaggccccaggcgccctcgccttcaagacatacgccgctgtccttccagtagccgaagcgctcgatgagattggcgtactcgtcggcgatgttcacgccgccggtgtaggcgacgtcaccgtcgatgcaggcgatcttgcggtggtcgcggtagttgaagtgcaggcggttcacatactcgtgcacggggttgaagatgaatacctcgacgcccacctcgcgcagacggtcgatcgtctcgccggaaaagcgcttgatgttgccgaagtcgtcgaaaataatcttgacctcaaccccctcgcgcgccttggcgcagaggatcttttcaagctcatcccagagctttccctcagccagaatgaagtattcaaggaagatgaagcgctcagccttggctgcgcggttgatgagattacgcagcaaaatcgcgccctcgggcaggtacgtgacagaggtattctgatagagctggaagtcgcggcggcagaggtagtttgccgtgcgcgaccaagcgggcagctggcgcgtgagcttgtcgacggcgatctcactgcgcatgcgcacgctctccggctcgtcaggaaagcgcttggtgttctgcggcagatggcgcttctgcgccgcgccgccccagaggaaccagagaatcatacccaccggcggggccagcaaaagcaggatgaaccagatgagcttataagaaagctcacctggttcattgtagatatgcaccgcaaggaacagcgcgccgacctgtacgacgccgtaggccagcgccagatactcctgcataaagtaggagatggcgacaacaaagccgatctgcaccgcaagcaggacgacgaccagcatgatccgcagcgccgcagaaatgcgccgctcgcccttttgctgaatctggaatcccttcatcgcagtctcagtcccctcctgttggctgttccctgtttttgattttttgttttcctcagttcttctcgtagcgctcgttcttctcgttcagaagctcggccttgatgtcgtagagcctctgcgagaggtccacataatagttatgcgggttatcgaagcgcttgacctcgtcccagagggtatcgacctgctcggcgcagtattttttgatctcctcgatgccgggacgcttgtagacgagcttgcctttctggtagatgggcacgagcagctcgcgcgcttcgaagtgatagacttccttacgcttccacgtggcgtcggggtcgaagatctcaagattctggctgtcgtccacggtctcgtcgtagaccgtcagatagtcggcgatggccttgccggtgtcacggccatagaagcggtagagcttcttgaagtgcggtgtcgtgatcttgccgacgttctcgctgatcttgatcttggggacgatattgccgtccttgccctccactgcgacgagcttatagacgcagccgaagaccggctcgctcttggcggtaatgagacgctcgccgacgccgaaggcgtcgatcttcgcgtcctgcatccagagatcctgaataaggtactcgtcgagcgagttcgaaacggtgatggtgcattccgtccagcccgcctcgtcgagcatcttgcgcgccttgcgggaaagataggcgatgtcgccgctgtccaggcggatgccgcactttttgatgccaagcggcttcaagatgtcgttgaacgctttgatggcgttgggaatgccggactttaaggtattataggtgtcgacaagcaggacggcgttctgcggatagtatttgcagtaggtcgcaaacgcgtcatactccgtgtcgaacatctgcacccaggcatgggccatcgtgccgagcgcgggcgtgccgtagagctggtcggagatggtgcaggcagtgccgcagcagcccgcaatataggcagcacgagcgccgtcgatggcggcggcggagccctgcgcgcggcgggaaccgaactccatcacggcgtggcccttggcggcgcggacgatgcggttggccttggtggcgatcaagctctgatggttcacggtcaaaagcgcgaacgtttcaagcagctgcgcctcgatcgcgggcgcgcgcacgacgaccatcggctctttcgggaagacgggcgtgccctcgggcacggcgtaaatgtcgccgctgaagtggaagtttgcaagatagtcgaggaattcctcgcagaagatacctctcccgcgcaggtagtcgatgtcctgctggtcgaagtgcagatcctcgatatagtcgatcagctggtcgaggccggcggcaatggcgtacccgcctccgtccggcaccgagcggaaataaacgtcgaaataggtaatgcgatcctggaaccctgctttcaagtaaccattgcccatagtcaactcgtagaagtcgcagagcatggtcatattgagcttctgatcggttttcatagtcacctcatagtgtcacggcgcggactgtgccgcgccttgtaataggtgcattatatcttgcataccaaaataaagcaaggctttccgccctttttccgctttttacttgactttatccattgcgtcccctatgataaagggactttctaaagaaacggagcatcacaatgggtgttattttaggcattgacatcggcggttcgagcacgaagatcgtcggtcttgcccccgatctttccgtcatcgacatgctgcgcgtcaaggctgacgatccgctcacctcgctctacggcgcgatgggcaatttcctttccacacatcatctccagctctccgacatccgccacatcgcgctcacgggcgtaggctcttcgtatgtcgagggcgatatctacggcgtgaagaccatcaaggtcgaagaattcccctccgtcggcgtgggcggcctcgccctctcgggcaaggagcacgcggtcgtcgtcagtatgggcacgggcacgtcgtttctctgggccaacaagggcggagatatccgtcacctcatcggcagcggcgtgggcggcggcacgctcgcgggcctcagctcgctgacgacgggcgtacaccagtacgcgctgatccgcaagctctgccaggacggcgacctcagccacatcgacctgacgatggccgacctctcgcgcgagcaggtgggcgatctgccgcccgaggccacggcggcgaactttgccaaggtcgccgacgacgcgacgccgtcggacaagatgcttggcatcgtcaacctggtgctccagtccatcggcacaatgtcggtgctcgcgtgcaagtgctgcggcacggacacggtcgtcctcacaggcgcgctgacgatgctgccgccggcaagggagacgttcgagctgttcaaacagctctaccatgtcaattttattattcccgaaaacgcgacgtttgctaccgccatcggcgcggcgctgtacagcgtgagagaaaattgacgcaaagcatttaaaaaagtgcctgccgaatggcaggcactttttattttcaaacgcttgttccatttcgtattttatgctacactgttcatgaaacgaggtgaacgcgatggaccgcatcattcttcactgcgactgcaactgcttttacgcctcctgcgagcttttgagccatcccgacctgcgccagcttcccgtcgcggtctgcggcgatccaacggagcgccacggcatcatcctggcaaaaaatgaaccagcaaagcgctgcggcgtcaaaacggcggagaccatctggaaggccaagcagaagtgtcccggcctcatcctgctgccgccgcaccaccgcctctacgccgaatactcgaaaaaaatcaatgccgtctacggcgagtacactgacttagtcgagccgttcggcatcgacgagagctggctggatgtgacaaattccctccacctcttcggcggggacgccagagcgctcgccgacacgctgcgaggccgcatcaagcgcgaatttggactgacgatctcggtcggcgtgtcattcaacaaggtgttcgccaagctcggcagcgactataaaaagcctgacgccacgaccgtcatcgcacgcggcaactggcgcgacatcgtctttcccctccccgtcggcgatcttttgttcgtcggccgcagcgcacaggagctgctcggccgctacggcgtgcgcacgatcggcgaactctcaaaatgcagcgaggaaatgctcgaaaccctgatgggcaaaatgggctcgcagctctaccgctatgccaacggcctcgacgactcccccgtccgcggagcggcggaccgcgggccgatcaaatccgttggcaattcgacgacgttccgccgcgacctgacgcgctgggatgaggtgcaaagcggcatctcgctgctttctgacagtgtggcgatgcgcctgcggcgctacgggctctactgcggcggcgtacaggtcggcatcaaaaacagccgctttcaggtcttttcgcgccagacgacgctcgaccacagcacgcacctgatgcgcgagatcaacgataccgcgctccgccttgcaaaggacttgtggaaagcacccgaccctatccggctcctctccgtcacggcactgcatctgaccgaagaagcgcaatcctaccgccagctcgatctgctcggcacggacgacacacagcaggaaaagcaggaagccgtcgaatccgcaatggacgccctgcgcaaaaaattcggccgcggcgtcatctcctacggtaccgccgaagacaccatcagcggcgaaaaaatcgaacgggattaaatgcgccgaaggctttcgcgcccgcaggcgcgaaatgatcttaatcgtaaattccgacgacatgtgcgtcggaatttactcttctcactccgcgcgtgtcgcagccgccctgcgggcggcaaggcacgaagctgagtgcaattttatcggagagacggcttcgccatctctccgataatctcaaaagcggggattctctttgagagaatccccgcttttgaaacgtcagttgatgagccactccggccttgaccgcttcttgatgcccgacacgacccccatcgcagcgaacagcgtcacgatcgacgagccgccgtagctgaaaaacggcagcgtcagcccgatgacaggcatgagaaaaaggcacataccgatgttcgcgatcgtctggaagatgagcatgcccgccatgccgacgcacacaaggctttccatgcggctcggcgcttcgcgcgcgacaatgaggcagcggacgatgatggcaagcagcagcacgatgatgagaaggcacccgataaaacccaattcctcgccgcagacgcagaagatgaagtctgtctgccgctcgggaagactcgaccggtacaacgactgcgtctgcgtgccgttgaagaggccctgccccgtcagcttgcccgagccgagggcaagcataccgcgcgtctgctgccagcccttgccctcgggctggtagctgtggtccagaatgaccttgatgcggtcgtaccagtcgccgcgcaggagattgaaattccacgcagcaaggaatccgcccaccgcgccgccaaggccgaggaagatccaacgcagcgcaaagccgcccgcaaacgccatgcacacaaagacgaacagatacacaaggccgctgcccgcatccttggagatcacataataaaagaggaacatgatccccgcgtgcgccgtgggctggatgacattggaaaagcgcgtgaggtcctttttctcctgcagcagcgcaagctggcgcgccaagaggataatgaacgtgatcttcacgatctcggcgggctgaacggtgatgggaaaattctccaaaaagccgacgccgagccttttgccgatgtcgttcacgccgagccaggcgcggttgccgtttcgcgtcagaccaaagggcgtgcgcagcagcagaatgaagccgaagttgaacgccagcagccacttccatttttttccgacctccgacacgtcgatgctggagagcaggaagtagagcagcacgcccagcagcaagccaaatccctgaatggcaacatatttaaaggtattgcggaaatgcgtggcgctcgcgatgagcaccatgccgtaaagcgtggaaacggtgcacagcgacagcagcaccatatccgactgccgcaccacgtcacttaaaaaatcgcggaatctgttcacagcctcacgctcccttcgcacaaagttttcgatgtattttagcacaattttacccgtctgtaaacgcacatttctccctctttccgcagaaaaggaattgtaaaggtcggcgcgctgtgctatactgtttggtaatatgggtgaaaatggggtcaaggaggcgaaaccatgcaatttctgtcgcacagcacgcaggagaccgaggcgatcggcgaagagcttgcccaaaagctccgcggcggcgatgtgctcgccttcacgggctcgctcggcatgggaaagaccgccttcacgcgcggtcttgcgcgcggccttggctgccgcggacgcgtcacgagcccgacgttcaccatcgtcaacgaatacgagggcagaacgccgctcttccattttgatatgtaccgcctcggctcgtcggacgagctgttcgacatcggctgggacgattatctcgcccgcggcggcatctgtgccgtcgagtggagcgaacgcgtctccgacgcgctgccggaggacacgatctttgtcgacatcgcgcgcacagacgagcacgaggactggcgcaccatcacggtcacaggaggcagattcgcatgaaaattctcgctctggaaacatcggcgaagagcgtttcctgcgccgtcgtcgaagacggcgcgccgctcgcctccgcctatcagtgcacggggctgacgcacagccggacgcttctgccgatggtggatgcgatgctcaaaaacgccgatctgacgctcgatgatatcaatgccatcgccatcgcggcggggccgggctcgttcacgggccttcgcatcggcattgcggcggtcaagggccttgcctgggccgcagacaagccgtgcctcggcgtttcgacgctcgaggccatggcacagaatgccgcgcacatcgacggacttatcgtcggcgcgatggacgcgcgccgctcgcaggtctataacgccgttttcgaggcaaagggcggcgaactcacgcgcctgacgccggaccgcgcgatctcactcgaagagctctgcgcgcagcttcaaggcaagcagcagcccatcaccgtcctcggcgacggcggcgtgctgtgctatcgttatttagaagagcacggcgtcaagtgctcgctcgcgcccagtatgctcctttatcagagcgccgtgggcgtcggccttgcggccgagcgcgcctatgcgcgcggcgaggccgtgagcgcgcaggagcttctccccgtttatctgcgccccgcgcaggcagagcgcctgagaagctccaaattgaaccagtaagcaaaaacacattaaaatatattttttcggaggtcaaagcaatggaagccaaattcaacgagaaagtacacatcatgaaccaccccctcgtcgcccacaagctcaccatcatgcgcgatgaaaacaccagcgtcaaggatttccgcgagctcgtgtccgagatcggtatgctcatcacctacgaggccacgcgcgacctcccgctgaccaccaagcacatcaagacccccatctgcgagatggacgcccccacgctcgcgggcaagaagttcgttgtcgtccccatcctgcgcgccggtctcggcctggtcgacggcgtgctgcgcatggtgccctccgcccgtgtgggccacatcggcatgtaccgcgatgaagagacgctcgagccccacccctacttctgcaagatgcccaaggacgtggccgagcgcgacgtgatgatcgtcgacccgatgctcgccaccggcggctctgcctgcgaagccatcggcgagatggtcaagcgcggctgcaagcacatcacgctcatggtgctcgtcgccgctcccgaaggcatcaaggccgttcaggagaagtaccccgacgtcaacatctacgccggcgcactcgatgatcatctcaacgagcacggctacatcgtccccggcctcggcgacgcgggcgaccgcattttcggcacgaagtaacttcaatgaaaccgacttacgtcgctttcattgagaaagattcgcgccgctctgtgcctcattgtctgcacaagcagacaattcgacactcgctttgcgcaaagagtaattcctgacgcacatgtcgtcaggaattacgattttaattgttttccgcctgcgggcggaaaatggtacaaagaatcttcacaattttgtcattgcattattgtgttccattcgttataatgattgggcattttcaatagcacctttgcaaatctgcaaaacccaataattgagaggactgaacaaacaaatgagtgcatccagagaaaagaagagccgccaggagaatctggcaggcggttacgtcgatccccggacaaagcgcgaaaaggacgagcaggcgaaggatcgccgcagcaatgccctgtatatcgccatcgccgtcatcttcgtgatcgtcggtatcgtcgtcacggtcgccaactccaaggtgatcgaacgcagcgccgacgccgtgaccatcggcaacgagacctacacggccgccgacgtgagctacttctacaataccatctacaacagctttgtctccaagaactcctattacctgagcgcttacggtttggacaccagcaaatcgctcaaggagcaggactgccccgtgaccgatggcggcacctggtacgattatttccgcgatcaggcactcagcagcatgacctcctattcgcttctcgcgcagaaggctgaggccgagggctttgacggcagcgaggccgtggagcagtccgtgcaggatacgtttgccgatctggacgctgccgccgcttccgccggttacacccgcgcgcagtacatcaaggccgtgtgcggcccgctggtcaacgagaaggtcttcgagcgcaacgtgcgtcttgaagccctcgctcaggcctattccgccgatcatgtgaactccctcgagtacagcgacgacgagatccaggccgcttatgacgccgaccccaagagctatcagagcgttgacatcgagtacatcctcttcagctccggcgccggcagcgatgcgacggatgaagaaaaggccgagcttcttgagcaggccaagcagaaggccgagaccgctctctcccgctacgcgcagggcgaggcgttcgacgccatcggcgaggacatggagggcacttacgaccacgctgccaacgtgacgaacggcacctccgatatgctgacctgggcgtttgacgatgcccgtcaggagggcgacaccaccgtcgccgcctatggcgagaagggttattacgctgtgctcttccactcccgcagccgcaacgactaccacgccgtttccgtgcgtcacatccttgtcgacagcgaggagaaggccaatgacattctcaagcagtacaacgacggcgagaagaccgaggacgccttcgccgcgctggccgtcgccaactccaccgacccaggcagcgccagcaacggcggcctgtactccaacatctacaagggtcagatggtcagcgagtttgaaaactggtgcttcgactccgcgcgtcaggcgggcgat

SEQ ID NO: 10199 - DNA, 40794 bp, Unknown
  gut microbiota DNA sequence
gtcgggtaaatctccctacttacgacaaaataagctgccggtttctgaccggcagcttatttctttttgattctgacttttgaggcgacactatggacaatcagtttttacgcacgcagatgctgctcggcggcgacgcgatgaatcagctacaccgcagccatgtggccgtgttcggccttggcggcgtgggcagctacgcggtcgaggcgctggtacgctcgggcgtcggtgagctgacgctcatcgacgatgacactgtcagccccacgaatttgaaccgtcagctcgaggcactgcactccaccgtcggccaaaataaaaccgacgcgctcgccgtgcgctgccgcgacatcaaccccgatgtcagactgcacctcatctgtgcgcgctacgacgccgcgcaccgcgaggacttcttcaccgcgcgctatgactacatcctcgacgcgatcgacacggtgtcgagcaagctcgacctcatccagacggcgcaggctcgaggcattcccatcctctccgccatgggcacggggaacaagctggacgcctcgcagctatgcatcacggacatctccaaaacgcgcaactgctcgcttgcgcgcgtgatgcgcaaggaactgcgcgaccgcggtgtcaagcacctgcgcgtgatctactcccccgagcttcccgccaagcccgaggcgctggaagcgccccctccgggccgccgcagcgtaccggcaagcctcgtctgggtccccggctgcgcgggactgatgatggcgggcgacgtcatcctgacgctcgccggatgcaaaaaagagaaggaaggcggcagccaatgattttgaccggtaccatcgtcaattccgccgcgatcgtcgcgggcagcatcgccggacttctgctcggcaagtttatccccgagcgcttcagcgacgcaatggaaaagggcgcggcgctctgcgtgctctacatcggcgtggacggcatgctcgcgggcgaaaacacgctcgtcgccatcctttcgattgcgatcggcgcgatcctcggcgaacttttacagctcgatgaacacatgcatcagctcggcgactgggtcgagcgaaaatttggcggaaaagggtcgaaaacctcgctttccgagggatttgtcaccgcctcgctcctcttctgcgtgggcgcaatggccatcatgggcgcactcgactccggcctgaccggcgaccattcgacgctctacgccaaggcgctgctcgacggcatcatttctgtcgtctacgcctcgaccctcggcatcggcgtcgcgctttcagctatccctatcttcctctatcagggttccatcgcgctgggtgcgtcgttcctcgcgccgtatctcacagaagcggtcatcctcgagatgaagtgcgtcggctcgattctcatcctcggcctatcgctcaacatgctgggcctgacgaagatcaaggtgatgaactacgtccccgccgtgttcctgccgatcctattgtgtcggtttctgtaagcaaaaagaagcgttccatcgaatgatggaacgcttcttttttactcttccaaaatgagcggcagggcgcggacgcagcagtgcttcatgtcggcatggctgtcgtctaaaaagccgatgccttcggccttcaaaagctcgacctgacggttcgcaccgccgaaagcaaaagcacttgacacctccccgtcccgcttgacgacgcggtgacacgggatgacgcccggctctggattcacgtgcagcgcgtagcccacgacgcgggcgaggcgcttgttgccgatcgccgcggcgatctggccgtaggtcgcgacgcttccgcgcggaatgagccgcaccgccgcgtacactttgtcaaaggtcgtcatgcttctcccctctttttgagccggcgggcgagcagcagcccgcccacgatcaggacaagatagaatagatagtagggccagtcgtgccgcagccatatccccgcgctctcccaaacgatcggccagtcgcccccgtccgcatactctctcgacgtcgaccacagatccaccagataaccaagcatagaggccaggcgggcgatcgccagcgccgcaccggctgcggcaatgccaaagcagatcggtttgccgcgctttttccaaaccgtacaggccagcacagcggcggctatcgccattgcaccaaggacgaagtgcagcgccgtatacgactcgaatcccgtccgcgcaacgctccacaccgctgccatcacaacaattgtcatcaccagcagcagcgcatcgttgaatataccgctccgcccgcgcgtatcgccgccccgcttctgctcggctgcctgcggcgcgtcctccgatctttcccagatcagataatccgtcgtcacaccgaagtacgtgcagatggcgcacagcttgtcgaggtcgggcgtcgagtcgccgcattcccatttgctgatggcctgccgcgagacatccagctccgcggcgagccgctcctgcgataaaccgcgcgatctgcgcaacagctgtaatttttctcccagggtcatgtatttgtcctccgtttgctttgatgcgcccagtatagccgactgcggcgaaaagcgccaccagtcaaggcttgcaagtccgcaaccaaacgtggcaaagaggatttagtccgcttttttcttgttctttccaaacagcgcgcccacgtcgacctccaccagcacaaggctcgcaagcatcagcgccgcgccgatgtagcccttgacgccgatacgctcgcccagcaggaagaacgcgaagatcgccgaaaacacgggttcgagcgtgaagatgaggctcgcgcggctcgccgtcgtgtgcttttgataaacgctctggatcacaaggcagacgcctgaacacacgatgccgagaaacagcgccgccgcccagacctttgccgtacccggcagtgcaggcgtctccaaaaatacggagagcatcagcatcaccacgccaacgacggcaaggtcgcacacgccgagcgccagcgggtcgaccttttcattcgccacggccttttccgtgaccatcaggtcgacggagtaaaacaccgctgcgaacaggcagatgatatcgccgaacgcaggcttgagcgtttcgttcagcgtcatcagcgctaagccgataagacataagatcatcgaaacgccgaatttcttctccggctttttgtggtagacgatgaactccaggatcggtgtcgtcaccacggaaagcgcgccgatgaagcccgcgttggaaacggaggtataaagcacaccgtaggtaaggctcgtatacacgatgacaagcgacagtccgaccatgatactgtacttcacggtcacgcggctcacacggcgcaaattcttgtggaaaacaaagcccagcaccagaaaggctatgacaaagcgaaacgcattgagcgtcagcggctgcatatcccgcaggcagatcgccgtcaggcaatttgaaattccccagaagctcgttgtcagcagcagcatcagatccgctctgcgctgatgttccattcggtttccttctttctctcaaattctctctcatttaccaaacgggcgcctcacggcgtccgtttgattagttgattttaccatgtctattaggttttcgcaagtggcatgagaaaagaaaatgtaagaatatagatgcgcacgcttcgctctttttattcaccaaaaccgcggagagcggcgggaaaacccgcctctctccgctccgcatcagatcttctgcaccggcggcaaaaagccgcacctcgcattctcctctgtgtcgtccgactcgtcgtaggcgtcgtacggcgcggacaggtcgtgcactttcttcttgaacggcgagcagagcttatcgcggtgcgcaaaggcgaagtagagatcgtccgtccagccggtgtggcctgtcaggatgacgggccgcaggccgcgcgtgcgaagcttctgctccaactccgccagtgacttgactgcgagcttgttgctctccgccagcgcggaaatgaagctgtagccgccgtccgcgccgaaccagatcgtatcgcccgtgaagaggtacctgtcgtcaatgaggtacaccatatgcccccacgtgtggccagggaccaaaaagcattcgatcttgatgccgtcgatctcgaagacctctccgtcgcgcagcagcaccttttcgttgttaatggtcacctgcggcagcttgtagaggtggtagatcaccttgcggcgcacctcgccggtgagatatttgttctcgatctcaccgatatagagcttcgcgtcccggaaaaggccggggctgtccgcctccaccgcgccgacatggtcggtgtcctgatgggtgatgaggatatggcggatggacttcgggtcgatgccgagccagcccatcttttccccaagacggtcatagttgtagcccgcgtcgaccatgatggtcgtctcgcccttgcggtagaaaaagatgttcgccacccattcgcgcacgcaggcgacatgttcatcgacccagccggtgttcagcggcttgaagatctccttgccgcggtacatcttgctcatttcctttttctgaaattcggtagcttgcttggacacggcagatttctccctgttttgatttttagttcaacatctctaacttcaagtgataaaaagccgcacgcggcgttcacgcccgcggaaacagctcttcgcacgcaccgcgcgtcagcgtttcgagcacctgcggatacagcgcgccgatctgctcctgatgcgacaccgtgaggatcagaccgcggatcgtcgcagcggcgagcgcgataccgccgcgcggggtcaggccgctctcttccaaaaggtcgcggatatgtacctcgtcgctgtggtagtgctcggttttcacctgtgcggggatgcggcgcagcagataggccgagtcctcctcgatgaatttcatcgcaccgatctcggataagcggctgcaggccgtgagcagcacgttcgcgatgcgctcgtcgggcggcaggtctttgccctcctccagcgcctgctcggccacctgatagacctcgctgtggatatcctccagcacctcgaaaaacagcagttctttggacgcaaagtatttatagaacagtcccttcgagatgcccgccgcctcggtaagctgctcgaccgaggtcttgcgcagccccagcgtgacggcgcagcggcgcgcctctcgcagcagcgtttcgcggatggccgcgttttcttctgcggaaaaggccattggcattccctcctttgttgaaatttttgaccagcttggtttatcggtcatattgtagcatatccatcgccgtctggcaagaaaaaaaggatcccattcctttatcaatactgaataaaaccacagcttttatcaatgcactgcgttatatatgtgcagcacagccgcgaggccggtatggatgcgcacatctccaagcccttcgacgtcaagacgctccgcatctgcctgcggcggctgaaggacaagcagtaaacgcaaaaaagaggacattccgattcttttcggaatgtcctcttcccttttcttgtcacagcaggccgtagacctcgtgcagatccctgatctcgtggtcgatgcggtaaccctccggcgctttgattccctcgggattgtaccagcaggtcacgatgcccgcgttgtcgccgccgcggatatcgctcgtgagcgaatcgccgacgatcatcgtctcgctcttctcgaccggtccgatggcggcgaagacctgatcgaaaaactcctttttcggcttctccgcgccaagctgctcggagaggaacacgccgtccatcagcgcaccgaggccggagcgcgtcagcttcttcgtctgcgcgacgaccgtaccgttcgagacgacgcactggcgcaccttgccgcgcagcgacttgacgatctcatagctgtcgtcgcggtagacgatggtgtcgcccagacgcagctggtaggcgtcgttgaacttcggcgcgagggaaacgtcgatgccctcctccgcgaaaaactcctcaaagcggccgacgagcacctgcggcttcgtgatctcgccgcgctcgagcttttcccagtatttcatattcaggacggaatagcgcgcgacctgttcttccgagcattcgccaaggccgaactcaacaaaaaggctctggatggcggcgcgctcggcggcatcaaagtctaaaagcgtgcggtccacatcccacaaaatcgttttgatcataagatatctccaaaaacagtcaaaattactctttttccgcgtgcgcggcgagaacatcataccacagcaggactacacccgcaacgccgattttccgcttgcgggaaagatcataccgtggtagaatagcggcaatcatttttgacagaaagggactgtttcctatgaatatcaccgtatatctcggtgcgagcagtggcaacgatccgacgcttgagacgtccgtgcgcgcactgggccgtctcatcggcaagagcggcaacgcccttgtctacggcgggtcgaaaaacggcctgatgggtgcgctcgctgaaagcgtgctgcgcgcgggcggcgaagtgaccggcgtggagccgcagtttttcatcgatgagggctaccagtatgacgagatcacgacactcatcgtcacgcgcgatatgaccgagcgcaagacgaagatgatcgagctcggcgacgcgttcattgccttccccggcggcacgggcacgctcgaagagatcagcgaggtcatgtcgaaggtgtcgctcaaacagctcgccgcgccgtgcatcctctataatctgaacggctattacgaccacctgaaggccctgctcgctcacatgatcgacatgggcctctccacgcccgagcggcaggagggcatctactttgccgataatctggacgaaatccgtacaatcctgaagatttgaggaaaagccgccttcggcggcttttctttttgtgcggcgcttgacaggcctccttcgctgcggtatgctaaaagaaacttaaagttactcactgtgctgcaacctaaagcgcgctttcatttcaggaggatttcatggtctacacagtcggcgagatggcgaaaaagctggacgtccccgcttccacgctgcgctattacgataaggagggtctgctgccctttgtggagcgctcgtccggcggcatccgcatgtttcaggagtcggacttcgagtggttacaggtcatcggctgcatgaaaaaggccggcatgtccatcagggacatccgccagtacatcgagcttgccctgcgcggcgacgacaccatcgacacgcgcctcaagatgttcacgcaccagcgcgacgtgctgctcgcgcagatggaggagatgcgccacacgctcgagaccgtggagtacaaatgctggtattatgaaactgcaaaggccgcgggcacgatcgatgtcccaagggatatggcggacgaggacgtgcccgagcgcttccgcgccatccggcgcgaactcaagaggattccgcaggagtaaaggtaaactacttttctgccggcaagcaggaaaaggataagaataggaaagtaaactatggatcggatcaagaagaattttggctttggctgcatgcgcctgccgatgatcggcgaagaggtggatatcgagcagaccaagcagatggtggacgcgtttttagacgcgggcttcaactattttgacactgcgcacggctacatccagggcaagagcgaaaaggcgctcaagacctgcctgacaagccgctatccgcgcgaaaagtacatcctgaccgacaagctgacggcgaactatttcaagaccgaggcagacatccgcccgtttttcgagagccagctcgagatctgcggcgtcgagtatttcgacttctatctgatgcacgcgcagggtcttgtcaactatgaccacttcaaggagtgccgcgcgtatgagacggcgttcgagctcaaaaaagagggcaaaattcgccacgtcggcatttccttccacgaccgcgccgaggtgctcgagcgcattctgaccgagtatcccgagatcgaagttgtccagatccagttcaactacgtcgactacgacgatcccgcggtgcagagccgcaagtgctatgaggtctgccgcaaattcaataagcccgtcatcgtcatggagcccgtcaagggcggcaacctcgtgaacctgcctgagaacgcaaaggccgtgcttgaagacctgcacggcggcagccccgcgagctacgccatccgctttgtcgcgggcttccccggcatgatgatggtgctctccggcatgagcaacatggagcagatgcaggacaacatctcgttcatgcgggacttcaagcccctcgacgagaccgagcgcgccgcggtggaaaaggtgcaggagatcttccacagcaaggacctcatcccctgcacggcctgccgctactgcacggacggctgccccaagcacatctctatccctgacctcttcgccattatgaacaccaagcagattcaccacgactggaacgcggactgctactatgaagatgtccacaccgcgccgggccgcaaggcgtccgactgcttaaagtgcggcaagtgcgaaaaggtctgcccgcagcacctccccatccgcaaactgctcgagcaggtcgcggcagaatttgaaaaggcccccgcagcgaattaagctcaaaatgtaaaatgcagcaccggcgagagaaagatggaaaactctcgccggtgctgtttgcttgcactgatccttgatctttatcataacaccgcgccgcggtggttttcttggtctgccgctttggccgttcggcgaggcggacagtggaccccagaattttttgtttgtcgccctttgttttaggctatggctgaagtataacgtggattctttaagcaagcctaaatttggtgtaaataaagtatgaacaattctcgtatcgcgcgggaaaaatataggtaaaaaagcggcgcattttgcgtaaatttccgtttcttccttgcaataactgctccttcggcgtataagaaagtaaattttgtcgatttcttaacaaatctgcggcgaaattcatacctgcggctcacctcgcacgcgatcttgccgcgcgctgctcctccacattccgaaagagagcggcggcaccatcggatcaagggagaaaatcatgcagaaaaaacgagtgctcagcctgattttagcgttgagctgcatggcggcgctgcttggcggctgtgccggcagtgacacaagtgacgacaatgccgcctccggcgagcatgaggtcatcaccatgaacgcgccttaccgcaatatgtctcagttctacaatctggtgcatgaaaaatatccggagatcaaccttgagatcatcccctacaacggggaaaacacctcttcctaatattgcgcgtttgccttcaccttgttggtcaggcgcgcataggactttttcccctgattgaacaccttgatgacctcaatgccgttgatatactcgatcatcgcgccgctcatcatcatttcctcggtcgccgtctatcagggcgaagccttcaccgccattgagacggcgcggctgctgcaaaactgcatgctcatcgccggtatcggcacgcttttgcagctctaccccatctggaagatcggctcaggtctgccggtcgtcatgggcatcagcttcacgttcctcgccgcctgtcttgcgacggcctcgcaggattacggcatcatgttcggcgtgatctttgtcggcggctgctttgaaggcgtgctgggcctaacggccaagtactggcgcaagatcatctcccccatcgtctcggcctgcgtggtcgtctcgatcggtctgagcattctgaatgccggcgtttcgtcgttcggctcttcgtcggcgtatccgctcggctcgtggcagaatcttctcgtcgccaccatcacgcttgcctccgcgctctctggcggcgtattcggctgctcgcccatcacgtcgttcagccagaacgtcggcctcatttcgatgacccatgtcgtcaaccgctttacgatcatgttcggcgcgctggcgatgatcctcggcggtctgttcccgcccatcggcgcgttcttcacgacgctgcccgactgtgtgctcggcggctgcacggtcatcatgttcggctctattatgatgtccggcgtgcgcatgatgcacgacgcaggcatggaccagcgcaacacgctcatcgccgcaacctccatctgcctcggcgtcggcgtcacgcaggtcgacggctttttcaacgagctgccgagctttatcggcgacatttttcgcgggcaatatggtcgcgggcgtgttcgtcgtgggcctgatcctcgatctgtgtctgccgcgcgaccccagccactataccagcatgtgacccaaatttttggcatacaaaaaggctcctgaggaaattcctcaggagccttttttatatacaactcagtgcaccggcgtcagcacgccgaagcgggccttgatgacatggcgcgggcagaccaccgcgcacgccccgcagctcaggcagcgcgccgcgtcgatcacagcgtggaactgctcaatatgaatggcgtctgcgggacaattcttcacgcacaggccacagccgatgcagccgtacgcgcacaggagcgcgccgtcctcatccttttttgcgcggcagccgccgctgcaatagaccgtcgccacgcggggcgggaatttgcgtttgattgccattgcgtctcctcccctgttccattctgatattgccgccctccgcggcacaaaatttctctgcttacgcccgatagccgatcgccgttgagatctgcgccgccgcggcgcaggtcaagtcaatatcgcgctggaaatccggcgaacgcacactgtcgaacatgccgacaacgccgacggcgtagcgcaccgcgccggagctgtcgcgcacgggcgcggagggcgagcacaggccgaagcggtactcgccctcctccacggcatagccgttttcacgcgcggcctgtatcacacggaagagctcctcctacgtgacgagggtctagggcgtatagggctccaatgtgcggcgcgacaggacgcgcttcgcctcgtggccggccatcgcggatagaaacaccttgccctgcgaggtgcagtgcagcggcagacgcgtcccgacctccgacacgacgcgcagtcccgcgcgggactgcacctgttcgatggtgatgacctctgagcgattcaacatcgagaggaacaccgactgccctgtcacgcttgccaaatgctgcaaatgcggctttgccaggtctgaaacgctccagcttgcgcccacggcgtagccgtactcaaaaagctgcacgccgaggcagtagcgcccgtcgctctgctggtccacgaccgcgctctcgcgcatcgtgctcaaaaggccgtggatcgtgctcttcggccagccggtctgctcgttcagcgcggccagcgtgagcggctggtgcgcctccatcagcaggccgagcagccgcagcgccttggcaacagactgtacgggaccgttttcatggaacatcgccttccctcctctcgattcgtcattgccggatgagccgccgtcattttcttgatgacagtatcgcgcaggttcaaacaaaagaaaagggcaatttccgcaaatcgcacaaattccatcagctagactatcgattttccgtcaaaaaagcccgccgtcgcatctgcgacggcgggccttgcattttcagttacttctcttcgccgtggatgatatcgccgaagtaggtgccgcggacgatctcctccacgtcctctccctcgtgtcccctgaggatctcaaggagcttgctgtgcgcggcgacgagctcgtcgcctctgccgctcgtgatcatcgtgctgacggtctcgtagcggacggcgtgcgtcagcgtgcgcacgacgcggctgatcttgtcggccagcggatttttgcccatctgcgagatcaggtcgtggaactcgttgtccacggcgaagaagcggtcgacctcgttgtcaccgctgtggacgatctctttcatctgttcgagcatcgcctcgagcgcatggccatcctcctcgtcatacttctggctggcaaggcgcatgatgccggtctcgaccatctcacgcagctccatcagattgtcgaaggaatcctgattcaggatgatgccgtagatcatcggatcgatcatgctctcctggaagccgctgcaaacaaaggtcccctctgaacgcttgctctccagcacgccgaggtaggagaggattttgatggcctcacgtacggaactgcgggcaacgcccatcgacgcggccagctccggctcgggcgggatgcggtcgccgggcttgagctctttattgcgcatggcgtctgtcaggcagttgatgacactctgcaccacagactcttttttcaaatttttcacatatccgggcgtatcgttcataattttctccttttatgcctgacaatatgattcccatgtataacataatacaaagttgaggtttcgtcaatgaaaaccgtctttcataaaagcggcgggcggcagatgtaccagtccgccgcccgctcattcaggaaggaatcaacggcaagctgccgttttttgcaggaattcatatgggcgcaggctgcgcgagccgctttgcgtcgtttgccgcggcacagcgccgcacggcattttttaccggccgaggtagatagactgcttggccagcacgagctggagcatcaggtcgttgcagggcgtgggaatgccgtgctcacggccgaggcggcagacagcgccggtgatgatacggatctcggtctcgcggtgatgcgtgacgtcctgcaccatggagctgatggtctcatcagtcatgcgagagacctcataggcgtgctccagctcggcgtcatggtcgagcgtgcagccgcaggcgttcgccacgacgatggcctcttctaccagcatgcgggccgcctcgtgggcgtactggttgccgttgacaaagccgttcttggtctcgagcagggcgctcatgccgttgatggcgacgttcgccagcagcttgtgccagatggcgttcatcacgttctcgtggacctggacctcaagaccggcggcgcgcaggccctcggccatttcctcgaccttggccatgggggccttcagcgagccaaggttcgtcacaccggtaccggtgtgcttaacgtggccggggccgacgggcgtggagccgaacgccgtgttgccgatgatgatctgctcttcgggcacgaccttggcgatctcatcgtagttgccaaggccgttctgcaggcagaggaccatggtgtgcttgtcgatcatcggcagcgcattgcgcacagccgcttcaagatactgatagtggacgaacacgatcagaagatccacaacgccgatctccttggggtcggtcgtcgccatggcgggatggaagacgacggtctcgccggtgcccgtgccgggcacgcactcgtcgacgagaatgccgtttttcttgatggactcgatgaccggagcataggtatccagcacgcagacctcatgctcgcgggacagatagcttgcatagcagctgccgatcgcgccgcagccgacaaatccgattttcatggtaaataacctcctgtatcagataattctatgatgaatgttatttaactggtttttctcagcccttgacgagcgtctcggcgatctcggtgatgttctcgaccgtcacgccgttcatggcgagcaggcgctcatagggcgcggactggccgaactggtcctgaatgccgactctcttgacgatgcccttgcccatctcggcggcgacctcgcacacggcggagccgagaccgttgaggatgttgtggtcctcgaccgtgatgatcttgccgacctcgttgatcgcggcagtcacagcctccacgtcgagtggcttgatggtgtgcatgtcgagcacgcgggcggaaatgcccttgccctcgagcaccttggcggcctcgatcgcgagacggacggtatcgccgttggcgatgataacgacgtccttgccgtcctggatctggtgggccttgccgatggtgaactccacatcctcgtcgtagatctgggggatggcgtcacgggtgaagcgcagatacacggggccgtagacctcagcggcctgacggacgagcttgcgggcggagttgtagtccgcgggcatgatgacggtcatgttggggatggtgcgcagaacgcccatatcctcaatggcctgatgggaagcgccgtcgttggcgggggtcacgccgccgtgggaacaggcgatctttacgttcaggttgggatagcagatctcctggcggatcatttcgcacatacggagggaaccgaacacggcataggtgacgacaaaggggatcttgccgcaggtggcaaggcccgcggcaacgcccgcgccgttctgctcggcgatgccgacgttgatgtactggtccggcagctccttgcggaattcgccggtcttgcagctcttgccgatatcaatatcaacgaccagaatgtcgggattctccttgccgagcgcgacgatctccttgccgaagccctcgcgagtggcgatcatttttttctcactcattgctcttccctcctcgcttaatcgatcagctgggccttgagctcagccatggcctgcgcgtactgctcatcattcggggcaacgccgtgccagccgcactggttttccatgaaggaaacgcccttgcccttgacggtgtgggcatacaggcacttgggcttgccgttcttagaggcgtagcacttgtcgatgcacgcgacgatctcttccatgctatggccgtcgagctcgagcgtctcccagccgaaggccttgaacttttcgcccaggtcaccgttgggcatgatctcgtcgcaggtgccgtcgagctgcaggttgttgtagtcgacaaagacgatcaggttgtcgaggccgtacttgtgtgccgtgttggcagcctcccagatctcgccctcctgcgcttcgccgtcgccgacgacgcagaagaccttgtagtccttgtggtccatcttgcccgccatagccatgccgaccgcgcaggcgagaccctgaccgagagagccggtggagatatcaatgccggggcagcggttcatcgaggggtggccctgaagcatcgagccctccttgcgcagggtgtcgagctcagactctgggaagaaaccgacgcttgccaggcacgcatactgaatggggcacacatggcccttggagagcaccatgcggtcgcggtccggccagcggggatccttcgggtcgatgttcatgtacttaaaatagcaggcagtgacaaagtccgccgcggaaagcgagccgcccggatgaccggactgcgccttgtagatcatgtcaatgaccttcatgcgcatctgcgtggcggtgtttttcagttccttgatggaaatatccttcacaaaaatcacctcatgaataagtttggttctgtggtttctttatactatgtcggacaaatgacaattacagtatagcgctttgtctgacaaagtcaagtcctttttaaaattttcttttttatgattttttctcccgtttttctgccgttttgtacaaaaaagctccggacatagcggtccgaagcttttttgcatagagagatcaacccacgaacatcaaagagagatcgggaatatatgtgacgaggaggagcaccgcaagttctgcaagcaggcatgggatgatgccctttgtgatctcttcgatcttgatatcgccaatgccgcacgcgacatacaggttgacaccgacaggcggggtgaacaggccgatggccaggttcacgatcattacggtgccgaggtggatggggtcaatgcccagctgcagcgcgaccggcgcaaacagcggcgtgaagatgtagagcgcggaggtggaatcgaggaagcagcccgcgatcagcagcacgatgttgacgatgatgaagaaaatgacggtgctgccgccggtgatgttcagcatgaagtccttgatggcaaggtcaagtcttgcgcgggtcagaacatagccgaacagcgtcgcgcccatggtgatgaacatgacggtggcggtagtggagcaggaatcgacgaggatgtccttcatcttcttgaagtcaatctcatggtagatgaacacacccacgatcaggccgtagaacacggagaccgcggcggcttccgtcggggtgaacacgctgccgtagataccgccgaggatgatgacgggcatcagaaggccccagaaggcgtccttgaacgcctgcaggcgctccttgccgctggccttgggcaggaccttaaggtccatcttgcggcccatgagcatggcggccacgatcaggccgagacccatcagaaggccgggtacaacaccggcgacgaacagatccgtgatggaggcgtccgcgatggagccgtacacaacgaaggtgatggacggcgggatgacgacgccgatcgcgccgcccgcggccatcagcgcgcaggaaaacgaagcgggatagccggccttgacgagcgccgggatcatgatgaggcccagagccgcgaccgttgccggacccgaaccggaaatagcagcgaagaagcaggagacgaccacgcagaccatcgccatgccgccgcggatgtgaccgaggcacttttccgccagattgatgaggcggccggagataccggccttctccatcacgttgccggacaggatgaaaaatgggatggccagcaggacaaacttactgctcgccgaagagcacagacggggcagaacgctcatgatggcctcgagcggcttgcctgcaccctgcacaaggatcgcgctcacgctggacataccgaggcagaccgcgataggtgcgccgagcgccagcagcaatacaaaaacacccagtaaaacgatacctaccatttatttgtcctcctctgccttgaattccttatacatctgcaccatggtctgcaaaaaagccatcatggcaaacgctgcgccgacggggacaaacgagccgtagatccactcgggccactgcatcgtagcggtctcttgcccgagccggtattggctgatgaccatctgaatgccgaaaatgacgatcagcaggcaaaacagcgcggagaccgcatacatcagcagcccgatgatgagccgcgcacgagggctgacgtgatcggtgacaatagacaggcccagatgcgccttgcggcgggcggcaatggccgtgcccataaagctcatcagaacgaacagataggtggacatctcatccgagactgccatagagtgcttaaacgcaaaacgggagactacattgacaaaaaccaatattgccataacggaaacgcagacgcaggaaacgaatttctcaattttctcaaacatactcgtccctccttagttgatcccgaaagcggcgcaggcatcctcgccgtaatcagcctttaactccgccgtaagctctgccaccgcgtccttgaatgcctgaagctgttcctcggtcagaatatcgacctgcattccttcatcaataaagccctggatcagggaatcctcctctgcctccagacggtcacggccccactcgcaggactccgtggcgcactgctggagaagctctttcgtgttgtcctccaggttctcccagacctttgtgttggcgacgaagaggtcgttttcgtagctgtagttccagatggtcatgtacttctggatctcatccatcttggcagacttcgtcacggagcaaccattctcctgtccgtcaatggttctctgctggatcgcggtaaacacctcgctccagctcatggcgaccgggctggcccccagcgcgttgaatacacccatatacaccgccgaaccgggaacacggatcttgagatccttcagatcctccggtttggtgaccggatgcttactgttggtaagctgacggaagccattgtggaatgagccgagataagtgatacccttggcctcaagaagctccgcgtagtattcgccgccggttgagtcgatcacctcacgggcctgctgataagaggtaaacgaccatggcagggtcgcgaccgagagcttcggctccagatttgcgagcacgcacgttgcgtaagcacccagatccgagccacccacggcgatgtactcaacacccttggtgctgttgccacccgccagtgtatcgtttgagaacacgtcgatcacgatgttcccgcccgagcgctcagacacaaggtcggcaaagtgatgcgctaccagcgagtcgatctgcgtatccgttccgttgactgccatggagaggttgatcttttgatattcgccgctctccccatcgtttgttcctttactgccacagccggccaggcttgtgatcagcatggcccctaccagcgcagctatgattagtctcccatgtttcatacacagttacctccagcgatcgttaagtctttgtcatttgtcctatgtctgataaagattgaggtcattatatctatcaaaactactaaagtcaaggttcaattctatttctgtcgtttcagacaaaaagggcaaattattttattgatttggtcaattctgtgttaaaattgtgtcaatccgtcatttttttaacgatttggcggaaagatgtctttttgttgcaaaataccataaaagcccctccacctgtgcggtgaagaggctttttcccttttatgaaaatggcggtgcggccggttcgtcttgctttttcagcggagggcacaccctcccctgccgcagctttagctcttcgcttctgccggaacggcatctggatatttgatgagatcgtacatttttccgaattcaccgaggtcgcgcgttccggcgagctccatgccgagatgcacatacttgtcgcatttggacctggcgtccgtctctaagatcaccggcacacggaggcggtcgccctcggcaaaggcgatgtccatgacctttcgcatatagccctgcccctgatacttttcgcacacgcagaccatgccgacgaagatatagggcttcttttccttgtccatgcgctcctggagcgactttccgccctttttgatggccatggcgaaacgcatcaggcgcttcatgctcgaattgtgcagcattcccgtcgcgatcggccaaagggtcttgaagccgagcttttccttgggccgcttgtaggcgatgtaaccctcgccgcgctcgctcgtcgtgtgcaggaagccgccgtgcagcatcccgcgcacgtaggcacagatgtattgcgccgtcggctcctgaccgaaaaaggcgtagaccatgcccgtctcctccccgtagtcgtagtagccgaaggcgtggccgatcgaatagatggcgctctcattcatggatttgacgatcatgctgtccgttcctttctttttccgcgcttcccgcttcagttagagaagactaactcaatgactttgaaaaagctgccttggcagccttggcgcgaaatgatcttaatttgacccaaacggtttttcggtcacagtatagcatccatatctttcatttgcaaggcagttttctgttttcggcattttccatgcatgtctgccgcctttttcttccctgctgtgcgctgtttcttcgtccgatgcataggataaagcaccgatatcatgtcaggggggagacgtctatgaattactacacgggggcctgccgcgggaacggctgctgcccgtccgatccgtatagccatgtcacgatccaggggccgaccgcggtcccgtcggcccaaagggcgatcccggcccgcagaggcccattggtccccgaggcgagcgtggagaaaaaggcgaacagggcatccaaggcgagaaaggcgacaccggcgaaacgctggtcgtcaccgtcgcgtaggacaccccactgagctacaagctgcacttccaaaccagcgagcaggagttgacgacgcctaatctattcgcgccgttcaccgagtaccatgtcgacctctccgcggcagacagcacgctgaatattccgctcaaggacctgatttagacctatcagcgcgcgtcggccagcgcgctgcgcatcagcatcgtgccgaagaacaccgccgcgcccgttttggtcgacctgcgcagaacgaccatctacgacggcagcacgatcgagacacagacgctcagcggcagcagcatttccgcaagcattgcgatcgacggcaccgtgtacacaaactcgcaggagacgcacaacatgcgcatccgccagcaggatcccgtcacgaagctctggtcgatgtgtgagctcaattcgttcctttccgcgggcggcgcacgctgctccatccgcatccagtggagcgagtacgacgtggcctacgccgcgccgacggtgtaaccacaccgataccatataaagacaccgtccgcgttccggaaagatatccggaatgcgggcggtgttcactatttgatctgaattgtttctccgtcatacacgccttgcaggcattcgccgtttccgatgtggtaggcataaaagtccttcttcggacgagcataggcctccatgatcgccatgatgacgccgccgtggacgacgaatcccacgcgagagccgtccggcacatttttgatcgtctccgcaaacgcctcgcagcaacgcgttttgaagtccgttacgctctcaccctcggggatgggcgtcaggcacatcgcgtcgacccacgcctgataggcgaggtcgcccgaaagcttgtcggcggacttcccctcaaagcggccaaaatccgtctcaatcaagccgtccacgacggtatagtgcatcttcggaaaaagaatgtccgccgtctgccgcgtgcgcagcatggggctgacaaaaagccgatcgactgaaagtccccgcttttgcagcgctttgacctgtgcgatgcccgcctcgcacagcggctcgtccgtgcggccgatgtagcggcggcggaggttgccctctgtcgcgccgtggcggatgaagaaaatgtcgatcacagcagccctccgatccagacgccgatcaggccgcagagctcgcagagctgcaaaaagaagcccgacgtgtcccctgtcacgccgccaaactgtgccagcgcgaatctgcgatacttgagcgcggaaaccaccacaaacgccgccgccatcccgccagccgtgggagacatccagaccatccccgccgcggcggcaaggccggcgagcgtgagcgcgactgtcgccgtgcggcgctggacgccgcttgtgaaggtgcagagcatgccggactttcgcgcattcggcagattcaccgcgcacaggcccgacagcgcgcgagagagcacgaacagcgggcaaatcagcaaaatatgccccgcggcgaacacctcgtaggcaaagcccgcgtaggcgagcaggtacacgccgccgtaaatgaccgcgaacgcgccgcagttggcatccttcatgatcgcgagctttttctcgcacgtctggtgcgacgagagtgcgtccaccgtgtcgagataaccgtccatgtggatgccgcctgtcactaaaatcggcaggcacgccgcgattgccgcgaacagcacgccgctcatgcccgtcgcctgcgcaagtacagcccacagccagagcgccgcgccgcagagaacacccaccgcggggaaaaagcagatcgcatagcgcgtatttttttcgttccaatcaagctgcggaacgggcaccgcgctgtacgtcgacagcgcgatcaaaagtgattcaaataatctcatcgaggtctcccttttcggcaaacggcgcgccgtctttcattgcgaccgccgccgcggcgtggtcgtacagtctttgattcaggccgttcagcgcacggatgtaagccgccgtctcgccgtcgtagccgtcggcgcgcaggcctgtgatcgtcacggcgacgagcagacgacagcgcgagcacagcgcttcgatgtccgcgtacacgcttgctccatccccgccgcgctcaaacatcgcgtttgccagcagattcgacacatcctcaagcagcacgacgccgtccctttcgaccgccgccgcgccgacctgatatgggcattcgagcgtcgtaaattgcaggtcctttcgctgctcgcggtgcttttcgatgcgctgcaaattttcctccgagcaggggcgcatcgtggcgatgtaatagcgctcgcctgtcgtgcgcgcgacgatgcgctcggcataacggctcttgccgctgccgtttgcaccggagatcatgatcagcgttcccatgcgcgttcccttctctcagggcgtgaactggccgccccggcgaatttcgtccagatagtcgtcgttgatgcccgcctcgtcaaaggtcgccatgtcgttgatgacagcgcacgcagcgtcgagcacctgaaaggcgagcggacagccgctcccctcgcccaatcgcatgccgaggtcaaacagcgggcgcaggtccatcgcctccatcgcgaggcggtagccgatctcaaacgaggcgtggctcggcaccaggtagccgtgcacattcgggcacagcctgacggcgcacagcgccgccgcggcggaaatgaggccgtcgatgaccgccggccggcgtgccgccgccgcgcccaaaaatgcgccgcacatcgccgcgaggtcaaagccgccgaccttggaaaggacgccgacaacgtcgtccctgtccggccgatttacctcaatggcggtgtggatgaccgctttctttttgcgaaagctctcctccgtgataccgccgccgcggcccgtcacggcctcgacgtccgctcccagcagcacggccagcaccgccgaagaggtcgtcgtgttgccgatgcccatttcgccgacaccgatcacatccgcgtcgaccgtccttgcgatctctgcgccggtcaggatggcctgtaaggtttgctcccgcgtcatcgcggggccggtgcagatattctgcgtgccgtaggcgatcttgcggttcaaaacggtgctctcgtaaatatcggcattcacgccgacatcgcacacggtcaagccgcagccaaagtgctttgccagcaccgcagctcccgtcttgccccgcatcaggttaatggtctgctgcttcgtcacggactgcggcgcgctggaaacgccctcggccaccacgccgttgtccgcagcgaagacgagcagctgctttttattgagcgcattgtgcacccgccctgtgatccccgcaagctggatggagatctcttcgagccgcccgaggctgccggggggcttggcgagccgcgcctgatactcttccgccgccgtcatcgcgccgcgatcgagcggcgcgactgcgcgcacgagcgcgtccaattccttctgcatggctctcccctccttaaaattcgacgccgcgccgcgccgcgattcctcggtcaaacgggtgcttgcgctttcgcatctccgtcacatagtcggcagcgtccagtaaatgctgcgacggatctcgccccgtcagcacgacttcaagcgcttttggtctgccgcgcagaaagtcgatcagcgttgcctcttcgatcaagccgtggttgcaggcggcgaccgcctcgtcgagcacgaacagatcgacgccgtccgcgctctttcgcatcacgtcttccagcagcgcggaataggccttttgcgccgccgctttcgtctgcccgtccatcgccttgaaaaagccgaagttctgcgtgcagcacgcgacctcaacattttgcagcgcgcgcaggacgttcagttccgacgagctgccgtccttcaaaaactgcgcaaacagcacgcgctttccagcgcccgccgcgcggacgctcagtccgaccgccgcggtcgtcttgcccttgccgtcgccgaagtacagatgaataagcccctgcatgctcacacctcccgattcaaaatgcggtagatgagcggcatatcgagccccgcgcgcaccgcgtctgccagcagatcatactgctgctccttgtaggccttcgcgtcaaaggtgccgagcgattcaaaggaaacgccctttttcgtgcacagcgcttttaagatcgtgtcggcgacctcttgttcatcgaaaataccgtggacatagctgccgtagacattgcccatgctgaagagcgcgccgcgcgcttcttcgctgcggcccatgtggatctcgtagcccgcgtagcgcttgccgttcagctcagagagcagtcccgcgacgccggagaagacgccgtttgtctgcgtctgcaccttttcgccctgaaatactgtttcgagcggcagaaggcccattccgtcgatctccgtcacgcccgcggcctcgacctgttcggggtcggaaatgtgccgccccagcatctgatagccgccgcagatgccgaaaaccagcgtgccgccgctcgcagccttttggatcgacgcctccagcccgctctggcggagccattggaggtcggcgatcgtactcttcgtaccgggaatcacgatcatatccggcgcgcgcaggtcccgcgcccgctccacatagcggagcgagacattctcgtagcgctcaaacggcgaaaaatccgtaaagttcgaaatgcgcggcaggcggatgaccgcaatgtcgatgagccgcggctccttatcccgcccgaagcgttcgctcaagctatcctcgtcatcgatgtcgacatggaggtatggcacaacgcccgccacgggtacgccgcagagctcctcaagcgttttgagccccggttccagaatggcgcggtcaccgcggaatttgttgacaacaacgcccttgatgcgccttctgtcctcttcactttgcagcgcgaccgtgccgtagagctgggcgaacacgccgccgtggtcgatgtcgcccaccagcagcaccggcgcatccaccatgcgggcaagacccatgttgacgatgtcgttttcctgcaaattgatttccgcggggctgcccgcgccctcgatgacgatgatgtcgtactcgcgtgccaagctctcataggcctccatcaccgaggggataaagtcgcgctttctgcgatagtattccatcgcgggcatattgccctgtacgcgtccgttcacgatgacctgactgccgacgtccgtcgtcggcttcagtaaaatcggattcatgcgcacatccggctcgatgcccgcggcctcagcctgcaccacctgcgcgcgccccatctcgccgccatctttcgtgatgaacgagttgagcgccatattctggctcttgaacggggcaacgcgatagccgtcctgcttcaaaacgcggcagagccccgcggccagcagactcttgcccgcgttggacatcgtcccctggatcatgatagtttttgccatgcgctcactcctttcccacgcttctgattgccgcgataagctgttcgttttcctcgtactgccggaccgcgacgcgataccagccggatgtcaggccctcgaaatttgcgcagtcgcggatcgcgacgccgcgcgctcgcagctgttccgtcaagcccacatcgccacggaataagatgtaattcacctgcgatgggcacacccaaaagccgaatttcctcagtttttcctcgagccacgggcgctccgcgcggatgatggttcggtttttctccagaaactccgcatcgcccagcgcagcgacgcccgccgcctgtgcaagcgtcgagacattccacggcggcaccgccgccgacatcttccgcagcaatgcctcgtccgcgctcaggccatatcccagccgcagccccgccatgccaaagctcttcgtaaaggccttgaggataaaaagctgcgggaagtcagatagggacggcgtcagatcaacgccgccgtccgacaggctcaaaaagcactcgtcgacaaaaagcgcgatatttttctcgcggcagatgcgcagaatttcttccagcaaatcgtccgcaatgagccgtcccgtcgggttgttcgggttgcagaggaacagcgcgtcgatcttttcgcgcgcaagaaacggcaaaaagttctcccgcaagtcaaagttttcctcttgcttgagcgcaaagcgcatgacctcgcagcctgtccgccgcaaggcaagcgaatactccgaaaacgtcggtgcgagctccatcgcgcgcttgggccgcacggccccgcagtaggcgtagatgagctcggacgcgccattgccgcagaggacaaaattcttcggcaccccctcatattccgagatcgtctgtacgagtgtccggcagtaggggtctgggtagcggtagagctcgggcagcgcgcgttcgatcgcgtcggtcacgcttctcggcgtgccgagcgggctcacattcgccgaaaagtcgagcgcaatgccgccgtagatatctccgccgtggcggttttccgtttgataaagcattctcttccctcacagcgaaaaaatcagcagccggaccgcgcagccaagcagcagcgccagaagcgtcgtgccgtacatcagccggcaggcgcgcgggatatcctcatgctcgatctgccgcaatgcgtcgccgatgtactcctttttgtgcagcacgccgtggtaccacgcgtcgcccgcgaggcgcacatccaaaagtcccgcgcagaccgactccgtctgcgcggagttcgggctcgcgtgcttgtagcggtcgcggcggaatatcttccagccgtttttcacgtccatgcgcagaagtccgcccgccgcgagcatcagcaatgcagagatgcgcgcaggcagatagttcgcaatatcatccgccttcgcaggcataaggccgatgtccttatacggcggctcgacgtagccgagcatcgagtccatcgtattcacagccttgtagaaaaagcccagcggcgcgccgccgatggcaaggtacagcagcggtgcgaccacgccgtctgacgtgttctccgccacggtctcgaccgcggcgcgcgtcacgcccgcatcgtcgagcgccgccgtgtcgcgtcccacgatcatcgaaacggcgcggcgcgcggattcgatgctgccgtgctcgagttcgtgatacaccttcatgctctcatcccgcagcgactttgccgccaagatctgccagcacatgacgctctcgaccgcgaggcgcagccacggactcactctgccgcacaaacacagaagcagcgcgggcaccgccgccgcgagaaacgagacgatcccccacagcaccgcgcccgccgcgcgctcgccgcgcggcgttttggggaaaatcctccgcaggacgcactccagcgcgctaatcgtcttcccgatcagcacgaccggatgcggcaggctgtgcggatcgcccagaatgcagtcgatgccaaagccgatgagaagcggcaaaacggggcaaatcatggtttctcctccgactgcatcgtgaagatatacacggggttctgccccgtcatcaggtgatacggccccgcctttttgccgcgggcgatctggacggagacgacctccgcctcggtaaaggcaaaatccttcatgcacgccgtcagctcggcgatgctctcaagcgagacggccgtcgccacgatgcggacgtgcggatttttggcaagcagcatcgacagaatatcacgcaggttgcccgcgctgccgccaataaagacgtgcgtcggtgcaggcagatcgcggcacgcctccggcgcagtgccggaaacgaccgtcaggttctccacatggaacgccgcttgattctttttcaacagctcgaccgcgtcgtctctgcgctcaacggcgtagacatgaccgtgcttcgcctgaagcgccatctcgatggcgaccgaacccgttcccgcgccgatatcatagcagacggcgcgctcggtcaggcggagcttcgagagcgcgacggcgcgcacctcgctcttggtcatcggcacaacgccgccctcgcccgcgcctcgcaaaaacacctcgtccggcagtccgtgcgtcacgatggcatcgggatggtcgttttcgatcagcacggcgctcaagggcgcaaaggccttactttgcagctcctccgccgtaccggtggtgacggtctcgtcctcgtagcttaaacgttcgccgacgctcaccgtcacggtgctgaggccgttttccgccagcgttcggcacaggccgttcacgccattctcgccgccgacgagcgcgaaaacgcgcgcgtgcgcgcgcacgtctgccgtgatgtcgtgcgcgcggccatgcaggctgacgacatgaacgtcctcataggacgtttgcagctttgcacagaggtaggaaagcgagctcaggcccggcagcacgctgacctcgcagtcagaaagcagcggcagcagcttcctcgtgccgctgaaaaagcccgtgtcgcccgacatcacgaccgcgctttgccggtattcgcagtgcgcgtgaatgaaatccgcgatctcctgtggtgcgatggcggcataagtcttctgcccgccgcgcgcggcggcatccagcatccgtctcgcgccgatgaggcagtccgcctcttcgatcgcgcggcgcgcctcctgcgtcatcgcatccctgctgcccggcccgataccgacgatcttcacactctgcgcgaatcggaaaccaaagcggcactccaagctgtccaacacctgcgaaaaggacttcccctcccgctgctttggccgtccgatcacgagcacatttgccccggcctttcgcgccgcggcgaccttggcggcaaagccgcccgcctcgccgccgtccttcgtcacgagccacttagccgacacggcgcgcagcatggccgtgtccatctcctcggaaaacggcccctgcatcgctaaaatgtgcgacggctgcacgcccgcctcgcgacagagcgcgagcgacgcgtccagcggcagcacgcgcgcataggctctatctgtaaagtcttttaccttgctatacgttttcagatccttgctgccggtcgtcagcaggatatttccgtccgtcttcgacaggaacagcgctgctgcttccgcattcaacacgcaagtaaagtcagataccttgtcagactcctcgcgcagaaggcgcagatattctgtccctgtctccgcgcaggcgcgcgcagcgctctcggtgatcgatgccgcgtaggggtgcgtcgcgtcgatcaccaaatcaaatttcgtgtcagaaagcatttgaatgatcccgtccaccgggatacgtcccgagcgcaccgtcacgttgcccccttcgggcaggagcgtttcaccgtattccgttgctacgcaggccgtgacggagaccggctgggtgctcaaaagctccacgagtcggcgcgcctccgtcgtgcctgcgaaaatgcagatcttacacatttttgtaccctcgcggcgtgatgagccgccccgcaatttccttcgttgatacgttgccgacgatcaccgtgcagaacatatcgacctctgcctctctgagctccccgagcgtcaaggtgcgccagctttcccccgcgcggccgatgttgcgcgcgatgccgcagaggcggctgtccggcaggtcgcgcagcaggatatcacacgcacgcttcaaatgtgcgggccgtgaacggctcgcgggattgtaaagggcgatggtcaggtcggcctttgccgcgtgcgtcaggcgcttttcgatggtctcccacggcgtcaggcgatcgctcaggctgatgacggcaaagtcgtgcgtcagcggcgcgcccaaaagcgccgcggcgctgcatgccgccgtcaggccggggacgacctcgatctcaggctcttcgctctcgccgcgcagctcgtacacgagcgccgccatgccgtaaatgccgctgtcgcccgagcagaccatcgccgcggtcttgcccgcgcgcgcaagttcgagcgcgagcgcgcagcgctttgcctcctgcgtcatgggcgtttcataaaacgccttgtccggatagcgctccttcacaaggtcaacataaactccgtagccgacgatggcgtcgcacgattgcagcgcgcggtcggcgcggatcgtcatatcctcatagctgccggggccgatgcccaccacgatcactttacccaaaggaaacctcccaatgctccgccgccacggcgacggtcacgccgtccaccgcagtctttttcaccaataatttctccgcgccgcgcatcgccgcgcgctcgcagacgttgccgacgcccgtcatctcctgcacgaagggggaatccgtaaattcgcccggtacgctgcgcaattcctctgccgtgtaaaataccgtcggccagttgtgcttcgcgcaggcggcgagaagccccgcctcttgctgctttaagtcaatggaatagacgccctcgaccgcgcttggatccagctgatgcgcagaaagcaccgccgcaacggcggcttcaatggtttcctgtgcagttttcctgcggcagccgatgccaacacgcaatactctcggcgtgaggcgcagcgtttcagcaaacggttctttcgtgcagtatccgatcacaattcccagcgcaccctgcgttttttccacaattccgccgggcaatgcacccttgattggaaaatcgctcacaagcggtacatcgcgctccagaatctccgctgcgaccttttttgcaagcagcatactcgaaatggcgcattcatttttcgccgcccaggcatcgacagcaaatttaccgttcacatccgtcgccgtcgtaatgaccgctgctgcgccgagcgcatccgccagtcggcgcgccaaatcattcgcgccgccgatgtgaccggagagcagcggaatgacaaactgcattttctcgtcgatgcagagcaccgcgggatcggtctttttgctcacaagatacggcgcgatctcacgcacggcgataccgcacgcgccgatgaaaatgagcgcatccatcgacgaaaagcgctcgcggtagatgtccttcgcaagcggcaggaagcccgcttcttccaatcgcggtaccgcgtagcagacggtttccgcctccgccagcaccgcgcgaacgcgccgcgctgccgcgcagccgccgtggctgtaggcaaaaattgcgatcttcatgccttccccttgcggtattccgtcgtaaagtcgggatggtagagcagcgagcgcagatactcgtcgccaaggcagccgcccaccacgatcaacgccgtctttttcatgccgttttccgtcaccgtcttatgcagcgtgcccaccgtgcagcggaagatcttctcctccggccatgtcgccttgtaaacgacagccgcgggcgttgtctctccatagccgcccgcaaggagctcgccttgcagcttttctgtgagtgaggtgctcaagaacagcaccatcgtcgcctgatgcgcggccaagctgcggatggactcacgctcgggtaccggcgtgcggcccgccgcgcgcgtaatgatgaccgtctggctcacgttcggcagcgtgtattccgcccgcagcgccgccgccgcgccgcagaacgagctgacgccggggcagacatcaaagtcgatgccgcgctctgtgagcgcgtcgaactgctcgcgcaccgcgccgtaaatgctcgggtcgcccgtgtgcaatcgcacggtggtctttccctcgcgctccgcccgctcgatgagggcgatgacctcttcaagcgtcagcttcgcgctgtcgtgaacctcgcagcccggtttcgtgagtgtaagcagctcgggattcaccagcgaacccgcgtagatcaccacatctgcttcgccaagaagccttgcgccccgcagcgtgatgagatcaggcgcgccgcttccggcgccaacaaaatgtaccacgttcagccctccctgatctgttcgagcagttcctccgcgccttccgtttcgcagaggaaaccgtattcttttgaaaataagattgcgccgctctggagttcgccgctcttatagccgagcatcgtgccgatgcgctgtcccagacgcacgaggaaggcatccttcagcccctcttcgtccaggatgcgcagcgcgtcgtcgcaggtggcgcagtgcagaatttcctccgtgcgttctgcgcgcaggcccagcgccgcgctgtgcgaggcgatgatctccatgcggcagtcgccgaatttcgagtgcgtgttccacatgccgcccgcgagcttaacgaacttaccaatgtgcccgatgagcagcgtgccgtgaaaaccgaattccttgcagaattccaggctgtcaccgatgaagttcgacgtcagcaccgccgtcttcgggtcaagcccgataaaatcgcggatgtagtccgcgccgtagttgccgggcgcaaggaggatgtagtccgcgccgttctcgcgccgctgccgcagttccacgcggatggtgtcaagcaatgcctgctcgctcatcggctcgacgatgccggtcgtgcccagaatggagatgccgccctcaatgccgaggcgcgggttgaaggtctttttcgcgagcgcctcgccctccggcgcggagatcgtcacgtcaatgccgccgtcgtatccgacgagcatgcagacctcgcgcacgttctcttcgatcatctgccgcggcacagagttgatggccgcctcgcccacaggctggtcgagccccggcttcgtcacgcggccgacgccctcgccgccgtcgatggtcacgccgggcgtggccgattttttcactgcggcaaaaatgagcgtaccgcgcgtcacgtcggggtcgtcaccgctgtccttttggatggcgcagcgcacctcgtccgcggaccgctgaatgtccagcacgtctaaattgagctcgatgcctttcggcgtttgcaggcggatcgtctctttcttcctgtccgtcagcagcatccacgccgcggccttggccgctgccgcagcgcacgagccggttgtgtagccgaggcgcaggcgcttaccgtcctttacgagatattcttccatctttttaccgcctgatctgatagagcagggcgttgcagatggctgcggccacgttgctgccgcccttgcgtccgcgcgcgacgatgtacggcgcgcgcgccttttcgatgatgcgctccttgctcatctccacattcacaaagcccaccggcacgccgatgatgagcgcgggggcggctttttcctcttccatcagctgctctaacgacagcagcgccgtcggtgcgttgccgatggcgaagatgcagggcttttcaagcgccgccgccttttccatcgagacgaacgcccgcgtcacgccgcgcgatctcgcctcctgcgcgacgtcggggtcggacatgaagcagtgcacctcgccgccgaggctcgcgaggatcgtcttgttgatgcccgcctttgccatctgcgtgtcggtgacaatgtcgcagccgcctttcagcgcggcgatgcccttctgcaccgcatggtcggaaaacgtcagattgtcggcatagtcaaaatctgccgtcgtgtggatgacacgcttgatgacaagctcgttttcggggtcgagcacgcggtttcccagcagctccgtgatgatctcgaagctgcgctgttcaatttccatcggcttcatcggctcactcatagcggtgtttctcctttcggcaggcttcaacaaagcgcaccgcggcgctcaggtttgcgtaaaagtggaaatgcggatagcccgcgtagagcgtttcgcccgcatacgcgcagcgccagcttcttccgctcggcttttccgcgaggaagtcctcgcccggattttccgcatcccagcggtggaactcgtgcgcggggatctgctcgcccgcggcaaacagcatcgaatcccgctgcgccgtcaatgtcgcgtagccaaagcgcgtcagcttccccgcgtcgaagcagctgcccgataaaacacccgccatcgcatgtcccgcgatggactgcgtcaggtacataaagccgccgcactcggcgacgcagggcagtcccctttccaccgccgcgcggatagaagcgcgtatggcggcgtttgcctccaaccgctccgcgtagagctcgggatagccgccgccgaggtacaggccgtgcaggtcttccggtaagcgttcatccgacagcggactgaacggcacaagctccgcccctaagcggcgcaggagttccagactgtcttcatagtaaaagcaaaatgccctgtcgcgcgcgaggccgatgcgcacatgctcgcccgccaccggaatgtccggcggcgtgaatgtaagcggcggcgcgctcttcgcgatttgcagcagcgcgttcaaatcgatcgtctcctgcgccttagcggcgagacgctgcatcttttctttcagatcattcacctctgccgcggtgatgaggccaaggtgacggctctcgagcgagcagtcgggcatttgcggcagaaagccgcaggcgcgcacgccgaagcgttcttcgatcgcccgcgcaagcgtcggatagctcatcaccgtgcagccgttcaggatgacaccgcggatgcggttttccggcgcaaagtgcagaaaaccgtcgagcacggccagcaccgacagtcccgcgcccttcgcgttcagcacgagcacgacgggactttccgtccgctgcgcgacctcaaaggtgctcgcgcgcgaggaatcaaggccgatgccgtcgtaatagcccatcacgccctcgatgaccgtcacgtccttccctgcgccgttttgcgcgaggaggaagcgcagcgtgtcgtcgtcaaaaaagaaggggtccaaattgctgctcttcgcgccgatgatctcgcggtggaacatggggtcaatgtaatcgggaccgcacttcgccgcggcgacagaaacgccgccgtcgacaagcgcctgcaagatcgcgcaggtcaccgtcgtcttgccgcagccgctgttcgttccggcaatgagcaatctcggcgctgccttctgcatggtctcccctccttctgcaatctctataaagcgtttttacttgtatgcgctacggtacaaattccaaggtgctgaagcactcgtcgtacttcccgcgctccaagtgatagagctgcgcgatgtagtcgctcgtgaagatgtcctccggcgtgccgatgcggtcgatgcgttcgcccgcgacgcagatgactgtgtccgaaatgcgccgcgccagatcgagctcgtggagcgagagcagcacggcgaggtcgttttcgcgcaccatgcgcttgaggacggagagcagttccagtttgtagcggatgtccaaaaagctcgtcggctcgtcgagcacgataagctgcggctgctggcacagggcccttgcgagcagaatgcgctgccgctggccgtcgctgacggcggaaaacggcgcgtcggcgaacgcgagcgcgtccacctgagaaagcgactgctcgacgatcttcttatcttcgtcccgcaggacgccgagccttcccgtgtagggatagcggcccgagctgaccacatcgcggcaggtcatgagctccggttcgacgcgcgcggtcatcaagatcgccatgcgccgcgcgacgtcgttgcggctgcgcgagcgcatcgtctcgccatccagatacactgtgccggaaagctccggcagctgaccgatgacggttttcaggatcgtcgacttgcccgagccgttcggcccgatcagcgtaacgatctttcccctctgcacgcagagggacacatcctcgatgagggacttgccgtggtagccgacggataaattctttgtctccaaatagccgctcattcccgccccgcctttctgtgcaccatcatgtagatgacgaccggcgcgccgaacaccgccgtgaccgagctgatgctgacctccgtgggcgcaaaggccgtgcgcgcgatgagatcacacgcaaggcagaagatgcccccgccgaggaagctcgccgggatcagcaaaagcggctccgccgtcttgaaaagcgccttcatcaggtgcggcagcgcgatgccgacaaacgagatggggccggcgaaggccgtcacgcaggcagataacacgctggagagcagaatgagcgccgcgcggaacgccttgatcggcacgcccatgttgcgcgcgtagacctcgccgagctgataggcgcggatcggcttggagaggaaaaatgtcaaaatcagcgcgatcctgcacacccacgccatcgtcgtcacgttttcccacttcatgccggaaaacgagccgttcgaccagttgtgcaggttcacgatgtttgaatcgtccgcgaacgtgacgagaaaatccgtcagcgctgagcagatgtagccgatcatcacaccgcagacgacgagaaggctcatctgattgacccgctgcgaaatgagcaggatgaggcccatcgagagcatcgcgccgatgaacgccgcgccgatgagcagcgctgacgatgatctgacgccgcggctgaggaaaacgatcatcgcgatcgacaccgcgagcttcgcgcccgacgaaatgcccagcacgaacggccccgcgatgggattgtggaaaaacgtttgcagaagataccccgacacggacagcgcaccgcctaaaatgagcgccgacgccatgcgcggcaatctaatttgcataatgatctgcttttgcgtcaggtcatccccgccgccgagcagaatctgtcctatctgagacgcggagagctgcacgctgcccgcgaataaattccagatcaaaaaaacagccaaaaggacgagcaacagcaaaaagccgcaccacgtccgtgttctccgcttctgctccatgcccgtccctcctgtctgtttcaactttccagccaaaaattattgcagctttgtcaaaaaccggagcggtgtatccgccccgctcaaaacggtgtggagatccacgacgaggtcgctcaattcgagcgattcctgataaaagtccttcgtcaggcaccagacgtttccgtcctgcacggccttaaagtcgccaagcagcggttcgagcgataaaagctcgtcgatcgtcgtaagcccgccgtcgatgatgctgttgtagatgagcacatccgcgtcgtgcgcgccactgtaaaatgcctccatctggatggtgacggtggactgggcgttctcctcttccgtgttgtcaaaggagacgtattccccgcccgccatggcgatggatttagcgacatagtccgtcgactttcgcacattgaccgcgccgttgctcgtcacatagaagaatgtgacggtctttcccgtgggcgcagcgcccagaatgcctgaaacgctgtccattttctcctcaaacagcgccgcggcctcgttctccttgccgatgagcgcaccgtagagcttgacccactccatgcggccaaacggctcgctctcgtagctggacatttccacgagcacggggatgcccagcgtttcaaactgctcgatgacctcgggcgagtggtagatcatcgtgttttcaagcaccagatcgcagccctgcgacaagataagctcgtaatcaggctcggagtatttgcccgcgtaaagcatgtcacccgcgctcatggcctccttcgcctgctcgatataccagtccgactccttgcgtccactgaagcggatgcagtcgaccgcgtccagctgggcaaagctgtccatcgccgcgctggcgaccagataaatttcatcaagcggctgctgcaaaactgtcacgccctccggcacgccgccgggcacggccgcgccctccgccacgagcaggaattcctgatcctgcccgatggtaatgcacttgtactcgtcacccgcgtaggaaacggaaaactgcgcggcgtagtcaagcggcatggacttgtcaaacgacagagcatcccacgcgaccgccgcgtcttcgccgttcgaaccgtcctgcgctttgtccccgcaggcgcagagcgtcagcacggccaacagcgtgagaagcgcgcgcggcaggcgtctcatctgttcacctcagcgctcgaggcgtcgaacgtcagcgtgtagtcgatctcgtgcggcgtgctcatggcggtggtatcgccgaccacggcaagcggcgtatccagcgcggcgacggggatctcaaacgtcgagccgttctcggtcgagagcacgtcgcagcgctcgccgtccacgagcatatagtcatagtggctgctgctccagacgatggtggcggtcattttgccgtccgcgaccgtcagcgtacagggcgactggatgttcgccttgccgctgccgcccccgagcgtcacggcgatcgtgtaggtgccgtcggccagcgtctcggcgggcgcggcggcgtcgtcttccttcaaaacggcgttcgtcacggagaccttgtggtcgtaccacttgcccttcgtgccgatgatggcgacgtcgaactcctcgtccagcgcgggcacggggatatcaaagccattgacctcctcgctcaggccgtcggaataggtgacggtgtcggtcgtgggctgcaagagcgccgcgccgtccttccgcgcgtcctccgccgtgccgcagaagaggttcagaatgctcttggacggcaggctgatgtggatcgtcatctggccgttttcgaccgtcagcgtccccttgcccttgcatgcctcgttcacgtggaacatgctgctgtcggtgctgaaatccgcggtgtaaacgccgtcggcaagcgcgggctcggtgctcgtgtcctgcggatcgccgtccccgctcttctgcccgcagccgaaaagcagcgtgcagagcatcagcacggtcagtatcagtgtcagtgttcttttcattgggaagtacctccatctggaaaaggctccgaagcggtgcacaatcgcttcgaagcccctttttgatcctttttatgcgttcagggcgtcaatggcggcctgggtgtgggcgatgtacagcgcctggatgtcggcaatctcgccgaggcccgcgatctggcagtcgacggtgaagtcggcagcctcgaacatagtcttccaggaatcgtcgtcgctgccggccatgtcgttgttggcgtggtcacccgcaacgaccatcagcgggcgcaggatgacgttggtgtagcccgcggccttgacggcctcgatgacggactcgcaggaggtctcctccggctcgccatcgaccgtgccgatgaagacgttctcatagccaaggttctgcatctgggcgctcatctggctgtagctgaccttggcgacgtgtgcggtgccgtggcccatgaagacgaacgcggcgccagcttccttggcagcctcgagagagtcaaagccgcttgcctcgaccgcggcggcggtgatggccttggcgacaacttccttgtcggcgttgatgacggtcgcgtcgctgccgacctcgccgagcaggggctctgcgatggagacagattcgaaccggtcgcggtactcgtcgatggcagcacacatttcgtcatactccgcgccgtgcatcaggtgcgtcggctgcacgacgaggttcttgacgccgttggccacagcgcggtcgagcgcctgggtcatgttgtcgatcttctcgccgtcgcgggcctgaatgtggttgataatgatctgagccgtgaaagcgcggcggacggaccagtcaggataggcctcctgcagggcgtcctcgatgctcttgatatcgttgacgcggctgtcgttgtaggacgtgccgaaggagacgaccagaagctcgttctcgccgatgtcgtcccggttgcggggatcgtccttggacgcatcgcccgtgtcaaggccgaaatactcggggctcgcttcctcaccctcgaccatggccttctgctcgtcggtcagcgcgtcccaggcagccttggcagcctcgcactgcgcgtcggtctcatcggtgcgctcctgaacatagatcgcgtcaatgagcgcggcgacattgtcggccgcggccttgtcggcgccctccgtgttctgcgtgtcgtcggcagcgtcgtccttcttgctgccgcaggcggtcagcacgcccagcagcattacggctgtgagcaggattgcaagtgcttttttcatgtttctctttaccttcttcttcaaaaatcgttctgaaagaaatataaaagcggccatggtgacccacagccgctctcacgattccaaccagcaacaccgcgccgcgaaaaaatcgcgccgcgggtaaactcgcagaaatatcagcctgtgtgcagcgggcttgagatttcccgcagaggcaggtctcctgacttcgttcatcgcggcgctgcccttcccagtttcccagtggctacgcaggccgttcccgtacacagtgactgcatcgttccggattcgcaccggattctctattctccgcctcgcggcggcacctctgcgatacaattttacattttttcagacatagcagattatagcattccccgtcgaattgtcaatgaggaaagcgcggcgtcccttttaccttttgtgttgatggtaaaaactccgtcgatttcaccaaaagcgtgccccagatacctaatttccgagaggatacctatttttagggtatcctctttctggagtagtaccctgtaagtgcagtcgcaaaat

SEQ ID NO: 10200 - DNA, 773 bp, Unknown
  gut microbiota DNA sequence
ggcggccgcctgatgagcaagcgcggcatgggcaaggtgtccttctgcgacttgcaggataaaacgggccgcatccagatctacgcccgcaaggatgagatggatgaggacaactataaccgcttcaagaaatacgacatcggcgatatcgtgggcgtcaagggcgaggtgttccgcacccagcggggcgagatgtccgtccgcgcacgggagatcacgctgctgagcaagtccctgcgccccctgccggagaagttccacggcctgaccgataaggagatccgttaccgccagcggtacgtcgatctcatcatgaacccggagagcaagcggaacttcgagatccgcagcaggttcgtggcgtatctgcgccgctatctggacgatctgggctttatggaggtggagacgcctgttctcagccccattgccggcggcgccaacgctcgtccgtttatcacgcaccacaacgcgcaggacattgatatgtatatgcgcatcgccacggagctgcacctgaagcggctgatcgtaggcggcatggagcgggtgtacgaggtgggccgcatcttccgcaacgagggcatggacaccaagcacaacccggagttcaccacctgcgagctgtatcaggcatttaccaatctggacggcatgatggacattctggagggtatcctctccggcgcggccaaggagatcctgggcacctaccacgtccagtggctgggccacgagatcgacctgacccccagctggcagcgcgtgaccat

SEQ ID NO: 10201 - DNA, 6229 bp, Unknown
  gut microbiota DNA sequence
gaggcagtccgccgcggcgacggtcttgccgtcgtcgttgaggcgcatatagaacgccttgatctcctgcggatagtccgtgacgaacacggggcgcttgaagatctgctcggtcaggtaacgctcgtgctcggtttgaaggtcgatgccccactcgacggggtagtcgaacttctggccgctctcctttaagagcttgacggcctcggtatacgtcacgcggccaaagtcggaactctcgacgtgctggagacgctccagcagacccttgtcgacaaagctgttgaaaaacgcgagatcatccgggcagcgctccatcacgcggcgaatgatatgcttgaccattccctccatgacctcaaggtcgccgtcgaggtcgcagaacgccatctccggctcgatcatccagaactcggcggcgtggcgcgcggtgttggaattctcggcgcggaacgtggggccgaaggtgtaaacgtcgccgaacgccatagcgaagttctcggcgttgagctggccggagacggtcaggctcgtcttcttgccgaaaaagtccttgctgtaatcgaccttgccgtcgggcgttctcggcgggttctcaaggtcgagcgtcgtcacctggaacatttcgcccgcgccctcgcagtcagagccggtaatgatgggggtgttgacatagacgaagccgcggctctggaagaactcgtgcacggcgtaggccgccgcgcttctcacacggaaagccgcggagaagaggttcgtgcgcgggcgcagatgctgaatggtgcgcagatattcgacgctgtggcgctttttctgcaggggatagtcgggggaggacacgccctcgacctcgatctctgttgccttgacttcgagcggctgcttggcctcgggcgtcagcacgacggtgccgcgcacgatgagggccgcaccgacgttctgcgcggcgatctccttataattagaaagagaattcgcatccatcacgacctgcaaattgcggaagcacgagccgtcgttcagctcgatgaatccgaaggtcttcatatcgcggatggtcttcgcccagccgcatacggtgacgcttgcgccgccgtactgctctttgtcggcgaagagcgcggcaattctcactcgttccataataattttccttccttttgtgggttttcacgggataatagaggtattatatgccacttcccgtgcaaattcaagccccgctttgtattgacttttgacaagttgtatgttatcatacaaccttacctcaaaaggtaaacgtgaaactttcacctattactttacaggaggattttaactatgaacaagtatctggatatcgcccccgaggttgccgaggcccttgccgccggtaagcccgtcgtggcgctcgaatccaccatcatttcccacggcatgccctacccccagaacgtggagaccgcgctcaaggtcgagcagatcattcgcgacgcgggcgccgtgcccgcgaccatcgccatcatcggcggacgcctgaaggcgggcctttccaaggaagagatcgactacctcggccgcaccggcgcgggcatcccgaaggcttcccgccgcgacctgcccgtgctcgtcgcgcagggcaaggacggcgcttgcaccgtcaccaccacgatgatgatcgccgacatggcgggcatccgcgtgttcgccaccggcggcatcggcggcgtgcaccgcggcgcgcaggagacgttcgacatctccgctgacctcgaagagctggccaacacctccgtcatggtcgtgtgcgcgggcgcgaagtccatcctcgacctcggtctgacgctcgaatatctcgagacccacggcgtgaccgtcatcggctacggcacgagcgagctgcctgcgttctacacgcgcaagtccggctttggcgtcgactacgagctcgacacgccggagcagctggccaaggcgttccacgtcaagcgcgagctgggtctgcgcggcggcttactcgtcacgaacccgattcccgaagagtactccatggacaaggaagtcatcgacaaggccattgccgaggccgtcgaggacgcgaagaaggacggcatccacggcaaggccacgacgccgtatctgctcgccaagatcaaggacctgaccggcggcgacagcctggattccaacatccagctcgtgttcaacaacgcgcgcctcggcgcggcggcggctgtggagctcagcaagctcgaaaagtgagatattttgtcatctatctcgccgcgatcaatctaattactttctgcgtctacggcgcagacaagcgccgcgccaaaattcagggcgcgcggcgcgtgcccgaaaagactctatttgcactcgcgctgctgctcggcagcgcgggtgctcttttcgcaatgagggtctttcaccacaaaacgcggcactggtacttcaagttcggcattccggcaatcttacttgcgcagatcgctctgggggtgttcgtgtatgtgcggtttttcgcggcgtaaaaaatttttgggaaattttcgggttttgtgaaacaaaacagacgtttcttgcgtctaatcaatgaagcaaagggaaactgggcgaagagggaagataaagaatttatgaattttccattttcctgttcccttatttcccgcggcatggtaaaatgtatgtgtatgagaaaggctctgtgcgcgcggagccgacaacaacaaacacgaaaggatgaagatcacatgaaaaaatttctctccttgctattggctctgacattggtcctgagcctcgtcgtcgtgcctgcaagggcggcggacggtgaggaaagcagcgagcctgccgtcactgtcaccggtctgagcattgctgctggcaatgttgatcgaggcgttcagaaaacgttctcgctcgcaggaacgccgactgtcaccgacaataaggttcccgcaaaaagcgcacgaatcacttcctgcgcttggactgttccgaactttaccggtaatcccggtacatcccctcagacagctaccttgaccgcgtttacgcctaccaccggcagtaataccgtcaaggtttcctgcgttgttacggttgagtatgttatggctgctgccgagggtggcggcgaagatacgatcaagaccgtgtccaaagtcgttaacagtgatcctttcaccatcgctgacaagcttctcccgggcgacatcaccaccgtcaccttcaacgacagaacctattctgtgacggacggcacggtcaacatctcccttcttgataaagaaaccatcgcctccgccgacaacaagtggtctgccgccgcaaccggctatgtgatcgataatacgacgaacaagcccacctattccgattccacgcataaactgacggtgaagacgacggcaacgactccgctttcaaccgaaatcacagttacgactacggcagccaccgtgaccgcaaaggcaagccttaccgaggtcatctccggcggcaagaccacgctcaccgccacctccaccggtctcagcaacgccgccacctatgcgtggttctacaagatcggcgacaaagccgagactccgatcggcacgggtaagtccctcgtctggacggtccccgcaaacgttgcgaccgcgaccgactactctgtttactgcaaggcaagcgagggcgataagctcgctaagacgagtgaccccatcacggtcaagagccttcccgacacctatacctttactgtcgtccccgcaagcgttacgctgacgcagatcggtcagaccgcgcctttggcggcgaactttgtgaatacctcaccttccgccagcatggtcgtcccgacctactcctttgtttccgccaacctcaacatcgcaactgtggcgaaccagacgaccgccgcgccgacggtaacgctcagagcaagcggctctaccactgtcaccgcaaaggcgacctataagggcaaggactatgtgcagaacatccccgttaccggcgccctgatcgaggcgaccctcagtgctgttcagaacggcacttctgtgaactacagctacagtgatcttgtcaacgccgcgcaggccgccatcaacaagacctacagcaccgcctacacctacgagaccgtctattccctcagcggcgtcactcaggtcgcctctaccgctgcctacggtgtcggcacgagcaatgcttcgtacaactatcccaccggcggctccggctatctttacttcaaggcaaacctctccggcatcggcactgcaaagttcaccgccaccgtgaccacccgcgttgccaattctaacgttcccaagacctacagcgttacgtttaacgttcccgtaacgcccagctcgaccacctatgccgaccagtatcccgagccggtcgcggcttacggcaacacctatcgctattacgttcaggttccctccggcgcaaggtattactatgttgccggtgtgaacaccgagcctgtcgactggaacaacggcagcacccagaaatactatcccaccactgccaccgccaatctctattccctgaccgacaccaacttcatcaatggcaagtgcacgctgtatgtcgtgacgcagggcaccgacaataagctctactgcggcaccatcagcgtctaccagaagaactacaacatcaactacaacggcgtggccggtgagaccgtccagttcgcgcagagcgacttcaacgacttcatgaacaaggtcgctgaggcccgcggcgacgccagcaagagcaagtcctatccctatgtcaccttcgattatgtgtccttctccctgcccaccaccgcgcagggcacgctgtactatggcggcaccgccatgtccaccagcaattcctccggcgcgttcaacacccgcaccaaggtcaccaacctcgatagcgtgacgttcgtccccaacgacaagaccaccgcgaagaccatcacgctgaacttcaccctgtacgcgacccgctattccagttcctccacgagccgcggcacgaccgtgagctactccggcagcgtcgtcgtcaacctcgtgcgcgaggacatcaagtacaccgtctctcagggcgacagcgtccgcttcgacgagagcgacttcctcagctacctgcactccaccaagggctacagcagcaactacaccatcgactacgtgacctttgaccagagcgccgtctccgccgtcaacgagggctcgctctacacctactacagcggctacaactacggcggctccgtcaagacgactgacaagttctactacagcgccaccgccagccagaacgcgctcagcgacgtcgcgttcctcgccagccgctacgccaagaccggcgagaccgtctacatcccgttcaccatctacgcccgctacggcacgaccggcaccggcacccgccagctcaccggcaccgtggccatcaagatcggccagacgatgaacttcatcgatgtcaagaccagcgactacttctacaactccgtcaagtgggccgtcggcaagaacatcaccaacggcacgtccagcaccaccttctccccgtacaagtcctgcacccgcgccgagatcgtgacgttcctgtggcgcgccgccggcagcccggagccgaccaccacccgcaacccgttccgtgatgtcaacgccgtcacgcactcgagctactacaaggccatcctgtgggccagccagaagggcatcacctccggcaccagcaccacggcgttctcccccgatcaggtctgcacccgtgcccagatcgtgaccttcctgtaccgctacgcgggtcagcccagcggctactactccaacccgttcaaggatgtgggcgccacgagcgaggcgagctattacaacgccatccgctgggccgtcggtaagggtatcacctccggcaccagcgccacgacgttctccccgtatgcttcctgcaaccgcgccgaggccgtgacgttcctgtatcgttacaccaacggactttaaaacctaaaaaatgcgtccagcgaaagctggacgcattttttattccttgcaggccgctgcgcgcataatttgcccgccgatggcgggcaaattccacacttgcggcctgagaggtattttccgccacgcacacgccccagggcggcttctcttgccgctttgcggcaattcaccttctgtcgtcaggatttacgatttcattttatttcgccgcggggcggcgaaactctgcg

SEQ ID NO: 10202 - DNA, 2930 bp, Unknown
  gut microbiota DNA sequence
cgagggcgggcggtttgcgtttactcttttccattctgtaaacttttgttcaaacgcctttacgggggtcgaaaaagcgtgtagaatggcagcatcaagattttaggagtgttttttgtgaacaaattccgcgatgccctttaccgctttatgtatggccgcaacggcgtagatgcgctgaactgggcgctcgtgatccttgagctggtcgtgagccttctgagctcgatcatccgcgtgcagggcgtgtcgcaggcgctgtactttgtgtcgatggtgctgatgttcattgtgctcatccgcattttttcgcgcaatctcgcgcgccgtcaggccgaaaacgcgaagtttctgacctggtggacgccgaaggcgaacgccattcgcggcgcgaaggcacgccgcgccgacaaggcgcacaaatacgtccgctgctcctgcggcgcgtactgccgcgtgccgaaaaacatcggcaaggtcgagctcacgtgcccgaagtgcggcaagaaaagagtcgtgaaaacgtgaaagaaaaaatccgtcccgcgggacggatttttttgtaagaaaaccggttttccgccgtcctatagacagaaaggggggtgagggcgctgacgaattttgaagaggtgtacgccgtgtacttcgacgacgtgtaccggtatcttctctcgctgtccggaagcgagagcgtcgccgaggagctgacgagtgagacgtttttccgtgcgatggacgccctcgaccgctttcggggcgagtgcagcgtgcgcgtgtggctctgccagatcgcgaagaatctctattattcgcagctgcggcgcgagaagcggcttgccccgctcgaagactgccggatcgccgaggagcgccacgaggaggagctagaagatcacagcgaggccgcgcgcatccagaaattgctgcacgcgctcagagagccgtacaaggaggtcttcatgtggcgcgtgtacggggagaagagcttccgcgacatcggcgcgctcttcggcaagacggaaaactgggcatgcgtgacgtatcaccgcgccaagcgcatgatccgcgagggattggaggacgactgaaatggacaaaacttgcagcatcgtgcaggaccttctgccgctctatgaggaagacatgctgcgcgaggagacgaaggaatttgtggacgggcatttagcgcagtgcgcggcctgccgcgccgagctcgacgcgctgaaggcggacgtgaagcccgcgcccgtcagcgcgcagccgctgcgcgacttgaagcggcagcttcggcgcaagaagctgaccgccgtgctgctggccgtcacgctcgcgctgacgctggcgacggcggggttcgcgtacctcaccgcgccgcagtatttgccgtacagcgagacagagtgggcgatctcacgctcgcccagcgcgctcgcggacgacggcccggcagcggatgggctttctgatctcagcggcgcggagagcatctccgtcagcctgctcgtgccggtctccggcgcagaggtcacgaacacgcaggaccccaacagcagcaaaaccatctacttcatcaccgcatggcgcacgccgctcgacacatggcgcggcgcattcgacaaaaccgggggcaccccgaacacacacagcgcaaatgatcgcacacagcgcgaggcggacgcactgcaagacgtgctcgccaaggcggagtccgcgcgcacgctcttcacgctcgacgccgcgaactgcgcggcagtctgctattctcagaacaacgggcaggacgatgtgctgctctgcggcagcatgaacggcggtgtcatttcgctgccgaggctggcgttgggctattacgttctgctatcgttagcactccttattacgctgggtattgcatttttcgtctgccgcaggaagaaaacgggcaaagcgctcggctatctcgcgctgattcctgcgagctatcttgccggtcatctactcgtcaagggtttcacgacgacgagctaccagatgcagcgcgacttctcgctcattatcctcgccgccgcgctgatctacgccgcggtcatgctggcgatcaacctctggcggcagaagcgggagaaggtgtaaaagaggaagagacgcattcgcgtctcttcctcttttgcaatcaaattcgaatgctcaaggccctttgagcaaagccgtgatagtccgcaaatgcgcttttcaggccgtcgattccctgcatttcccatcggtctgccagatacagcataccgcacatacaggcaaacttttcatagtacgatccgcagaccgcctcttcaagaaactgcttttgcctgtctggatccgtctccgtaagcgcgaggcgcagtttggcacggcttgctgctgcgacctcggtaagctgcggggtatgccagtccacacagtcgatttctgtcgcctgataggagagaagatgggcgaatccctcatgaaatgtgtaagcatccaatcttctcaaatagtctgtactttccaatgcagcatctgccgccggatagcggtgtccaatcaagagatgcgtaatctcatgcgtcagcagattccgaatgatgctgtcgagctggtcgagctccgcataattgcaccaacggatgaggtcaaagatgagatgtgcctgcccgtcgggcgagtgtgccgcaacggcgtcgtaaggctcgggataaccgacgatcaaatcaagtgtcggctgtaccgcctcccaatcggggaaaagcgcgtcccaaatcgggcggttgacggggacaaagtgcgcagccgcttcacagatacggcgttcgagcttgcgcacagtctctcggagagcaagatcctcaggcggcggagtaaatgcattcctgccaagatctgacgaaaccgaggtgtgttcaaagagccatgaagcacgaaaagcg

SEQ ID NO: 10203 - DNA, 9278 bp, Unknown
  gut microbiota DNA sequence
cggtacacttcgatcaccattttcagaaccgtggtcttgccggtgccggggccgcctgtgataatggacaggttatgccggaacaccatttccacgccttctgactggcgcttggacaggttgagccctaagctacgctttacttgctccaacggctgcgtgatgtccaccaccgtcggctttgccaggaacagctctaccgctttctgtgcggtttcgctctcctgcaggaattgcttgggcagatacacattgccgtgattcgacaccacctcgtcctgccggatcatggcagacagctcctgttcgacctggctcatggggacacgcatctgtgggaggggtatccgctcattgagcagctgcatagccgctttgagcagagcctccgcctccagatagagatgtccgtcctttgtccgcgcgtcctccagcgcataaaagagcgcaccgtggacgcgcttcggatcacgcaggtctccaccggatttttgtacgatggcgtcaatgcgcttgaagccgaatcccggcacctggcagagattgaagggactctgtctcacgatgtccgcgcaggcaggcccgaaatgctgatagatcttctgcgcggtcgtcggggtgaccttgaacggggccagcagggtcatcaggacacgcatccggctggtttccgcataggtgtccttgatctccgcaagccgctccttcgtaatgccgcgaatctcaagaagccggtctggctgatgttccagaatctccagagcattgatgccaaacttttcaatgatcgcgtcggcggtcttttctccgatgcctttcagcagaccggaggcaagataattgcggacgccctccaatgtgggcggcacgatctcctgccaatgatcgacctgaagctgaagtccgtattttccgtccttccactctccatctatcttgatcttcaccgtatccgtctgcggcaattcgatgccaacggcggtaaagcggatcaggtggtcgtgatagcggtagggactccgggcctctgtgggtacgctgctgtcctccgtcttcatccgaaggacagaatatttgctggacgcattgaaaaacagtaccttgtccagtgctgcaacaatgctcacagcacatcacctccgtttcctttcacgctgcctgcaaagcagcttttttcacatggaatcttcgccattcagacaccgtgacatactgatcgtaaatatcagggtgttcgtccttcaaacgctctaaggcgtccttcgatatgcctgcggagcgtaccggattgtaggttatggtgtagctctccgcaagaccgttatacacggcggtgcagcttgtgcccattctctcgatgagcatacccttcaaccgcttgatgtccttctccagtttgttcacatcagccgacagctcctttttctgctcttgcagggaaagaagcatggacaactgcccaaactgtgtctgtcccagcagtatgggaggcgcgtccttgtccgcaggccccagctttcgccgcaggctttcgaggatcaggtcgccatccgcttccacatagggaggcggcgtttttgtgaggacatggttctcccagaagtcccgttccaaagcgatcagttcctcctcataggccatgtcacggtcaatgcggcgaataatcgcctcgtcttccgaattgccgtaaaggcagcagaagtagacccggtcaatgttcatgaccgccatgtagtgccgcccctgcgattcatagtagataggaacgatttcctcgccgttgtaccaccagttatccttggcattatagttcgtggtcttgatctcaaggatggctgatgtaccgtccgacaactccaccatgtaatccagatccgccagcatccaaggatattgggggtgccggaacatgaatggccggcggtagatcttatagcccgtcttatgggcgaagatcttggcaaccaacggctccagcagagttccaacctccatctgaacccagttttcggcatcatccgctgtgacgatattcagcttgtcatagtagagatcccgcccggtacggaatggtgaaatcccgagaacggcagcggcgtcacttccgccaatgcccttgcgccggtattccagccattgctcacgcggcagaccttctgtaccgacgagaatttgcggagcgtaacactttgcgttttccatggatgcattcctcctcggtttcatatccgatgcgcggcttattcaaaagccgcttctctctgtacctgtggtacggtcggaaggagcgtctgggatgccctccgggtttccattttcgtctgaatttcatttcttgtttccacctttcttgatgatatatcctcaaagcctttcggcatttgggcgcaaaaaaagcgggaacaacgattctggtaaaatccagcgtgtttgcctcacagcaaacactcgtcattcccgcagcattggggcgttactaccccgtaaaataaaaagccagcagcagccggctctcatggcacagcaatactactgacaaaaacgtacaaacctgacaacgtgcgcaggtggatcactccacacacaggtcaatgacctatgcccaaagggaaattgcacaaaactcatttacaagcaaagtgtaacacagtatatatgacaagtcaatactatttcgccttcatattgtgtctcaaataggttttgttagctattgtggcgtcgagcagtaacatcaaatgctatgcatatcagcacagataccctctcacgctgcaaaaaaggagtgtcacctgatagtaagttcgctatcaggtgacactccggaagggtcaacttagctgtcgacctatcaacagcaaaacaacgctctctaagagaagcgccccaacacagcacaaatcaaaccatgcagattttttcttttcttctaccgctcggagcgcgaaaaatgcaaatccgaaagcaataaaaagcaaatcactccagtgctttggatatgccttgactggaagcaaaatcataacagtcaaaaatagtgcaaggcttatcacatactgtatggtatttttgggtaatctttccatgttattatccattcatacagcgatacacaaccgtatcagcgtcttcaatatagttctgctgattggcgcttgcataccattttgtgtacaactttgttaccgtcccgtacccgataacccccggaccgctggggcgctgatacgaaaggactcttacagaaatagcgtggataccgtctgggtgcaccgtcccgccaatattgcaaatctttcctaaaagtactcctgccgcaaaagctccaagaggattaaattcgagtgcagcgattacgaccgttacaaatgcaccggaggtcatatcgagcaaatcctgcataaatgtaatatctttcttttgggtaccaattagtttgctataatcagttgcaaccgttccatctggcggaccgtcaagatattttacggtatgtgcgaaaggagcaatatcatattccgtacttagctttgatgattcctgcgttgtcaccttaatgcaattaccgtttaagattacgtctctaatggaatcaatttcaaccttatcagatttatcgccttctacaaagttcatctttgttgtcccatctgtcgagatttcttttatcacgagaccattgaccacatttccagcagcatcgttataagaatatctaaatctaccttctacattatccgagaaagcaaactcaatcatctgtgaaaaattgcccacttcatcagtagcatatgggcttaattcgacagcaaatgcaggaatggcgagagccatgcacattgcgatgcagagaataaacgacaccattttacgtttcatttaattaacctcgctttcttttgttgttgaacatagcttaatctacttcggatacattgaaaattatacctctgtattttctactaaaacagccctcccttctcgtaaaactaaatacgacaagggagggattttttggacacaacgctatttattttccgcaaacactttctgctaatctaatcaaatcttcggcagtgaagaatccggatatgaaaaatccagcgttgtcagcagtcatccatacgattgtgttaccgatagcagcgtcatcgctgatcaaaatgtcggcagtgcagccagctacggttaccttttcaacggcagtatttgttgactcgatttgccagaatgtctcatctggcggacttgcataatagaatttcagtatctcaccctcgtcattcatataaatgaccgacgaagtatttcctacactatcttctgatatctgtgtatatccttcggggatccaagttaaatagtagttattctttccttcattgctggtacgcccatcctcaaaatgatatataaacagctcttcgtacacctctttgacccatccaaaaaaagatgctctagcctctgtatcgacggccagccaagcacttccgccaatgagaactgcaagtataataacggcaactttgtgcatcattttatacaaataaggatgatctgcgcgctttttcagctttctgattttcctttcaaaagctgcagaaaactcatgaggaggaatcgcgtcgtaaccttcttccatataacgcagatataagtcgctggatttttcagcagccgcgcgtagccgctcatcagtgatcaaaattcgccgcctccttctttatacagtatctcgagatgctttttcgctctctgatcgattttctgcgcccaagataacgtaattcccaacatctttgaaatttcacgcaaattgtagccatgataatatttcaaccagataacatgacgttgctgctccggcaacttaagaatagcctctgttagcaaatcatctgtgtgaagttctgcactcagttgattaagaatttcatcgttatattccgcagtgggatggcggccattcattcgcagcatatcagtcactctgttatcaactatagttacgacgagctgctttgtttttggactcaccggatcaattattttgatattttcagctattttcataaaagcgtaatgtactgcgtcctccgcatcctgttcatggtgcaaacgcttataggcgacatagtacataagcccacggtattcccggtatatgtcttcgaatttgctcttgtcttcttctgtctcgatcgtttgaagataaatcagcatagtcttggctccctacctgttatgttggtattataacaaagcgggaaataggtgtccagtaattgtagtgcctgtcagcaccggaaataaggttgattaagcttttcagaagtaaacccttgccattccatttttccagaatggcaagggtttatcaggtatgtattagtccaatcacaaaagcagccggagccatagtctttacggctaatatatgacactattcatcgctcaagaggccatctaccactttagcgaagtcagtgtcgtttataaccaataattcatcctcactcaaaaagtcctcccgtgtatcaggggttcctgttacaataacgccattatcggtaggtgaaaacttgtattcggttaaattgtcggagatgataatgtaaggagcatctgtggatgcagaacaatcttgcagaacagaaaaatcatccgcagtaagcgccgtaagcgccttctccatatccgatgccgcagtaacagcgttctcacctacaagtgctgttgacgtcccatcagggaaagtaatcagaattaagggctcattcgaagcacgaaaccggctacaccattccatgaacaatgagttttctacatcttcagaggagacatcagactgattttgacatccagaaaagcaaactgtcatgacgcatacaaacagcagtatatatgctcttttgatttttttcataatacaatccatcttctttccattaattaactcgagaaacaatttcagtagcgttgtaggggaccggaatgctggtagtgggccatcccatcacagcggggtgcgcggcgttatcaatatagctgatagtgttcaaaaccatcactctgccattgcacgactgaatatcgttgagaattgactggttaatactgacggtagtataaaggagggcattagcgcttcctgtaatataaggaggaagccaatttaaggtcttgacagcctccataatagcacttgcaacatctcgctgagtttcaatctcattaatccatctttcaccctgctctgcagtacaaccaacaactacaaaacgaccaggaacagccccccactctcgcgcctgcttgtatgctacagagccaccgcggggagcgtacacattatttactgtgccatcctctaaaggagaaattgagttttcgtcgtattcagctgagaacatggcgtaaagaatcgcttcataatcatctgcgagatagagagcgtcctgtgcggctaactgaggaaggatcactgccatcttttcgtcaaccatctgttgaataggatcggcgggcttaacagtgtcttcggcagacaattcgaacgcggaagcatttaccataagcgcaaataccatgcaaatagccattaacaaagaagcggttctcttcatagtaatctcctttcgacgtttggtattatctataccttatatttcatattaatgtgaatttgacattgcttttgcaacatgtttatctgagacataactattacagcttacagtcacttagaacattggatacaccccctatcatatcggtaaggcattgaaatatattaagttatcaggcgttaactggaggccctttactattcatcttttagccatttgtggcactgatagtaactggggatcgctctgttccattcacggaaaaattgacaaccatggtataggtttttccctttttgactgccgcactttttgtcatcttcaaaatgccagatccgcttccgttccagcttgcgatcaaatcgctgccacaccggagttccatcgtcgccgaaatctcatctgtcatcttatcgccgacaatctgaattacacatgaggcgttattcccatcgaagctcaggtggggcaccgaggtaatgctgcggctttggatcgcatgtgccgaaacagaaagaagcatcaccagaataagagacatgcaaaagaaacgctttttcactaatctcacctcccttcattctcttaaatacgacagcgagatgtatttttggacaggatagctgatattttttctttgcagtgatagaattttattggacaaatattaagccctcgtaaaacgactacgttttacgagggcttatctattaactttttctgtaacttgcaaaatttgtctatgattctccgtatttattgtgtgaacggcaaatagatgtgccttgaaccttgaaaacgccgcccccaaatgcggctgcatcgatttgtccgggagttatacaggatcggctgacagtatgcgtttgcgtacctgccggggaagtgccgcacagcggcagcctgcaaatacgcggcctgaagcgagggcgcaggaaatggcccggaaagcgaattgactttcaataaaattatgcttggcaatcgttgttgtggagagtataatatgcctaccctgctaaacaattagggaaggaggtacttactgcaagctatagcggtttccaagctgcaaggaggtattattttgtctgaccaaaattgcggcaacagtgttcaacgcacctacaccgtcgaacagatctcaaaaattcttggcatcagtcttcgcaaaacctactacctttgcgaacatacaacagattttaaggtcattcgacttggcaaacggtgcctgcgcattcataaagaatcattcgattcttggttcaatgcgttagatcaatcataaagcaacgagcaagaaaggaaccgttatggcaacatatacaatacgcggaacatcgcacaatgtcgtctatacttacaaagcagctgacggaaaacgcaaacagcaatgggaatcttactcttctgaattggaagcaattcagcgcaaagcctatattgactatcttcaatctcaaaacaggacatctgatattacacatgaagcatccgagtatcgtagaaaaaaagccgttgaaaaggcagctcaaaaaattgctgctgaaaggacagcaactgctcccgatactccgtcccctgaaagcgaagataatatgagcaagacctatcgagaatttatggagcgatttcttccaatacacgcaagaaagaagaatttctcacctaaaacctatgacagctatcgtcaaaatctggaaacgcatatatacccttattttggtgattgggtcatgagttctattaccagcagcgccattgatggctttatcgaccatctttttcagaaaccttgccgtggaagcaagagctatggcaaacgcacctcggaaattccaacactgagttccggaactgtaaaaaagtgctataacattcttacacttggttttgaaacagcaaaacgatggaactacatcgcagagattcccaacaccaaaggtccatccgagcactacaagaggcgtaaagcttggtctgctgagtatatttcaaaaattctcgatcagattcaagaagatcccattctccatctctcgcttcacctggcctttgtatgttcacttagagcgggcgagattgttgctattgacattcactcaatcaaccttgatgaaggcagcatgtggatctcccaaattcttgaacgtgtctctgacgaggccctcaaaaatctctccagagaaaagattgctaaagtttttccgaaacagttttctaacgctaaaagtcgccttgtcttaaaaattccaaaaacagaaggcagtttgagaaagcaatacctgacaagcccattggtacaagaaatcaaagagcgcattgcggaaatcaacagagcaaaagaatctctcggtcctgaatatcaagacaatgaattgctgatttgtcagccagatggacgtcccattgacccaaataatctctgcaagtccttcaaagaatggcaaagtgcaatgaatattacggaccaaattgatcttcaaggtttacgtaagtcaggacaaatgcacaaaatcagattgactaaaaacaattaccaacttgtggctgctaacgctggacaatctccggaagtgcttatgcatcattataatgaagcacttgaagtagagaagcaacagcttgcatcgatggttgaat

SEQ ID NO: 10204 - DNA, 36987 bp, Unknown
  gut microbiota DNA sequence
caagcggagctttccaaagcacaggaagccaccgtgaacgcagaaaagtttatgaatgttgtccggcggcataccagctttgaagaacttacccctactctgttgcgggagtttgtagagaaaatcgttgtgcatgagtgcagctatgacgagaacaagacccgtaggcaggacattgagatttattattcttttgttggcaaggtggacttgcccgaataaccgcccgacctatccgacatacctcatgtgccggataggaacggcaaaattttttacacttctattacttctttatcacacatcagtaaaagcgtgccgcatgatgtgaggaaatatggataaggtactcattgcgatgagcggcggtgtggactcgagcgtcgccgcatttttgatgaaggagcagggctgcgagtgcatcggcgcgacgatgaagctcttccacaacgaggacatcggtgtcagccgcaccaaaacctgctgctcgctcgaggacgtcgaggacgcgcggcttgtcgcgctgcgcctcggcatcccctactatgccttcaacttttcagacgacttcaaggggcaggtcatcgaccgcttcatctcgtcctacgagcgcggcgcgacaccgaacccctgcatcgactgcaaccgctacttgaagttcgagcggctctacaagcgcgcccgcattttaggctgcgatgccattgtgaccggccactacgcgcgcatcgagcaggaaaacgggcggtggctgctcaaaaaatcgctcgatgagagcaaggaccagagctacgtgctctactcgctcacgcaggatcagctggcgcacacgcgcctgccgctcggcgcgatgcacaagagcgagacgcgccgcatcgcggaggaacagggcttctacaacgccaacaagccggacagtcaggacatctgcttcgtgccggacggcgactacgctggctttatcgcgcgctacacgggccgcgactgccccgcgggcgactttgtcgatgaaagcggccgtgtgctcggccggcacaagggcatcgtgcactacaccgtcggccagcgcaagggtctcggcatcgccgcggacgcgccgctctacgtcaagcgcatcgatgcggcagaaaaccgcgtggtgctaagcggcaacgacgcgcttttttctcgtgagctgatggcaaatgacttcaactggatcgcctacgacgtcccaccgcgcgagctgcgcgcgaccgcgcgcgtgcgctaccaccagcgcgagcaggcggcgacagtcacggtgctcgaggacgggcacgtgcaccttgtcttcgacgagccgcagcgcgctatcacaccgggtcaggccgtcgtgctgtacgatggcgacaccgtgctcggtggcggcacgattctctgatgatattcttctctttctctcttccgctcatcccctgagcgggcgcggggcgctaatgcgccccgcgttttttattcccgttcaccgagggcttcctccagcttttgcagcgcgcgcttttcgatgcgcgatacatagctcctcgagatgccgagctttttggcgacctcgcgctgtgtgcggggcatccggccgccgaggccgtaacgcgagatgatgacctcttcctcccgctcggtcaggcacccgtgcacgagccttcgcacgcgcaggcagtcgtcgcggttctgaatgtccaaatacatcgtgtcctcgacgccgacgacatccatgaggtagagcgactcgccgtcggcgtcggaatcgagcgaatcgttgagcgacacctcgccctgtaatttcttccgactgcgaaagtacattagaatctcattctcaacgcatttggcagcgtaggtcgcgagcctcgtacccttttccggacggtagctcgaaacgcccttgatgagaccgatggtaccgatggagatgagatcgtcctgctcgtcagactgggtgtagtattttttggcgatgtgcgcgacaaggcgcagattgtgctcaacgagcacattgcgcgcctcaatgtcgcccgcaagcatgcgctcgacgtatttcttttcctcctgtgccgagagcggacgcgggaacgagccgcccgacaggtggagcgagagcagcatggcgtgcgtaagcagataaagtgcaatcgacagcataaaaacgcctcctctttttctccatcctatggccgcacgggaagtccctatgcagtgcttctttccatgacatgaaggaaccattaggattcattatgtctttttaacaatgtcgaaaagtgggtatttctgttttttgtgtactcgtccaatcttgcataatcagtcgcttttcccccttgcgaggtaaaaaaatgtgtgttaagatgcgttcatcttcaggaaaggagaaacgtctgatgactcagttctttgccaatgcagctgcatctcacttcgcacaggccgcctgtgccgctttctcctgttctgatatgaacagcatgattattctggacgccagccttattctgctggcgtcctttattattctgcctctggcagtactggtaagaaacaaaactgaacagcccgtccgaatcacgacgcaatttcgacttctctcccgattctccgcacgagatagagactgatatcacgaaagaggctccgtcgattcgacggagcctcttcctcttagctttttcactttttctcgttcggccggcgaaaaaagcggaaatagatcccccccattccacatttttcagaaagagagatccctccaatggactttttaaactttctcatggcgctcagcccgatcgtcgtcgtgctcgtcggcatcctgggcttcaaaaaatccgcaaaaaccgtctcgcccatcgcccttgcctggacgcttatccttgcctttacctatttcaaccttgacggcctcacgtttgctgaaaacgtcaaggtgctcgaccctctggtctggaaaggcatcaaggaaggcctcaagatcgtgctgatggtcttcggcgcgttcaccattttgaacctgctgcgcgagaccggcgccattgaggatgtgaaagccaccattgcgcaggtcagcgacgaccgccgcgtgcaggtcgtcatcatcggcatgatgctgccgatcttccttgagggtgcagcgggcgcgggcgctcccgccgccatcgccgccccgttcctcgtggccctcggctttaaccccaccacctccatcgccatcgcgctgctcggcgacgcgacgcccgcctcgttcggcggcgcgggcctgacgaccatcaacggcggtgcggccctcgttgacgcgggccttgccaccgtcgcgcagaacgccgcaatggccggccgcttccacatgttcggcgtgctcgtcatcccgttcatcatggtcggcatggcgttcggcaaaaagggctacaagggcattctcccctacctcactttcgcgggtgtgagcacgtgcctgacgatgttcctcctctccaacttcgtcggcgcagaggtcacctccatgggcacgggcctcatctccatccttctctccgttgcgtatgtcaagctcgtcggcgtgaagactccggacgaattccgcaatgaaagcgccaaccatcagcgcaagtacagctcgttcaaggccatgtcgccttacgtctacatgctcgtgctgctcccgctcatccgctacggcttccccgccgtcgttgaaaacggctttgccatcatgtgcacattcggctacatcttctgggtcgaccttgtcattcttgtgtgcggcatcctcggcgcgctcacgctgggcgtggacttcaagacctataaagccgtctgcaagcgcaccgcgagcggcgtgctgccggtcctcatcacgatgggcagcctccttatcgtcgcctacatcatgcagtcctcctccacgggcatgatgaacctcctcgcctctgacatcgccgccgtcgtcggccgcttctatcccgcggcagccgtcctcatcggttcgagcggcgcgttcatcaccggcacgggccttggctccaacatcatgtttgctcagatgcacatcgacgccgcggcgtcgctcggcatgaaccccatcacgatcttcgccggtcagaacgcgggcgcttcgctcggcaacctgatctgcccgaacaacacggtcgccgcctgcgcgacggtcgaccaggtgggcaacgaaagcgacgtcatgaagaagaccttcaaggccttcgccatcatccttgttttgtacatggttctcgccatgctttatacctgcgtgctcttccccaacttcggcatgtaagggccgcacaaacgatcagttaactacacgggcacaccgtttttgagaaaggaagtattcttatggcaaagaaaagagttctcggcgtggtcggcatgggtcatgtcggcgcacatgtggcttacgctctggcgatccagggcatcgcggacgagttggtgctcgtcgaccagaacgagcagaagctcgcaagcgaagtgcaggatctgcgcgacgcagtcgcgtacatgccccaccgcgtgacggtgcgcggcggcgacttctccgaccttggcgtgtgcgacgtcatcgtcaacagcgtcggcaagatcgacctgctgcgcggcacgcatgaccgcgtgaccgagatggacttcaccatccccgctgtgcgcggctacgcggaaaagatcaaggccagcggctttgacggcgtgctcatcaacatcaccaacccctgcgacatcgtcacgcgcgagctggcactgcatctgggcctgccccgcggccgcgtgttcggcaccggcacgggcctcgacacctcccgtcttctgagcgcgctggcgcgccagaccggccttgaccacaagtccatcacctgctacatgatgggcgagcacggcaaccagcagttcgcgccctggtcctgcgtcagcttccgcggcgtgccgctggatgagtgggccaagaccgacgagcgcttccgcttcgaccgcgacgcgctgcagaaggagtccattggcggcggctgggtcacgttctccggcaagttctgcaccgagtatggcatcgccaccaccgccgcgcgcatggcctacgccgtgctgcacgacgagaaggtcatcctgcccgccagcacggaactgtgcggcgagtacggcgaagagggcctgttcgcgggtgttccctgcgtcatcggtgaaaacggcgtcgagcaggtcgtcgagctgccgctgaccgccgacgagaaggccaccttccacgcctgctgcgagggcatccgccacaacatggagcatctcaaggaaatctaaagagcaaacaaatttcgacaggaggtcatccttatgaatatcacgatcactaagactacccatcccggcacgctgcccccgtccgaccagctcggcttcggcaccgtgttcaccgatcatatgttcctgatggactacagcgccgacaagggttggcatgacgcgcgcgtcgtgccctacggccccatcacgatgtctccggccgcgagcgtcctgcactacggcaccgaggtcttcgagggcatgaaggcttaccgccgtcccgacggcggcgtgcagctcttccgcccctgggagaacgtcgcccgtctgaaccgctcctgcgagcgtctgggcctgccccagcttgatcccgacgatacgctgcaggccatcaagaccgtcgtcaaggtcgacgagaactgggtcccgagcgatcccggcacgtccctctacatccgtccgttcctgtacggcactgacccgacgcttgccctgcacggcgtgcatgaggccacgtttgccgtcattctctccccctccggcagctacttcaaaaacggcttacagcccgttcccatcatggtcgagaccgaggacgtccgcgcggtgcgcgggggcacgggcgaggccaagtgcggcggcaactacggcgcggccaaccgcgcgggcgaccgcgccatcgaaaagggcttctctcaagtcctgtggctcgacggcgtggagcgcaagtacgtcgaagaaggcggcggcatgaacgtcatgttcaagatcaatggcaccgtcgtcacccccgcgctgactggctccatcctgcgcggcgtgacgcgcaagtccgccatcgagctcttaaagagctggggcgtgcccgtcgaggagcgtctgctgagcgtggacgagctctttgacgccgcggcatccggcgcgctggaggaggcgtggtgcatcggcaccgccgccgtcatctccccgatcggcgagctgagctggggtgacagagactacaaggtcaacgacaacaagatcggtgcgctgtctcagaagctctacgacgagctgactggcatccagtggggcacaaagcccgacccgttcggctgggtctgcccgatcgactaattttgctattctctcatctctctcatatagggaaaaggcggtgcgcttgcaccgccttttccctattttatcgttttgttatcgttttaattcatgcaaattgtaaaatagcgttcagcttattttgacatattttaagattttgcctcgttttctatgtctgactattgattttttaaaattaaatgatatactaacctcatcaatcaaaacaaaaaggaggagctttccatgcctacgcaaaaaagcaccgcacggctgtcgaaaaagccgccgctgtcgcccgaggagctcaaacagatcgacgcttactggcgcgcagcaaactatctgaccgcctgccagctctatcttctcgataatcctctgctcgagcgcccgctgtgcgagagcgacttaaagcagaccatcgtcggccattggggcacctgcccgggccagaacttcatctacacgcacttagaccgcgtcatcaagcgcgatgacctcgatatgatctacctttccggccccggtcacggcggcaacgccatggtcgcgcaggactggctggacggcagctatacggaggtctaccccaacatcacgcgcgataaggagggcatgcagaagctcttcaagcgcttctccttccccggcggcatcccgagccatgtcgcgcccgaaacgccgggctctatccacgagggcggcgagctgggctattccctctcccacgccttcggcgcggtggcggataaccccgacctgatcgcggcctgcgtcgtcggcgacggcgaggccgagaccggcccgctcgcaacgtcctggcacggcaacaagttcatgaacccgatcaccgacggcgcagtcctgccgatcctgcacttaaacggcttcaagatcgcaaatccgaccatcttctcccgcatgagccacgaggaggtcgagtgcttcttccgcggctgcggctgggagccgcgctttgtcgagggtgacgaacccgagacgatgcaccagcagatggccgccgcggtcgactgggccatccgcgagatcaagcgcatccagcgcaccgcgcgagagagcggcaaggcgagccgcccccgctggccgatgctcgtgctgcgcaccccgaagggctggaccggtccgaaggaggtcgacggcaacgcgatcgaaggcagctggcgcgcccatcaggtgcccatctccatgggcgcggatgaaagcaagcacctgccgctgctcgaacaatggctgcgctcctacaagcccgaagagctcttcaacgaggacggtacgccggtcgagctgatcgcgtccttcccgcccaagggcgagcaccgcatgggcgcaaacccgcacgccaacggcggtcttctcctgcgcgacctgcgcacgcccgacttccgcgactacgcggtcgatatccccgcccccggcgaggtcgaggcgcaggacatgtacgtccttggcacctatgtccgcgatgtgatgaagctcaacatggagtcgcgcaacttccgcatcttcgcacccgacgagacggcgtccaaccgtttgcaggccgtgtttgacgtcacgggccgccgcttcctcgacgagcaggtcgagggcatcgacgagcaccttgaccccgacggccgcgtgatggactctatgctctccgagcacttctgcgagggcttcctcgaaggttacctgctgacgggccgccacggcttctttgacagctacgaggccttcatccgcattgtcgactcgatgttttcccagcacgccaagtggctcaagatgtgcaatgagctcccctggcgccacgatatcgcctccctcaactatatcctcgcctccaacgtctggcagcaggaccacaacggcttcacgcatcaggaccccggcttcctcgaccacgtcgccaacaagaaggccgacgtcgtgcgcatgtatctgccgcccgatgccaactgcctgctctcctgctttgaccactgcatcaagagccgtaactatgtgaacgtcatcgtcgcgagcaaacacccgcgccagcaatggctgacgatggagcaggccgtcaagcactgcacgcagggcatcggcatctgggagtgggcctcgaacgatcagggccaggagcccgacgtcgtcatggcctgctgcggcgacacgccgacgcttgagactctcgccgctgtgacgatcctgcgccgcgagctgccggagctcaagatccgcgtcgtgaacgtcgtcgacctgatgaagctccagccgcacaccgagcatccccacggcctgaccgacgcagagtacgacacgctctttaccaaggacaagcccatcatctttgcctaccacggctatcccacgctgatccacgagctgacctaccgccgccacaaccgcaacctgcacgtgcgcggctataaggaggaaggcacgatcacgaccccgttcgacatgcgcgtgctcaacgatatcgaccgcttcgatctcgtcatcgacacggtgcagcgcctgccgcagctcggcaaccgcggtgcttacctcatccaaaagatgaacgacaagctcgttgagcaccgccagtatatcaaggacaacggcgtggatctgcccgaggtccgcgcgtggaagtggaacgacggcaagggcgttgaggtgtaaaaggaggaaagcaatgcgtattgcaatccctgttgtgagtggggaggttttctccccgctcgccaatgccgaagccttccatttttatgaggacgaccacggaaagatcgtgcgcgagttcctcgagccgatggaagaaagcggcaccgacgctgccgtcggccttttggagcgttacggcatcgacgcgctgctctgcggcacgatcgacgacaccgagcgcaccgctgtcggcatggcgggcatcatgctcttccccggctattccggcaaggcagacgacgccgcgctgcgctttctgagcggcagcgtcgtgtccgacccgaacaaccactgcaacgcctgcggcttcaaaggagcgtgctccctgaaggataaaggcggctgcggcggcaactgaacagcaaaaaggagcaagctttcggcttgctccttttttgcttgatattgttacgatgcggggcgcgtggtggagagaaagtccgagttgatccagccaaacttaccgtccacgctgacgaacgtccacccatcctgcttggccgcagcctgtacctcgctgccgagcgacacggtcgtgaccttgtcatagctcgtgcccgggccgctccgcagattcacgccgccggttgtgtagtagatgtaatacttgtcgtacacagtgctcggcttgacggagacctcgtcatggcccgtgaggtcgagccagtcgatcatgtcgccgcccgtctgattatcgccgctcatattatcgccctgcgcggggtcgctcacatcgttctcgccggtgagcgagccgtcttcgccgttcgtgatctggccgtcctcgccggtctgctggccgccgcgcagctgctcgattttcgtctgcgccgcagcaagatcgctgcgcgcgctcttgagcttgaagcccagcacgaccaccgtgatcaggagcaccagcgaaagcgccagcagtcccataaaaagcacataaagcggattgcgccgcggtttgcggcggctgacccgacgtccttccataatgattcccccttatcggtttgttcgcctttattgtacataattttcacaagttatgtcaagtgcctttcctctttagacgcgcaaattcacaaaaagttcccgcccggtgcaaaaaaaggagatgaccaaggccatctcctttcagcggatttactttttgtttgcgcgctccttgcggcgctcgaggaattccttgggctcggcctcggcgagcttgcgctcgcggcgctcgaggacttccctgggcttttcggtgatcgcgccggcggccttgagagattcctttgtcgccagcgggccgaccagctcgtagatcagcacggagaagaggatgatgttgcggatcagctcgccatccgcgccgagcacctgtgcgctcacgcacataccgagcgccacaccctcctgcggcagcagcatgatgccgaggtacttctgcaccgtgtggtcacagcccaccgccttggccgaccagcgcgcgccgcaatacttaccggccgagcgcgcgatgatgtacacaacgccgatgagcacgagcacaccctgagaaaagacgctcaagcgcaggtttgcgccgctcacgacaaagaacaccgccaacatcggcgtgctccacttgtccgcgcggttcatcaaatcgtccgacagcgggcagatgttgcagaacaccgtgccgagcatcatgcacacgagcagcggcgaaaagccgcagtctacgcccgcgacggtgaagtccattgcggacaggccgaccatcagaaagatgaacgcgatgctcagcgacaggcggttcgagttcgagcggaacatcgtctcaagcttcgtgagcacgaaacccgcaagcgcgccgagcagcagcgagccgacgatctcaatgagtggagagagcaaaatgcttgcgaggctgaactgtgcgctgtccatcgcgcgggcaataccgaaggatacggcaaatgcgatgagacccaccgcgtcgtcgagcgcgacgatcggcagcagcagatccgtcagctcgcccttggccttgtactggcgcacgaccatcagcgtcgtcgcaggtgcggtggccgtggcgatcgcgccgagtgtgatagccgcagggacggacagcacgtcggggcgcaggaagtggaagatcacgagcgcaatgtcgacaaaggccagcgcggccagcgcctgcaagacaccgataatcatcgcctgcctgccagtctttttgagctggctcaggcggaattcattgccgatggaaaaggcgataaagcccatcgccacatcggagatcatgctcagcgcctcgacctggtcgtagcttgcaaagccgaggcccggaatgccgagccggcccagcacgaacggcccgatcagaacgcccgtcacaagaaacgccgtgacatcaggcagatgccagcggctgaaaatacgggtcatcaaaagccctgcgagcagcgcaacggccagattcaaaatcgcagtcatggtaataccctcacaacagaaaaagtacgggcgaacaaagccgcccaaggctcatattgtagtctgtttgttcgcaaaaagcaagcactattttgcaagtttcctgtcaaagcaagaaaaaatggcagctttttgggcaaaagctgccattttgtttcgtttcacacaattcagtctgtgttcgcgcgcacaccggcgaagtagctgttgccaaagccgtcggtgtagacgccgcgcagcgtgtcgcgcagcatgtgcgccgtgccgtcaaaatatacgggcgagagcgccgtctcaccgagcagcatcgtctccgcatcgtgcaggaacgctgtgcgcgccacaggatcttccgacgctctggcgacgcccatcagcacgtcgtaggtgccgttttcatagccgatcaggttctgctcatcctcgctgcaccagcggtcgaggaagcccatcgcgtcgtcgtagagcgcggtgaccttttgcagtgcgagctcgtagttccccgcttccatgcgcgtgttgtactctgcctgcgtcacgccgcgcagcatcacgttcacgccaagcgtcgtgctccacatgttttgcagcgcgctcgccacggcgtcattctccgtgccggtcacgtacagaagctcaaccggtgggaacatgctcgtgctgtaatagcccgcgtaggtcagctcctcctgcgcttgcgttgcccgcgcgctcatgccctcttcatcgatggcgcagagctcgccgcccgtcgtgcggaaatcgtcctccgtctcgccggaatctggaatgccgtaggggacaaggcccgtcgcggggctgttctccgcgccgcccgccgccgtggcggccgcgcggtcgatggcaaggtcaaaggccttgcggatgtgctcgttcgagaacgtgtcgctctcgttgttgtaaaggacgctcgtcgtcgcgtacaccgccgttggcttccagctctcgtcctgcgaaagctcggcgatcacgctgttgggcaggtgggcgatgtagtcgatgtcgcccgcctcgtagagctgccacgcctcgtccgcgcccgctgtgaagatgaagtgcagctcgtcgggcccgacgagacgcgcctcgtaatactcgtcgctgcgcgccgccgtcagctcactgctcttcgtccacgtgctcacatggtacgcgccgttgctcacaaggtccggcgtgtcaaagcctccgccgttctctgtcagattgcggcgcagcggcatcgtggcgaccgccgtgcagatgccctcgataaaataggcgcacggcgcgctcagcgtgacgacaaacgtggattcatccttggccgagacctggagcttcgtcttgtcgcccgtctcgcgcacgtcgtcatagcccgccaccacgctcatcagcgcgtggttcggcgaatccgtcgcggggtcggccaggcgctgccaggcatagacgaagtcatccgccgtcaccttttccccgtccgaccagcgcgcagtggagcgcagcgtgaagcggtaggtcacgctgccgtcgtagtttgtctcctcagtgtactccttggccatgccgttcgtcagcgtcacctcgccgctgccgtcgtcgctctcgcgcatcaggttttcatagagtgcgtagaaaacgctgtcggcatccgcgtcggtgttcatcgcggggtcgagcgagtcgatcacgttgcagacgctcacgttcaggacgaatttctcgtccccttgcttcttctccccgcagccggagagaaggcccaacagcatcagcgcacagagcgccagagctgtgatcctctttattgctttcatcatgcctcccattggcaaaacgcagcgaagactgcttggttttttgtaatacggagatattatagcgaaaatcattcgccttgtaaaggtgaggggcataaaagttacagtttgttaccaaattgcagctgcttttccgcacaggtgcggagggtatgcggcatgcacgccgcagcaccacaccccccattttctttcccgagaaagaaaacgggcggtgtgaccgtccaaaagaaaggcgtttgattggcagtctcgggctcgaacgacctttatgcctccggaatgaagatgattgcgcgcggcgtcgccgcgttagcgttgctagacgatttggcctacttctattatccgctgttgcgcagccgttggcggctctgctgccttacggatgcggcacaccccttgcgggtgccgctctgcccagcttgtagaagtgcggactaatttccgtctaccgtcagcctccatattgcagcgagtgccagcaaggccgcctcggcagacaaaaacaaaacagtgaaaatctgtagtagacggaaattgcgtaagggtaacgaatcgcaggcaaagcgacagcgaagatagaagaaagtcaaatcgtatagcaacaaaaatagcaggcactcgattcggcaagcgccgcagctcttcaagctgctcgcttgcaatgcaaacctttctcttgggggttcaaaagggggatattctctttcgtgaaagagaatatcccccttaaccgcgtcccctgcacggtgcaggggcataaagctctgttagtcttcgactaacttcccctccgcatccagatgtgctttcttgacctcattgccggtgaacttggcgattccatccagccgcatgccggagggataatccgacaccagtgtgtacgccacgccgcggcgcttggcgcggcccgtgcggccgatgcggtggacgtaatactcgttttcaagcggcacgtcgtagttgaacaccgcatcgacgtcgtcgacgtcgatgccgcgggcggccacgtcggtcgcgacaaaaatcggcagctcgccgcggcggaagcgcgccatgacggcctcgcgctttttctgcgggatatcgccgtggatgcagtcggcctcgaggccttccatcatcaaaaacgccttgagccgctcggtcatgcccttcgtgttgcagaacgccatcacgcgctcgtggccctcggcgcggatgatctgcgccatgacatgcgccttgtcgttctggcccacgtcgatgcggtactgcgcgatatcgggcttattctcctccttggcctgcacggtgatctcctcggggtcgcgctggtacatccagctgatgtccatgacctcgcgcgagatcgtcgcggagaacataccgagattgcggcgggaggacagcttgtccagaatgcgcgtcacatcatggataaagcccatatcgagcatgcggtcggcctcgtcgagcacgacggtcttgacgttgtcgagcttgacggtgcggcgcttcatgtggtcgctcaggcggcccggtgtcgcgacgacgatctgcgggtgctttttgagcgcgtcgatctgcttgccgatgggcgcgccgccgtacaggcacacgatgcgcacgcccggaagatagacgcaaaggtcgcgcagctccgccgtgatctgcatggcgagctcacgcgtcggcgctaagatgacagcctcggtctcctcgctgccgggctcgatgtgctcgatgatggggatgccgaaggcaaaggtcttgcccgtgccggtgggcgccttggcgatgacgtccttccactcgcgcatcggcgggatgcagcccgcctgcacgggggtactctcttcaatatttttctttttcagtgcgcgctggacctcttcggtcagtccgagagagtcaaagcgcacgccctgtgtgaattccatagcgttttcctctgttttttcatattttcagtcgtgtatgattatatcatggctgtcaacctgttttcctcgccccagatgcagagctggtcaaggaccttcatcaacgactttccgcgctccgacagcgaatactccaccttcggcggaatctgcggatactcctttcgcacgatgagacgatcagcctccagctccttgaggttgctgctgagcgtcttatctgtgatcgtcccaagatagcgcttcatctcgttgaaccgcaccggctcatactccatcaggcaatataagatcaccatcttgtgcttgccgctgatgagcgacatcgtgtagctgaatccggtgtcggcaaaatttgcgcttttgatatacttctccatgcaggacatatttacacttcccttttagaaagtacctgtatttattaacagtacttgtgttttttccgatgcatgctatgatgatagcaggatgaccatatgaagtcaatccaaaatgcaaatggaggtcgttaataatgaaaaaagaattgggtgtccatccctatctgtttccaatgcccgtgctgatgatcgccacttacggcgacgataatgtcgtcgatgtgatgaacatggcgtggggcggtatctgtgccgaaaacatggtttctctcaacattgacgaggatcacaagacctcagagaacatcaaaaagcgcggtgcgttcacgctgagcattgcggacattccccatatcgaagccgccgatttcttcggcatcgccagcggcaacaagatgccggacaagttcgagcgcagcggcttgagtgctgtaaaaagcgaaaaggtagacgctcctattgtgcaggagttcccgctgacgctggagtgcagggtcattgaggacaagatggaggtctacggccaccacatcatcggcgagatcgtcggcgtgctggcggatgaagccgtgctggatgaaaaaggcaaggtggacgccgcaaagctgaatgcatttgtgttcgaccagttccgcagcggctactatgccatcggcgaaaaggtcggtcaggcatggcacaccggcgcaccgctgatgaaaaaataaagataatccctgcacttgcaggcaaactgccagctcgctatgccgatcttgcttttcaggatacgacacaaaggatgccagggcgttttatgccaacaatgaagcgctgatgggcaaaaagaaggccgttttccttaccacgatggccgatgaggatcaaaagactgcctccggcgcgaacgcttcgtttgacctcatggccgactatctcggctgggagatcgtgggtaggctgaatgtcggcggctgctccacggcggacgatcttcacgaagaagacctgaccgccgcttacgagctcggcaagaatctgtaaacagttgatcgtataaaaaaagaggacttgctttgcaagccctcttttttattgtcgaaacattctgctgttgtacacggccaacgccgcaatgagcgacagaacagtggaaaagatcagcttcaccggcgcgagtgcttgcaggctggcgagaaaatacgtccagccgtcggcttccagcttgatgcgaaaggccggaatgcagtagcccatcgcaacatacgccgcggcaaagatcacggcaaacgctatgatcgcccagcgtctctttttcatctcccacgctcctttcttatcactgtaccgcgcagccgccccattcgacgactgtaaaacctgtgcgctccggcgcggaaagctcctgcgcgggaaggtcgacaaatttttccgatgactgccacgccatgaagacgcgcagcagcgtgtcaggcgcgggatcgaccgtgagcttggcagaatccgtataaacgttctgctggaacgaaatcagattgtaggcgttgtcctgcatctgcggcagccagtagatgataaactcgtttgcctcctcgcgattaaggccgagctgtgtgagcgcattctcgaggaacgccgcggtgtcctcccccgaaacgcagaagccggtggaaaagtcgtaatccgtccccgacgtgccctcccagtagaggtagcggtaggtttggccgctctcgtccgtcagcgtgccatccggcgcggcgcggacgctccagccgtcgccgtaggcgggataggcgcacgtcagctcgcccgcaagatcaagcgtcacacgcacatccgtctcctgctcgggatatagataaatcacaggcttttcgttactcacctcttccttcggttcccgcccgcaggccgagagcgaaaagagcagcaaacacgcaagagttagggaaaacaacttcttcatggcagagtcctcctcatcagtagttgttcctttagacgcaagaaccatcaaaaaagttgcaaaagcctcgcagagtttcacgcccgcaggcgtgaaatctatgtaatccgttttctgccgcgacatgtgcgtggcagaaaacactttgcgcgaagtgagcgtcgaattgtccgcttaaatcggacaaccgaggcgcagaacgaagcgaatctttacaaagaagtggcacagccacttctttgtaaaaatcaaaagagggacagcaaagctgtccctcttttgaaatctttatttgtgcggtacatgccagatcgtatccgcgtactgcgcgacggcgcggtcggcggcgaagatgccgctgcgggcgatgttgatgagcgacatgcggttccattcctcgcttcttgcgtaggtgtctgccatgcgctgctcggcggcgcagtaggacgcgaagtcctgcaagagcatgtattcatcgttcatcagcagccgcgaggcgagatcgtcgtaggaaacgccgtctgagaagcccgccttgagcttgtcgatcaccgcgcgcaggttctcgtcgcgcgcgtagagcttctgcggggcgtagccctcgcgcttgaggcgcacgacctcgtcggcgtgcaggccgaagaggaacatgttctcgtcgccgagcctctcgtgcatctcgacgttcgcgccgtcgagcgtgccgacggtcagcgcgccgttcatcatgaacttcatgttgcccgtgccgctggcctccttgccagcggtggagatctgctggctcacctcgctcgcgggcatcagatgctcggcgagcgacacgcggtagttctcaaggaacaccacctgcagcctgtcgcggcagatggggtcggcgttgatctcagcggcaagggagttgatgaggcggatgatgcgcttggcgaccgcgtagcccggcgcggccttcgcgccgaacaggaacacgcgcggctgcatggcgcggttcgggtcgttttgcagctgttgatagaggtagatgatatgcatcgcgttcaaaagctgacgcttatactcgtgcaggcgcttgacctgcacgtcgaagatcgcgtcggtgttgagcacgatgccctgcgtctttttgacgtaggcggcaaaatcgagcttattcgcgtgcttgatctcgccgaggcggttcagcaccgcggtgtcgtctgcataggcctcgagctttttaagcgcttcggggtgcaggaggtattcatccccgcccgcgagcgcgcgcacgagctcgtcgagccgcgggttgatctgcgcgagccagcggcggtggtcgatgccgttggtgacattcttgaacttctccggctccatcgcgcactggtatttaaaaacgtcgtttcgcaggatgtccgagtgcagagcgctcacgccgttcacggccatgccgcccgcgatgcacaggtttgccatgcggacctggccgtcccagatgatagccaattcacgcgttttggcctcgtcgtggtagtagttttcgattttttcctgatagcggcgcgcgatctcggtgatgatcgtccacacgcgcggcaaaagcgactgcatcagctcctgcggccagcgctccagcgcctcggaaagcaccgtgtggttcgtgtaagcgacggagtgcgtcgtgatgttccacgccgtgtcccagtcgaggcccgcatcatccatcaggacgcgcatgagctcggggatgacgagcgcggggtgcgtgtcgttgatctggatgacattcttttcgtggaaattcgtggccgtgccgtagacctcgatgtgcttgcgcacgatggactgcacggtcgcggagacgaagaagtactgctgctttaagcgcaggctcttcccctcgggatggttgtcctcgggatagagcaccttcgcgatggtctcggccatcgcgtgctgctcctgcgcgcgcagatattcgccctgtgaaaagagcgacatgtcgagcggcacgggggactttgcatcccaaaggcgcagcgtgttcacatgatccgtgccgtagcccgcgatctccatatcgcaggggatagccagcacctcggtcgcgccctcgggcacaacatgcagccgcccgtcgtcccagaactggcggaccgtgccgccgaagcagacggtctcggtctcctgcggcttgggcagcagccacgcgccgccgaggtccttccagttgtctggcagctcgacctgctggccgtcgacgatgcgctggcggaaaatgccgagctcatagcagatggaatagcccgcggcggggatgtcgagcgtcgtcatcgagtcgagatagcacgcggccaagcggccgaggccgccgttgccgagacccgcgtcgggctcgctttcaaagatgtccgctgcgcggaagcccagctcgtcgagcgcttcggtcagaatttcgccgacgcctaaattgaaggcgtttttcatcaggctgcggcccatcagaaattccatcgacaggtagtgcacctgacggcggtgttcttcgcgggtctcgcgcatggtgtccacgctgcgctcggccatcacgtcgcgcaggacaagggcgctcgcgcgcatcatctgcgcgtcgctcgcctcctccacggtgctgccgaagctgaccttcagcttttcgcacagcgcgtctttcattttcttcacagagtcaatggtcatagatcgttttccttttctttatcggcagatggattcgtaaatgttgcggtattcctgcgccgagcgcgtccagctgaaatctgcggtcatgccgcgctgctggagcatcgcgtaggcgcccttgttgtcatggtaaaggtcaatggcctcgcagatcacgtggcacatgtcgccagcgttgtagttggcaaaggtgaagccgttgccctgtccgttccaggcttcatacgcatggacagtgtcctttaatccgccggtctcgcgcacgatgggcaccgcgccgtagcgcatcgcgatcatctgcgagagcccgcacggctcgctcttcgacggcatcaggaagaggtctgcgcccgcgtagatctgcatggcgagctgctcggaatagccgaggtagacggccatgcgtccgccgtagcgctgcttggcgtactcaaaaaacgtctcgtacttcgcgtcgcccttgccgagcacgacgaactgtacgtccttgcccataaatgcgtcgagcgtttcgcacacaaggtcgagccccttgtgggagacaaggcgcgtgaccatcgcaaggatcggcgtgtcgggccgttcctgcagccccagcacgcgctggagcgctgccttgtccttcttctttccggcaaggtcatcgggcgaatacgccgctgcgaggctcttgtcgcgcgacgggtcatagcgctgcatgtcgatgccgttgagcacgccgtggagcttgcgcgcattcatgctcatcacgttttccagcccgtgggcaaagtacgcgtacttgagctcctgcgcgtaggtcgggctcacggcggtcacggcgtccgccgtgacgatcgcgccctttaaaaggttcacatcgccgccgaattcgatcgtgccgccgtcgaaccagccatggtccaggccgaacaggtcttcgaccgtgcggctgccgtagcggccctgatattcgatattatgcaccgtaatgacggttcggattcccttataaaagtcgtcgcgcacggcttcatccctgatgtagatgggcacaagcgcgctctgccagtcgttgcagtggacaacgtcgggcttttgcggcagggacttgagcagttccgtcaccgcacgggagaaaaagccaaagcgctcgccgtcgtcatagtagccgtagagctcgctgcggcggaaatacgtctcattgtcgacaaagtaccacgtgacgccgtcgcgctcgagcgaaaagagcccgcagtagacgctgcgccacgcaaggcgcacgaacgtccacttttcaaagtggagctgctcgccccacttatccttcacgcgctcgtaaagcggcaggatgacgctcacgcggtctccgtttgccgcgagcgcctgcggaaggctgccggccacgtcggcaaggccgcccgtcttgcaaaaggggaccgcctcgctcgtcacatacaaaatgttcatctgcaagctcctttcttctgtttgctgcttttatacaatgctgcccttgctcacggcaagcgggtagctctcgtgtccgatcagcgtgccgccgcggcggatgtggacgtccttgtcggcgatgacgcagccgagcgtcacgccgtcctccaccacggtattcttaaagaggatgcagtttttgacttggctccccttgccgaccttgacgcccgggaagaggatgctcccctctacgttgccctcgatctggcagccgtcggcgatcagcgaattgacacagcgcgagtcgggcgcgatgtacgacgccgcctcgtcatcctctttagcgaggatgggccgctcggcacacaggagctcggagcggatggcggggtctaagagctgcatgctgcgctcatagtattcctgcaccgtgcgcagctgcgcggcaaatccgtcccacaggaaagcgcgcaggtcgagcttgtcgcccatggcgcagagcacatcgctgcgaaagctgtatttgtcctgcgcggcgcactcgtccacaagggaaataagaaggtcgcggctcagaaggtagatctccaggctgcggcagccgctcgccttgtgcggcgcgcagcgcgtctcggtgatgcggcccgcttcgttgacggtgaaatacgtggcgttttccacaaactggccgctctcggtgcagacgcaggtgatgtccgcgccgctttcgatgtgcgcgtccagcaccttctgcagcggcagattgatgataaggtcgctgtcggacaggacgacgtacttctgccggatctcgtgcaggtacgaccgcacgcccgagagtgcctccatcttgccgcggaattcctccacgccgaacttgcgcgcgtcggcaaagggcggcagcagcttgagaccgccgttcttgcgcgccatgtcccacgtcttgccgctgccgatgtggtcgagcaggctttgatagttgccgtgcagcacaacgccgacgtctgtgatgcccgcgcccgccatgttggagagcatgaagtcgaccacgcggtagcgcccgccgaacggcacagagccgggcatgcgcgcttcggtcagctcgcgaaggccgggagccttttcataagcaaagatgatgccgtgcagtccgttcatcgtaccgtctcctttccgtccacgctgcgcatgcggttggcaggcagcacatagtcatccgcgaccgccgcgccggggccgagcaccgtgatgccccactgctccggcggcaccgcctcgggcggcgcgccgacaaaggcgtgctcgccgacgacgccgttctcgccgatgatggcgtaggagacgcgcgcgtcctttttgacgaccgcgccgggcatcaggatggagtactggacgcttgcgccctcctccaccgtgcagcgctcagagaggacagagttctccgcctcgccctcgaccgtgcagccgcgcgcgacgacgctgtgctccacgtgcgcgttgacgcctaagtacgccggcggcgcggagacggagcggccatagatcggccagtccttttcgagaagatcgagcccgctgccggtcgcgagcatatccatgttcgcatcccaaagagagtcgagcgtgccaacgtccttccagtagccggagaagcggtacgccgccatcttttccccgttttgcagcatcttggggatgatgtttttgccgaagtcgttgctgctcgcctcgtcgctctcgtcctcgatgaggtattgacgcagctttttccacgtgaagacgtaaatgcccatcgacgcgaggttgctcttgggatgcgcgggcttttcctcgaattccgtgatcgtgtcgttttcgtccacgttcatgatgccaaagcgcggcgcatcctcccagggcacctccataacggagatggtacagtccgcgcccgcttttttgtggtgggcgagcatcttggcgtaattcatcttgtagatgtggtcgcccgagaggatgagcacatactcggggtcgtacatgtcgacaaagccgatgttctggaagatggcgttggccgtgcccttataccacgacgcaccgcccgcgctctgatacggcggcaggatgtgcacgccgccgtccgcgcggtcgagatcccacggctggcccgagccgatgtagcggttgagctccagcgggcggtactgcgtcagaacgccgacggtgtcgatgccagcgttggcgcagtttgagagcggaaagtcaatgatgcggaacttgccgccaaacggcacggcgggcttcgccatattctccgtgagcacgtagagacggctgccctggccgccggcaagcagcatggcgatacattctttcttcacgcttgttctctcctccttgtttcgttgccgtccggtcacacctcgggcggctcgttggttttctcctcttcctgccattcgccctcgcccgcgaagaacaccgcgccgagcggcgggatggtcacgcacagcgagcagggcttgccgtgcgaggggatggactcggtcaaaagctctccttcgttgcgccagtcgcccgtgccgccgtatgcgggaaggtcggtggtaaacacctcgcggtacgtctttttcggcgggacgccgaagcggtagtccgcgcgtccgacgggcgagaagttgaccgccgcgatgagctcgcgccctttccggtcgcgccggacgaagacgacaacgttgttgtggttgtcgtcggcgacgagccactcaaagcccccccatgaaaagtcaatgtcccaaagcgggctctgcgacaggtaaaagcggttgatgtccttgaaaaaccgctgagtctgctgattttctttattttcgagcaaataccagtcgagctgagaggcaaaattccactcgtgccactggcccagctccgcgcccatgaacgtgagcttcttgcccggatgggcgagcaggtacgccgtaaacgcgcgcacccccgccagctgctgccagtcgtcgcccggcatcttgccgcgaagcgaccccttcatgtgcacgacctcgtcgtgcgagatcggcaggacgaaattctccgaaaaggcgtacatcagcgagaacgtgatgtccttgtggtggaactggcggaaccaggggtcaagcttcaaatagtggcacatgtcgttcatccagcccatgttccacttgaggttgaagccgaggccgccatccttggcgggccgtgtgacgagcggccacgcggtcgactcctccgcgaccatcagcgcgttggggtcgatggaaaacgcagtctcgttgagcgcgcgcaggaagtcgatggcctctaaattctcgtgcccgccgttgatgtttggcgtccaacggccattttcgcggccatagtcgaggtacagcatcgacgcgaccgcgtccacgcgcaggccgtccacatggaactcgcgcagccagaacgcagcagaggaaaggagaaagctcttcacctcgccgcggccatagtcgaacacacgcgttccccagccctcgtgctcgcgcttattggggtcggcgtattcgtagcagggcgtgccgtcaaagtcgatgaggccgtgcgcgtccttgcagaagtgcgacggcacccagtctaaaatgacggaaatgcccttttggtgcagatggtcgacaaagtacataaagtccctgggcgtgccgtagcgcgacgttgcggcaaaatagccggtgcactgatagccccaggaatcgtcaagcggatactcggtgacgggcatgagctcgacgcagttgtagccaaggtccagaacgtgatccgccagctcgcgcgcgagcgtgcggtagtcgtaaaaatcgccgttttcgtgccgccgccatgagccgaggtggacctcgtaaatgttgagcggcgagcggtcgaggggtgcctttgcgcggctcgcgcgccattcgtcatccccccagcggtagccgccgaggtcatagagcttgctggccgtaccggggcgggtctcggcgtggaaggcgtaggggtcggccttgaggaccgtttcgcccgattgtgccgtcacggcgaacttgtaggtatcgtagcgcttgagggacggcacaaaacactcccagaaaccgtccgcgttcttttccatcgggtgggcgtagccgttccagccgcagaaatcgcccacaacggacacatgcgcggcgttcggcgcccaggtgcggaagacgtagccgtctttccccgaccgccgcgtgcggtgcgcgccgagatagcggtaagcctcgctgttcgtgccgccgtaaaaggctgcggtgtcaaatcgtctgccggtttgtttcatgcctcttgtcctttctcctcatagagcgtatgagagcggtgcagcaccttattcctcatccggtgcgcgctgcactgccgcgccgccgaggccgaaatcgtcctccacgctcgccgtgtcgcggcggagcatattttccatcacgcggatatcgctgtcgatgtccatcgcctcattgcggtacaaatcgtcgagctgcttgtcaaagcccttgatgagggcgtccatcgtctcttcgatgcgctcctgcgcgcgggagagattctcgccctcgatgcccgcctcttcaaacttggcgtagctgtcaagcagcttgagcgtcgtgggcaggtagtaattgaggaacgtcgcggcctgctgctgcttttcgggatgctcctcgacctcgcggaaaattttgcccgcaacggtctcgagatggtcgatcttctcgctcagcacggggtcggcgatgcggtcgttggccgagcggatggcgcgcagcgcgcccgcatagccctcgttggcctccttgggcgtgacgttttcctttttcgcggtcgcattcgcgtagtcggcaaaggcgtcggcgctgcggaagaagatgccgcggccgctgtctaagtacgcgcccgcgccgagcagacccttttcgaccatgtagtcaaggtcactctcgatctttttgcggctcttgcccgtcacagcgcagagttcgtccacagcaatgtagccgcgcttgcccatcacggcaaggtagcgcgcaacacgtgcgctgcgtcgcttcatccgctgcccggcgacgagcatggcaacgccgccggcaaaaaagccgcacatagggagaagctcttccatcatgtaggaataccagccgtaggcgatgacctcgcccagcatggtcacaaggctgataccaaagatcgcagtgatggcagcgcccacgatcgagaggatgcgggaggtcttgtccgaagccttcggcgcgcggttcatcttcttcgccgtctttacgacggtcttttctaccttgttcgtactgcgcgaggaaacgtttgcattcgggcttgtggacgtgcgcatgccgccgcgcgaggaattcaccttcttcggcttgtccgagagcttggagatgagcgcgatgaggccgatgggccacaggccgaaggcaaacagcgccgcgatcaaaatccagccgccgacgtcgacatcgttctttttcttcgtttttccgtcgctctcgtcaaagcggaacgaaccggtctcgggatcgtattcaaaatccttgctcatttacctgttctcctttttctttcccgctctcgcggcgcgctcgcgctcaaagtcgacgatcttcgtctttttacctgtcttttcgtccagcacatagagcgtattgagctgggattttaggttcgccttcaccgagtcgatgtagtcgcggcgcagctgcgcctgctcctccttctcctcgtcggtcaagccttcagctttggccttgtgcgccagcgcgttgatgcgcgcgatcttttcatccatcgtcattgtttgattctccttacaggtatcggcgcagcaacagcgccgttcttccttttttactcaggccgccgacctcggcgacctcgaacttgccgaggccgcgcgcggagatcacatccccctgcgcgacgggggcgtcgctcttgagcgtttcgcggtggttgagctgcacgcggcccgaggaaatgagctcctgcgccttgccgcggctcatcgaaaagccgctcgccgccacggcgtcgagccgcagtgtcgagaccgtgtcgcgaatctccttgaccttgagctcggggacgctcaagtctgaaagctcgatctcgctgaccgagagcttcacgcgccccgcgctcgtcacgttttgcagcagatacggcgcgatatcgcgcgagacgatcaaatcgcacgagccctccgacaccaaaatgtcgccgagcttttcgcgcgtgacgccctgcgccatcagcgagccgagaaagtcgcggtgcgtcagcgtatcttccttgcgatacgtgcagcggagcgccgtcatgtactcgctctcgtcggcctcctcctgccagtcgggcagaaagaggagcattctccgctccgcgcgctcatagccgccgcgaaaggcgcagccgtcatgaatggcggcggcgtgcagtaggtcctgcgcgctgcgctgctcagcggggttcaaaaagtccgtcgccgacgggatattgcggtttctgctctgctcacacttgtccagaatgtgcgccagcagcacgcgctcatcgccattgcgcgcggcgcgatccaaaagctgccgtctgtccatcatgctttcccattctgcgtgcgccagagggacgcatactcgccgttttgcgcgagcagcgcctcgtggctgccctgctcggcgatgcggccattctcgacgacgaggatgcggtccgccgagcggatggtcgagaggcggtgcgcgatcacaagcgtcgtgcgcccacgcgcgagctcgtcgaaagcgtgctgaattttgacctccgtcacgctgtcgagtgcgctcgtcgcctcgtccagaatgaggatgggcgggtttttgaggaagatgcgcgcgatggacacgcgctgcttctgtccgccggagagcatcgtgccgcgctcgccgacataggtgtcgaagccgtgcggcatggccatgatatcatcgtaaatctccgcgcgcttcgccgcttcgacgatctcctcgtccgtcgcgtcggggcggccatagcggatattctcgcgcaccgtgtcggcaaagaggaacacatcctgctgcacgatgccgatggcgcggtgaagagacgactgcgtaagagagcgcacatcttccccgtcgatacggatcgcgccctcgctcacctcgtaaaagcgcgggatgagctggcagagcgtcgacttgcctccgccggaggggccgacgatggcgagcatctcgccaggccttatatgcacgctcacgtcatggagcacaccttcattctcctcgccctcgtaagaaaagctcacatggtcgacgtcgatctcgccgcggcagtgttcgagttccttcgcgtccggtgcgtccttgagcgcgggctcgacgcgcatgagtgccgtgaagcgctcaagacctgcaaagccacgagcaaaaatctcagagaaattcgcgagctttcgcacggggttgatgaacgttgcgatgtaaagggaaaacgtgatgaggtcaatgtagttcatctcgccgcgcatgatgagatagccgcccaccgtgatgacggcggcggagagcagcgtcataaaaaactccatcgtcgcgttgaacacacccatctcgtggtggaatttgcgcttggagaccttgaattcctcgttcgccgcgttgaatttgtcgatctcctcttcctcgttggcaaaggcgcgcgccgtgcggatgccggagagcgacgactcgatgccgacattgatggcggcagtcttctgcttctcgccgcgcgaggctgccgtcatcttgctgcggcgcgacatgatgaccgcgatgaacaccggcaggatgcacgccacgaccagcgcgagccgccactcgatggaaaacaggatggcgagcgcgccgacgatcgtcagcgtcgaaatgagcaggtcctcggggccgtggtgggcgagctccgtgatctcgaagagatcgctcgtcagcctgctcatgagctggcccgtgcggttgtggtcaaagaagctgacgtccagctcctgcacgtgcgtgaaaaggtcgcggcggatgtccgcctccaccagaatgccgaatgtgtgtccccagtaggaaatgacatagtataaaagcgcgcgcacaatgaacgccgccatcatcacgcccatcacgataaaaaacgtgcggtactgctgattcggcaaaaggtcgtacatcgacttgcgcgtcacgagcgggaaggcgagatcgatgagcgcaacgaccgtcgcgcagacaaggtccaggataaacaggccgcggtgcggcttgaaataggtgaagagaatggaaagcggctttttctgctgaaattcacgggtcgtcatatggtcgatagctcctgcaaatactttttcaaggtaattgtagcacaggcgggcagtgcttgcaaggaaagccgcccctttttgcgtaaaaaaagaacggcccccggccgttctttttctctttacttgatgcgcaccgtgatggtcagcaccgcgccgccaacggtggccgtcacggtcgtggtacccaccttggcaggcgtgatcaagccgtccgccgagatagacaggacgctcgcgtccgccaccgcccaggtcgcggccgcgtccgtgccggaaacgctcaggcggatggtctcgctcggcttgatcgtgcagtcaaagttgccgtttccgtccttgggcagcgtcgtgccgacgttcgtcttgatgctcagggccgaggcatccaccgtcggggtggatggggttgtcgtggtgccgggattggtggcagttgtgtcgctgctgtttgcaggatcatttgcgttcggctcatcaccggtgttcgggtcagtggtgccgccgttgttcgcgttcggatcgtccgtgttcgtattgctgtcgtcgggcgtattgacatcgtcctgcacgccgggggtatcgtcgtcgtcggcgggcgtgatctttgcgacgatcttgtcaccaaagagcgaccagctcagaagcagcagcacgacgacgagcaccgccgccatcgcgccgcggacggactgcgtctgctttttatccgaaacgcgccggccgccgctctgtttgctggagttgtacttgatcttacggggatggtctccctcctcgcagaacgggcatctgcgatagctgggggaatattcttcgccgcagcgcgggcacttgagaagattcatgccgacgctcctttcttttgtcaaaatagagtctctgcgcgcgagcacacacggtgccgcgttcctttacataatacttgcttttttgtcccgcgtcaaccgaaacacgcaaatttttgccgcattccgccgcgcggccttgctttttcgccaaagtcttcctataatcgacttaacaacaaacgattcatggagggtctggcgatgaacaccatcttcattggcattgcaggcggcaccggttcgggcaaaacgacgctcaccgagcatctgaagcagcacttcggcgacgatatcagcgtcgtgcaccacgacagctattataaaatatcaggacaggccctttgaagagcgctgcaagcagaattacgaccaccccgacgctttcgagaccgatctgatggtcgagcagcttaaggagctcaaggcgggcaaggccatccgctgccctgtctactcctacgcagaccaccagcgcacaagcgagaccgagctcatccggccgagcaaggtcgtcatcgtcgagggcatcctcattttccaggacccgcggctgcgcgaaatgctcgacatcaaaatttttgtcgagaccgacgccgacgtgcgcattctgcgccgcgcgctgcgcgacgtgcgcgaccgcggccgcacgctcgagagcgtcatcacgcagtatttgacgaccgtcaagcccatgcacgagcagttcgtcgagccgagccgcaagtatgccgatatcattgtgcttgaaggcggccacaacttagtcgccctcgacatgatcatgcagcgcatcgccagccacatcgcctccgccgactaacgcagcggttaaaaagcctcgcagagttttacccgcaaggggtacgcggcatccgtaaggcggcagagccgccaacggctgcccaggcgtccgcagacgcgaaataaattggaatccgtttttccggcggcgtgtacgccggaaaaacacttctctctccgcgcgtgtcgcagccgcctttcgggcggcaaggcgcaaagcggaacgcatctttctcaaaaaagagggacgcagctttcagctgcgtccctcttttttgaatatcttttacactcccgcgaagtggaacacgacgccgatcaccgcggagactccgataaagacgatcgggtgcaggtccttggtctttttgatgtagcgcgtgaagacgagcagcaccagcgcaaggatgatgccgcgccagctgatcgcgccgtcccacgagaatttcatcaggatggaatcctcctgcgacgcgctcgtgatcccggcgatcacctgaagcatcacgcccgcgcaggccgcgccgatcaggccggtggaggcgggacgaaggccgtagaatgcgttggcgacatactggctgtcgcggaatttggcgagcatcgccgcaacgatcaaaatgacgatgatcgacggcgtcacctcgccgatggtggcgacgatcgcgcccggcacgccgccgaccgtatagccgacataggtcgccatgttgatgccgacaggacccggcgtcgattccgacacagccagcatgttcatcaggtccgtctgcgaaaaccagcccgtggtcgccccgatatccttgaggaacggcagcgtcgccatgccgccgccgatggcaaacaggcccgttttgaaaaattcccagtataagcgaagatacaaggtcattttgccgccctcccctcaagatttttcagcacgatgccggacatcgccgagagcagcacgaaccacaccggcgaaacgctcagcagcatattccccagcagcacgataacaaagatgaccgccgtgcgcttatccacgaccgactttttcagcagcttgagcacagcgttcaggatgagcacgcatacacacacctgaatgcctgcaaaggcgttctgcacccaggcaaggtgggcaaagttcgtaatgagtcccgccaggatcgtgataatgacgagcgaggggaataccacgccgagcgtcgcggtgatgccgcccatcgcgccttttctcttctgtccgacaaatgtcgccgtgttgacggcgatgatgcccggtgtgcactgaccgatggcaaaatagtccaccagctcttcttccgttgcccagtgcttattctgcaccacctcgcgctcgaggatcggcagcatcgccatacctccgccaaaggtcatcacgccgatcttggcaaaggtgagaaacagttccaaaagttccttcaaaacactttctccttactccacatatccgtaaaggccgcgcacggacacctcacccgtgcggacggtctcgaccgtcccgttttcgcggcgcacgatgaggccgaactcctcgtccacgtcaagcgccgtgactttttccttcgtatcctgccacaaaagctgcacctcgcgcccgatggtcacgcagcggcggcggtattcgtcgagatacccgctcgtctctccggatctgagcgccgtataaagcgcatcgagctcctcgatcatcgccgcggacagctccgcgcgcgaaatgagcctgcccgtctcgcgcaggatggacgttgcgatcttcgagacctcgccgacgaagtcctcctcgcgctggctgacgttgaagccgatgcccgccacgacgtactggagctcgccggtctcaccctcgacgctcagctcggtcaaaatgccgcagagctttctgccgttcaggatgagatcgtttgtccacttgatctgcgagtgcgtccccgccacgcggtcgaccgcgcggctcatcgcaacggcgatgagacccgtgagcggcatcagctgcgacggcgcaagcttcggacgcagcaagatcgacaggtaaacgcccttgcccgccgcactctgaaagctgcggccgcggcgaccgcggccgctcgtctgctccgccgcgacggcgacggtaccgtccggcgcgccgtcgagcgcgatgcgctttaagtaggcgtttgtcgagtcgatggaatcaaagcagtcgatgcgcttgccgacggtttcgacaggtcccaagtagctgcgcacggtctgctcggtcagcgtgtcgggcagcgacttgaggcagtagccgcgtcccgtgacggcgtcgatctcgtacccctgcgcgcgcagggcggaaatgctcttccagatggccgcgcgcgtgatgccgagctcggcgctgacggcctcgccggagacgaagtgtcccttttcccgcagcagcagcgccaaaacagtctcttttcccatagcgtcctccgttacaaaatgtaaccgaaattgttacccttttgaggttgacagtcggcggcttatcgcttacgattgacataaaatatcaaacgctgcgtttttcgcagccgccgtcttaggattgtagcacgcttgccgccgcatgtaaaccaaaatctcatgttttggcttacccggcggtttcttgacgaattcctgatttttccattgccgcgctccgccccggcgtgtacaataagacgctgacaaattatgacaggagtttccccgtgagcttttccgaccttacgtttcttttttattttctgccgctgtttttcgcggtctattacatcctgccctttcgcttcaaaaatgctgcgctcgtgctgggcagctttgccttctacttcatcggcgcgggcgcgcgcgacacactgctgctgtccggcgtgctgcttctgcactacgccctcgcccgcgcaatggcggggaaagaagtccgcacgcgaaaagcactgctgatcatcgcgctggcggcggacctcttctgccttgtgtacttcaagtacgccgcatttattctggaaaatctgggcaaactgacggggacggcgttctcccttgtcgagcttgcgctgccgctcggcgtcagcttctacctcttccagagcgcggggtacctcatcgacgtgtatcgcggcgaggaggcggagaaaaacctcatcgactacgccgctttcaccatcgcgttcccccagctcacgatggggccgatcttacgctaccgcgaatggcgcggcgcactaaaggaacgcacgatcacgcgcgaggacgtattctccggctttgagctctttgttgtcggcctgtgcttcaaggtgctgctcgccgaccagctcgcgccgctgtgggcatcgctcgagcgcatcggttacgaatatttgtcgacgccgctcgcatggctcggcgcggtgagctacagcttgcagctctactttgacttttccggctattctctcatggcgatgggcctcgggcagatgctcgcgctgcctgtgccgcgcaactttgacctgccctacaccgcgcgctcggtgagcgagttctaccgccgctggcacatcacgctcggcacatggtttcgcgactatgtctacatcccgctcggcggcagccgcaacggcaatgcccgcacggtgctctcgctcacggtcgtgtggtttttcaccggcctctggcacggggcgagctggaattttgtcctctggggtgtgatgctgcttggattcatcctgctcgaaaagttctgtatcggcgattttctcaaggagcataaagtgctctcgcacgtctatctcctcttcgtcatcccgcagacgtgggtcattttccgcatcacacgcttaaaggacatcgtcgcgtatttttcccgcctgtttccgtttttcggcacgcacagcgccgtgtctgcgcaggatgcgctcaagctgctctcatcctactggtggctactgctgctcgccgtcttcttctgtctgccgcagccgcgccgcttttatgaaaagcatcgcggcagtttactcgtccagctcccgctgtttctgctcttctgggtgtgcgtgtacttcatcgccacctcgtcgggcaacgccttcctctattcccgtttctaaggagacctttcatgtcctctcgtccctttttcctgctgccgctgtgctttgtcagcgcgctggcgctcaacgcttacgccgcgctcgatcccaccggcgtgtatcaggattatcttgaaaaactggatgccgcgacgccgcccgtcgcggcaatggccacagcggccgcagacggggtctacccgtggagcgagcccaaagcgcccgaacctcctcccgtcccagaccctgctccgcttccggacccggaaccggagcccgaaccggaagagcccgactcccccttcaccacggtggacgcgagctactttgacgacgcgctgttcatcggcgactcgcacaccgacggcttcaaggactatgcgggcctcaataacgccgactacctctgccacaacggcctgacggtctggtcggcggtcgaaaaggcggagtttcccggcaagcagacgcttgcgcaggcgctctccggcaagcactacgacaaaatttacctgatgctcggcatcaacgagctcggcaccggcacggcggagagctgggccgcacagtacaaggtcctgctcgacgaagtgcgcgagctccagcctgacgccatcatctttttgcaggccatcttccacacgacgcaggaaaagtccgacgcgacgttctttaagaattcgaccatcgacgcacgcaacgccgagctccaaaagctcgccgacaacgaaacggtcttctacatcgactgcaatcccgtcttcgacgactctaccggcgcgctgacgccggaatactctggcgacggcgtccacgtcaaggccgcgtactatccgatgtggagagactatctcttccagtttggcgtcgtaagatagcttcaagaaagcggtgaagccgctttcttgagaaagtttcgctgcgctctgcgcctcggttggccgcataatgcggccaattcgacgctcgctccgcgcaaagtgtttttcgccacgcacttgtcgcggcgaaaaacaaatttcgatttgaaccacacgatttcatagccgctcatta

SEQ ID NO: 10205 - DNA, 6545 bp, Unknown
  gut microbiota DNA sequence
atcctccgaaagccttgcaaataaaggatttttcgcattgtccccaccgtatccctttatctgatttcacgcattgttgtccttaacttgacctcgcacaagggaaaaatcaagggaaggaaaaactggtaacaaactataaaacagcgtggcaatcggggaactgtgacgtatgtgcgaatatattatagcggaggatttcgatatggacaagtacatttttgacgaaggcaacggcctttggtatgaactgattggcgactactattttccctgtttgactgtacccactgaagaagaacagcctgtcggtatatgggggcaacggcacaagcggtatatcaaagaataccacccagctttatacaatgccttgttgctcaacggcagactgaacagctaccttgccgatattgaccagcaggcacaagaacggttagataccattattgaacagatggcccgatcccaaggtatcaccgaggcgctgaaagctgccgaccaaatgacatgggtcggtaagatgaacaatatccaagcaagtgcaatggaaattgtaaacagtgagctgatttacgcttaacagattagcgaagcaggggccgccccaatcgggcggcccctgcttctgctgtaacacgctttactcattgatagccagagagagattgtccagaatatcttccacttcgtccgtggtcagatacgcaccatgcaagctgacattggcatggcttgtacagcactgcgcccaaacgtgcccgttgtccatttcaatcaggaattcatggccatcaacggacgtgtaataataggcggtttcgtagctgccatcaatgacatacgtttggacaaaatagtcggcttgtgcgatattttcgattgtgaaatcgacatatccgctgccgttcttctttgcgtaaagggcgtcaaagttctcgctgacgtaatcaccttttgcatcggacacgacaaaggacaagttggcatctggaacataatcataatgctcgttcacccattccaaatcaaaggtaacgcgacctgtcagcgtgtccagaagatttgcggggttttcggcagtatactccattttctccgcgccatcctcccgaccaatgcggcggctgcggagaactggatcactgctcagaacctctacggagtcccactgatggtattcagatactactccgccgttaatgcgttcgcccgcaacccaatcgtccgatttgaaccgattagattttatcgtttcttccaaagtggcgggcgggtttcctccggggccgtcgatagcaacagcaccaggagcaccattttcacttgaaggcatgggaatgtcatccctgctggacacgatgatgtcatttctgaacagatgcacacccaccgctgcggcagcggtcagcgttaatgccatcatcataacaacagcgacggcaatcaacggcacacgagattttaaggtcgattttttcataggaatgtcctccgattgtttttggtaggaggcaagctgggaacgaatacgctcccggctctcctgcggcaatttcagcccatcagaaatgcgcttgaagtttcgctccatatcaatccctcccaagttgcttttttaagatgtttttggcccgatgcaatctcatggaaacggctgagatgccgatgtgtaaaaattctgagatttcccgaaacgagtagccctcaaagtagtgtaggctcacgacggccctatacttttccggcaactccatgaccgcataaaatatgtcccgatcctccggctgtatcagcagaacagcctcgtccaaaggaatggcttcgtgcttctttactgcggtgagaaggtttttacaatggttaatcgtaaccttagttagaaacgcacgctctttgccgggataaactatcatgccgccctccaacagtttaagaaaaacagtctgcacaacgtcctccgcttcctgcggagagcggagataactgagagcaatacgatacaccatatccgcataacggtcaaaaagctccagcacggtttcttgctccatcggcgcacccccttccgcttcctcttgaggcctcatatatataacaaatcagcagaccgaatttgcacaaaaattttcaagaaaattatagcacataaaacagtatataacctacaaactggctcctgtttatgtacgccgccgctatggattgcaccatagcggcggcgttctctatcatctgctgtccctgtcaactgccctcctgtgtggctgtggctgttgccgtttgccctcgtcctgcaaccgccgcaggcgttcccggacgcttctcggctctgggggccgctcttttacggcgggccgctggcgctcctgcaccttccgctcccactcggccaactcccggttatgctggctgacaacggcctcggccttgcggtaggtggctgtaaatgtctgcacatcgggataaccctccgcctggacgatggagggaagcgcatccatcctgtggctgatttcctgctctgtctgctgtatctgcccagcgatgtctttgcgctctctggtcttaaagatacccgtggcggcggcaagctgctgcttcaagtctggcagcacatcctcctgcaagtatcggatgctcgtggcctcgtccctcactcgtatcatcagacctcgcatggcacggaactctgccatatcaatgtccagcgtgggcttcggcggcattgcccgctggcggatcagcccttgcaggaaggccctggccttgcccacgatggcccggaacaggtgcgggagccacccggcctgatggatggattgcctgaccttctcgtgtatctcagcctgcttgacctccaatatctctgcctcggatatgcccgtcaaaagcgccatatccgccgttcggttccactcctgacgggcggcgttgtccgctttgatttcctccgccttgggattgttcctgcctatctttttggtgggcaaatatacgctctgcgggtcaaacacctttagctgctgctccgggtctgagatatagcggttgataaggccggtatagaactccttgacctcagccacaaagccctcctgcttgaagcgggcgtccttaacgctgaacatatggctctcgtagacctcgccctttttgatgacggtacagccggggcgtatctgcccaccctccccggtgatctccttcttggtgcggacgtgcttccccacctcgtcatagaacatattccgggtggcgaccttgactacgggttccggcaacaaccgccgctcactgaaaatcaggtggatgtggtagttggtcttggccttgttgtggtgtaggccggacacacactccacgttataccgcttttgaaattcctctgtgaactttgtcagaacccgctgcgggtcatagcgtgtgaacttctccggcagggcgatgatgaactcccgcgcctcgatgcacgtcccctcggtgccgctccgcttgaactcctgctggttttcccttgcgagggaagtccagaaggcggcatcggcggtatgataggtggcgtacaggttctcctgtctggcggggctggtgatataggaaatacgccccttgacattggacagcttcgacatctggatgaagctgtgtcgcgtcatgcctccgtccttcctccggctgtgtcagccggtgcgtggagcgacagcggagcgcaagggcggtttagggcagtccgccgctgtgcggactgccctaaaccgcaccgccgcgccagcggcggcagcccccggcagggcgaaatacacagagtacaaaccgaaggtttgtgcgatgggtatatttcgctctcaaacggcgaggcctttgtggtggcgttcgctccgctcacgcctttttgactggccctcatcactccacgccccgcacatcgtccctgaccagcagattccgtccctggttgacggtcatgaaccgctccagcgtgtcgctgcggatgatggtcttgcgcccgaccttgaggacgggcagctttctccactccaccagcttccgcatggtgttcctcccgatgccgctgcactcagcggcttcctcaatcgtcatgcccattttgacagttgccattggtgtcacgctcctttcaatgtacttattttgcaaccctcgctgatttattataatcagtctgccatcgcctgtcaacctattttaagtccgttctataaaacaatttgaaaaatagggttgcaaatcaaattcacctatgttatactaacactcgaaaggaggccgagccaatggataaagacatagcttttaccccaaagcaggtcgggcagcgcattaaggagcgccggaacgaaatcaacatctccatgccggaactgggcaggcgggtaggggtaaacaagtccaccatccagcgatacgagacagacggggtagaccccaagcgcaccatgattatcaacggactggcggacgcgcttctcaccacccccgaatggctgacagggttatccgatgaaaaggagtataactccaaaaccctgtgccagatggatattgagaagcacatagcggcctatctggacgaactgacaaccaccgtccagggtgaacctcaccaacagcttttgaccaccttcctcggtcagatcgtagacctctattccgtgttctgcgtccactttgccagggcgatggccgaggcagaccacatcgccgaggacgagggcttgaagaagtccctgatgcgctacgccatcgagtctggggctgtgattgaaaaggtctaccgccgggagatggaaacgccggtggaggacatgaagcggttcatggacgggcttctgcacatctatgacgagggacgcaccaaaatgaagataggcgacctgcttgacatgagcagcgaggcccgtgagcggctgaacgggcagaattgatccgtggcaccttgacaacgaaaaatgccagtcagtacgactggctggcgtgacatgattgaacgcacatcatacgtcacagtcccgattgccacggatagaaaggagtaaaatttatctatggcaaaaggttctgtacgcaaaaagggcaaaaagtggtactatcgcttctatatcgaggacgagagcgggaaccgggtgcaaaaggagtaccccggcaccgagagcaagtccgaaacggaagccctgctccgcagggcgatggaggactacgaggaaaagcggtttgtggcgaaagcggaaaacatcaccgtgggcgatatgctggatatgtgggtggaggaagaactgaagcccggtacattgagcaatggcacagtgatggcttatcaggggacggtgggccgtatcaagcggcaccccctgggcaagcggaagctgaaaaccgtcaccgccgaccatctgcaagccttcatcgacttcatgagctacggcggcgccaatcccgatggaatgacctccccgcccatgagccggggctatatgctccaattctcagcggtactgcaaaactcgttccgcttcgccgtgttccctaaacggcttatcacgttcaaccctatgcagtatgtgaagctgcggggacggaagcaggaggcggacatcttctccgaggatatgggggacgccgctgcggttcccaccatcagctgtgagcagttccgagcgttggaggactttctgaaagagaaggacaacccggccttgctgcccatccaaatcgcttattataccgggctccgtatcggtgaggtctgtgccctcacctggaaggatatcaacctggacgagcagtatctgacggtgcggcggagcatccgctacaacggggcaaggcacaagacggagatcggggccaccaagcggaagaaagtccgcactgtggatttctgcgacaccctggcggcgatcctcaaagcggccaagagggaacaaagtaagaaccgtctgcgctatggtgagttctaccgcctcaactactacgccgaggtcagggagaaagaccgcatctattatgaggtctataccctgccgaggacggaggaagcgccggaggggtacaaggagatttccttcgtctgtctccggcctgatggagcgatagagacaccgagtacggtgagcatcatgtgccgcaaggcaaaggagaaggtagagggtttggcggacttccatttccatatgcttcgtcacaccttcacgagcaacctcctgtccaatggggcggctcccaaggacgtgcaggaactgctggggcactcggacgtcagtaccacgatgaacatctacgcccactctacgagggaagcgaaacgcaactccgcccgactgctggataaggtggtcaacggggagtaaaaatctttcccttgtttcagcccgtaagggaaaaaacaagggaaagtacatacggtttgaggatttgataggcggaaacgcctgatattacaaggtttttcaaggggaagcacaataaattccgatttatttgcgccgtgcgcggcgcaaactctgcgaggctctttacgtaaaaag

SEQ ID NO: 10206 - DNA, 32100 bp, Unknown
  gut microbiota DNA sequence
tacattgcttcgttttattcgtgcttgaccttatagccgcggttcaatctcatttcgagcgcgtcgagctcttcgtagagctcaggcggcaccttgccgatcttctcgtaatactcacgcgcgtcctcgcactcctggagccagagctcgcggtcgaccgagagcaggcggcgcatgtcgtacatcgacatttcaagcccctccatgtcgatatcgtgggtgttgggttcgtagccgagcgcggtctccgccgcgccgatctcatcgtcggcgcgcgagatgatccattgtaaaacacgcatattgtcgccaaagccgggccaggcgaagttgccgtcctcgtcggtgcggaaccagttgacgttgaagatcttcggcggcttggggatcttctttcccatgtcgagccagtgctgccagtagtcgcccatgtggtagccgcagaacggcagcatcgccatcgggtcgcggcgcacgacgccgacgcggcccgtcgccgcggcggtggtctccgacgccatgatcgagccgataaacacgccgtgctgccagttgaaggactggtaaacgagcggcgcggtcttcgcgcggcggccgccaaagacaatggcgctgatgggcacgccctcgggattgtcaaactcggggctcagacacgggcagttgcgcgcgggcgcggtgaagcggctgttggggtgtgcggccttttcggggctctgcggcgtccagggacggccgcgccagtcgatggcgcgcgcgggcggcgtcttgttgagtccctcccaccagacggtgttgtcgctgaggtcaagcgcgacgttcgtgaagatcgtgtccttgtgcgtggagatgagcgcgttggggttcgacttcatggaggtgcccggcgcaacgccgaaaaagccgttttcggggtttacggcccagagcctgccgtccttgccgacgcgcagccacgcgatatcgtcgcccacgcaccagacgcgccagccccaccgctgcaggccctcgggcgggatgagcatggcgaggttcgtcttgccgcaggcggaagggaaggcggcggagatgtacttgatctcgccgcgcgggttctggatgccgaggatcagcatgtgctcggccatccagccctcctgacggccgaggttcgaggcgatgcgcagcgcgaagcacttcttgccctgaagcacgtttccgccatagttcgagttcatcgagatgatcgtattgtcctgcgggaagtggacgatgtacttgttgtccttgtcgaggttgcactggcagtgcaggcccttgataaagcccgtatcatcgccgagcgcgtcgcacacggccttgccgatgcgggtcatgatgtgcatgttgagcacgacgtaaatggagtcggtcagttcaaagccgtatttggcgaacggagagccgatgatggacatggagtacgggatgatgtacatggtgcggcccttataggcgccgtcggccagagcgtacattctttcgtacatttccttgggctctacccagtggttcgtggggcctgcgtcctcttccttttcacagcagatgaacgtgcggtcctccacgcgcgccacgtcgtcggggtcggtgcggtgcaggtagcatcccgggagcttgtccgggttgagcttgatgaggatgccctccttgacggcctgctcgcgcagcgcgtcgagctgttcctcttcccccgtgatccagacaatcttgtccggcttggtgatggcggtcatttcgtcgatccacgacaaaacggccttgttgttcgtcaaattcgtcatttgttctttccctcgtagcatgttcacggtgtaatgaaaaagaaaaattttgcaccgcgtcttgtgtggtgtgctgtgctgctttggggcggcagggagctaaccgatgcacaggaaaaatggctgctattgagtttgactcctttctgccgaaaattgtagcagaatgtcttatcaatagcaaccatatggcttatcaattttttaaatagatgatactgcgttatcacactaacgcatggattgccttcgccagcacggcaaattcactgagccccagccgctcgccgcggatgttggcctctaagccgcaggacgtgaccgcctgcgtgacctgctcttttgtgagctggctgccgaacgccgtcatcaggctgttgacaagcgtcttgcgccgcagggcgaacgcggcgtacaccacgcggaagaagaacttctcgtcctcgacctcgaccggaggctccctgcgcacgacggcgcgcagcacggcggacgtgaccttcggctgcggctcgaagcactcgcgcggcacggcgaacaacagctccggctcggtgtagtattgcatgaagacggagaacgcgccgtaggcgctcgtgcccggcgcggcgcagaggcgctcggcgacctccttctgcacgagcaccgtgatgctctcaaagcacttcgactcgatgagcgcggtaatggcaggcgtcgtgatgttgtagggcaggtttgcgcacacgatgggcgtgaggtctgcgaatttttcacgcacaagcgcagggatatcggttttcaaaatatcggcggacacgacctcgaagttgtcaaagcgcgccatggtctcgtccaggatcggcagcagcgtcttgtcaagctccacggccaccaccttgcccgcgcgctcgcagagctcgtggctcagtgcgccgatgccggggccgatctcgagcacgccgttctgctcgtttgcgcgcgagctctcggcgatctcataggggatggcggggtcgatcaaaaagttctgccccatggactttgaaaaatgaaaaccgtggcgctttaagagcgcctcgatggcagctttgtcattgcgttccatagcgtggttcctttctgcgcgctgggcgtaaaaaattgtaaaatgattctaccatattttgcgcaaaagagtagtaaaaatttttcccgtgtgataaaatgcagaaatctcagaaaaagagggagactttcatggagctcacaccgcaaattctgatcgttgttctgccgctcatctttcttggcggctttgtcgactccgtcgccggcggcggcggacttatcacgcttcccgcctatctgatggccggtatccccgcgcatcttgcaatggggacaaacaaggtcgtcaacggcaccggcacggcgctcgcctcgttcaaatactttcgcggcggcaaggtcctgctgcgtcccgccatcgtctcggggatcggcgcgctgctcggcgcggccatcggcacaaagatcgctctgctcatcaacgaggacattctgaagatcatgatgctcgtcgcactgccctgcgcggcgatcctgctgatgctcaaaaaggacttcggcaaggaaaatgacgcacccgcgcgcgagtacacgccgcagcaggagctgacgcgcgccgcgctcatcggtttgggtcttggctgctatgacgggctcatcggcccgggcacgggcacgtttatgatcatggcgtttacgatggcactttcgatggacctcctcacagcgtcgggctgcgcgaagatcgcaaacctctgctccaacgtcgcctcggcggtgctgttcatcttcagcggcaaggtctggtggctgctggcgctccccgcggcggcctgcaatatgctgggcgcctactgcggcgcgcgctacgccatgaagggtggcagcaagcgcgtgcgcggcatgatctttgtcgtgctggggcttctcttcatcaagatgggctacgagctgctgttctgaaaagacgaattctatataaaaaagcggacagtcaaggctgtccgcttttttcagttcttcaggctgtgcagcggcgcgggaattctgccgccgcgcgcaatgaactctgcgctcgaataagggtggaccgcctgcaccggtgccgagccgagaagtccgccgaactccaccgtatcgcccaccttacagccaggcgcagggatgacgcgcaccgcagtcgtcttcatgttgatcatgccgatggccgcctcatcggcgatgatggcagcaatggtctctgcgctcgtgtcgcccggaagcgcaatcatgtcaagtcctacggagcacacgcaggtcatcgcctccagcttgtcgagcgtcagcgcgccggacgacgccgcggcgatcatgccctcgtcctcgctgacggggataaatgcgccggataagccgcccaccgaggaggacgccatcacgccgccctttttcaccgcgtcgttgagcagggcgagcgcggcggtcgtaccgtgcgtgccgcagacctcaagccccatttcctccagaatgcgggccacgctgtcgccgacggcgggcgtgggcgcaagggaaagatcgacaatgccaaacggcgtatcgagcctgcggctcgcctcctgcgcgacgagctgacccatgcgcgtgatgcggaacgccgttttcttcacggtctccgccaccacgtcgaacggctggcccttgacgctttgcagcgcgtgatacacaacgcccggcccggaaacgccgacgttgatcactttctccggctcgcccacgccgtggaacgcgcccgccatgaaggggttatcctctaccgcattgcagaagatcacaagcttggcgcagccaaagccgccctgcttttccgtgagcgccgccgtctttttcaccgtctgccccatcagggcgacagcatccatgttgattcccgccttggacgagccgacgttgactgatgagcacacaaggtccgtacaggccagcgcctcggggatcgcagcgatcagcttccggtcggcgtccgtcatgcccttttgcacaagcgccgaaaaaccgccaataaagttaacaccgacatttttggccgcgcggtcaagcgccttggcaaacgggacatagtcttccgtctccgacgcggcggcgaccagcgcgatgggtgtgacggaaacccgcttattgacgatgggaatgccgaattcccgctcgatctcttctcccgttgcgaccaggtgctctgcatagcggctgatcttgtcgtagatcttttcacacgcacgctctgcgcttctgtccgcgcaggagaggagcgagatgcccatcgtgatcgtgcggatatccagatgctgctggtcgatcatacggatcgtttccagaatatcattgcggcttagcatgattctttccctccccgctcagatcttgtgcatcgcgttgaagatgtcctcccgctgcatgcggattgcaatgtccatctccgcgccgagggcgctcagcttttccgtcagttccgtaaaagagagcgaacaattttcgagatccaccagcatgaccatggtgaaattttcctgcaaaatcgtctggttgatatccagaacgttcacgttccactttgccagcagtgagctgacgcccgcgataataccgacctgctctttccccagtaccgtgataatggctttcatcctgtgttctcctttcggtttctgccggtaattgtatcacatcaccgcaataaagtaaatgttccggatgcgcaacatacgcatccggaacatacatttatcgtactattcgacaaaccgccccgctcagtcgaggaagtagaccgtcgagttcttctggcggccgaactgcttgcactcctgataggaattcatatagaggtcgatcgccgcgccgcgcacgccggtgtcctcagccacagcgttgccgtaggtgtagcccgacgagccgacgatgaacatctcggtaccgaggggaatgaccttcttatccactgcgacggtgccgacgtggaccgtcgtgcccgtggccgttctggtgcccacgccgccgtagcccgcggtataggccgtgcaggtgaccttcatcgagccggagaagtggacggaatcgccggacttcatcagaagatagccgctgccgtcgctctcggtgacaacggacttgaccgtgtcgccgctctgcgccttgtcgacgagcgtgccggtgtaggtgatctccgcgacggaggtgtcgttcttctcctccaccgcctggcgggagacgaactggccgtcggcatacacgacctcgtaaacgatgtcgcgcgtgccgtcgatgccctgctggacgacccgcgtctcgcccttggggatgcggtacgatgtggaggtcagcgtggtgtggggagccgcctcggtggcggtctcatagtaggtgaagtcagaggcaacggtgatctcgacctcttcctccgtgacgtcgaccagcaccatctcaagcgggctgaccgagatctgcaaacggcgcagcagctcgctgacgcgctcgccgtttcttgtggtggcgtactcgatatcgtcgccgtgtgtcaccgtcaccttttcaccggcagggagcgtgacctccgcgtcaccgctctgcgcgccggcgacaatgacgcgctcctgcgggatgtccgttgtgccgtcgagcacgctgaccgtatcgccgtcggcgatgaggtacagcgcgtccgcgcgcagctcgggcgaactgttcagcagcatcacagccgcgaagagcagaaagaacatcgctctgcggcagcgctgggctgtgaacaaatttttcaaaaacttctgcatgggatactccttttttcgcggcgtgagccgccgcagcttcgcgcagctgaggaagtgcgctgcgtccggaaaagattacaaaatgtaacttttccaaaacttgctggcagtataccgcctgaaaaaggatttgtcaagtttccgccgtttgttcgccaaaagttctgtattttataaaattttcgatatttttcttattttcatcttctaaaagttgcgttttaagtcatcgaattcgtgattttctcgatttatgtaaaccatcgtcacccctctcccccgcctcgccgccatctcggcgtcgaagaggcggcgcacctgccgacgctctttgtcccgtccgagcgggcaaaaaacttttgggagcaggccgggtgtgtcccgctcccgccccgcaaggcggcaaaaacgcggaaagccctgcaaacactggcttttttgcttctccgccgcacgctctatcccctcggacagcaaaggaatgccccctgcgccctttccgggcgcaggggacgaaaagccgcctcaacagcgtgtcgcgatgccaaaatatgcaagtttgactttttgaaaattcatttattgaaattcatttatgtcaacctgattttttgatttttgttggcaaaggtcacaaaaatcgcgcttctttttcgcttttcccgtcaaatgggcgatcgcagtggaagttacatttcatcctttttttcgtccgtttccccgtgaaaatgaaggtaaacggacgccgcggcgtctttcggcagcacacgttcgagggtgaaaatgtccgcctcccgaatcgccttaacgctcttgaacgtcttgagcagcgcctgagcgcgcaccttgccgacgcccggaatcccgtcgagcgccgagcgggtcgaggaccgcgaatggctctcgtggtggaacgtgatggcaaagcggtgcgtctcctcctggatctgaccgatcagggcgaagacgttcggcgcggcgtgcaggtcgatctcgcggccctgcgcggtgacgagcgcgcgcgtgcggtggcggtcgtccttgaccatgccgaagatcggcacacgcacatgcatctgcgcgcacacgcgctcggcgacgcccgcgtgcgtgatgccgccgtcgatgagcatgacgtccggcagggggctgaacttctcatcgccgtccagatagcgctggatgcggcgcgtgagcacctcttccatggaggcatagtcgtctgggtgggccgacaggctcttgatcttgaatctccggtaggcgctcttcttgggctttgcgccctcgtagacgaccatcgacgcaacgatgtcgctcgcgccggtgttcgagatatcgtaggactccatgcgcccgggcggctcggggagcgagagcatccccgcaagctgcgtcagcgtgcggttctcgcgctcctgcgcggtcgtcacgcgctcgacgtcctcgcgcgcgttgcgctgcgccatggcaaggagctccgccttctcgcccctctgggggacgtggagcgtcaccttgcggcccgcgcgctcggtcaggatctgtgcgagttcggctgcgccctcgatctcgcaaggcagcagaatttcgcgcggcagcacgctcttattgaggtaatactgcggcagcagtgcagacaaaatcatctgctcgctctcgtcctgcggcgcggcgaagaggttcaagtcgcgacccgtcacgctgccgtcctcgatgtgcagcacagcgctgccgcatttgagcgcgccgcggtaaacgccccagatatcggtatcggcgcagatgccggcaatgaccttctggcgcttgcccagcacctcgatggcgcggatgcggtcgcgcagtgccgctgcctgctcaaagtgcagatctgcggcctcctgctccatctcctcgcgcagcgcgcgcgttaagcggcggtagtggccgttcagcagctcttcggcctgcccgatgcggcgcatgtactcgtcctcatccggcgtgccgcggcagaacgcgtcgcagcgccccatgtgatggttgaggcagggccgctcctttccaatgtcgcgcgggaatttgcggctgcacgtcggcaggcggaatgccgcacagatcgcgtcgatggccgcgcgcgtctcgtttcgtccgccaaacgggccaaagtacagcgcgttgtcgtccgcgggcttagaggccatcgtaaaacgcggatagtgctccgtgccgaggcgcacaaagggatagcccttgtcatcctttaacaagatattgtagcgcggcatgtgctgcttgatgagcgagttttccaaaatcagcgcctcgaactcggtcgagacgaagatcgtgtcaaagtggtcgacctgtgagaccatgcggcgcgttttctcattgtgggaggaattctcctgaaaatactggctgacgcggtttttgagctttttcgccttgccgacgtaaatgacgcagccggtcttgtccatcatcagatagactcccggcgcgagcggcaggtcgtttgccttgtccaaaagctcctgctttgtcacgggacattccctcctttcttttcatctctacattataatatataatagtatatccggtcgaacggtgccggtaaaatggaaaaaggcggcttcctgtggaagccgcctttcctggttgtttgttattcgccgaaattgttggaaaccagctcgcacagagcggtcacggcttccttttcgtccgcgccgtcggccagcagcgtgatggtcgtgcccttgacgatcccgagggacagcacgcccagcaagctcttggcgttcacgcgacgctcatccttctccagccagatgccgctcttgaactcgttggccttctgaatgaagaacgtggcaggacgagcatgcaggcctacttcattgttgatcgtaacattctgagtatacatcgttactactccctctccaaaaaaatctttcggactttatcgtatcatataccatcgggggccgattcgtcaatgccatttcgcgcgaaatggcgcggatttggcaataaacacagacaaagcgtctccccgggcgggcatttatttcaactcgaccacagtgacgcccgactcgccctcgccatagttgccaaggcggaagctcttgacggctttgttgcgccggaggctcgcgtgcaccgccttgcgcagcgcgcccgtgcccttgccatggatgatcgtcacggtctcgagatgcgccatgacggcagcgtcaatgtagttatcgagcacgctttcggcctccagcgtctccatgccgcggatatcgagctcgcgcgcagcggacgccgtgcgcagaatgcgctgcgagggggcaaactgcggctgctttttggcagtcgccgcgcgctccgccgcctcaatgaggcggacctcgccggctttgaccttcatctgcaaaacgcctgccttgagcgtcagcgtaccgtccttgacagctgtgacctcggcctgacggcgcgtaccggggatctcgaccagatcgccgacctcaatgggccgcgagggcttggggatgggctccgcgctctcgtcgcgcacgcccgcagcgtcgcgcgcctgcttgatgttgtgcatgatctcggcgcgctgggcgttcatctgctgggcatcgagctttttctgctgcttgcgcagcgcgtcgagctcgcggaacgtgtcgtccgcgacggacttggcctcagccaaaaggcgcttggcctcggcttcgccgcggcttctcgcgttctccttcgcgcgctccatctgcgtgcggaattcgcgcgccttgcgcgcgtcctcctcgcgctgggcgtaaaggcggtcgacctcggctttttctttctctaactgctgcctcttctgctccagctgcgtcagcacgtcttcaaagcggatgctctcgctgtccatctgcgccttggctttttcaatgacggcctcggaaagccccagccgcttcgagatcgcaaaggcattcgacttgccggggatgccgatgagcagcttgtaggtcgggcagagcgtttctacgtcgaactcgcagctcgcgttctccacgcccgcggtcgtcatggcgaaggtcttgagctcggcgtagtgcgtcgtcgcagcgatcttcgcaccctgtgaacgcgcctgctcgatgacggcgatggccagtgccgcaccctcaacggggtcggtgcccgcgcccagctcatcgaagaggatcaggcagtgctcgtccgcctcgtccaagatctgcacgatgtttttcatatgcgccgagaaggtcgacaaactctgctcgatgctctgctcgtcgccgatgtcggccaacaccgaggaaaagatgctcacggcgctgcggtcgtcgcaggggatatgcaggccgcactgcgtcatcaggcagaggaggccgagcgtctttaagctcacggtcttgccgccggtgttcgggcctgtaatgacaagcgtatcgaagctgcggccgagctcaatgtcgatgggcacggccttcgcggggtcaagcagcgggtggcgcgcatggcgcagatacacgctgccgtcctttttgagctcggggcgcatggcattcatgcggtagctcagctcgccgcgcgcgaaaatgaggtcgaggtggacgagaatgtcataatcccacagaatgtcgcggctgaagctcgccgcctcgcccgagagggcgtagaggatgcggtcgatctccttctcctctttcgcttcgagctccttgagctcgttgttggcctgcaccacgcccatcggctcgacgaagatcgtcgcgccgctcgaggacgtgtcgtgcacgaggcccggcagctcgccgcggcactcggccttcaccggcacgacgaagcgcccaccgcgctgcgtgatcagcgcgtcctgcaaaacgttccggtagctcggggacgaaatgatgcgctgcaggatctggcggcccttggccgccgccgcgcgcttgtggcggcgaatttccgcgagctcgggcgaggccgcgtcggcgatctcgttttcgtcgaggatcgcggtcgtgatcttctcctccagaaagcggttcgggtgcagggagaggaagagcttgtcgatgaccgtcccctcctcgtcttccttataataatcctgcacgcggcgcacattcgtgagaagccccgcgatgtcgagaagctcccgcgtgttgagcatgcctccgcgctcggcgcgggagagcgcttcgcccacgtcgcgcacgccgccaaaggcagggctgccgcgcagcatgatcatcttgcgcgccgcgtccgtctcgtcgagcaggcggttgacctcgccgaaatcatccgatggcgtcagccgtcgcgcccgcgccttggcctccgcgctcaccgcgtgatgctcgagcatctccaatagccgcggcagttccagcacgcggatggatttttcaaacagttcactcatagttttctccgaaattttgatttcgattcgtatttctttcgacagatatttcgtttagttgtcaattttcatgcttttgtagaagtccagcgttttgaatcgccggtcaagctgcacctgcgcaaacacctcgcacgctgcggcaaagcgcttttccgtctcgcccgagagggaaaacgacagcatccgcttcggctcggaaaacagcacatggcgcatcgccgcgaacgagcccgcgtccagcggcagaaggccgcccccgccgtggtccgcacattctttgcacagcagcacgccctgctgcgcgtcaaacaccggctctttcgggttgtgcgtgccgcagacggcgcagccgtcgagcagcggctcgtagcccgaaagagcgagtaacttgagctcaaacgccgccttgacgatgctctgcggtttttgcagcgtgtcgagcgcatagagtgagttgagcagcagcgacaaaatctccggcacgggctcgtcctccgccgtgacgcactcggtcatctcggcaaaatacgacgcgagcgacagtagctcaatgtcctgccggataccgtcaaacagcgtgatcgtcgacgcctcgtcgaggtagtaccagttcccgcgctgatagagtacgagctcggaaaaggccagaagctcactgcccgcggcgatgcggcttcccttgcgccgcgccccgcgcgccacgaccgcgatccgcccgagcgagtcggtcagaatattcaatatgtagtcggcctccttcgtcgccgtcgcgcgaaggacgatgcctttggtcacgagtttttctgacataaaactcctctaaattgttttacaccaaggggtgtaaagggtggttgccttgcaggcgggatgtttttttccgcgcactgcgcggagggagaatgcagcgcgtaggcgctgctgccggtcaaagggggtattctctttccaaagagaacaccccctttggaacccccagagaaaggcaagggggcttcccccttgaccccgcacattggcagtttttatcttgaagagctgcacgcgctgcgcattgcacagccgttggcagctttgctgccttacggatgcggcataccccttgcgggtaatcaggtgcggtgtacatggcttcgccatgaacccctgcgtttcgtgacaactctcaaccgcgccttactatcgtgaggcgcgagtgacgtttgcttggcggcagactgcgtgcgaaatagcggcattgctggcgctcgccgcattgtggagtgcttcggtagacggtgattactgtgtacttctacaagatgggcagagcggcacccgcaaggggtgtgccgcatccgtaaggcagcagagcctccaacggctgcgcaacagcggatgataggagcaagtcaaatcgtatagcaacgccaaccgcggcaacgccgcgcgcaggaagtagcaatcggcaagcattgcagctcttcgagctgctcgcttgcaatgggaaacgcctttcttttggacgggcgacgcccgttttctttctcgggaaagaaaatgggggtcgcatcacgcggcacttgtgccgcattgacattcgcacctgtgcgaaaaaggaagaattctctttcgagaaagagaatatccccctttcccgcatcccctgcacggtgcaggggaaaaatccctcacccctcaaggggtatcatttactgccagtaaataaaaaatcggctccccggttttcaaaaacagcgcgaaatatccgtttcgcaaattcctcacctcatgcttagcatgaggaaaactcccgcgaactatggctgggaaaatttattactgctttttgatgcagtcaatgaagctgccgatcgccataccgatgcacgtaccgctcgccataccggcggccatgttgttaaaaagcggctgccccagtgcaaagccgatgctcatgccgatcagcataccaaaaatcatacaattgccgctgtcatcggtcttcttttctttcttatcggacatgtttttccttcttactgttcgtcgtagccgaagcttctgatatagttcatattgtcgcgccagtttgtcccacgcagcctgccgccgcgcgggaacccattaatccattgacgggcgaagtgaattcgccccatggcattctccgctgacgctccgaatgacgccgcgcacgcggcggcttgctcacgctcgcaggaaaaccggcgtttcccctcttctgcgcagcttactgctcgtcgtagccgaagcttctgatatagttcatattgtcgcgccagttttccttgaccttgacccaagtctcgaggtagacctttgtgcccatgaagcgctcgatgtcgcggcgggcctcggtcgagatcttcttgagcatcgcgccgtttttgccgatgatgatacccttgtggctcgccttttcgcagtagatggtcgcgtcgacctcgatgacctcgtcgtcgcgctcaataaagcgcgtgatctcgacggccgtgccgtgtgggatctctttatcgaggttgcgcagcagcttttcgcgcacgatctcgcccacgacctgacggtcgggctggtcagtcgtcatgccgtcggggaagagctgcgggccctcagaggcgtacttaccgagctcgttcatcagatcgtccagcccctcgtgcgtgcgcgcggaaatggggataatggcgtcaaacgcatacgcctcgctgtaggccgcgatgacggcgagcaggtcgtcctttttctcgacagtgtcgatcttgttgatgcacaaaatcgccggcaggtgagaagccttgatcttttcgatgagctcggcttcagggatgccgacgtgcgccactggctcaacgagcagcagcaccgcgtccacgtccgcgatggattcgcgcgtgaccttgaccatgtagtcgcccaggcggttgcgcgccttgtggaatccaggcgtgtcgagcagcacgtactgcgtgtcgccgcggttcaccacgccgtaaatgcggttgcgcgtggtctggggcttgttcgacacgatggcgatcttctcgcccacaagggcgttcgtcaggctggatttgccgacgttaggccgtccgcagacagtgatcatagcggttttcgttttgttcatgataggtgatcctcaactttcttttgttcgttgaacgttttttattcatacagcgaaagctgtattctctttttggatgcccaaagggcgcggtgttctgtcccactgccatggagacgcgaggcaaagggggtattctctttccaaagagaataccccctttggaacccccagagaaaggcgaggggagaccccctcgacccccgacattgtcggattggagctcgaagagctgcacgcgctgcgcaatgtaagtgcggtgtacatggcttcgccatgaatccctgcgaatcgtgaccgttttgcaaccgcgccttactaccgtgaggcgcgtgtgacgtttgtctggcggcagactgcgtgcggaatacggcattgctgcgctcgccgcattgtggagactggcagtagacgggaattactgcgcacttctacaaggtaggcagagcggcagcggataatagaagcagagacaaatcgtcttgcaatgctaaacgcggcaacgccgcgcgcaggcagttgcattccggaggcataaaggttattcgagcccgaaactgccaatcgaacgcctttcttttggacggtcacaccgcccgttttctttctcgggaaagaaaatggggggtgtgctcctgccgcccacaggcggcattttcctccgcacctgtgtggaattatcaccgctcgagttcgagcaatttcataattgtctcttcatgttcccgcatctgcgctttcatcggcccttcgtccagatggtcgtagcccagaaggtgaagcaccgagtgcgtcacgaggtacgccagctcgcggcggttggagtggccgtattccttcgcctgcgcggcgacgtgctcgagcgagatgaccatatcgccgagcgggacgagacccgttccggggtcggcgtcctcttcacccggcagctcgccgggggtaagctcgaacatcgggaaactcagcacgtccgtcgcgcgatcgacctcgcgcatttcgcggttgatctcgtggatggtctcatcgtccgtcagccgcacgtcgatctcacagggaaagtccacaccctcggcggcgagcgccgtgcggatgaccttgcggatgaaggcgcatttgctgtcgctcacgccgggcacgtccgacgtgatgggaatataatgtctctttgccatcactttttcctcttttcgtttcgcgcggcctcatagtccgcgtaggccttgatgatgcgctggaccatcacgtggcgcaccacgtcctggtctgtgagctcgcagatgccgatgccctccacgtctttgagcacgcgcacagcctgcttgaggccgctcatcttgtccgccggcaggtcgatctgcgtcacgtcgccggtgatgaccatttttgaattaaagcccatgcgcgtcaaaaacattttcatctgctcgcaggacgtgttctgcgcctcgtccaaaatgataaagctgtcgtccagcgtgcggccgcgcatataggcgagcggcgcgacctcgatattgccgcgctctaaatatttctggtacgtctccgcgccgagcatgtcgaagagcgcgtcgtacagcgggcgcaggtacgggtcgaccttgctctgcagatcgcccggcaggaagccgaggcgctcgcccgcctcgaccgcggggcgcgttaaaatgatgcggttcaccttgcgctcgcggaacgccgcgaccgccgcggcgacggcgaggtacgttttgcccgtacctgcggggccgacgccgatggtgatggtgtttttcaaaacggactcgatgtattttttctgtccgatggtcttgggcttgatggggcggcccttggagctgatgcagatgacgtcctgcgtcagctcgctgatgcggtcctcctgtcccgcgcgcacgagcgagatcacgtagcgcacattctgctcggtgatgggttcgccgcggttcgagatcgtgagcagtgcgttgagtgccttcacggcgagcatcgtgtcctcgacctcgccgttcacgcgcagctcgccctcgcgattggaaatggtgaccttgaattccgattcgatcagccgcacgttctcatcgaatgagccgaacaaattgaccgcctgctccatgcgttcgatgctgatgcgctgttccatgctgtgtttcctcctgaaaaaatgttgacgccggccggtcgcggctgacggtgttatccttcactgacggcaatgggcacctcttttccgatctgctcctcacactcggcggagagcgtcacgacgagggtgtcgccctccacagcggtcgaaaagcgccgctgcgtcacgctgccagtctcccccaagagggcggcaagatacgtttcgagcatgtcttttccctgcgcctccgcgtcggcgcgggaacgtggtgttacttccaattcgtagggcagcagcgtttccgtctcccacgtgacgggcagggcaaaaaggccaaaaagcgtccattgtgtttgattctttattttatcacaatcaacattgcaaatgctactcccttttgcaccaattttcaaccgattctcgccccaaatcaaggtatggctgcgtttttcttttccggtgtaaaccttcttttcatacgtgagcggcacgcggacggtgaggtcgtaccatgtccgtgcccagacttcgcccttgcccgctaaaaagcgcgtcgtcacgctcggcttttctgtgccgcccgtgtccaccacgcccgcgatcaaaagctggccctgctgtacgctcgtgccgggcaggactcttttctccccatccagcgcgcggaccttggtgataaggcccggctttgccgcaatgacgttcgtcggctcgctctcgtttacccgctcgggtgcgcgcacgcgctcgcgcacctgcacataggccttgcagccgcgcacgttgaccgccacccagcagaggtccttgagctccggcaaaacgcggttgcagatatcctgtgagcggaacgaatagatgaacgttccgcggtggacgccgtgctcgcgcagggcatgcaaaatcgtctcagtcgggacggtctcgttgcccgtgacctcaaaatcccagatgaaaagcgagttgacgagcagcagcgccgcacacagaatgccgccggcgaacagtgcgtggcgtcggcgcaggcgcgcaaagaaaaagggtgtgcccgccgtgcgctcgatagatacctccgccccgcagccctcggcggcacggcgcagcgcgcgcaggtcgccgcgtgccacgcagaaggacagcgccgtatcgtcgatccacctgacgtcccagaattcgatgccccgcgcggagcagaggttcagcatccgctcggggtacgcgctctttgcgcgcacgcatacactgccgcgcagcagcttgacggcttttttcagcatagctccctcatctcacatattccacggtgtcgatcttgccgaagatgcgcacctcgctgtcggtcatgctgcgcagcgtcaaattctgcccgcgcacgcgcaggatgagcgagcccgcccccacgtcgatctgctctgttccgtaggataagatcccgctgtgtccctccagaaagagctgccggtcacccagcatctccacatggcacagccccgccacgatgtccgccggcaggtcaaagagctctgccatgcgcgccagcatgcgctgcggccgttcgtttcgttccatcgtccatctcccctttgggcaaagcctatgcgccctttcgcgcggatttgcctgtcccaggcgggcaagttcggcttgccccgcgcatagactcgtctggaaggtcaggtgatggcatgaaaataagagaccgtttgccgcttctggcggtgctgtgctgcttttccgcactgctgctgttgccggaggtcagcgcacaggcggcgcgggacgcgatgctgctctgcgcgcagacgcttatcccgtcgctgtttccgtttttcgtgctctcgtcgctgctcatcgcctgcggcgcgtcggagctgctctctgcgcttttgtcgccgctgatgcggccgctgttcggtctttcgggtacgggcgcggccgcgctggcgctgggcctctgcggcggataccccgtcggcgcacggacagctgccgagcttgtggaaaacggcgcgctctcgcaggaagagggcgagcggctgctcgccttctgcaacaacgcgggaccgggatttctgctcggcgtgtgcggcgcgggcgtgttttcgtccagccgcgcgggcgcagcgctgtatctcatccatgtcgccgcggcgctctgcgcaggtcttctcacctgccgcgcgttgccgccggtgccgcatggaacatatccgcacaaaagcgcgaaagcgcagcatctttccacagcctttcccgcggcggtgcagaacgcgctgacgggatgcctcaatgtgagcgcgttcgtcgtgtttttcacggtgcttgcgcggctgttgctgcactttctgccggaggccttcgcctcatcgctcccctgcgcgctgctgcttggatttttagagctcacgagcggcgtgctgtcgcttccctgctcgcgcgcgggttttctttcctgtgcggcgctgctcggctggggcgggatgagcgtccactttcaaacgcgcagcatgctcgcggcctctcccctctccgcgcggtattacctcaagggaaaggtgctgcaagcgctgctgtcgctgctccttgccctgcccgcgctgccgtttctgtttccctgacgctcacggctccgcccctgtgatggcgctcgccacctgtgagaccacgtccgccaccgcgtcgtcgaaaaggtgcatatacaccgcgctcgtcacggatgttgagctgtgccccagcgccttcgagatgctgaacatcggcacattctggctgttggcgacgctcgcaaagctgtggcgcagcccgtggagcgagatcggcgggaggccctgcgcggcgatgaactgcgcaatgcgctggcacagaacatccggctgataaggctttcccgcctcgttgacggcgacgtatccctcggggttatatttagggtcctgcttccgccgcctttcccagtcgcgatacagtcgtttgagcagcgcggccagtcctccacaaaaacgtccctgggcgcgctcatgccgccgagcagctgcgcgcggcggtactcggcgatgacctgctcggcctgctccatcgtgggataggtgcgcgtgcggcgcacgcgcctgccgtcttcaccgtcgtagtagagcgagacatagtaaaggtggttcctgtcgtcatacgacaggttccgtttgagcgtttttctcatgcgtttcttcctctttccgtcgttatgatcttttctacattttgtgcagaaagtaaaaaaacaccgctgctcatgcagcggtgttttttagcgaataaaatcaggcgttcttcgcgatctcgacgagcttggtgaaagcgacgggatcgttgatggccatctcgctgagcatcttgcggttgatctcgatgccggcggtcttcaggccgtgcatgaacgtggagtagttcatgccgttgagcttgcaggctgcggagatacgggtgatccacagggagcggaaatctctcttcttcaggcggcggccgacataagcgtaggtcagggacttcatgacctgctcgttggccatcttgaagtggcgggatttgttgccccagtagcccttggcgagcttaagggtcttgtttcttctcttgcgcgtcatcatcgcgcctttaacacgtgccatattgtataagcctccttaaagcgtatcgttgtaaattatttgtaggggatcatcttgcggatcgtgctggcagtggtcttgtcagcatagccgccctgacgcagacgacgcgtacgcttggtgggcttcttggtcaggatgtggctcttgaaagccttggcgaccttgaccttaccggacttggtcagattgaatctctttttggaaccgctgtgggttttcagcttgggcatagtagtttctccttttcgtatttgtagtggcgctcaaagttactttcccgccttgggggaaaggaagatcgacatgctgcggccttccattttcggctctttatccaggttggcgacctcggcgacggactctgcaaagcgcacaagaagatcgcggccgatgtccgtgtgtgccatctcgcggccgcggaagcggacagagaccttgacacggttgccgtcggcaatgaatttctgggcgtttttgagcttggtgttaaaatcgcccacgtcgataccgggggacatgcgcacttccttgatctcgacgacatgctggttctttctggcttccttttcgcgcttgccctgttcaaagcggaacttgccgtagtccatgagcttgcacacaggcggcttggcctgcggcgagatcttgactaagtcaagcccctgctcgtcggcgatgtgctgcgcctgcgcggcagacatgatgccgagctgctcgccggtcgcactgatgagacggatctcgctgtcccggatctcttcgttgatctgatgcacgttgctgctaataccgaagcacctccgtttttcataaagaatttggcaaacaaaaaacgagcacagaacattctgcacccgtaccatgacacaaaaaagcccgaaggctttgttttccacgattgaccccttcgctttgctgggggtgagaacgaatgcaccgctcttctttgttttgcttaagtagtatatgctctattttccggtttgtcaacaacaatttgcccgaaaaagtgaaaatcccacggtatatttttacttttgcccgtcaacactatgtctgcaagcaagaaaagcgaaaggaggcgagcacatgaaggagcgcaataatcagaacaaaaaccagaatcaggaaaacactaatcagaaccagaacggcaaccagaatcagaacaatcagaacaagaacaaccgctgattcgtactcaaaagcgcagggctccggaaattccggggccctgcacctttatagaaccttaatcctgcggcccttgcgcaaaggtgcgtttcgtgctatcattttatttaaaatgaggtattattccgcttacatttcagaaaggcgcaccatgctcgactctctttctctctggctgcacgaaaccccgctcggcgaaacgctgctcaccatgctcatctcgatgctccccgtcgtggagctgcgcggcggactgcccgcgggcgttgcgatggggctgccgatccccgtggcgtttgccgcgtcgctcgtcggcaacatgatccctgtgccgtttatcattttatttgtccgcccgctgttccaatgggtgcgcatccatattccaaagcttgagggcttcatctcgcaccttgaagcgcgcgccgaggcgaaaagcgccgacgtgctccgctatcagacgtgggggcttttgatctttgtcgccatcccgctgccgggcaccggcgcgtggacgggcgcgctgatcgcggcggtgctcaacatgcgcctaaagcgcgccgtgccggtcatcctgctcggcgtcgtcatcgccgggtgcatcatcaccatgctgacgcacggggtcagtatgctcatctgaatcggtgctgccttttgattttcccccttcgagagggcgggaggttgcagcgcctaccggcgctgcattgatcatgcggcgctttgcgccactgccaatgcaaagggggtattctctttccgaagagaatacccccttttgaacccccagagaaaggcgaggggcgttcccctcgacccccgacattgcaggttttgggcttgaagggctgcacgcgctgcgcagtggaggtgcggtgtacatggctgcgccatgagtcttctgcgtgtcggttcatgttgcaaccgcgccctactccgtggggcgcgagtgacggtagtttggcggcggactgcctgcgcatcggcggcattgcttcgctcgccgccgattggggagatggtgctgattcgaggaaacatctgcggggggacgggcggcattgcttcgctcgccgccttttcaaatgataaaaacgaccgctgacgcggtcgtttcattttaattcctgctccagatcgtgaaagtattcagggcaaaagaactcgtcgacggtaatacttaggccgtcacagacctttttgatcgttgcaacggtagttgtatgattccgtccacttataatgttgttgagcgtggattgcgtaataccgctcaaaatactcaagcggttgattgtgatattccgttcttcacacagtgtcaaaatacgtcgccgcacggcttcgcctactgtcatcacgaccacccccgctttcttttcataaagaatagcgattttctcttgaaaagattaacccttatgagttaaaataaccaaaaagagttaaggaggggtctatcatggaagtctatcaaaaaatgtacactacgctattcaacgcggtgaccgacgcgctcgaaaaaatcgagactcaaaactatggcgatgcaaaagacttactaatcgccgcccaacagcaagccgaagatatctatatcacagcagaatcctaacagcggcggcgagcgaagcactgccgcgccgtccacgcatcacccatcaaaaaggcggcgagcacagcaatgccgctatttcgcacgcagtctgccgccgagcaatcgtcactcgcgcctcacgatagtaaggcgcggttgctgtcaggtcgcgactcgcagggattcatggcgaagccatgtacaccgcacttacactgcgcagcgcgtgcagttattcaagctgcaaactgccaatgttgggggtcgaggggggctcccctcgtcctttctcttgggggtgtaagggggatattctctttcgagaaagagaatatccccctttcccgcgtcccccacacggtgtgggggataatagagtgcgccctgcgggcgcaaaaaaagaagcaccctttcgggtgctccctttttattcaacagtgacagattttgcaagattgcgaggcttatcaatatcacacccgcgctggagcgcgatataatacgccagcaactgcagcggcacaacgccgagcgacggcagcagcatctgcgccgtatcggggatcgtgataacattttcgacggtcttcgccatctcgccgcggtggctctcggtcgcaagcgcgagaacgtccgcgccgcgggccttgacctcgaccacgttgctcatggccttgtcgaaaagcggggcgtaggtgccgagcgcgatgacgagcgtgccgtcctcgatgagcgagatcgtgccgtgcttgagctcgccggaggcgtaggcctcggaatggatgtagctgatctccttgagcttgagcgagccctcgagtccgagcgcatagtcgaggttgcggccgatgaagaagacagaattgtggttgaaatactgggaagcgtacttggggatggcctcgcagctctcgctcgcgaggaactgctccatcttctccggcagcttctgaagctctgtgaccgcctcgttgtactcctcctttttcaccgtgccgagcgcctcgccaaacgcaaggccgatcatgtcgagcactgcgagctgcgtagaataggcctttgtcgtcgcaacggcgatctcggggcccgcccaggtgtagagcacgtcatccgactcacgcgcgatggacgagccgaccacgttgacgatggagaggatgtagccgccgcgctttttcgcctcgcgcagcgcggccatggtatcgagcgtttcgcccgactgggagatcacgatgacgagcgacttatcgtccacgatggggtcgctgtagcggaattcggacgcgagcacaacctcgacattgcggcgcagcagatgctcaagattgtacttgccgatcatgccgacatggtacgaagagccgcaggccacaatgaaaatgcgggtaaattcgcgcattttctcgacggggagcttgagatcgtcgaagatgaccctgccgtccttgatgcgcggggagatcgcgcggcgcagcgcctcgggctgctccatgatctccttgagcatgaagtgctggtagccgcccttttccgcggcagagacctcccagtcgatggtaaagtgcttcttttcgaccttctgctccagcgcgtcgtagacttcgatgccctcgcgcgtcagcacggcgacctcgccgtcttccatgtaggcgacgtcgcgcgtgtgcttgatgatggccgtcacgtcggaggcgaggaagttgcagcccttgccgtagccgagcagcagcggcgcgtccttgcgcgcggcgatgatgcggtccgggcagtcggcgcagagcataccgagggcgtaggcgccctcgatgcggcgcagcacgcggcccacagcctctaaaaagtcgtgacactcgttgtagtagaattccagcagctgcgccacgacctcggtatcggtctcggacttgaaccggatgccctgaccgatcagaaattccttgatctcgacgtagttttcgatgatgccgttgtggatgacggcgaacttgccgttttcgctcacgtgggggtgagagttgatgatgttcggcgcgccgtgcgtcgcccagcgagtgtgaccaaggccgatgcagccctcgaggtccgcgccgccgtggatctgttcgctgaggaccttgagccggcccaccgctttttcgacctgcagctttccctgcgccgagatgacggccacgcccgcggagtcatacccgcggtattccagatgcacgagcccgtccagcaggatgggggccgcctgttcctgaccaatgaatccaacgattccgcacatatgataacattctccttttgatgatttttgaaaaatgggcaaaatacccctttgcggcgcaaagccgcttcttcaaaaggacaaatgcacagtcatttgtcgcttttcccgtggtcacagcccctttgttctgcggtcgcccgcatgtttgccggctgtgtgcgcgcccacgggcacggggaagcatccgccgaaatttcgatcctcttcccacctcgtcgtcccgccaaaggcgggcgctggcgcttatgatggagaaactccatagctcctttcacttctgcgtttttttaatatatttcaaaccggatttctccggatgaaagcggttatttcgcccctccgcagggcaaactcccaaaaagggaggatgactatggctactgcttttatccgcacgatcgtgctctattttctcatcatggtcgggctgcgccttctcggcaagcggcagatcggcgagctcgagcccatcgagctcgtgctcacgctgctcatttcggaccttgccgccgtgccgatgcaggatttcggcatcccgcttttaaacggcgtcatcccgatcgtgacgctcttgctgctctcgatgctgctctcgtgggggagcgtgcgctccatccgcctgcggcggctgatctgcggcagcccgacggcgctcattttagatggcaaggtgcagcaggacgcaatgcgccacaaccgcttcacgctcgacgagctcatcgaggaactccgctctcagggcgtgacggacctcacaagcgtcaaatacgccgtgcttgaaacggacgggcagctctctgtcctcctctatcccgacgagcagcccgcaacgcctaaacagctgggaaagcccgtcaaggacgacaccttcctcccgcacatcttcatcaacgacgggcgggtgatgggcgaaaacctttcgctcgcgggtctggatgccgcgtggctcgacaaaaccgtgcgcgcgcagggctaccacgccccgtcggagatttttctgctctcgctcgacggcgcgggcaaaattctgtgcatcggaaaggacagtgccaaatgaagcgatttttctggatcccgttctgcctgctgctcgcgctctttggcgcggcgctcgcaaatgccgccgtcgccgacggcttagtcacagactggtgcgcggagctcgacaaattgcaggacaccgcgcaggcggagaactgggacagcgtgcgcgatgatctctccgcgcttcacgaaagctgggacgcgcacgcgacgtatttccacatcattttgcagcacgacgagctcaacgaggtcgaatccctgcttgcccgcgcggacagcttcgccttcgagcaggacgagggcgaatttcgcgcgtgtgtcgcggagctcaaatcgcagcttttggtgctgtcggaaatgcaggaaatttcgattcagaacattttatagctcacttgccctcgagcagcttgttgagttccttcataaacgtgtcgatgtccttgaactggcggtagaccgaggcaaagcgcacgtaggccacctcgtccacggcgcgcagcttgtccatgacgagctcgccgatgtactcggtgctgacctcgcgctcgagagagttctgcagcgtctgctcgatctcgtccgccttctgctcgagcacctcaaagggaacggggcgcttttcgcacgcgcggatcatgccgttcaagaccttgcgcttgtcaaagctctggcggctgccgtcctttttgatgacgaccatcggcaggctctccaccgtctcataggtggtgaagcgcttggcgcacgagaggcactcgcgccggcggcggatgctgctgccctcttcggcagggcgggaatcaatgaccttgctctctttgtatccgcaataggggcatttcatcgtgcagaacctcttttctcatcttagtcagagagagtatagcatactttctttcgggatggtagacataatttgcattttttcacaggatgggcgaatttttctcattcacgcgatagatcacacactttctcccgtcgaccgttccgatgtgggcaaggcagaagagttccggcagcgggaacggcgcgctctcgctgtacggcagcgccaacagttttccgcttttctcctcgcgtaccatcgcgtcagataacagtgagagtgcacagtcgagccgcgccgaacggaaaaacgagccgcgcggcaatgctttccagtcccccaccgctctcccctcctgtcggcacaaaataaagagcctgtgctatttctatgcacaagctcttttctttatgtagggattttactgcacgctgtaattgccgcgtacgagcagctttgtgctgttcgcgctcgcctgcacgccgcggctgtcgaccgtcgccatgtaaaggtgattcttttgcaaaccgaggccgcccacaagcgccgcgcccgacgtctcgtcgatgagccccggggtgctcgccgctacgcacacgccgctgccggtgcgcagcatcgcctcgcagccgacgcccatgtacaggatctgcccctgattcagcgtcacgaccgtaaagctcgccgacgtgccgccggaggcgtttccgctcgacgcgccgtacttctgctcgaaggcctgcgtctcgctcttcacctgctcggtgagcttactcgagagcgtctgttcgcgagaggcggtcttcttgtccacctcggaaaggatctgcggcaggaatttttcgtttaagtagctcagcgtcacgagcgggtcgctgctcgtgcccgcgccgccggtcgcggcgacagtcagcgtcagcaccgtcgcgctcaccagaagcagtcccaccagacgggcaaaggcgttgtttctctttttcatgctgtattcctcattttctccccggcgcgcactctttccgtacgcgccggaggggttagaccaattgtgtgttttgcaggccgaagctcacggcgatggccgcgtcgatgcgctccatcagctcgccgtccacgcgccccatgcgctcgcgcaggcgccgcttgtcgagcgtgcggatctgctcgagcagcaccacgctgtcgcgcggcaggccgtagtccggcgcggagagctcgatatgcgtcggcagcttcgccttgttcgtctgcgaggtgatggccgccgcgatcaccgtggggctgtagcggttaccggtgtcgttctgcacgatgagcaccggacgcacgccgccctgttcgcttccgaccacgggcgagagatcggcgtaataaatatcgccgcgtttcacattgatatccacttagctattcacactccgagcggaagaaagtacccttgcctttgtcaggggccaatttcattctcccacgcgggggcggaatttatacgggggctcgcaactttccccgtctttctgcccccagtccatcgtatgctgaggacagatgccgcgtgcttttcttaaagcggctgcaaattcttgtcgacggacacgccgtttaagcgatagacgcgcggcacacgcttgctgaccgcgcacatcagctcataggggatggtatcgcagagcgcggcgtcgtccgcgcagaggatgtgctcgccgaagatctcgacctcgtcgccggacttcacctgcgggaggtcggtcacgtcgatcatgcacatgtccatgcagatgcgcccgacctgcttggcgcggccatagggcgtgagcacttcgatctgatccgagagcgcgcggtgcaggccgtcggcgtagccgatgggcaggaccgcaatgcggctgggccgctgcgtaaagtatgcgcgcccgtagctgatgggctcgcccgcagcgaagtccttgatcgtcgccacgcgcgttttgagcgacatgacgggctgcatgcccatcttttcggccaagtcgcccgagccgtagaggatgatgccgcagcgaaccatatcccacgcccattcggggtagcttgcaatgccgccggcattgcagcagtggtggagctggaagcggaagccgctttgcgtctccaccttttcgatcatgcgcgcgaagcgctcatgctgcaatttcgtaaattcgacgctctccgtcgtgtcctcgtccgacacgctgaagtgcgtgaacactccctcgatgtcgagtcccggcagttcgagcacacgcagaatgtcgcgcagactcgcgtcaaagtgcgcctcgtcgcacgaaaagccgaggcggcccatgccggtgtcgagcttgacgtgcacggtcatcttcccgcccagcgcgatggcgcggtcggaaaattcctttgcgatgtcgtagctctgcaccgcctgcgtcatgtgcagctgcaaaatgcgcgccgtctgatccgcgggcgtgaagcccagcattaagatcggcagcgtcacgccgctgtcgcgcagctcctcgcattcgtcgatgttcgacacggcgaggtatcccgcgccgagctgctcgagccgcttggcgatctccaccgcgccgtggccatagccgtctgccttgacgacgccgagcagcttcaccttatcgccgacgtggcggcggatgacctcgaaattatgggtcagatggtcaaggtcgatctccgcccaggtcctcttgagcgtgttttccatagacgcttccacccttttgctttcagtttcgacgcgcgctattgcgctgcgtccggcgatagtatatcaccaaaaataaaattcgtaaactccgccgcggcaataattttgtcattttccgcgatctcggcgtacaccggcgcgccggaggcgtcgagccagagcgagcaggcgagcgtttcgccgctgagcgtcagcgaaaaatcggcacgcagcgtatcgacgtccccgagtgtttccgcacccgagctgtcgagatacactttcgggaagttttgcagcacgagcggcacgcaggaaagcgccgaaacgcgcggcgagagcgtgcccacgtccagcaccagatcgtcgaacgtcagcgtcagcttgtcgccctcaagcaccgcgccgacgcccgtgagctcctccggcgcgagcaccgccgcccgcgtctccccatttgaatgttcgagcgagagcgtatagtgcagcgtctcgtcctcgcgcggcacggcggtctccacgatcgcctcatagccctgcatctgcgcatagcgcgcctgcaagtcctccgcgctcttctgtgtcttttccccgcagcccgcgagcagcagcgcaagcgccgcgagcagcaagcatccctttttcctcatgtcccgtcccccttttctcccctatgagtatgcggcgcgcggcgcgcgcataccggaaagcgcggacgggaaaacgcccgctaccgcacccatcggaggtgcaatggcgggcgtttgcggttttcatgcgtttactgcgctgcttctccgtccatcaggacgtcgttttccatgaggaacgggggcgtcgtatcctgtccccagccggtgtcgtactttgccatgagatagcttttgagcgcggcgcggctttcaaacttcgtcaggcggtacggctcctgaaaggcgaccttttcgacaaaataaagcccatcgtccccggcgggaaggagcacgccgacgtggccgatgaagagcgtattctccgtttcggaaaaacggtcgtggaagatgacggagatcatgctgcactcaccctccgagaaggcgacgccgcgcgccgcccagcccttgcgcagggtctccgcctgcacggaagcgtccgttgagtccgccgcctccaccggcgcgaacagggcgcagaagtctgccgtgctctttccgcagagcgcgtccgggtcgcgcttgagcgtttcaagatccatgaagagccagtcttccccgttggtgtccggctgatcttcgccggcggtgatgcgatctcccatgagctcatacgccgtgatgcggcagttgtagccggggaagtccccctgccgctccatccacatttcctgcatctcataggggtcgtactttgtctccgtgggggctgccgttgaactggtcaaggcaggcaaagaatttgtccgcccg

SEQ ID NO: 10207 - DNA, 26042 bp, Unknown
  gut microbiota DNA sequence
agctccttagacgcttcgtcgctgaggttgctgtacgccgccgtctgcgccgtctgctcgggcgcgtcgggcgcgtcctttttgccgcagccgctcagtacgagggcggcaagcagaagcgcgagcgcgcagcgtctccgtcccgtcatcatcacgttcattcttatccgcctttcctttttggtgcacggccggtcagtttgaatcgagggcgctcttttcgtattcctcaagcgcgagcaaatatgcgacataggcgtccgtcagggagtcgtatttttctcccgccttcaagaccgacttgtactgcgagtcgttgtagaggtgctccgagaccgcaatatagttgccgcccttgctttcccgctctccggtcgtggtgtgggaaacatagtatttcccatcaccggtctgaataatcacggggattttcacgccgctgccgacatcattcgtgttgagagaggtccagaagagatagcgctcgctttcccggccgtcatagggatttcccagaaatgcccaggtgcagttttcctgctgcaaaaggctgttgttcagcttctcaagctccttctcaagaggggggatgtattttgagcccgggcagcgggagtcaaactcaaaattagtggtcttgaggctgccgtccttccagaacttggtgttgtagagcagtgaaaaatagtccttcacactggtgtcaaacggatattggggcttggcagccgcctcgccgctccatgtgagcaccacgccgacggcttcctcgtaggaaacgacgcagcttccgcccggcgacgcaacgcctttccagttgttcgtgtcgcccgcacccttgtggtggatgatcccgcggatgttcacagggtccatcgactgccaatccgcctgcttctgcttcagatcgaccgtaacggtggctgtcttattccccatcagcgcctccgcggaaacgtggtcgaatgccgagcgcacgctggaaatgtctgccgcctcccagcttttctcgatcagagttgagaataccgggtatgcgcccacgctcagtatggcaatgaccgcgatcacgatcagcatattcaccagcgtaaagcctgcgttgttttgtttcataagcattttgttggacttcattcgttttactctccgttttggtgggactcttcttcgctcagcgcggcagcgatcacgaaaaaaagaggaaggaacaggtttccctgttcctctctcaataagctcggaattgctgcggtttcggcttacttgaagtatctctccagcagacccttgagcgccttgccgtgacgcgcctcgtcgcgtgccatctcgtgcacggtgtcgtggatggcgtcgaggccgttcttcttcgcgcacagggcgaggtcaaacttgccgctcgtggcgccgaactcgcagtcgacgcgccacttgaggttgtccttcgtgcttgccttcatgttgggctcgaggtcggagccgagcatctcggcaaacttcgcggcgtgctccgcctcttcataggcggccttctcccaatacaggccgatctcgggatagccctcgcggtgcgcaacgcgcgccatgcagaggtacatgccgacttcgctgcactcgccgttgaagttggccatcagctggtcaaagatatacttcttgtcctcttcggagatgtcggggttgttcttcacggtcttgccgtaaacgccgaactcatgctcggcggcgagcttcagctcacccttgacttcctcgaacatattgctcttggcgtggcacacggggcactccgcaggagcctcagggccttcatagatataaccgcaaaccttgcaaagccacttcttcataattgctacctccataaagtttatcttgaaatgtgaattgttttgcttgcctttcactggcgttagtctaccacactttaccggctttatagaagttgcaaatgcaacattttgatgaattttttatgaattgcgctccatggccttcaggatgcgaggcgcgaggatcacactcacgacgatcttgaggcagtcgccgggaagatagggcagcatgtaggccgtggcgagcgtcatcccgctcacgttgccgcccttgtagacgttgacgatcagcgcgatatagggaagacccacgaggtacagcaccgcaaggcctgcaaagcacgcgagcaaaagacgcggcacagagcggtccttttcggcgatcttgccgatgacccacgccgtggggatcaggcccagcaggaagccgaacgtggggttgaagatgtagccaaagccgccgcccgccgcgaaaataggcacgccgacaaggccgagtaccacgtagagaagctgcgacagcgcgccgagctttgcgcccagaagcaatcccgccatcgccgtgaagaagaattgcagcgtgatcgtcgcctggaaaagctggaagtgcaggaacgcgccgatagccgtcagcgcggcgaacagcgcgcagtagatcaggtctcttgttttgatgtttttcatggtgatcctcccttttctcaaaaaaactgggctcatcataacatgacgccctcctattgtcaacctataaatttcataaaggtttacaagtttgcaatttttcttgcacaagatcaaaatcgcagcgcctacggcgctgcacgaggcaaagggggtattctctttcgcgaaagagaataccccctttggaaccccaagagaaaggcttagattggcagtctcggacttgaatgactcctatgcctccggaatgggaatgcctgcgcgcggcgttgccgcgttagaactgcaagacgatttgcctctgcttctattatccgctgccgctctgctgatcttgtagaagtgcagactaatttccgtctaccgcggcactcctcaatgcggcgagcgaagcaatgccgcattccgcaggcagtctgccgccgttctaccgtcactcgcgcctcacgatagtaaggcgcggttgatagttgtaacgattcgcagggattcatggcgaagccatgtacaccgcacccgactgcgcagcgtgtgcagtcattcaagctataaactgccaatgtcgggggtcaaggggcagcgccccttgcgttctcttgggggtctaagggggccattctctcacgtgagagaatggcccccttgattcgctcccctgcgcggcgcagggaacaagcgcagcgttgtcgcgctgccttcaatacttcttattgtagtaccaataagtcccacaaaaaataagcgactgcgcgcaggtcacaagacacagcacctgcccgatgattggctgcttgaacactaaaagcgccagcagtcccgccgcgagctgggcatagacgcagatgaaaaacgtcatgctgcgcgctttattcgcaacatacatcgtgcgctcatccttgagcatcgcgtcataatctgtggccttttccgggtcgcggctcaggcggtaaacgcgcagcagccgcaccgcgccgcagacaaagaggccgcagccaaggccgctgtaaaaatcgcccatgtgcgcatcaccgagcagaaatccgatggcgaacatcacaagtccgatgacggtcaccagaatgccgcactttttctgctcctgcaaattcatgcccctcaggaatttcaacttcatgcttcttcctcctcaaaaatgaaaatatcctcgatctgcgcgccgaacagctgcgcgatgctgtgcgccagcaggatggacgggttgtacttcccgttctcgagtgaaatgatcgtctggcgcgagacgccgagttccgacgccaactgctgctgcgtcatgccgcgcgcctttcttctctcttcaatgtggtttttcatcgcttctctccgtttccaaaagtcaagctcgctttacatctgcgaggatagcactgcgcgagtgaaatgtcaagtgtcttttacatttttttgcattgcttttgttcctgcgctttgctacaataaaaaataagaaaattttcgcaggaggattcttatcatgtccgtcaagatcgcaccgtccatcctctccgccgactttgccgagctcggcgccggcgtcgaggccattgccaccgccgactacgtccactttgacgtgatggacggctgcttcgtccccaatatcagcatcggtatccctgtgctccagtccatccgcaagcgcacggcgctgcccatcgacgtgcacctgatgatcgtgcagcccgagcgctatgtcgaccagttctgcgacgcgggcgcggacctcgtcacctgtcatgtcgaggccgacacgccggagaagatccacctcgcgctcgacaaaattcacgccaagggcaaaaaggccggcgtcgtcttgaagcccaacacccgcgctgaggccgtgctgccgtttcttgacaagtgcgacatcgtgctcgtgatgaccgtcgagcccggctttggcgggcagaagttcatggccgatatgatgccgaaagtttccgccatccgccgctacatcgacgagagaaaccttgactgcgagctcgaggtcgacggcggcgtcgacgccgtgacgtgcaaaacctgcatcgaggcgggcgcaaacgtgctcgtcgcaggctccgccgtctacaaggccgcggatatccccgccaagatcaaagagctgagaggttaagtccatggaatactttcccgcggcgctcgaaaagctcgttgagcagttcgcgcgcctgcccggcatcggcagcaagagcgcacagcggctcgcgtttttcgtgctgagcctgcccgaagaggaggccaaggcctttgccgatgccatcgtcgacgccaagcgcaccgtcacgttctgccccgtctgccgcaatctgacggacggcggcctctgccctatctgctcgtcgccgaagcgtgatgaacatgtcatctgtgtcgtcgccgacccgcgcgacgtcgttgccatcgagcgcgcgcgcgaatacaacggccgctaccacgtgctgcacggcgtcatctcgccgatgaaccatgtggggcccgacgatttggagattaagccgctgctcgaccgcgtggcgcaggggaacatcgaagaggtcatcatggccacgaatcctgacaccgagggcgaggcgacggcgatgtacctcgcccgcctgctgcggccgttcggcgtgcgcgtcacgcgcctcgcctacggcatccccgtcggcggccacctcgaattcgccgacgacgcgacgctgatgcgggctttagaaggacgtcgcgacatataaaaagcaaaaaaggaaggcgagtccaaatggactcgccttccttttgatttctttacatcattttcaccgtgtagtacaccgcgaggaggaatgtgccaatcgccagcacccagaggccgtagtaggcgatgctgctgacggcgagcgccgccacaatggccagcgcgcacacggcgagcacagcgtaaatgagcttgtagtcgccgtcctgcgacacgatacgaagatcgccgagctttttaagcttgccgtcgttcttgcccgccttgaaaacagcgacaccaagcaccgcgaccacgcagatcgcgaggatgctgcatccgatgacgatgccgccccacgtgtcgctcccgctgccgcggtggatgaggtacatcgccatcagcgacgccgtcaggcccacggcctgcacggaaaactcacgcggatagagcaggaacacgatgccgatgagcatcacgaccggcacgatcacgcacatcatcgtcgtgccctgcgggtagaccttgagcatcaggatcgacgacacggcgaagaaaaagccgatgcataagagccacggcgcggcgggcgcgaagcgcgtccactttttgcgcatcagccagacgacaaggcccgcgccgaacagcgcacagccgatgtaatcgatgacctgaagcacagtcatcatcgtcagcacctgaccgacgccgcctttgacatagtagttgttcaccatcaaaagataaaattcagcaatgacgccggccatgagcaccgtgatcgcacgattgacgttgcgattgcttctggccatgcgttctgcccgcttatcgttgttttttgccatctatccgagcctccaaaaaaggttgtcgttttgtaagcgcctgcatcaggcggaaacattacatcatagtataatagcagaactccccccgtttggcaagggaaaattcttattcttatgccagatcctccctttttgcaccgcgcttgcttttcttttgcacaggctttataatgtttcgcatgcaaaaaagaggaggatcttccccatgtccaacgtttcgatcaagctgctgcgcgagggcgcaaagctccccacgcgcggctccgctttcgccgccggctacgacctttacgcgtgtctggacggcgacaaagagctcatcatcccgccgcacgcgacggctatgctgccgaccggtctttcctttgccctgccggagggcacgttcggcgcagttgtcgccagaagcggcttagcttccaagcaaggcctccgtccggcaaactgcctcggcgtcatcgacagtgactaccgcggcgaatgcttcgtcgccctgcacaacgacagcaacgaagagcgcaccgtgcgccacggtgaccgcgtcgcccaactcgtgctgctgccgtttctgccgatggaatttgagcaggtcgacacccttcccgagaccgtgcgcggcgaggggggctttggcagcacagggcgctgactcagagcacgaacgccccgtccaccgcgagcacctggcccgtgacgaacgacgccttgtcagacgcgagatacgcgaccgccgcggcgatgtcctcgggcttgccgaggcggccgagcggcgtttgctcggcaaggtccttgagcgtttcctcgcccagtaccttgaccatatcggtctcgatgacgccgggggcaacgcagttgacgcggatgccgctcggcgccagctccatcgcgagcgagcgcgtcaggccgatgagcgcgtgcttcgtgcaggaatacgtcacctcgcacgacgcgccgtgctggccccagatcgacgaaatgttcacgatgcagccgctcttttcgtgcagcatgttcggcagcaccgcctgaatggtgttgcgcgcgccgttcaggttcacgccgaagtagcgctcccacatctcgtccgtcacatcctgaaagagcgcctgaccggcgacgcctgcgttgttcacgagcagcgtgatcttaccgaacccgcgctcgcactgcgcgaccatggcgttcacctcgctgcgctttgacacgtccgcctgcacggcgatggcctcgcggccttcggcgcgcagcagcgcgacaagctcgtcggccttgtcctttcgttcatagtaattgatgcacacggcatagccgtcccgcgcgagctccgccgcgaccgcgcggccgatgccgcgggacgagccggtgaccaatgcgacctttttcatgtgtttgcctccgtctgttgtcaatgatctgtttcattataatttacataacgcaaaaatgcaagcaccgccgcctttttgggcagcggtgctttttcccacgcgctcagagaagcggcgcaatgtaatttgtccatagggcgctcagcggcatcacgagcaccatcgccgggatcatgtccgccacggggaagtcctgcatcttggcgatgcggcagcccgttgcgatgagcaaaaagccgccgaaccgggctttccccgttcggcggcgctcttgatcttgtattaagatagcgcaaattttttcgcctgtaaagatttttccgcagctttcctctgatcgtggaaacttttcttctttttttgcgtctaatatagacaaagggcgcagaggaggtgaagcgtatgcgccgcatcaatcttttttcctacggcatgatgtcgctgctgaaattattcgtgcgcgtgctcgtcatcgtcctcgccgtttcgctctttcagcaggcgcgcagcgcacaggccgtccccgtgcgtccgccgcacttcgaccgccgcgcaatgcctgaggcccttgccgcaccggtgcgctctcccaagggagacgccgcaaagcccgcgcccgactggcgcttttacgtgctggaataccacaactttacggaaaatgcgtctcaggcggcagactacaccatgaccgtctccgcgctgcggcgcgacctcgacttcctgcgcgataacggctatacgacagtcctgccgcgtgaactggctgccggtcagctcgacgacggctcgccgcttccgcaaaaggcggtactgctgacctttgacgacggatatgagagcaactataccctcgcttttcccatcctgcgcgaatacggcgcaaaggcagccatctcgctcatcacttcccgcatcgacgagagagcggacggttttctcacctgggatgagtgccgcgagatggcaaaaagcggccttgtcgagtttgcctcgcacacgaacgactgccacatccgccccgatgcgcccggcatcgagcgcaaaagcggcgaggacgaggagacttacatctcgcgcatctccgccgacctgcaaacgagcatcacacgcatcgaactcgaaatcggccagaacgtcacgacgttcacgtatcctctcggcaagatggagctgtgggccgaaccgtttttgcagcagcactttgccgtcacactctccggcgtctacggcactgcccgctacggcgactccctctaccacctgccgcgctacaacatcacggatcttcatcccgccagcgagtacctccccgcctcttgaccggcagtcaagagcttcgtatactaaaagcaagcatttccccaataaagagagatgataaggagagagcccatgagtaacctgccaggcaaaattacggatccccatctttccgcggaagagccgctcaccttccgccgttgtctccgcttcattctgcaggccctgctgctggccttcggctgcgcagctatcatcagaattatcggaattttatctcttttcttttagcaattttccccgccgcatccgcgccatcctctacgccgccgccattttcacctgcatcctgaccggcaaggcccccgcgtccaacgataacactccgcaataatccccatcgcgccttgcccccacggggcaacagcgctgcgcagtctcaatcgatgcaacatccatcgtcatcaggcctgcaccccatcgcgcattgccgctccgcggcaacagcgctgcgcaccaccaatcggcgcaggcactcctacccactccgtcctcttcggcgcttttgcgccgtaaaatgcttttgctgcgcaaaagcatttgcgcagggcgaaattacttcgcccgagcattttaatgttccacgggttcctcgcgcgaagtcgcgcgtcaattcgcagcgcagcggagaattgttataggcggaattcacttccgccgttaaataatttgaatcaagccgagacgcgctccgccgcgtcgaggcccggcgcttttgcgccgtaaaatgcttttgctgtgcaaaagcatttgcacaggggcaattcacttgcccctgtgctttttcatctcccacggattccaaaaaagagagacacgcctgcgcgtgtctctcttttttggagcagggtacgggagtcgaacccgccttaacggcttgggaagccgctgtaataccgatataccaaccctgcgaacagatggagtatatcatattcttcgtgtcatttcaaggcgaaatattcatgttggcgcaaatcctttcatattctttgccaaacgaagaaaggagctccgccatgaaacgaatgttcccgatgatcctgctgttcgcgctgcttttgtgcgtgcccgtgcgcgccgacgagctcacgctcgacgccccctccgctctcttgatggaaaagcagaccggcacggtgctctttgccaaggatgaacacacgccgcgcgagcccgcgagcgtgacgaaggtgatgacactgcttttaaccatggaggccatcgactccggcgcgctttcgtatgacgacaccgtcacaggcagcgcgcacgccgcatcgatgggcggcagccagatctggctcaaagagggcgagcagatgcgcgtcgaagacctcatcaaggccgtgtgcgtcgtctccggcaacgacgcggccgtcgcgctcggcgagcacctggcgggcagcgaggaagcgtttgtcgcgcgcatgaacgagcgggccaaggagctcggcatgaacgacacgcactttgtcaactgcacggggctgcccgcggacgggcatgtcacctcggcctacgacatcgcgctcatgtcgcgcgagctcattgggcgccatcccgacatccgccgctttacgacgatctggatggactcgctgcgcggcggggcgtccatgctcgtcaacaccaacaagctcgtgcgcttttaccccggcgcgacggggctcaagaccggctcgaccgattcggccaaatactgcatcagcgcgaccgcggagaaggacggcatggagctcatcgcggtcatcctgggcggcagcacgagcgacaagcgcttttccgatgccaaagcgcttttgaattacggctttgcggcgtattcgctcgtcaccgtcacccccgaagctccgctgcccgccgtgcccgtgacgctcggcacacagaagacggtgcagagcgttctgacaagcgaaaacgccctgcttctcgaaaagggccgtgcaaacggcctgacgcaggccgtctcgctgcccgagagcattgatgcgcccgtcgaggagggcgaaccgctcggcacgctcgatattttcgacgcagacggcacgccggtcgcgtcgctcccgctgctcgcgggcgagagcataccgcacctcacgtggagcgagcttttctgccgcctgctcaagctcgcctactgcggggcgtaagctctctctgttttccacaaaaatcgctccgaaacttttccgttttacgctcatgcgtataattttcagccatttttcggcaaagcacgcttttcttgcttgacagaatcgaaaaaaggtgtatactgcaagcaatttcataagtcttgatagaggcgcggctgacatgagtagcccccaacaaaacggcaggagaccgtggggtgcggaaggggatgccgccgaagggtcgataaaatccctgttttgtcgatacttgggtcgtcgggaaatacccggcggactgtcgtccggaaggacggagtgctgtcatgatcgacgcgatcaggagccttgatgtgttttacatcggttgtttgatgtttttgtgttaagtcatgatggaaatcatggcttaatttttttgttctgtgtttgtatcacaggaaaggagaaacatcatgcaattcgtcggaaccttctgggcgctcgtgccccccatcatcgccatcacgctggcgctgatcaccaaggaggcgtactcgtctctctttatcggcgtcgtgatcggcgcgctcttcgcctgcgactttgcccccgtcgccacgatcgacatgatcgtcaacgatggcatcatcgccgcgatcgcggacaacgcgggcatctttctcttcctcgtcctgctcggcatcatcgtggcgcttgtcaacttagcgggcggcagcgcggcctttggccgctgggcggaaaagaacatccacacccgcgtgggcgcgcagcttgcgacgttcatcctcggcatcctcattttcatcgacgactacttcaactgcctgaccgtgggctcggtcatgcgtccggtcactgaccgccaccagatctctcgtcccaagctcgcctacctcatcgacgccactgccgctcccgtgtgcatgatcgcgccgatctcgtcctgggcggccgccgtgtcctccacggccgaagacctcgacaccggcatttccggcatccagctcttcatccgcgccattccctataacttctattcccttctgacattcgtcttcatcatcacgctcacgctgctcaagttcgactacggcccgatgcgcggctttgaagagcgcgcccgcaatacgggtgacctctccggcagcgccggcagcaccgaggagaacgccaaccccaagggccgcgtcatcgaccttgtcattcccgtcattatgctcatcatcctctgcaccatcggcatgctctacgtcggcggcttcttcggcgctgacacgtccggctgcaccgattacgccggcgacttcatcggtgcgttcggcaacacggacgcgttcgtcggcctcccgtggggcggcatcatcgcgctggtgctcacggtcatctacctcgtcgcccgccgcgtcgtcggcttccgcgaggctatgggctgcatccccaagggcttccaggccatgatctcccccatcatcatcctgacgctggccgtctccctcaagaccacgctcaacgcgctgggtgccgcagactatgtgcacgatctgatgtacgctgcctctgagggcctttacaatatgctgcccgccgtcatcttccttgtcgcgtgcgtgctggcctttgcctccggcacgtcctggggcacgttcggcatcctgatccccattgtcacagccatcttccccagcgacagcgcgctgctctacatcggtatttccgcctgctgcgcgggcgccgtgtgcggcgaccactgctcccccatctccgacacgaccatcatgtcctccgccggtgcgcaggtggagcatgtcaaccacgtcgccacgcagctgccctatgccatcacggtcgcgtgcctgagctttgtgtgctttgtgctcgcgggctttatccagaactgggtcgtctgcctcgccatcggcgtcgtgctgacggtcggcacgctctttgccatccgcaacgtcgaggcgcagaaggcgcgcttcaaggattaactttgctctctactctcttttctctcataggaacggggcgaaccggtcggttcgccccgttcccccttatattctccgctttgcaatccctaaaaagcatggtatactgagtataacacttaacttcggaggacgtttccatgagtattgtcgtgatgggcgcggtgtttgtcgatatcaagggctatcccctctcttcctacatccccggcgggcgcaacgcaggccgcgtcgtgcaggtgcacggcggcgtgagccgcaacatcgtcgaggacatcgcgaacgtcgagctgcgcccgacgttcgtgagccttgtcgacaacacgagcgcgggcgcggacatcgtcaaaaagctccagagtcacaaggtcgacacgcgctacatccgcacaacgcccgacggcatgggcatgtggcttgcgatcttcgacaacacgggcgacgtgaccgcgtcgatctccaagcgccccgacctgagccccattgccgacattcttgacgagcagggcgatgaaattttttcgcaggccgacagcattctgctcgagatcgacatggaaaaggacatcgtcaagcgcacgttcgcgctggcggaaaagcaccgtaagcccgtctacgcggtcgtgtccaacatgagcatcgccatcgagcggcgcgactttttgcgctcggtgcactgcttcatctgcaaccagcaggaagcgggcatcctgttttcggaaaattacgacggtctctcgcccgacgaaatgcttcccatcctgcgcgacaaaattcgcggcgcgcagatccaccgcatggtcgtcacgatgggcgctcagggtgcggtgttcgccacgctcgacggcgaggacggctactgccccgcgaagaaggtcgatgtcaaggacacgaccggcgcgggcgacgcgttttttgccggcgcggtcatcggccagacctacggcaaaacgatgatggaatcctgcgagatcggcacgcgccttgctgcgtccgtcatcacgacgggcgaaaacgtctgcccgcgctacctgccgagcgaattcgggctggacgtctccaccgtcgacgacgcgcagatcgcgctcgaattctgaccgctatattttaataggagggcccgccatgaaaaaagcgctttttctcgctctttccctcgcgtttctcctgaccgcctgcggcgaaacgacgctgccggacacgtctgagcagaacccggtcgacaacacgcaggaaacgtcgctgcccgagagctgcctgctctactacgacctcggcaatgtaagcattctcgcggaggacaaatccctcccgctcgcgcagaacgcgggcgacgggtacgcgacctcttatagcgtgtggtacgatggggagtatcaagaccttgccttacaggacggcgacagcggcatttccgtcgccgacatgaccggcggcagcgcagtcttcgactacggcgcggggctcgtcgtctggaacggcgagcgctaccactgcgcgcacctgaccgcgcaggacagctacattcccaacatctcccccaacatccccggcggtatcctgctgcttgaagtgagcggcgactgctgggccgacggcggcacagccgacgtcgcctgcttcacaggcttcggcacggtcgtcatctgtggcagcggcacgctgcgcatcgacggcgcgggcatcggtgtcggtggcgacaacctcccataccttcccggcctgatactcgatgacgtctcgttcagcagcggcgctattttcttaaatgagcgttcgtacagcggcgcgcccgcgctcttcgtccgctcgggcagtctggaaacagatacgctcgtgctctccggcgatctctgcatcgcaggcggcagcggaactgtgcagtacctcgacggcgttgaaaatgcagtgttccgcgacggttcatttgaagtgcaccagtggggagacacggtcattccccagctcatcctctccggcggcgacgcgacgtgcaccgactggctcccgcagggaacgagcattgaggtcggcgcgggcacgatgaccgcgaacggcatccgctactgggataccgtccacgtctacgacggcggcaagatcgtcgatctgatggattgaacacatatatactgggagaaggctccggtctgctttggcagaccggagccttcttttaccaacagccaatcattccttcagcttttcctcttactgcccgcacagcgcgctgcgtttttcttccgcaaggcgcagcgccgcgtcgcggtccacgccgtaggcaaagcggaacgcatacggctttgtcatcgtgatcgcgctcaccgtgccgtccttcaggtaaaacgcaatgtcgcggacgtcatagtttccgtcgtcctgcggcgtctgcggctgccagacgtaggcgcggtcgaagtcatacgcaggctcactgtagccgccttcgtcgctgtagccgtcatagagctcggactcgtctgcatcaatgcagtaaagcgcctccgggtattccgtcagcagcgctttctcgctgtcgccgaccttgacgccgcgcggcgttcccacgcccacagcgccggtgcgcagatagctgatgacctcgcgccctgtttcagggtagtaatccgtcccgacgacgagctgcgcgtccgcatcgtaatggcgcgcaaagtcatagggcagcatcccgtcgctgtcgtaggtcgtattctccgttttcccgttcggctcgtagtccgccccaaggctcaggaaaccatccggcagctccagcgtaaagttcgcgtccggctgcggctcgatcgtcaggtcttcctcctgcatcaggggttcgtccggtgcgccgtccggcgtttcctgcttttctccgcagcctgacaccaaaagcgtcagcgccgccaagagcgccgcaagcggcagcgctgtatttttccgtctcatatcggtctcctccttgattttgttttttatgcttccttcagcttttcttccagcagcttgaaggcttcatccgccgcttccccgcgaatttcctcgcgggaagccgcgccgaagtcaaagcgctcggcgatcgtctccttgggcgacgaaaatccgatgaataccgtgccgacgggatttccccgctcgtcgcggtcgggtccagcgacgcccgtgacgctgacggcgcaatccgccgccgtcgccttgcgcgcgccctcggccattgcgcgggcgacgggcgcggacaccgcgccgtactcttccagcatgtccgccggaacgccgagcacgcggtgcttaacgatattcgtatagctcacgacgccgcccatgaacacgcccgacgcgcccggcacatccgtgatgcgcttggcaataaggccgccggtgcagctctccgccgcggcgaaggtcacgccgcgcgccttgagcgcttcatagcagcgctgttcgactgttttttctgccatgataagacttcctttcagagcttgatgcgcacgaactcgcgattcgtcattgcgcggtcgatgaggccctcgatatcaaggacagcctcggcctcgcggacctcgtcgaggttcggcttcgtgcgcggatgacgcggggtgaagaccgtacagcaatcctcatagggtaagatcgacgtatcgaacgtgccgatcttacgggacaaacgcacgatctcttccttatccatgccgatgagcgggcgcaggacgggaagatcgacgacatcctcggtcacgcgcagggcctccatcgtctgagacgcgacctgaccgaggttctcgcccgtgacgagcgccttggccttgacctgatcggccacgcgctgggagatgcgcatcataaagcggcgcatgatgagcgtgaagaattcctcggggcagtttcttctgatctcctcctggatctcggtaaacggcacgatctgcaccgtcagccgcccgcaccaggggactaagagcttggcaagggaaagcaccttctccttcgcctcatcggacgtgtacggcggggagaagaagtgcaccatttcgagcttgacaccgcgcttggcgatcatgtaggacgagacgggcgagtcgatgccgccggagagcaggctgaccgccacgccgcccatgccgatgggcaggccgcccgcgccctcttcagcggggccgtggacataggccgcatcgtcgcgaatttcgatatgcacgacgagctcggggtcgtggacgttgacctcgcacgtcgggaacgcctgatgcagcgcgccgccgacctgctgggagatctggatggatgtcaaggggaaggtcttgtcggcgcgcttgctctcgaccttgaagctcctggccgtgcgcatctcgcacgcaaggtactccttcgccgcagcgatgatcttctggatgtccttttcgcacggcagcgcctttgaaacggcgatgatgccgaagaccttcttgcagctctcaaacgcggcctcgatgtcgcactcgtcgtccttgggctcgacatagatggtgctctgcttggagtagacgcggaaattgccgcatttcgacacgcggcggttgacgttcgacatcagcttatcttcgaagctgcggcggttcaggcccttgagcacgacctcgccgagcttgcacaggatcatttcatgcattggtattgttctcctcatttgttatggccgcttccgcatcggcggaaaatgcggctgaattttcgttgtcttcggatttggcagcctttttccctttgcgggtgagccccagtgtaaagcacagcggctcaacggcggccagcagggcaaagagcgcatagctgaacatcgtgctctctccgctcaccccgttgatcccgaccatggcgggcgccatcggcagctcccagatcatcgcaaggatgctccccgagccgaacgggacaggcatcacaagaagcgaggcaagattcagcacatagagcacgatcgccgcgttccagcagcaatttttgtcgatgccccgctccggccgcaggccccagccgaacaggaacgaaagcgccgacacataggcgacgccgagcgcgagcccgacgggcgtggcaaacgtaaaggacgaggtcgtccccgtgcctccaaacgccgcgaacagcaggataaaagccgcgccctgagcgatatggctcaaaacggaaagcgcgccaaactggatgtagtcgtaccttttcatctcattcacccctgtaaaatatccgtgttgcggtactggatggcctcggccagatgatgtgcctcgatcttctcgctgccgtcgaggtcggcgatcgtgcgcgcaacgcgcagtaatctatcgtggcttcgcgccgtgaggccgaggcgctcgaacgcgcctttgagcagcttttcgcccgcggcgtccagcgtgcagaactcgcccaccatcgcgggtgtcatttgcgcgttgcaggtgatgttcgtgccggaaaagcgttgcttctggatgtcgcgcgcggcgttcacgcgcgctttgacgtcggcggaggactccgccttttcgcgccggcgcatggcttcgaactcgacgctcggcacgttgacgtgtaagtccatgcggtcgagcatcgggccggagattttttcgacgtatttttccacctgctgcttggtgcagtggcagcgccccgaggggtggccgtaccagccgcagcggcaggggttcatcgcgccgacgagcatgaagcggctcggcagcgtgatactgcccgcggcgcgggtgatggtgacctcgccgtcctcgatgggcgcgcgcagcacctcgagcacgtcgcggtggaattcggggagctcatctaaaaaaagcacgccgtggtgcgcgagcgaaatttcaccgggcttgggcgtctgcccgccgccggtcatcgcggaggcggagagcgtgtggtgcggcgcgcggaacgggcggtgcagcagcatcgggtgcgagctgtcggtcaatcccgcgactgaccagatctcggtcgcttcaagtgcttcctttcgcgtcatgtcgggcaggatcgacggaagccgccgcgccagcatggatttgcccgcgccgggcgagccgatgagcaggatattgtgcccgcccgcagcggcgatctccagcgcgcgcttgacattttcctgccccatgacgtcggaaaagtcggggccggtctcgctcgtctgctccgcctgccacttcggctggggcgagagcttcttttcacccttcaaatgctgcacgagcgacacgacgtccggcacgccgtaaacggtcacgccgtcggcaagcgtcgcctccgctgcgttcgccgcggggacgtagagcgtcctgatgcccgcgcgcaccgcggccatcgccatcggcaaaacgccgttcaccgcgcgaagcgtgccggtcagcgagagctcgccgacaaaggccgcgtccttcgcggggggcttgatctcctctgcactggcaaggatgccgagcaggatgggcaggtcatagagcgtgccctcctttttccgacccgcgggggcgaggttcaccgtgatgcgcgagacagggaacttcacaccgcagtttttcactgccgcgcgcacgcgctcgcgcgattccttgacggccgtgtcgccaaggccgacgatgtcaaacgcaggcaggcccccggataaaaagcattccaccgtgacctcgtagcccgagataccctgaaggccgagcgagcgcaccgctgtgaccatactgttttcctccctctttcgcatcgaatcgtacagtttgcaattagtatagcacattttttgcaccaggcaaatccccctccgcgcatttttgcacattttgcacaaaatcaataaatcctcgcaaaagttctcgaaaaataaaagaaattgaacctattgttgcaaaatagtgaatgtttttgcgggaacaaggcgtttacatagcgaaaaaagtgtgctatagtgtcatcgttgaattttgcgttcacacgcagaagaaccgttttctgacggtgaaataaataggaggttcatttatggcaagaaaaatgaaatccatggacggcaataatgctgcggctcacgtaagctatgctttcagtgaagttgcggcaatttatcccattacgccgtcctccccgatggccgacctggtcgaccagtggtctgcaaatggcctgaaaaacatcttcggcagccaggtcaaggtcgtcgagatgcagtccgaagccggtgctgccggcgcagtgcacggctccctcggtgccggtgctctgaccaccacctacacggcctctcagggcctgctgctgatgatcccgaacatgtacaaaatcgcagctgagcagctcccctgcgtgttccacgtctccgcccgtactgtttcgacccacgcgctgaacatcttcggcgatcactccgacgtcatggcctgccgccagaccggtttcgccatgctgtgcgagggcaacgtgcaggaagtgatggatctctcccccgtggcacacctggccgcgctttccggcaaggtcccgttcatcaacttcttcgacggtttccgcacctcccacgagatccagaagatcgccgtgtgggattacaaggatctcgccgacatgtgcgacatggacgctgtcaaagcgttccgcgagcacgccctcaaccccgagcatcccgccatgcgcggctcccatgagaacggtgatacgttcttccagcaccgcgaggcctgcaaccagtactacgacgctctccccgaagtcgtggaaaagtacatgggcaagatcaacgagaagctcggcaccgactacaagctcttcaactactacggcgcgcccgacgctgaccgcgtcatcatcgcgatgggctccatctgcgacgtggccgaggaagtcatcgactacctcaacgcccacggcgagaaggtcggtctcatcaaggtccgtctgtaccgcccgttcaaggctgagcgcctgatcgaggccatccccgccaccgccaagaagattgcggtcctcgaccgcaccaaggagcccggcgcacagggcgagcccctctatctcgacgtcgtcaccgcgctggccaacgccggcatcaccgacaagaccgtcatcggcggccgttacggtctcggttccaaggacaccccgcccgcttccgtgttcgctgtttacaccgagcttgccaaggcggagcccaagcgtcagttcaccatcggcatcgtcgatgacgtgacgaacctctccctgcccgaagacaagaactgcccgaacaccgcagccgagggcaccatcgagtgcaagttctggggtctcggcggcgacggtaccgtcggtgcgaacaagaactccatcaagatcatcggtgaccacaccgacaagtacgtccaggcctacttccagtacgactccaagaagaccggcggcgtgacgatctcccacctgcgtttcggcgacaagcccatccgcagcccctactacatcaacaaggccgacttcgtcgcctgccacaaccccagctacatcaccaagggcttcaagatggtcaacgacgtcaagcccggcggcgtgttcatgatcaactgccagtgggacttcgatgagctgaaccaccacctcaaggcggacgccaagcgctacattgccaagaacaacatccagctctacaccatcaacgccatcgaccttgccatcaagatcggcatgggcaagcgcaacaacaccatcctccagtccgcgttcttctccctggcgaaggtcatgcccgaagagcaggccatccagtacatgaaggacgccgcgacgcactcctacctcaagaagggtcaggacatcgtcgatatgaaccacaaggccatcgacctcggcgccaccgcctacaccaagatcgacgttcccgccgattgggcgaacgctgtcgacgctgacgaggccgtctcctacgagggcaaggccgagctcgtcgagcaggtcaagaacatcctcgatcccgtggacaagatggacggcgacagcctgcccgtttccgccttcatgcctcacgtggacggccagtgggagctcggcgctgccgcttacgaaaagcgcggcgttgccgtttccgttcccacgtgggacgagacgaagtgcattcagtgcaacaactgcgcttacgtctgcccgcacgccaccatccgtcccttcgctctcaccgaggaagaggccaagaatgctcctgccaatgccaagatcgttgacatcaaggccggtaagggcaagggcgtttacaagtacacgatggccatctccccgctcgactgcatgggctgcggcgtctgcgtcggtcagtgcccggtcggcgctctgacgatggtcggccaggagtccgagctgcctgagcaggatgtgttcaactactgcgtctccaaggtctccgacaagaaggatatgcaggatctcaccgtcaagggcagccagttcaagcagcccatgctcgagttctccggctcctgcgcaggctgcgccgagaccagctatgcccgtctcgtcactcagctcttcggcgaccgtatgtacatctccaacgccaccggctgctcgtccatttggggcggccccggcgctacctctccgtactgcacggataagaacggccacggcccggcatggtgcaactccctgttcgaggacaacgccgagcacggcttcggtatgtatgtcggccaggagaagatccgcgaggatctgatggccaagaccgagcagctccttgccatcgagtgggcacagcccgcactgaaggaagccgctcagaagtggctcaataccaaggacgacggcaacgccaacgccgaggccacgaaggaatacgtcgcggctctgcaggcgaacatcgccaccgtcgacgagctggccgctgtgcccaagttcgctgagcacgccgccgagctcaaggccaagggcgagaagttctgcgactgcgatgcctgcaagctcgttgctgagatcctcgacaagaaggattacctctccaagaagtccgtgtggatcttcggcggcgacggttgggcttacgatatcggcttcggcggcgtggaccacgtgcttgctcagaacaagaacgtcaacgtcttcgtcttcgataccgaggtctactccaacaccggcggtcaggcttccaaggcttccaacatcggtcaggtcgctcagttcgcggctgccggtaaggagaccaagaagaagagccttgctgagatcgcgatgagctacggctacatctacgtcgcgcagatcgccatgggcgccaacccggcccagaccatcaaggccatcaccgaggctgaggcttacaacggcccgtccctgatcatcggctatagcccctgcgagatgcactccatcaagggcggcatgatcaactgccagaaggaaatgaagaaggctgtcgagtgcggctactggaacctgttccgcttcaatcccgcatctgacaagaagttcacgctcgactccaaggctcctgccggcggttaccgtgaattcctgatgaacgaggcgcgctacagccgcctgacccgcgagttccccgagcgtgcggagggtctcttcacccgcaacgaggacgcggccaaggagcgttacgagcacctcaccaagctcatcgacctgtacgacaagcagtaattgctgttcctacggtatgaaaaaggagcacccgaaagggtgctccttttttgcgttactttgcgtctgcattcagcagcttttcgccgacgacggccttttggacatcggtcatttgcacactgcccgacacaaactcgacaatgcgcgtgccgtctgtgatgagccagtggtcaagccactgctcctcttcctcgtcgtagagccgccacgcctgctctgcgccccacggcgcggcatcgacctcgcggtaggcgtaagggagacggcgatgctcgccgtcgataagggcagtctgctcatagtccagctcgaaggcgaggcagcggtcaaaccacgatgcaagatacacatcaccgatgtcgtagtggatccgcgcaggattgccgcgcgccgtctccggatgctcgggatcatccaaactggcaagcacatctcgctgctctccgccataccgcgcagcgaagggcgaggagctcccccaactcaggcacgaccagcgcgcattctcatcctctatgccgaggtcggagaggtaaagcggcagcgcgtcgtggtagaccgtcgcccgaaattcttcatcatacagctcaggcggaacttcatcgctgtcaaaaagtccgttctgctccatggtaagcagcacccccaccgaagccagcgcgaccgccgccgtcacgcaggccgtgacgatgcagcgcttcgccctgcccgcaccggttttcaccgccgaataggtgagaaacatcgcagcaaacggcgtgatcccgcacaggattgcggcaaggtaaagcctccccgcactgctgctgccggttcccagcagagctctcacaagaatgccgaaaagtgtcagcagcagcgccgcacgctccagtatctggagccacgggcgcgactttgcaggcaaaaagcggtgttcctctctcgccgtgcgcgccgccttccgataccagctgttatagcagataaggtcagtcccgcagatcagcgtgacaacaggcgaaatacatgacaaaaaatcccccattccatagataagcgtattcagagggtctgttttcaggccggtcaggatatcccagatcctgaggagcatatagccgaaccaaaaaatcatcatactgtggtaatatttgagcccgcggtgcatcgcgtccacctgcaaaacagggtcagtctcaacatccacagcgttttcatccgctgtgcagagcacatggcgggtcctcccgccaaggccgccgccctcgccctcggctccgtttccccagaaggtcagatcaccaacgcccgctgactgctgccagcctgcctgtgcacagtactcgaggaaaacatcttcgccgtctgcaccaccgtcatcgggatagtaggtgatggcgaagcgcagcttctgcggcttaatgcggcggtagcggatgaacaggcccacgcggtcgggcgcccagccctccgccgccatgcgctcaaagtggcgcgcaaggccctcggtgtcgtaaaaagaatagggattcagctcccgtttggtgttgcgcatcagaaaaacctcgctttctctcatttctctccgcccgcaaggggcgttatctctcaaatagcttctcgtagtcccgcacctgtgcttgcaggcgctccacctcgttttgcagcagcgtttttccatccgctgcgagctgatagctgcgccgccgcccctccgcgcgcgtctcgacgatataccccgccgccaaaaactgctcgagcaggttgtagagcgtcccggggccgacggccacgcgcccgcccgtcaactcgttcacgcgcgccatcacgtccatgccgcagcactcctcgcgcagacacagcaggatgtaaaacatctgctcggtcagcgtgctgaatttctcccgcgccattgtcggcctccttttatcgatattcgatattcttgaggagagtatattatcgaatatcgatattgtcaagagggagattttctttttcaaagaaagactccttcttgttcgcacaggtacgagagatttgcggcactggtgccgcggggaaggcagcgccgtaggcgctgcacgggataagggggatattctctcacgtgagagaatatcccccttaaacccccaagagaacgcaaggggccttgccccttgaccccgcacattagcagtttgcagcttgaaggactgcacgcgctgcgcagtgcgggtgcggtgtacatggcttcgccatgaatcttctgcgagtcgttgctacgatcaaccgcgccttactatcgtgaggcgcgagtgacggtagcacggcggcagactgcctgcgaaatgcggctttgctgcgctcgccgcattgatgggtgcctcggtagacggaaattaggctgcactactacgagacaggcaaagcggcagcggatagtaggagcaagccaagtcgtatagcagaggcctacgcggcttcgcc

SEQ ID NO: 10208 - DNA, 7656 bp, Unknown
  gut microbiota DNA sequence
catcacgcatttgccttctggagatagaactcactctccgcaacttgtgtcacaaaattatactccagccgtgttgcctttgagggtgaaataatgtagcgcttaaacaccgagcgaaaatatgaaaagaactccctgtcttcctctgtcatcggggcaacccagccgttctcggcaccgtgggattcgattttctccaactctgccatacgctctttatccatgtcagttgccccttctggatgaaatcatggttttcccttaacagctattacattcccgtaattcatgtagttttttaagggaaagactaccctttttgttacggacttacgtttccagaagatcctccatcgtacaaccgaggacttttgcaaggctaagaacagtctccgcactggctttgttaatgtccttgttgcgctgttcgtacatttgaattgagcgaagactgacattgcttcgcttggcaagctctgcctgcgtgcagccataaagcgtgcggatacgcttgagtttggtatcagcgaagtattcgcgtactttggcatcgacaatatcagcgaatttagtgacatccgcttcatgaaggggggaatacatctgctgcaaatcttcaaacgaaagaaccttaaaaatatcactgaactttcttccggagaaccattgatagtaggccactgcccagccgatccaatactctctggaacggctgaaattcgcttgaggcttggcggtcggcgctttgcccgtagtctcaacgagaacatcaacagcagtttcaatcccgcttttccccaaaagatatgaaggttcaccattctcaatccgattactgacggaactgacggaaaacagctttatgaagctatctccggcaactccgcacgcgttgatagcataatcaaaagcatcgcccagtaatgcctgcgcgttactcagatagatttcttggtatgcgtgggtcatcgttttggatgcctcctcttatgatatcaaggatatacagaccatctgtttcctcttcaagtatatccgaataaagttggtcggcttcatcatttcgagccttgcggcggacataatatttttccttttctgcaatagaaaatccatcgtaatgcagcagcgaaaaggtgtatttagacttgatgacgatctgttcgcctaacttgccaagtcgcatagcgtttgcgagttgctgtacggaaattccgttatttaggaaagacgcagcaaagtcaaaataggagtcatcggcacggtatccgataatcaggtcgtaggcattgacgttgacgccgaaattgtcaatcagatatcgttttgcccgctgtgcggctgggcttttgatagaaaacagacgatgcgctaccagaacagcaatccagttcagaatcgtatagtctggactgttcagattcagaattttcaggtattccgtatcaagactgtaacgattgacgaagccgttacgcagagaggatacagcccattctttggcgagttcctcgctttccgtgcagtagaagcccagcccgaagtcattgttctgcttaccaaacccaaaggttggagattcgatgatctgttcagagccatgatatagggtaattttctgattcatctccgcatcctcctaagtatcactgcaaaaatagtatcaccaaagtgatataaaatcaagtaatatttgtagagaaaaaagagagcatttctcgcttgaaaaatgcaggctcttcagacgaatatttccaagagaaacttagagataatcagttcacagaatgatatagagcatccattttgccggtggtataattaaatgcagctaagtaggatattgcagaactgctggaaaaatacaaatactccgcagcaaagcgaatgtttcacgggcgagggtgatgagccgtcccaaccgcgcctgctgcagctccagcagcttgatctgatctgtgagagcggtggcctggtcgaatttcgggccatccagaatgcgcttgatgtccttgagtggaaattccagctcgcgaaatagcagaatggattgaagccgcgccaaggctgtatcgtcatacagccggtagcccgattctgtgagggctgtgggcggcagcaacccgatggcatcatagtagtgtagcgttcggacactgacaccggccagtttgctgacttcgtgaatggtcatcatgggtatccctcctccgtgtgagcttagcgggcgatgaaggggatggtattgccctcgtccagcaagcgcacaacgttttccacgtgctgcgcgctctcgccgagctcccgggcaagcgtctgaatgatatccatagaaattcttttcgttgcatggtttaacgtcagcggcggcagacgcccaagcgtccgccgccgcctattttaccacagccccggccggatttccagcgcaaaggcttctcacgaaatagcagatccgcctctgtatcacacagaggcggatctgccaattctatgatgcccacggcggcgaacgctatgagcttattcagcacagcatcacctatcgttactgtgtttttatctcaagttcttccggaagaattcctgcgcattcttgtacattacgccatcggcatcctcctgcgaaacgcctcgggagatcagatactcgtaaatcgacgccgccttggccggtgtattcaggcactccggcaggagggaaccgtcgaaatccgaaccgagagcaagattctttttgcctcccagctcaaagaaatgcatggtgtgacggtagatatcgtcaaggctgtgaacttcgccgtcgtcgcgcaggaacttcacaaagtaattcagaccgatcaggcaatcgcgcctgaccatctctcggatcatgtcgtctgtgaggttgcgcttgtgactgcacagcgcacgagcattggaatgcgtggcgacaaagggtttggccgccacctccagcaggtcggcaaaaccgtggtcgttgaggtgggagacgtcgacaagaatgccctctttctccatctcgcgcacagcttccttgccaaactcgcttaggccatggtcagtggtgtgaccggagccaagctcgttttcaccgttccatgtcagcgtaatggcacgcacaccctgctcggcaagtgtgtgaacacgggtgatatcaccggcgagcgcgctgccgttctcaatagtcagaaatgcggcggtcttattctcagcccaagccttctccatatcggcggcattgcggcagggagccacacggtcggaaaacttttccatctggcgatagaagtttatgcggttcttctcgaaataagcgatggctgcatcgccgcgctcctcatccggaatgaagactgcgtagaactgcgcccaatgcacatcattcggcatgttgctcagctgcagcacgcggccgggatcgtccagcgtgtccgggttgccggtgttggcatacttccaatctgccagagtgtcacagtgcagatcgatcaaaccataactgttcatgatactaatttaaaatcctttctttgactttacgcccgcgggtcgagctcctcgcaggaaagaacttccttgctgcgtgtgtattcctcgtaccggagtccacgatctgaggtctcaatttcgccgacctggttatcataggggtcggcgcgccagaactgcttttcaatggtaaacggcgcttcaaactcgctgttggccaccatgcggtatgcgtcgatgttgccaaagtagaacttgcggcgttcctcattctgcgccctcaccgccgccgtgccgtagctcgggtcggcatagagccagccgtatggcgcgatatagaagcgggaccagtcgtgtgcgccgcagaagtccggctcagcggtcaggccgctctgccacctggcgggaatgccagcgcagcggcacatggtgataaagagcagggcaaacacaccgcagtcgccggtgtagctgcgcgccgcagaatccgggatgcactcgagaatgaaataggacggcatgaaggtatacttcatgttcagcgtgatgaagtcgtagaagatacgcgccttttccagaggatcggtcacaccctcggtcagcatctccacaagggaacgaataaacggggtgaagacgatgtgcggcgcctgctcctgcgtgtcgaaatcaggctgtacggcgtctgccttcatcgtggaaacatcgtggtagcgcgccgtgtggacataggagtactccacatagaactcgtggttttcctccatgttctcctcccagcagatcgtgcgctgcgccgcattctcgggtgcgagcttgccggtctcgggatacatcttctcgatgcggatctcgctttgctgctcacactcggcggggatgggcaggtgaacgcgcacgaacataccgggtgtgaaccgatcatcgtttacgcggacgctcgaacggatgcggatgcgattggagataccgccgttctcgcacatcagacggcgaacacggtcaagacggccctcgccctgctccttcgtcacgctctccacaccgtgcacctgtacgcccgcgcggacggcaaaggatggatctgctttgcacagcgtctcaaagaagcggtccaggaagtgcatctcgccgttgacatagagccagctgatttttccggcgtccacgcgctcgtcgaattcctcctcggtaaaatcggggatgtgcccgcgcaccacagcgagtgcggcggcacggtcgaacgggtaattctgcgggatccggcagatgatctcgcgctcggcggtcaggcacgcgcgcattgcctcagacaggttatcctgcgcaaggcgaagatcgatgaggcggatcgcgccttcaaaatcgccccatgccttgcgccgggcgatatcgtccggcaggccaatgttcagatattgcaaggtatcgttaatattcataagaataacctctttgtgaatcctgctcccacggcacgggccgcaggagcaggaaaaatcatccggcggggatcatgcaatcatatgcaggatcgcacccatgccaagaccaaaaatattaccaatagcagcgccaagaacacccatcagaacaccgatacccgcaaaggaatcgtcataggcgcaggcaatgatcggcgcagaagcggaaccgccgatattggcgaccgatgccgtagagaccatgcaaagatcccagtggaagaccttggagagaatgtacataccgacaacgtggatcgcaagaacgaacacgccgtaaacgacccacatcggagcttcgaccagcgcattgagcggagcctgcgtagcgagcagggagacgacggcgtacagcaggacgctggaaagatcttcaacagcaggaagcttgccgagcggggtcattgcgcagaccagaccgagaacggtgacgaacagcgtcgtgcaggtgcccttgtcgaacatgtcaaggccgatctcattgaggccgttattcatgacaaggccgatcttctgagacagcgcggagacgatcagagcaaggccgataagccagatccagtcggcagctttggcctgctttttctcgttggcgacctctgcgttggcagcggctgcaacggcctcaagcttggaggtgtccgccttaacggacttgttccacttgccggcatacttcacagcaaagagcagcagcgcaatccatacggagtagcagacggtgtcgagcgtaagagcgcaggcgtaagcgccggcatcgaccggcagagcatcctgcatggcagccatgttggcggagccgccgacccaggaagcgtacagagctgcggtagcgccccagatggtctcgccgcccccgagggatcccttgaagatcgggaagccgacgatgaagccgagtgcaagagtgatcgagcagccaaggaagatcgcgatcatgcgtccggagagcttggcaatcttgcggaagtcgcagcgcagcagcatgacgaagatcattgcgtacagaaggttattcttcagtacgccgtaagcggcactgacgccttcggaattgtacaggcccagggtacagaagaccatgttgagaatatagatccataccagcggcgggacccagttaaagactttccacttggtgtatttttccattgccagcagcccgccggccaggaacatcaggaatgcgatgaaagtaaaaccgttttcaatagcaggtaacatacttttctcctccaaaaaatatatttcttctcagcggggcggtacctggacccgctgcaaaagacaaaacagaaaaaagcccaacaaaaccgagcgtttttcaacgcctgatcttgctgggtttcacacgcggcaccacgagggaactcatggcaggcgactgcgaagcagccatatacagttatacgtaatcaggttttgctttccggcttgcccgtcattgaccgccagcgcttgagcgcatcgcggtaagcgacaagtacggcccggcgggacgagccgccgtatcgtctgttgagcgtgttctccaaccacacatcgatctccggaaaaacctgccccacaaaaagtttacgcaggaaagcctccgtcgtggaaattgtatgggtacagctgaaatcgagaaccttggacgtcaggtcgtcgacctcaaacgccatataaaacgtgccgtagttttttgtgatggcgttgtccgaattcgttctggactcgccaatgacaaaaaccgaattgatctgattcaaagaaccgtccttcctttcacaggagaatgcacggaatgtataataatcaaaaacgccctgtatcagcatcattgggtgcctttattatagcggccattgaccgagttgtcaatatcttcttgtcaaaccagatgattctgccgttttttatcgataacgcacaacaattccttgtcaaaaaatcgctaaggcacataaactatggtcaaatcaacgattatcaccttcccccttgcaattgcagtctaaacatggtagcataaatatgcttttaaaaacttgattatcactgctgctttactttgcttgagaatgccacaacgttcttcaccgcaaataaaacccagcaaaagacgtggatttatcgcgccttttgccgggttttttcttttgcagcagccaagagaggtgaggagccgccataatacgccgcgcattcacagaatcacacaatatttgaggaggaattcatcacatgaagaaaagactttgctcattgctacttgtcctcacgatgctttccacgcttctggtcgcgccggcttccgcccttgaggcagacggttcgactagcgtcggcaacgagacttacgtgtatctcggcgtgaaggattacggcaccgtggaagctgacagcaagcccgactttgtccatcgcttctacaccaacggcgaagaagtgcagtataccatcgccagcagtgacaataagtacgccgtccagaacaagcttcaggaaggctatgtctacgatctgacgattgaaggcggtgtcgtgaccgacgccgccgctgccacggccgacgccgaaggcacgatcgcgtccatcgacgactccaccgtcaccgttaacggcgccgctgtcaagtacagcgccatctatgagatcagcaacaacgccgccggcgccaccgccgtgaccaaagtga

SEQ ID NO: 10209 - DNA, 3533 bp, Unknown
  gut microbiota DNA sequence
cccccttattgccgttcccgcacagtgcgggaacaaatatcaaacttctttgttgaagtaaaagaacttctcatcctctcccttcttcctcatgcaggaagaaagcattttataagaagcgtcgttctccttgaagcacttggcgacgacgtgtcccaggtggcgctggtagagtccccattcggccacggcgcggaacgcttcgacgccgtagccctgtccgccgtattccggcgcgatgcggcagccttcctccgcgccgcccttgccgtcgaaacggtagagcagcacctcgccgatgcacttgccgtctaaacggatggcaaagttgatggcgcgctttttggtaaagtcctctcgcacaacgtcgaggaaataagagtctaagtcttcacccttccagtcggtgcggtagtcgtagccccaccacttgttgcgctcatcgtcgaggcaaagcgcgttgtaggcctcgcggtccttgtcggtaaaggccgaaagtgtcagacgctcggtcttgagcgtcgggatctcgtccaagtcctccagctcgtttttcacatcaaagcagaacttttccgcaagcttgcacggcaggtattggagcttcgaggtgcgaaggccgcggtcgcccgcatcgtcctcacggttcaaatacctgacgccgtccacggcgtagcagcgggcgaactcctgcaccgtcgcgggatagacgccctcgtagccgtagagcgccttttcgatgtggacgtgcagcgtctcgccgcagcgctcagccatcgcgatagaaatgagccgcccctcgtactccataccgccgacatagagccacgacgcgcccgtcaggcgcagcatcgtcttggcaagcgccaactcctgcttggccgactgcgaggtcttttcaaacacctccgtatagtcctgccagaagcgctcgatcagcggcagatcatccttccccagcgcacggaactgcgcctcgggatagagtttgcggaatttgttgacgtggttgcgctggccgctgtaatggcggcccgggaactcgcgcagatcgttcgcctcgtaaatatagtcgcgccaggaacgaaaattgttgaggtggaagcgcggatagcgctctaagagcttcgccgtcttctcctgcggcacgacggacagctcgagcgagatgccctgctccacgcaataatcctcaatggcacagagcgcggcctcctcatcgccgtccggtcccggcacgggatagtcgaagcagggcttgccgtcgatgcagtttttcacgatcaggcagcccgccgcctcggcatactgcgggtgcaggtgcccgcgccacatcagcttgacgagtgcggaatactcgcataattggtagttgcaattcttataatagcgacgcaggcgggaaagatcccgctgcgcaacgggtttgaatgtcagcatggaaaacctttttctccttttcgagtcgtatcgattattttacccgtttttgcgccgcgttacaagtcttttttcatttgggctccagctcggcgagcaccgtctgcgcgcactcaaggaactgctggagcgacgcctgccgtccctcgcccgcgcgcacagccataccgagctcgcgcgccgacttgggctccaccggcacaagcagcacgccatctccgcggccgcgcagcgtcagctccgtcatcatgctcacaccgagaccgtgctcgaccatgctgatgaccgtcgggtcgtccactgccgtcggcaggatgtgcggcttgacgcctacgcggttgaagatgcgcatgatgtccttgtcaaagccctgcgcaggcataatgaagtcacgcccgtcgaactcgctcagcggataccccgtgcgcccgtcgatgggatagtccttgggcagcacggcatacatcgtgtcgtcttgcagatggatccactcgtagccactctcctcttcctgatggctgacaaagatgacgtccatctttccctgcgccaaaagctcataggggctgcggatatgatccgccatgcggatgtcgacgtcaacgtcgggccgctcctcacgaaagcggcggatgatgctcggcagccagtgcatggccatgctggcgaatgcgctcacgcggatgacctcgctgcgcgaggatgccacctgcgcgatcgtgctgtcaagccgcgcgttggcctgcaaaaattcacggatggcgggtgctacacgctcgccgtccttcgtcagtcggacgccgccgcgcccgcgctcgagcagcgtgaagccgacctcgcgttcgagggaattcatcatgtgcgtcaggccggactgcgtgtagcccatcacctccgccgccttggtaaagctgccgaggtctaccgccatcagcagcgcttctaactttttgctctccataggatattcctttcctattagtattcagcatgtttggattataatatatcctcgcgccgtatgcaagcggaattcgcgttttcggtgcctttttacaaactttttccatcatccgtcatacagcttggtcttttttgtccgcctgctgcgtaaaatagagcctgaggtgatgatcttgaaacgacgtttcgcgctcttgctgctgtttttgttgacttttcttgcactctgcttttcctgcaccaaagacggccaagctgtcgccgtctcggccccatcccaactgcggcgctgcattgcgctgacctttgacgacggcccctccccgcagacgaccgccaccctccttgacgggctcaaggagcgcggcgcgcacgcgacgttcttcctcatcggcgagcagatcgcgggcaacgaagatctcgtccgccgcatgaaagacgaaggccatcaggtcggcggccacagctacacgcacatccgtcttgacagcgctgacgccgctgcactcgccgaaatccagaaaacggacgagacgctgcgcgccatcctcggcgacggtgactactggctgcgcccgccctggggctttgcgagcgacgcgctcaaaagcgccgtctccgtcccgctcatctactggacgctcgacacgatggattggagcgtgcgcaacagggacctcgtcgcgcaccacatcatcgaaaacgccaaaagcggcgacatcgttctcctgcacgacccatatgacacgagtgtcgaggccgcacttcagaccatcgacgttcttagtgagcagggctacgagttcgttacgctcgaagaactgttttccaacgccggcgtcacgccgcaggccggacacttctatctgcgcgcggatgaagaagtcccgtggtgaggtctcgacaaaatttttgaaaaaatttcaaattaggacttgcattttccggactggtgtgctattctatctaagctgacattgagcagtacacatcatccgggtgtggcgcagttggtagcgcgcttgactgggggtcaagaggccgtgagttcaagtctcgccactcggaccatcttgagtgaccaaaatagatacactcacctgaaacccctgagaaatcaggggtttcag

SEQ ID NO: 10210 - DNA, 6915 bp, Unknown
  gut microbiota DNA sequence
gatacacaagggcatttaagagtgtcaggaaggatttgaactcaattctcggctgatttggcctgctttatggtgggctctacgctctcggatactttttattgctcgtctttcctaaaaaatttgaaactttttatcgaagaggttccaattcatcacaggaaaatccttcgtgaaaattcttccgagggcaaacaaattccggaagtgctttacaaaaattatacgcagtgatcccggtctcatataaaaatcgcagaaaggtccgaatgccaaaaagagcagatctcattccaccagtgtatcgtccaagcattcttgtaacgcatgtggcaatatccatcgcaaagctttttgattgtggctacgcttgtgctgttatttctgccgctgacgatatcgttttcccgaagcttttgctcttgacattcgtcagattatcccgtataatgcaccgaaaacaacacaaggaggaaatgaaagtgcgctatcttctgaagaatgcaaagtttttctcgcagggcgtgtttcatttggcggacgtgtttctttcagacggaaggatcgtttctattggtgatggtgtttccccttccaatgatactattgttattgatatttctaatatggttttgtttcccggtttcgttgatgttcatgttcatcttcgtgagccgggattttcttataaggaaaccatccgttccggcacactggccgccgcgcacggcggcttcgctcacattgccgccatgccgaacctgaaccccgtgcccgactgcgccgaatcgctcgcgctccagcgcgcgctcatcgagaaggacgccctcgttcatgtccatccctatggggcgatcacggtcggcgaaaagggcgagcggcttgcagaccttgcgggcatggcaccagacgtcatcgccttttccgacgacgggcgcggcgtgcagtccgagagcatgatgcgccaggcgatggccgagtgccgacatctcggcaagatccttgccgcgcactgcgaggacaacgccctgcttcgcggtggttacatccacgacggcgcgtatgcccgcgcccacgggcaccgcggtatctgcgcggagagcgagtgggggcagatcacacgcgacgtgaagcttgccgaggaaacgggctgcgcctaccacgtctgccacgtttcggccaaggaaagcgtcgaggtcatccgcgcggccaagcgccgcggcgtggacgtgacatgcgaaacagcgccgcactatctcgccttcacgcaggacgatttacaggaggacggacgcttcaagatgaatcctcccctgcgcgatcaggccgaccgcgacgcgctcatcgagggccttctggacgggacgatcgacatgctcatcaccgaccacgcgccccacagccgcgaggagaagagcaaaggccttgaaaagagcgccatgggcgttgtcggactggaaacgtcctttgccgcaagctacacgcatcttgtgaaaaagggaatcctgccgctggaaaagctcgtcgagctgatgcacacctctccgatgcgccgcttcggctgcggcacagagatcgccgtcggccagcccgccgacctgaccgtatttgacctcaacggaacttataccgtcgaccccgaaacatttctgaccatggggcgcgcaacgcccttcgccggcacgtgcctcaccggtgcgtgcaagctgacgatgatcggcggcgagatcgtctggaaggaggatatgctttgatcgaagtaacttacaccatcgcggagaacgccctcattgcctcgggcgtctaccgcttgaagctcgagggcgacacctcggccatcaccgcgccgggtcagttcctcgaccttcgcctgcccggtttcttcctgcgcaggcccatctccatctgcgactgggacgaaaagagcgtcacgctcctttataaagtcgtcggcggcggaacgggctggctctcccgctgcacgccggggcaggcgctcgatgcgctctcgggtctcggcaacggcttcgacgttgccgcctgcggcgaaacgacgctccttgcgggcggtggcatcggtgtcgcgccgctcttcggcctttcaaagcgccttcttgccgcgggcaaaacgcccgtcgccgttctgggtttcaacactgcggaggatgttttttacgaaaatgaattcaaggcgctcggcgtgcagactgtcatcgcaacggcggacggcagccgcggtacgcgcggctttgtgatcgacgcgctgcccgagcggttcgacaccgtctgcgcctgcgggccgatgccgatgctcaaggcgctctgcgcaaagacggacaagcccggtcagatcagtctggaagcgcgcatgggctgcggcttcggcgcgtgcatgggctgcacgatcgacacggtgaacggccccaagcgcgtctgccgcgagggtcccgtattcggaagggaggagatcaaatggtaaatacgaacgtcacgctctgctctcttccgctcgataaccccgtcattcccgcgagcggtaccttcggctacggccacgagttcgcagaactctacgatatcaactgcctcggcacgttctcctttaagggaacgacgcgcgatgcgcgccttggcaatccccagccgcgcatcgctgagatgcaaagcggtgtgctcaacgccgtgggtcttcagaaccccggcgtggacgcggtcatcgccgaggagcttcctaagctcgcgcgcgtgttccgcaagcccgtcatggcgaacgtcagcggcttttcgctcgatgaatatgtcgaggtctgccaaaagcttgacgcctgcccgcaggtcggctggctcgaggtgaacatctcctgccccaacgtccacggcggcggcatgagcttcggcaccgacccgaaggctgccgcagcggtcacgcgcgcggtgaaggacgcggtcaaaaagcccgtcatcgtcaagctctcccccaacgtcacgagcatcgcggacattgcgcgcgcctgcgaggacgcgggcgcggacggcatcagcctcatcaacaccgtgatgggtatgcggctcgaccttaaaacgagaaagccgctgcttgccaacagcacgggcggtatgtccggcccggcgatcttcccgctcgccgtgcgcatggtctggcaagtctacgaagcggtgcgcatccctatcgtcggtctcggcggcgtgatgagtgccgaggacgtcatcgagctgatgctcgcgggcgcaacggcggtcgaggtcggcgctgccaaccttgtcgaccccttcgcctgccgccgcatcgtcgaggatctgccccgcgtcatgcagaaatacaacataaacgatttgaacgacatcataggaggtgcccaccatgggtaaggacgttatcatcgcgctggattttgacagcaaggaaaaaacgctcgcgtttctcgatcacttcaccggcgaaaagccctttgtgaagatcggcatggagcttttctacgccgaaggccccgcgatcgtgcgcgagatcaaggcccgcggtcacaagatcttcctcgatctcaaactacacgacatccccaacaccgtgaaaaaggccatggccgtgctctcatccctcaatgtggatatggtcaacctccacgccgcaggtacgcacgccatgatgagcgccgcgcttgagggactcacccgcgtggacggtacgcgcccgctcctcatcgctgtcacgcagctcacctccaccagccagcagagcatggaggaagagatcggcattcacgccccgcttgagaatgtggtcatcgactatgccaaaaacgcaagactcgccgggctcgacggcgtggtctgctctccgcttgaagccggccgcatccacgagacctgcacgaagaactttctcaccgtcacccccggcatccgctttgctgacgcaaaggcggacgaccaggtgcgcatcaccacgcccgcaaaggcacgcgagatcggctcggactacatcgtcgttggccgccccatcacgcaggcggaggatcccgtcgccgcctatcgccgctgcgtcagcgagtttgtgggctaagcaatgcaccgcaacatcatcttatttgatttggacggcacgctgaccgactccggccccggcatcatgaaggccggacagtatgctctgcgcgcgttcggcatcgagcgcgactggcgcgagctgtcgttcttcgtcggcccgccgctcagcgagaccttcgcgcgcttcgtgagcgcagagaatgtcgacgccgcggtcgcgaaattccgcgaatactatcagcaggacggctggctcgacaacgccccctaccccggcatccccgcgctgcttgcgcatctcaaaagcaagggcaagcgccttttcgttgccacgtcgaagctcgacatcatggctgagcgcattctggagcatttcggtcttgcgccctacttcgacgccatctgcggcgcacccgagggcgacagggaagcgggaaaaaaggtgaacgtcgtaaaagccgcgctcaaggcagccggctgcgacgatctttcccgcgccgtcatggtcggcgaccgcgagcatgacgtcatcggcgcgcatcttgcggggctcgacgtgatcggcgtgctttatggctacggcagccgcgaagaactcaccgccgtcggcgctgaccaaatcgccgaaaccccggaggcattggaaacactaattctgtcaacaaactgacattttgaaaggagaagagatagaaatggagcatttggaacgcagcattgcggagggcctgctctccatccgcgcggtctttttccgcccggacgagcccttcacctgggccagcggcatcaagagccctgtctactgtgacaaccgcttgatcctgaccgcgcccgaggtgcgcacgcaggtggaaagcgcactgtgcgaggtcattcgcgccgactatcccgatgtggaggtactgatgggcacgagcacggcgggcatcgcccacgccgccatcgtcggccacatgatgggccttcccatgggctatgtgcgctcgtccggcaaggaccacggccgccagaaccagatcgagggccgccttgagccgggccagaaggtcgtcgtcatcgaggacctcatctccaccggcggaagcgttctggacgttgtgaacgtcctgcgtgaagcgggcgcggaggtgctgggcattgcgagcatcttcacctatgggatgcagaagggacttgaccgccttgccgccgccaacgtgaagaaccacagcctgaccaactttgacgtcatcgccgacgtagcggcgaagcaaaattacatccaccccgaggacgttgcgcggctcattcagtttcgcaacaacccgtcggatgaatcttggatcggaggaaagaactaacatggagcatttgatcgacattttgcagctgaccacccaggagatcgacgatatggtcgccacggccaacgacatcatcgaccaccccgacgcctacgcacacaagtgcgacggcaagatcctcgcaacgctcttctttgagccctctacccgcacgcgcctgagctttgagtccgcgatgctcggtcttggcggcaaggtgctgggcttctcgtccgcaagcagctcttccgccgccaagggcgagagcgtttccgacacggtgcgcactgtcagctgctatgctgacatcatcgccatgcgtcaccccaaggagggcgcgccgctggtcgcctccatgcactctgaggtccccgtcatcaacgcgggcgacggcggtcacaaccaccccacccagacgctgaccgaccttctcaccatcaaccgtgaaaagggccgcttcaatgacctgaccgtcggcttctgcggcgacctcaagttcggccgcaccgtccactccctcatcagcgccctgagccgctacaccggcatcaagatcgttctcatctcccccgaggagctcaagcttcccagctacgtgaagaacgaggcgctcaagaagaacaacatcccctacgagcagacgaccgacctcgaagccgtcatgcccgagctcgacattctctacatgacccgcgttcagcgcgagcgcttcttcaacgaggaagactacctccgtctgaaggacagctacatcctcaccccggagaagctgcgcagcgccaagaaggatctctgcatcctgcacccgctgccgcgcgtgaacgagatctccgttgccgtggacgatgatccccgcgcctgctacttcaagcaggtccgcaacggccgcttcatccgcatggcgctcattctcaagctgcttggtattgaataagggagggacttacacatgatcatcgacgctatttccaacggtatcgttatcgaccacatctccgccggcaaggcgatggagctctacaacatcctcggtcttgacaagctcgactgctctgtcgcgctgctcaagaacgtttcgagcggcaagctcggccgcaaggacatcatcaagatcgatcaggtgctcgaccttgactgggacgtcatcggctatgtcgaccccggcatcaccgtcaacatcatcaaggacggcaagcgcatcgaaaagcgccagctcaagctgcccgagcgcatcaccaacgtcatccgctgcaagaatccccgctgcatcacctccgttgagcaggagctgccgcaggtcttcacactgaccgaagagagcacgcgcacctaccgctgcctgtactgcgagaccaaggccgaaaactaaaagaagccgaaaaagagggaacattacgcaggagatttatgccaggcttatcatgtacaacttctctgaattgattacctcacacgtagtcattcagaaattcaaaacaaaacacccttgcaaggcgaatttctctgttgctgtacaggtttgcag

SEQ ID NO: 10211 - DNA, 795 bp, Unknown
  gut microbiota DNA sequence
tttcacgtgtcccgcggtactctggatccagactgccagtcttcattttcagatacagggctctcaccttctgtggccggctttcccacgccgttctcttaattacctctggtcttgatgtctgtccgcaaccccgaagaacttgcgtccctcggtttggcctcctccgcgttcgctcgccactactagcggaatctcggttgatgtcttttcctggccctacttagatgtttcagttcaggccgttcccttcgtacgcctatttgattcaacgcacgatgctcaagtattgcttgagcgggttcccccattcggaaatccacggatataacggatatttgctcctccccgtggcttatcgcagcttgtcacgtccttcgtcggctcctgatgccaaggcattccccttgcgctcttttcagcttgacctatcgaatcatttgctgatcctcaaagttgaattatgcaggcaatttaacaggattttcgaaattgtaattgttacccatctatacgatgttccacaattaaaactaaaaatacgttcttctgttctttcaaacaaaagacctctctgttgccttgcttatcacttcttcattacattgttcagttttcaaggttcgatcttccaactgcttttgcagccagatttgaagatctgtcttatgccaggtcttcaaatccaacgacaaatgtcactggtatggtgggcccgagtgggctcgaaccaccgaccttacgattatcagtcgtacgctctagccagctgagctacgggcccgtatgaactta

SEQ ID NO: 10212 - DNA, 18383 bp, Unknown
  gut microbiota DNA sequence
atacccccggctaggccgggggatatttatttgattttgaaatttgcttcttagtagctgccgaggtcggcggacttgtcgcccgtgacgctgacgccgaactcgtagtcgttgccggggaggatggcgttcaggatgacaccgcacagggccgcgatggcgaggccggagagggtgacggccgcgccgccgacagtgaaggtgatgccgccgaccgagctgaagccgaggccgctgacgaacatgaccgctgcgatgatcaggttgcgggacttggtgaggtcgacctggttttccacgatgttgcgcacaccgaccgcggagatcataccgtagaggatgaagctgacgccgccgacgatggccgcggggatggagttgacgagcgcgtcaaacttgggggagaagctcaggatgatggcgtagatggccgcgaggcggacaacgcgggggtcgtagaccttggagagggcgagcacgccggtgttctcaccgtaggtggtgttggcagggccgccgaagaagccggcgaacgcggtggcgagaccgtcgccgacgagcgtgcggtgcaggcccgggtcttcgatgaagttgcggccggtggtggaggagatggcggagatatcaccgatgtgctccatcatagccgcgatggcgatgggtgccatgacgaggatagcggaaacgtcgaacttcgcgatgacgaacttctgaaggccgatgagattcgccttgttgacagcggcgaagttgacgagcggctgcatcacgccctctgcatcgggcagctgcgcgccgcaggcgctggcgatgaccgcgacgatgtaggagccgacgacgccgagcaggatggggatgatcttgaccatgcccttgccccagatgttggcgaccacgatgatggccatagcgacgagggcgagccaccagcaggtggaggcgttattgatggcggagccggagaggttcaggccgatcatgatgatcatcgggcccgtgacgatgggagggaagtaacgcatgacctttttcgcgccgagcaccttgaagaggagtgcgagcacgaggtagaggagacctgcgatcacgatgccgccgagcgcgtaggcgagcttgagctcggggtccatgccctcataggcgggcatcgtcgcgaccgtggagaagccgccgaggtaggcgaacgaggagccgaggaacgcggggaccttgaacttggtgcacacgtggaacagcagcgtgcctaagcccgcgaacagcagcgtcgtctggatggagagcggcaggccgtagccctggaccagaatggggacgagcaccgtcgcgccgaacatggcgaacatgtgctgcaggcccaggatcagcattctgggggtgcccagctgtcgggcgtcgtagatggcttcgtgtccgagttctttcttcatgtgattttccctctttgctttcttcttatttttattctcatttgaataaacatggttgggccccgcgtgggcaaaaaataagaccggtaagaaaacttaccggtcaaaagaaacaatatcaataaaaacagaaacagcaataccaacggaagaatttttctttttcggcgcggtgcagagcatcatgggtcgttcctcctgttcgtttgttatcgtctgaccaagaatacccgaaagcaggcaagattgcaagccgaaattttgaccaatttacatgaaagatatccatcatttttgtgcaaaaatgcgggcagcaaaacgaaatttttcctgcaaaggacttgccaagactgttttgatgatgtaaaatacccatacctcctattgataacgcctataaatggaggactttttaaaaagagagtgtgtgttgtatggaaaagaaaaaaatgagcctgccggtgcagattgttattgcgcttatcctcggtattgcggccggtcttatcttctactttgtcggtaagcccgaatttaccaccaactacttaaagcccttcggcacgatcttcgtcaatcttctcaagttcatcgttgtgcccgtcgtgctgctgtcgatgatcgacggcatcatctccatgggcgatatgaagaaggtcggctccgtcggctggaagacggtcgcctacttccttgtcaccacggcctgcgcctgcgtcatcggcctggtgtttgccaacctcttcaacaatgcaggctggttccccacgctcgcgctggaggacggcgcggtctgggataaggccaccagcgccaacttcatggataccctggtcgccatcttcccgagcaacatgtggaagtccttcaccgacgcaaacatgctgcaggtcatcgtgatcgccctgatgttcggcggcggcatccttgccgcgggcgaaaagggcaagcttgccaaggacctggtctccacgctctatgcggtcatcgagcgtgtgatggcgttcatcattgccctcagccccatcggtgtgtttacgatgatggcgtgggtcgtcgccacgcagggccccgagatcctgacgtctctcggtatcgtgcttggctgcgcttacctcggatacattgtccacgcgatcctctgctattccttctccgctaaggcgtttgctggcatcagccccttcaccttcttcaagaaggcatcccccgcgatgattttcgcctttacctccacctcctctgctgccacgattcccctgagcaaggagtgcgcggatgagctgggcgcggagggcgacgtttcctcctttgttatccccctcggcgcgacgatcaacatggacggcaccgccatctatcagtgcgtcgccaccatctttcttgccacctgctgcggcatgacgctgacccttggccagatggtcacgatcgtcgtcaccgcgacgcttgcctccatcggcaccgccggtacgccgggcgcgggcatgatcatgctcgctatggtgctcgaggcgatgaacatccccgtcgatatgatcatgatcatctacggcatcgaccgtcttttcgacatgggccgtacctgcctgaacatcacgggcgatatctcctgcgcctgctgcgtgaccaagtgggagagtaagaaggccgcgcagactgccaagtaattttctgttccgtaatcaaaatgccgccccgattcggggcggcatttttcgtccgaacaaagcggattgggattgcattttaacacagcggggcatacaatgatgctgcttcgccaaaggcgaggcacaggaggaagaagatgacgactgatcggaaacggggatatctctatattttgctggccgccatgctctattccacgaccgaggtcgcgctcaaggccctcggcggcgcgttcgcgcccatgcaggtgacggtggagcgcgtgctgctcggcgcggctgcactgatgccctttgcactgaacgacctcaaaaagcgggatatccagcttacaaaggcggattggggctatttcaccctgctcggttttctgacggtgacgctgcacatgtcgcttttgcagatggcggtgctgcacatggacgcctcagctacatcgattatctactcgggcaatcctgtgttcgcggtggcgctggcgcacttcatcctgcatgagccgctgaaaaagaaccatctgctggccatcggcgtggaacttgtcggcattctcttcatcctcaatcccgcgcaccttgagatcagcctgcgcggctttttggagatcatcaccgccacgctgctgtttgccacttacggtacgctctgcaagctgcgtctgccgcggctcggcgcgctcgtgatcacgacgttcaacatgctcatcggcggtctggagcttcttttcctgctgctgctcggtgagattccggcggtcggtgcgctttacagcggcctggggctggagatattcgcgggcattccgtttttcacgggctttacgctcaaaacgacgctgcttttgtgccatgtcggcatcggctgcgcggccatcggctttctgctcacggcgaagatcacggagtacacctctgcgacggaggcgtcgttcgtttatctcgtcaagcccattctggcaacggcgctggcggtcgtcgtgtaccacgagcatatcagcgtgaaccgcatggtcggcatcgcgttctttgtggcggcgtcgctgtgtgtcagcgtgccggtgctgagagaaatgcggcgggagcgcgcggtaaaaacttgacaatgagaatggaaaagcggaagggcagcgcccttccgcttttttgttattcatcgatgcgggtgatgtcgtggatccacttgccggagtgcaggcggtaaaggccgatgggggatttgatgatatattcgatcatcaggcagaggcagaagacctcgttcggcaccttgagcacaaggccgagcagacacatcatcggcagcgtgccgcaccagagggggaaattgtcgatcacgagcgaagcgttcacatcgccgccgccgcgcagcacgccgacgaccatcgtggttgaaaagctgtgcagcgggatggcgcaggcatagcacatgagcatcacactgcaaagccgctcggcgaccgccgagagcgagaagagcggcatgacgaacgggcgcatcagcgtcacgaacatcgtgtattcggcgaggccgagcacaatgccgaacgcgaacgccgtgaagcacagcgcgcggccgatgttgtaaacgccctttaagttgcccgtgccgatctccttgccgacgatgacggataccgccgccgcgatgccgaacacgccggaggtcatcagcttgtcgatattgcccgcgagcgtgtaggcggcgatgagatcgctgctatttgccatgtggcccatgatgaccgtgatcatcgaaaagcccgtgccccagagcgtctcattgatgagcaccggcgcgctgtagcgcaggaatttacgcagcatgtccatgccggggcggaggatggcgtgcttcatgagcggcatcgtgcggcagcggaacgcgtaggagaacgcgacgacgaactccaccacgcgggacagaagcgtcgctaccgccgcacccgtgatgccgagcgcgggcagaccgagcttgccgaagatcagcacatagttgccgagcgtgttgcagagcatcgagatcgcgaagacgatcatgccgaagcgcggattttcgatgctgcgctgcatgccgatgtagatggaggaaagcgagttgaaaatgtaggagaagccgacgatgcgcaggtacggctcggccagctccacgagtgtcagattgtcggtgatgaggtagagcacctgcgcgggaaacgcgcacagaatggcggcaaacagcacgctcacgccgcccgcgatcataaagccgatgcccatgacgcggttgatgctctcgcggtcgccgcggccccagtattggctgatgagcacgcttgagccgctttgcaggccgaagacgacgagctggatgatgaagactggcacgttcgccaccgtgacggcggacatctgatcgctgccgagaagtcccaccatgaacgtatcgagaaagccgagcgacgtggtgatcaaattctgcacgatgaccggcagcgccagcagaaaaagatgcttgtaaaagcccttgggctggtgaagataggagaacataaaaacctcgaatcgtggaattacagcatggggaagcgcgtgtcgcggtgcgccctgagcgcctcggcgagcgcgtcgatgtcttcttttgtcgtttcagggccgaagctgacgcgcagcacgcctgcggcggtcttcttgtcaagccccatcgtgcggtagacatggctcagctgtccgcgatggcaggcggagccggcggagatgcagatgccctgcgcgccgagctccgtgacgacattggcggaggggtagccgacgagcgagatcgacaggatgtgcggcgcggtcccgtcgccgatgcggacgacgctgtcgagcgcgaggagcttttcctcggcgtaggtcttgatggcggcgacgtgggcgagcttttcatcgagatggtcggcgcgcagctcgaccgccttggcaaagcctgcgatctggcccgtggcctctgtgccggagcgcaggccgctctcctgcccgccgccaaagatcagcggtttgggcgcgcggatgcgctcgcccaaatacaggccgccgatacccttgggcgcgccgagcttgtgcgcgctgacggagatgaggtccgcgcccagcgtgtcggcgcggaacggaattttcaaaaaggcctgcaccgcgtcggtgtgcagcagggcacgggactttttcgctttcagaagctgcgcgacctcggccacggggaagatgcagcccgtctcgttgttgacgagcatcatcgtgacgagcgcggtgtcgtcgcgcagtgcactttcgacctgagaggcggtgatgtcgccgttcttgtcgggctttaagtacgtgacggagtagccctcctgctcgagggccttgcaggtctcgagaatcgcgctgtgttccacggcggtcgtgatgatgtgcttgccggtgtggcggttctggtgcagggcaaggcggacggcccagttgtcgctctctgacccgcaggaggtgaagacgaactgttcactcttgcagccgagcgcggcggcaatcgtctcgcgcgccgcggcgacagcgtcgcgcgcctgctttccgatggggtattgcgagctggggttgccccagccagaaaccagcgtatcgtaaacggcgtgcgccacctcttcgggaacgggggtggtggccgcgtgatcgagatagatcatatcgggaaaatcctttctttggtcttgtcagaatgctcaaatgattatacaatataaaaataaaaaagcaagggcggcggacgctttgcgtcggaaacggcagaataaagcgggactttaccgcccaaatcgcggaaaaggatacaaacatacatgaaagttgcgatctgcaccctcgggtgcaaggtgaaccaatatgaaacgcaggcactcgagcaggagcttttgcaccgcggacatacactggtggattttgaggagacggcggacgcctacgttgtcaacacctgctcggtcacggcggtgagtgacaaaaagtcgcgccagatgctccgtcaggcgcagcgccgcaacccgagcgcggtcatcgccgcctgtggctgctacgcccagacgcatcccgaggacgtcaaaaagctcgggctcgacgtcatcgccggcacgaatgaccgcgcgaagttcatcgaccttttggagcgcgcggcacaggacaagacgcccatcgtcgatgttgacgacgtctgggagcggcgcgattttgaggtgctgcccgcgggcggtatggtgaatcgcacacgcgcgatgctcaaggtcgaggacgggtgcgtgaacttctgcacctactgcctcattccttacgcgcgcgggcgcgtgcgctcgctgccgatggacgaagctgcaaagcaggtgaaagcgctgcgtgaggagggctaccgtgagatcgtggtcacgggcatcgaaatttcgtcctacggctcggacttcaaggacgggacctcactcatcgaccttttggagctcatcgcgcgcgagggcggcgacatgcgcatccgcctcggctcgctcgaaccgcggaccatcacggaggaattctgcaagcgggcgtcgaagcttccttacctctgcccacatttccacctctcgatgcagtcgggctgcgacgcgaccttaaagcgtatgaaccgcaaatatgatacggcgcgctatatggaatcctgcgacctgctgcgtcagtattttgacgaccctgccatcacgacggacctcatcacgggctttcccgaggagacggaggaggaattcgcgcagacgcttgacttcatcgcgcgcgtcggctttgccgacatgcacgtcttcccttattccatccgcccgggcacgaaggctgcggagatgcgccagatcgacatgcccgtgcgcgaagagcgcgctgcgcgcgcctcggctgtcgccaagacgatgcacgaagcgtatcttgcgtgctgcgtgggcaagatctttcccgtgctcttcgaacgcgaccgcaagggcggcagcgcgggccacgcgccgaactatatggaggtatccgtcgcgcaggaaggcctgcacaatcaggtgaaaaacgtgaagatcacggcggtcgacggcggcagtcttcgcggcgagttggaggaataacgcatggccaaccatttttatgcctatatctcccgcatgcgctgtgtcaagcgctgggcgctcatgcgcaacaccgaggaggagaacattcaggagcacagccacatggtcgcggtgctggcgcacgcgctcgcgctcatccgcacgcgtgtcttcggtctgcccacggacgcgaacgccgtggcggtcgccgcgctctaccacgacgcaacagagatcctgaccggcgatatgccgacgcccatcaagtactataaccccgggatccgcgacgcctaccgcaaggtcgaggccgtggcaagcgacaagctgctctccatgctgccggacgaactgcgcgcggactatgagcccatcatcaagatcgaggacgagacgacgaaaaagctcgtcaaagcggcggacaagctctcggcctacatcaagtgcgtcgaagagctcaaggcgggcaacatggaattcaaaaaggctgcggagcagacgcgccgcgcgctgagcgagatgcacatgcccgagctcgactatttcatggtcaactgcatggagagcttctccatgacgctcgatgagcttgaatgacgcggaattaaggaggaaaacaccatgaacatcatctggctgggccattcctgttttgtggccgagagcgcgggctggcgcgtcgtgctcgacccctactatgtagagacgtatcctgcgctgcacatcgaggcggacgaggcgctgtgctcacacggccaccgcgaccacgcctttttggaggcggtgacgctctcggggcgcgacaaatcggagagcccgtttacggtcgagacggtttcaacgttccacgatgacaagaaaggttcacttcgcggcgagaacgccatccatatcctgcgcgcagaggggatgacgctcgtgcactgcggtgacctcggccacgagctgagcgaggagcagcttgcggcggtcaagggctgcgatgcgctgctgattcccgttggcgggtactatacgatcgacgcgaagacggcaaaaaaggtcgcggacgcgatcgcgccgcgcgtgctcgtgccgatgcactaccgcttcggcgcgcacggctaccctgagatcggcacactcgatgaatttctggcgctgtatgaggcaaagaagatccacaaacttgatgggaacttgttcgagctgacgaagaacgcacctgcgggcgtcatcgtgccgcgatttgccgaataagagaagaaatgcaagagccgcccgtttagggcggcttttgctgtataaagcccttctttcccgcgtagactataatgcttgcccggcttgaccggggcggaaagggaggacggagcatgaaacgggagctgcgccgatgggagattgtcggctttatcgcaacgggccttttcgggacgctgctgcactttgtgtacgaatggacgggcgggaatcgcgtgatcgcggtgttttcggcggtcaacgagtcgacctgggagcacatgaagctgttgtttatcccgtttctcgtgttcacggtggtggagtttattgtgttttccgaggcgttccggaacttcttcgccgtcaaggcggcgagcatcttgctgggccttgtctcgattccggcgcttttctacacgctgacgggaatgttcggcaagctccctggctgggtgaacatcacgatcttcttcctcgccgacgcgcttttgtactttgtgagttaccgcctgctgaccgatggcgcgctgcgcgggggcgcgatgcagctcatcggctttgtacttctgtgggcgctgctgttcgcgttcgtctggttcacgtaccgcccgctgcacctgccgctctttttagaccccgtgagcgggtgttacggactggaaacaccgtgttaaaaaagccctgccgagaaatcggcagggcctttacagttgctatacaaatagtatattttgcagagcttctgcaaaatgcgtgtgcagaaaggctcttgtgattcggcagaacggcaaaaataaaaatcagcagacatgacggaagttacgaaaagccgtcaaagtagccgcgttcccgacagaatccgccgcgatgcggcaatgtttgatcgaaactgacagattaacataataaattcaataaagagattctacggtgagttatccacagtttccacagagttttccacacaagtggatttctcaaaatcccatgatttgacagggaaaaattgatttgatttccgcggagtggaaaacatactgtgcagataggcgtgtgtcgaaatttacataattctggaattggaaaatttgtggcagaacagaaattcgatttgttaccataatcgtgaaattatgcaagatggaatagactccttgcagtctgcaagggagagcagcgccgcgggcgctgcacgaggcaaagggggatactctctttcacaaaagagagtatccccctttaaatcccccgagagaaaggtttacattgcaagcgagcagctcgaagagctgcaatgcttgccgattgcactgccctgatcgcggcgttgccgcgtttggtgttgctagacgatttggcctgctcctattatccgctgccgctctgcccatcttgtgggagtgcacagtaatttccgtctatcgccagtccctacaatgcggcgagcgcagcaatgtcgcattccgtaagcagtctgccgccgagaaaacgtcactcgcgcctcacgatagtaaggcgcggttgctactggtaacgagtagtaggggttcatggcgaagccatgtacaccgcacttactttgcgcagcgcgtgcagttcttcgagctacaaactgccaatgtgcggggtcaaggggcaaggccccttgcgttctcttgggggatcaaaagggggccattctctcacgtgagagaatggccccctttaacgcacccctgcacggtgcaggggaataagaaccagcgctgccgcgctgtaaaccctcagacgataggatcgtcaatatctctcgtcgcatacgcgttcagcgcccaatccgcccgcgcgccggcgagatactcataatacccttgtgcgccgatcatcgcgccgttgtcaccacagagcttgagcggcggcatgtagagccggcagccgtgctttcggcactccttttcgagctctgcgcggatgaacgagttcgcggcgacaccgcctgcggcgacgagtaccttgcgcccgctttgctgcatggcgagcatcgcgcgcgggacgagctcgtcgacaacggcctgcgtgaagtcgcgcgcaagcgccgcacggtcgagctgctttcccgtctgctcggcgttgtgggcaaggtttacgacggcggtcttgaggcccgaaaagctcatatcgagagggcacccgtcaatcttcgcgcgcggcagctcgtagacgccgccctcgctctcgtgggcgagcttgtccatcgccgcgccgccggggtagggaaggccgagcacgcgcgcggccttgtcaaagcactcgcccgccgcatcgtcacgcgtcgcgccgaggagcgcaaagtccgtgtagtcgcgcacgtcgacgatgagcgtgttgccgccggacatgcacagcgccagaaacggcggctcaagctctgggaacgctaagtaattcgcggcgatgtggccgcggatgtggtgcacagggatgagcggcacattcagcgcgtaggccgcgctcttggcaaagttcagccccacgagcaccgcgccgatgagacccggcgcgtaggtcgcggccacggcgtcgatgtcttttttctcgacgcccgcctccttgagcgcctgatcggtcagcgcggcgatggcctcgatgtgcttacgcgacgcgatctccggcacgacgccgccgtagagtgcgtgcaggtcggcctgcgacgcgatggcgtcggagagaatttttcgtccgtcctcgacgaccgcgacggcggtttcgtcgcaggaggactcaaaagcgagaattttcattgctgcgcctccgcttctgccgcgccgaattccttcgtcatgatgatggcgtcctctttcgggtggtcgtagtagtttttgcggcggccctcgccgcggaagccgcggctgccgtacagcgcgatggcggcatagttgctctcacgcacctcaagcgtcaagaacgcaaggccgctgccctcggcgaagcggataaacacgtcgagaagctgccccgccacaccgccgcggcggcagtcggggcggacggccatcttggtgatgcagccctcgtccgcgacggcgagcagccccgcgtagccgacgacgctgctgttttctgcatccagcgcgactaagaaggccgagcacgcgttttcaagctcctctgcgagcatgttgcgcgaccaggggttcgagaagcatgtgcgctcaagctcggcaacgtcattcaaatattcgttcgtcatcggcacgatgcggacttttttctttaactgttccattggtttcctccggtcatttggcttccagccagtttatgccccagtgggcctcggcggtcaggggaacggagaggtgcactgcgccctccatctcctcggtgaggagccgtgcgaccgcctccttttcctcctccgggcactcgacgatgagttcgtcgtgcacctgcaaaatgagctttgcctttaagttttccttgtgcagccgctcgtcgacgcgcaccattgcgagcttgatgacgtccgcggctgtgccctggatgggcatgttgcgcgcgacacgctcgccgaacgaacgggtattgaagttgctcgccgccagctcgggcagcgcgcggcggcggtgcatcagtgtttcgacatagccgcgctccttcgcctgcgcgacgacctcatccatatagcggcggatgccggggaagcgctcaaagtacgtctcgatatattccttcgcctcgtacaccggcacgccgatgtcctgcgcgagcgagaaggcggaaatgccgtatacgatgccaaaattcacggccttcgcgtgcgagcgcatctgcttggtgacctgatcagtcggcacgccgaagacctgcgcggccgtgacggtgtgaatgtcctcgccggtcagaaacgcctgcttcatcgcctcgtcgtccgcgatgtgcgcgagcagccgcagctcgatctggctgtagtccgcgtcgacgagcacgcagccgcttgctgggacgaacatgcggcggaattcgctgccgagctgcgtgcgcgtggggatattctgcaaattcggctcggtcgagctcaaacggcccgtcgccgtgacggtcatctggaagctcgtgtggatgcgcccgtcgggcgcgatgaccttcaaaagaccgtcgcagtaggtcgagcggaattttgcgtactggcggtactgcaaaacctcttcgacgatgggattctcccaccgcagtttttcgagcacgtccgcgttcgtcgaccagccggtcttcgtctttttgccgtgcgggagctgcaagcgttcaaagagcacctcgccgagctgcttgggggaattgatgttgaacggcccgcccgcctcttcatagatgtgctgctcgagcgtcttgagctgcacttccatctcgctgccgaaggccgcgagagcgttcgcgtccacgcgcatgcccgcgtgctccatgcgcgcgagtacggcgcagaggggcaactcaacctcataatagagctcgtgcagctcgcgcttctcaagttcgggggcaaaggtctcatacagcgcatcgacggcgctggtatagacgtggaacgccgtctcggcctcggccgtgtcgccgagcatcgagaaagcgtctggatctaagtgcttcggctcggcaagcgtctggtggaagtaggcggcgaagagagacgcgatatcgtacttgcccgccgtcgcgtcgagcaggtaccctgcgagcgcggtgtcaaaaatgaacccttcgatgggaaggccgttttcgagcagcgtgcgctggaggtccttgacgttgtggctgactttcttgatatcatccgagaacagggcgcgcagcagcgcgttccagtcgccctcgtagcggctgaagcagaactcggcagagacggcggtcgattcgcctgcaacgaagtcgacgatcacgccggaaaggtccggcagcgccagcagcgtcacatgctccgccttgcggaagagcgagagatattccttggccttttccaccgtggtcacggcctcggcggtcacggtgaggtcgaccggctcctcggcggcggggatgtcggcgggcggcttgagaccgtatttgtcgatgagcttggtaaattccagcttcataaagagcggatagagcgcgtctgacggcgccttgcgcaggttgtcctgcggagaaaattcgagtggtgcgtccgtcacgatggtcgcgaggtggaagctctggcgtgcgctctcctcgccctcggtgagttttttgatgacgttcggcttggcctcgatatcggggagcagccggtaaatttcgtcgatgctctggtatttctggatgagcgccatcgccgtcttttcgccaacgcccggcacgccggggatattgtcgctcgcgtcgcccatcagggctttgaggtcgacaatgtggatgggcgcaaagccgtagacctcacgaaagctctcgggcgtcatgtccttcgtcgtggtctggcccatgcgcgtggaaatgagcttgacggtcgtatgctcggtcacgagctgcaaagaatccttgtctcccgtggcgacgacacagtcccagcctgcgctttcgcacttgcgcgagatcgtgccgatcagatcgtcggcttcaaagcccgcgagctcgtagcgggggatgttcatcgcgtcgagcacgtccttgagcaccggcatctgcatggcgagctcttcgggcatggcgtggcgcgtggccttgtagccctcgtactcgaggtggcggaacgtcggctcgcggcggtcgaaggcgacgcacagcgcctcgggcttttcctcgtcgagtaagcggccgagcatcgtcagaaagccgaagatcgcgtgggtgaaaaacccgtcgcgcgtggtgagcggacggacaccgtaataggcgcggttgatgatggagttgccgtctaaaaccatcagcttcacggcatgcacctcccaaaatgcaaatttttactaaatatagtatagcgcaaagcaaacaaaaacacaacagaaaccggcggaactctcggcgcggagtgagaaagtgtggtaaaaataaacagaacacttgcaatttcttgtcgggatgtctataatattgactgaaaatctgttttgcttcctaattttttgttaggaagcgggcggaaaaacaaaaaagaaagggagaaaatcatggaaaagctatttaagctgaaggccaacggtactacggtacgcaccgagatccttgccggtcttaccacgtttatgaccatggcctacatcatcgcgctcaacccgaacctgctgaccaactttgcagtgggtacgccgctgtggaacggtgtgttccttgccacctgcatcgcctcggcgatcggcacgatttgcatggcgtttttcgccaacaagccgttcgtcatggcgcccggcatgggactcaacagcttcttcgcggtggtcgtcgccaacatcgcggtcatcaacgagtgcgagtacgagtccgcgttccaggcggcgctcgtcatcatccttgtcgagggtatcgtgttcctcatcctcacgctcttaaaggtgcgtgagaagatcgtggaggccattcctctcggcgtgcgctacggcatcgctcccgccatcggcctgatgctgatgaacgtgggccttggctccaacgtcggtatctactctgaaaacggcggcccgttctacatgatgcgtgacttcttcggcgcgctgacgcccagcatcatcaagggcaacatgggctcgggctacgatgcgatggtcctgaccgtcgcgaccgcgttcctcggcgttttcgtcatggtcgtcctcgccaagaagggcgtgaaggcggcagtgctgctcggcatgctgttctcgtccgtcatctactgggcgggcagcgccatcttcctgcatgtcaatccgtttgcgagcctcgcgactgcgagctttgtcccgcctttcgccgacatggtctccaccacgcttttcaagtttgactttgcgggctttgtgaacatcggctggttcaccgccatcacgctcgtcatcaccttctgcatgatcgatatgttcgataccatcggcacgctcgtcggtacggcctcccgcgccggcatggtcgatcaggacggcaacatgccccagatgaaggaagccctgctgtccgatgccatcggtacggtcgcgggcgcctgcaccggtacctccaccgtcaccacgttcatcgagtccgcctccggcgtggaagcgggcggccgcacgggcctgaccgcgctcacctcgggcatcctgttcctcgcctgcatgttcctcgcccccatcgccgccgtcatccccggcgctgcgacctccgccgcgctgatctatgtcggcgttctgatgctccagggcctcaagaatgtggacttcagcgacatggaccaaatgctgccggtgtccatcatgctcatcggtatgccgatctccggctccatcggccacgccatcggcctgggcctcatctcctacacctttgtcaaggtgctctccggcaaggctaaggacgtcagcgttctgacctacgtgatctccgctctgttccttgtcaagttcttcgccgtcgtgtaagtgtgtgaaaaaaccttaaaaagagcgtcccgaacgggacgctctttttttctgcgccgtggtatgatatcatgacgaagatacatagggtaataggagcgcacggcgaaaaaacattgaaaaatcaaggattgcaactgccggttgacaaatttgacagtgcgctttctttcccgcaaccgcgaaataggctatgataacgccatccagacggcgcgggaccgcgccttagaattcaggaggaagacgatatgatcttagcggataaaatcatcacgctgcgcaaaaaggcgggctggtcgcaggaggagctggcaagtcagctcggggtgacgcgccaatcggtatccaagtgggagggcgcgcagtccgtgcccgaccttgacaaggtggtgcagatgagccggctgtttggcgtgagcaccgactatttattgaaggacgaactcgaagaagaggagttcgtcgaatccgaggcggacgaagcgccgctgcggagagtgacgatggagcaggcggcgcgataccttgcgctgcgcaaggcctgcgcgccgaagatcgcactggcggtggcgatgtgcatcatctcgccggtcgtgatcatttttctctccgccatggcggacgcgggcctgggcggtatttcggaggatctggccgcaggtctcggcgtgagcgtcattttggtgctggtcgccattgcggtggggatgttcctctcgtgcggggcgaagacgaaggaattcgactttcttgaaaaagagccgtttgagaccgagtacggcgtgagcggtatggtgcgcgagcggcgcaaggcctatgagccgacggcctcgcgctgtacgatcctcggcgtggtgctgtgcatccttgctgtcgtgccgctgatgctcggggtcggtctcgcgtcgtccgatgtcgccgcgctgctcgtgcgcgtcgctccgacggatgtttacgccgcggcggcggtggatgcgctgctgcttctggtcgcctgcggcgtgggcgtgctcgtctggagcggaacgtacaccggcgcgatggaccagctgctcgaggagggcgactacacgcgcaaaaagaaggcgcgcagcggcgtaatgagcacagtgtcgctcatctactggctgagcgtgacggcgatcttcctgttctacactttcggacccaaggggaacggccagccgcagtatagctggtttatctgggccgttggcggcgtactgtatgcggcggtgatgggtattgtgtcgctcgtgctgtatcacaaggataaaatgtaaagcaggcttgacaaatcggagcagtagtgctatcctgcgagtaaagcaaacttgacatttttaaattttctcttgacagttt

SEQ ID NO: 10213 - DNA, 5268 bp, Unknown
  gut microbiota DNA sequence
gagattcttttcagaatcagcatcaaacaaatgcaccagtttggcatcaaacccaaacttcaccgccgtatgccgcgcatacgccatcggatcaatattcgcggtgggaatgactgccacaacatcctgcccattcgcggcaaggtgcagatgcagctcgctgcccatcagctcgctgacgtcgacctcggcagggatgccgctctcgccgagcgagatatgcacggggcgcacgcccgcggtgacactgcggctctcgacgcctgcggcggcgagctttgcgctctgctccgcggtaagcgtgacggtctcgcccatgacggtgagcgtatagctgtcggcggtctttgtgagctggcagttttcaaagaaattcatctgcggcgagccgatgaagcccgcgacgaacaggttcgccggatggttgaagacctcctgcggcgtgccgatctgctggatgtagccgtcgcgcatgatgacgatgcggtcgccgagggtcatggcttcgacctgatcgtgcgtgacgtaaatgaaggtggtgtcgatcttctcgcgcagcttgatgatctccgcgcgcatctggttgcgcagctttgcgtcaaggttcgagagcggctcgtccatcagcagcaccttcgggcttctgacgatggcgcggccgatggccacgcgctggcgctggccgccggagagcgccttgggcttacggtcgaggaactgagtgatgtcgaggacttcggccgcctcgcgcacgcggcggtcgatctcgtcgttgggcattttcttgagatgcgtcttgccgtccgcgtctgtttccgcgatctttttgagcttgagcgggaaggcgatgttttcatagacggtcatgtgcggataaagcgcatagttctggaagaccatcgcgatgtcgcggtctttgggcgcgacatcgttcatctgcttgccatcgatgaagagctcgccgccgctgatctcctcgagaccggcgatcatgcgcagcgtggtcgacttgccgcagccgctcgggccgacgagcacgatgaactccttgtcggccacgtcgatattgaagtcctgcacggcgacgacgccttcgtcagtgatctccagattgttcttcttttcgacggcctcgtctttcttctttttcttgctttcggtgttggggtagacctttcggacatttttcagaatgacctctgccataatcgtgaaccgcagtcctgccgcctccgcgatgcaggacctcgcagccgcctgagcgcgccgctttacggcaggtctccacactgccgcaccgccggttcggcggaaaacgttcctccttttgtatttcccgcgagcggtacgtaaaaggtggagtagcgcaggcgggagggaatggaagtgagcaaaactactcgaaaccagtatacggcaaagcgcggctttccacaatggaaaaccgcgctttcatactgcattttggtaagatagataacaaaaagaaccgaaatttatgcatttttaccacggcggcggcgatagacgaccgccagccggtcgatgagcagatcgtagacaaaaaagagcagcagccccatcgctgccgtcgcccacagcagccacgctgcgctctcggaaaactcctgcacgacggcggggagcttgaagacaaaaatgatgagcgcgtacatgacgcccatgctcacggtgcagaggccgagcttcgcaaagagccgcagcgctttggacaagatcgcgtcaagattcggcttcacgaggggataatagccgagaaagcagaacacaagcgctgcttccttgtccgcgcagagaagaagtcctaagactgccgccgcggcaaagcagctccatgcgtagcttttgcggcattcctcgcgcgcgggcaaaagcgcagccgatgcgaggatcggccaggcgtaggtcgagagcgggatgacgccgctgagccagaggaaggcgaccgcgagcgcgcacagtacgccgcacagcgccagttcatgtgttttctttgccaaaatttacttcacatcgcttttacagatattccggctccatcgcgtcgtggagcacggtggtgatcgcgtcggaaaagacgctgtcggagtgcgcgtgcagggcgttgagcgtctccgccacggcggcgaccttcactttgccggtggagtacacatcctgatcgaagatgaagcgcacttccttttcctgcacctgctggacctggttgccgctgcggatgttgcgctggacaaagcctgggcccgcgtgcagcttgagcgccgcgagcgcatcgagcttgcgctcgacgtcgaccgagcacttggcgacgctcgcttcgtccacgccgtcctcgtcaagaatgccgagatacggcggctggagcagatcgttccagcggcggcccgtgaggccaagctgctcgcgcgaaatggcgttgacaaagcgaaggcccacgcggtcaaagcagttgggacggtaaatcttgataaactggccgagcggctcgtcgagacgggcggcaaagtcctcccagtgcgtgtagcgcatggtggaaagggcgatgaagtccttcgtgaggctcagcttgtagccgccgtcttcggaaatgaacgtgtggttgttgaccgtccgcgcgggcgcgccgttcacgccgggcagcttttccacctggcactggtagcgcgggaacgccgcgcgcacggtctcctgaaagtcggcgggctcgcgcgtgtcgatcgagagaatggtggggaagcgcagctggcagatgacttcgatgagctgagatttgccgtaggcgtagcggcggttatcggaagagatcataacgtaaatacctccgtcatgttgcatttgattatagattatagaggaaagaaaaacgattgtcaaatcagcgttcgtgcgcgaagaagcgctgataaaacttaccagcagaaaaactgcatatccgattttttatgagtcaaactacccttgcgatacccaaacagcaaaactctttcaaacaggtggaaccaaaaacaattgtaggaaaaggagaaaatcattatgtccagcaagaacagcaacaagctcaacatccccgaggccaaggccgctatgaacaagttcaagatggaagccgccagcgaggtcggcgtcaacctcaagcagggctacaacggcgatctgacctcccgcgaggccggctctgtcggcggccagatggtcaagaagatgatcgagagctacgagaagaacctgtaaaaaaggctctttcgcaaagcgcagacaaagggcgcggccaacaggccgtgccctttttgctgtgatggacgaaatgacagaagatattctgcaaagccttccggcacgctcgctccgcgcgggaatattatccgttcccgcgcggaggagacaaaagggcaggggacttgccgcccttggtgctcattttgcgcaatttatttgcaaaaataccttattgcattttttgttgatttgatataaaatttcaataactgtgcatgtattacttcaaacggaaacatacgcgcgcgggaaagcggcgaaccgcggcgggcggcctgccggaatacgcagggaggtgtccggatgcgcgccatcgagcactttaaaaccatcacgcatcatcgccatctggtgcggcaatactgttttcgcctcggcctgtactatcaggggttaacgcatgacctgagcaaatacagcccctcggaattctggcgcggcgtcaagtattatcagggctaccgcagcccgaacgacgctgagcggcgcgaaaacggcgtgagccttgcgtggctccaccacaaggggcgcaaccgccaccactttgaatactggatcgactactgtattgccgacgacggtaaggtctacatgggcgggtgcaaaatgccgctcaaatatgtagccgaaatgttctgcgaccgcattgccgcctgcaaggtctatcagggcgacaaatataccgacgcctcggcctacgactactacgaaaagtcgcgcggccatatcctcatccatcccgagaccggcgagctcatcggcaagatgctgctcgtactcaaggagcagggcgaggacgcggcgttcgactatgtgcgcgctcttctgcgcgaggaaaagcaatgtccgacaaaatgagaaaactgtcagaagatcgcttgcaatcctgcatatttcagagtaaactattttcattatagaattttaacagaggacggacaagaaccaatgactcatccctacaagacgcgcgagggcggcgcgacggtaacgatctttgtaccctacgattgccggaaccactgcccgttttgcgtgaacaagcaggaatacgcccatgctgagggcttcagcgtggaggcgatcctcaagagcatcgccgtgatggacgagatcacgccgcgctgcgactttgttttcaccggcggcgagccgtttgccaacttaaaagcgctccagcgcatgctcgacgccatccccacgacccacaaggtctatatcaacacgaccttccccgtgcagcctggatgcagcgcggaggagatgatcgctttcaccgagcgcaatcgcgacaagatcacctgcatcaacatctcgcgccacctgacgaagtatgtcgaggagtcgcccgacgaggtcgtcgcccgtatcgcaacgcccaagcgtgtgaactgcgtgctgtacatggactatcccgccgacgagcttgtggactacgcagagcgctggcgcaagtacaacatccccgtgcagttccgctacgactacaccgagacgacgcccgagaacctctatcaggaggagggcgacaagattttggcagaccttaaaaagcgcttcacctacaagggcctcgacggctgccgcatgcgcaacggctaccacttcgactacaagggcctgcacatgacctaccataagacgctgccctattccaccatcgtggagacgggtgacgacggcgtgacctacgatatcctctatgatatcctcatcaagcagaccggcgagatccattccgactggacgggtgtgaagctcgacgtggacgcgtaccgcaaggtggtctacgagccctatgatctgcgcgtgcgcgagggcacgatcgacttttgagaaaggcggcaatgctatgagctatcaggcggcagtcatcaccgtgagcgaccgcgcgtccgcgggcgtgtacgaggacaagagcggccccgctgtggccgcgatgctgaaggaggctggctacgaggtcgtgta

SEQ ID NO: 10214 - DNA, 1370 bp, Unknown
  gut microbiota DNA sequence
tatttgagaacaggcaggcaatgaatgcaacatcgatattcatcaccgacatgtagtgccgaacctgcaattcatagtggcgagggactgcgccgttcgcccacttgaattgcatgtcatagtgcgccgttttgcactctaagatggccttacgtccatccggcagggttacaaaacgatccacatcggcaatcaggaaggggaaaaacgggtgttggtacatccagtggtcttcatacacagatagtccggtcttctttgcgaagatttgagctaccacatcttcgagcaaatgcccaatctggaatgtgatgcttctgtccggcccatcatctgacatgacgaccccgattttgtcataataaaggtctcgtgccgtgcgatatggggaggaattaagggcgacagctacatcgctgccgccaattccttttcgcctccaactgagccattgatcctctgttagagttgtgatgtccaccaatctgtttggcgtgtagttcaggttcaggcccatagcctacacctcctcgcagcaatcaaacccacaattgccgcattctgggcattcctgatcatcaggatcctcgaacgaggcaaagcttgttatctccccgcaatgccgacacttataagcaagtagatctttttcggtgtgctctaccgtccctgtgtcatcgcaggtaatgtgttcctcaaaacatattcccggctctgaggtctggatcatgacagaaacgccatcttctgcgcaggcctctgagagagtcaggcactcactaggagaattctgaggatatccaccgatcaagcaactgtatgctgaccatgcgaacgacgcgacaaacgagtaacttgctttggcatcgacggcaggctcggagaattctttcatagcctcatcaatgaatgcctgtcttttcgactggatgaagctccgtgcaaagaaacgcttgcctggaatggttgaaggatcgtcttcgctgacaaaccgttcaatgaacgacttaatgccatcccgtgtaccggtgacatttacatacccaaacgcccaattaggcataatctatcctccttactcttcaaaatcagtattgtagtgctcgacgatctcagtcggctcgtcagatgcacagttgccgtagacaacagtctgaagtgcttccttgtttggatcgtattctacgcaagccaggatcgctgtagcgccatccttgcgtacatagtcgatgaaaacgcctggatagtctgctgcgcagtcagtcttatcgtgcttagcgtaaatcgcgagttgtcctactggcgtatcaacaataaaatgccgagtcttttccatattcaatccgctccttgttttcggtgatatcttt

SEQ ID NO: 10215 - DNA, 2660 bp, Unknown
  gut microbiota DNA sequence
cgaagagcgtgatatctatgtggacaagcagagtggccgcagctttgagagaaccaactatttggccctgcgcaacaccatcttgcgaaaaggagatgtgttagttgtcaaaagcatcgaccgcttcggtcgcaactactctgccatccgcgcggaatgggagttcctcacaaagactcttggtgttgatatcgttgttctggacacccccatcctcgacaccacccagtataaggacctgcttggcagcgtcatcactgatatcgtcctcgctgtgctctctttcggagcacagctcgaggtcgataccaagtctaaggcacaggcagagggcattgccgctgcacgcctgaaaggcgtcaagtttggccggccacgatgcaccgtcgaaggctgggatacctactacccccagtggaagcagggccaaatcaccgctgtccagtgctataaacagctcgggatcagcgcatctacattctaccgtcttgtacggaaatatgaattggaggacgaaagcgaatgagtcgttgttgcatatattgccgcattggcggcaccgcaaatgaacccaaccaaatagccatgaacagccagcttgagatgctgcgaaaggctgctaaggatctcggccttaccgtcgtggcagaagtgactgtttttgaaagtggcactgacccgcagcggcagagcatcaaaacgctgatccgagatggaaagcacggcgtctatgattgcgtgctgattgttgatccatccagattatcaaggagcgctgatggctgcaccttgattggacagaagctgaaccggcatgggatcagggtctatacccctcagggaaagatccagctggccccacctcacgccttcttctattccagataccataaggaaggagaaaacgatcttggcccaggaaagtaaaaacgaggattgcaagcaaaggatccgcgaggcgttccatgatggaaaacaagtagagcgaatgcctgcccgagaggacatggcccctcagcattccgacgatgttatctagcgggttgctccgtactgccgagtcagtacgatgtccgaaatgcaggcggagagttttgagatccagcagcagtactacaacgagttcattgtcaagcacccgaattggacgctggttcgcatctatgccgatgaaggcatctcagcaacttcggtgaataaccgcaagccgttgtatttttcatcccgttatcggataagcgttacagcggcttttgaaaactctgtattgatttttctgcgcgatgtgatataatcggcatataccgaaaacaaggagggcgcgtccatgccaagaccgccacggtgccgtcggatttgtgatgtaccacgagtcgataaattctgccccaacgggggcaaggatgtcgagccgatcctgctgacgctggacgagtacgaggtcattcggctggttgacttgaagcggcaaactcacgagcagtgtgccgcgcaaatggatatttcccgctcgaccgtgcaggaaatttacgaaagtgcacggtgcaagatcgcagcgtgtcttgtccacgggaaaccgctgcacatcactgggggaaactaccgcatctgcggaggacaggaggcagcccactgcggccgttgctgccggatgcaaagaaccaacacagaaaaatccaacgaaaattgcaaaggagatcccattatgaagattgcagttacctatgaaaacggtcaaatctttcagcatttcggccataccgaacagttcaagctttatgaagctgcggacggcaaaatcactcatgcggaagttgttgataccaacggcagcggtcacggcacactggcaggtttcctgatgcagaacggcgtggacactttgatttgcggaggcatcggcggcggtgcgcaggcagctctggccgaagcgggcatcaagctctacggcggtgtcagcggggacgctgacgcagcggtgaacgcattgctcagcggaagtttgggctacgatcccaatgttcactgtgaccaccatgaccacaagcatggcgaagcaggtcacacctgcggtgaccacggctgcggcaaacatagctgccattgatatggaacgcacactgacacaacttccgttctggtcttccttgactgaaaaggagcaagaaacgctgcgccgaagtgcctttgtccgtcattatgaaaagggtgcgttcgtacacagcagcgacaacgaatgccttggaatgctgttcgtcctttccggcgagattcgcacctatcttctctccgaggaagggcgagaagtcacattgttccggctgtatccgggcgaactatgcgtgctttctgcctcctgcgtgatcagtcagatcacctttgatacgcaaatgaccgcgggaatggatacggaggttctgattatccctgcaaatgtcattgctgcgctcaaggagcaaaatcttcatgtccgctgcttcctctatgagttggcaacgaaacggttttctgatgtgatgtgggcgatgcagcagatcatgttcaagggattggatcggcggctggcagaatttcttcttgccgaagcggagcgtaccggctccgacacgatacgcatgacccatgagcagatcgcccagcacatcagctcggcgcgggag

SEQ ID NO: 10216 - DNA, 828 bp, Unknown
  gut microbiota DNA sequence
gatgttggggtagcttgccttgatgtgcgcgtgcagcttgtcgaactccgtgtagtccgtccggctgtggtcaaagtagttgatggtcttgcaccggatggcggcggacaggcgggcggccgcgccctcgccgtccaagtcgggataattgccctccagggcaaaaaaatcggtcacttttttctgtatcatgccattttatcctccagataacggctgagaaactcacgcgtgcgcggctccttggggttaccgaagacctccttgggcgagccctgctctaagataaccccctgatccatgaagacgacgcggtcgctcacttccttggcaaacgccatctcgtgcgtgacgacgaccatcgtcatgccctgctgggcaaggtttttcatgacgtccagcacctcgccgacgatctcggggtcgagcgcggaggtcggttcatcgaagagcatgatctccggctccatgcacagcgcccgcgcgatggcgacgcgctgcttctgcccgccggagaggcggcgggagtcggcgtggatgaagtcggcaaggccgacggtcgttaagtgcttgatggccgtggcctcggcctgcgtcttggggatgtgcttgacgtccatgggagcgagggtgcagttgtcaagcacggacttgttgttgaagaggttaaagccctggaacaccatgccgatcttctggcgcagggcgttcaggttgacctttaagtccattaaatcctgcccgtcgaaccagatgtggcccgagtcggcctcttccagtaagttgatgcagcgcagcagtgtcgatttgccagagccggatgcgccg

SEQ ID NO: 10217 - DNA, 866 bp, Unknown
  gut microbiota DNA sequence
agtcctgttctgggtcaaaactgggtcaggaacagggggattccaatttttctggcatggcgccccaaatttttcttgcgtgattgaatggctcgtgctattataaaagtgcaatcgcaagtatggtgttaggagctgatcattttgccaagaggaaaactgttaaacggactggtgacccagcagaaggtcctgcggggagcggtaacgctgtttctggaaaacggctacacgaaaaccaccaccggcgagatcgcaaaggcggcgggcattgggcagagttcgttcttccatgtttttcccagtaaggaggcgctgctgctggagctggtaaagcggatgttcagcgggcaattcgcgctggcgggacagcacagcggggaacaagaccctgtgctcctgtacgccgtggaaacggccctccagctccacatcgccgagctgaccgagccgctgcgggagctgtatgtaatggcatactccctgccctccatcgcggcatatctttacaaaagcacaacgaagcggctgcaagtcatcttcgggccttatctgccggaggcacagcccaaggacttctacgagatggagatcgcgtccgccagtatcatgcggggcttcatgtcggttccctgtgacgtgtatttcacgatggaggccaagatctcccgctttctggactgttcattgaagctctatgacgtgccgaaggagaagcgggcggcaatcacggcggcagttttgcagatggaccttcacacaatggctttgggcatcatccaaaagaccgtccagcaggcggaaaagggctttgaggccctgacggaaaaacaaatttaggcaaggggtatccccttggagaagcc

SEQ ID NO: 10218 - DNA, 4064 bp, Unknown
  gut microbiota DNA sequence
gctatgggcggcaaccgctacgtgatccttctgtgcgtgaacatcctgctcatcctctttggtatgttcctggatgactccagtgccatgtacatctgcgcaccgattctgacgccggtgcttgccaacttcggtattgaccccgttcactttgcggcgatcatgatcgtgaacctcggccttggctgcatcacgccgccgtgcgcgtcagtcctcttcatgggagcccgcgtcggtaagtcttcgctgacgaagatgctgccgtccacatattcgctgatcctgtttgtctggctaccgatgctggcgattctgacgctcttccccgatgtggcgctttggctgccgcgcgtgatgctcggctacggcgcataaaacgcttttcagagcgatctctcctgaatactccacacaatagtaagagcctcctgctttgtccaggaggctcttgctatcgattgagcggccgctcggcgctctcataacccggaggccgtaggttcgagtcctgcctccgcggccaaaaaagtcctgaaatcataagatttcaggactttttctaacctttcgacagtaattataaagcacaaaataacgctttctaacacttttctaacacattccgtcagataaagaggagaagtcgtttagtttaattgaaatttgcgacagtatatgatatttttatatgataaaaagaaggtgtcgctatgcgcattcctgaaaatacattaaatgtcatcattacttctattgtttcctcactttctaactgccttctaatcggcaattcagcagaacaaagtgtctatcacatgtgcttaactgaatttggggcgttgcacatagtggtgcaatatggattgagagatcagggccatcgcattttgcgatggccctattattatatgcgagagttatatctcgttacggtcagcagtcttgttcatgataaatatctccaaaatgttttgtactcgaaaggttgtatttttctttcgttggccttatcatagcgccatagagaactttcgtaaagtaagcacaatattgtggcgtagttaccaaaaggatactattgtatattttcaacacttttttcacagctgatggagtgataccatgatcgacaaaatgctcattcgtggggcaaaggtccacaatctcaaaaatatcgacgtcgacattccgctcggtaagatcgtcggcatcgcgggcgtgtccggctcaggaaaatcctcactggcgctcggcgtgctgtatgccgagggctcgcgtcgctaccttgaagcgctgtccacctacacgcgccgccgcatgacgcaggcgtccaaggcgagcgtggatgaggttctgtatgttcccgccgcgctggcgctgcaccagcgccccggcgtgcccggcatccgcagcacattcggcacgggcacagagcttttgaacagcctgcgtctgatgttctcgcgtttagccagccaccgctgcccgaacgggcactacgtcccaccttccctgctcgttgcggcgggcaaggagctcgtctgtcccgagtgcggcgcgcatttctacgcgccgtccgccgaggagctggcgttcaactcacagggtgcctgcccaaagtgcagcggcacaggcatcgtccgcaccgtcgacttagacacactcgtgcccgacgattccctgaccatcgacggcggcgcggtcgcgccgtggaacagcctgatgtggtcgctgatgaccgacatctgccgccagatgggcgtgcgcacggatgtaccgttccgcgacctgaccaaaagcgaaaaggacatcgtcttccacggccccgcggagaagaagcacatcttctaccacaacaagaattccaaccaggcgggcgagctggacttcacctacttcaacgccgtctataccgtcgaaaacgcactcgccaaggttaaggacgaaaagggcatgaagcgcgtcgaaaaattcctcaaggaagagacctgccccgaatgccacggcacgcgtctctcttctgccgcccgcgcgccgaagctgcgcggcatttcgctcgacgaggcctgcgcaatgacgctctcggaccttgtcgactgggtgcgcggcgtaccggagagccttcctacggagatgcgcccgatggccgagagcatctgcgaggcgtttgagagcacggcaaagcggctcatcgacttgggcctcggctacctgacgctcgaccgctcggcctccactctctccaccggcgagcggcagcgcatgcagctcgcccgcgccgtgcgcaaccgcacgaccggtgttctctatgtgctcgacgagccgtcgatcggtctgcacccgtcgaatatcgtgggcctgaccggtgtgatgcacgatctcgtcgccgacggcaactccgtcatcttggtcgaccacgacacacagatcttgaaagaggccgactggatcgtcgaaatgggccccgaagcgggcgctaagggtggccatgtcatcgccgatgggaacatcccaatgatcgaagaaaacccaaattcgcagattgggccgttcctctccggcaaggctgaaacaaagctgcgcgagcgcgccaaaaaggacgaactgttcgcaaacggcacggttcatctgtctacttctcagatccacactgtcaagccgcttgaggtcgacatccccaagggccgcttcacggtcgtcaccggcgtgtccggttcgggcaagacgacgatggtgctcgagagccttatccccgcgctggaagcgaagatcaacggcaatcccctgcccgcgcacattcgctcggtcgaagccgacggcatcgcgcacgtcaagctcatcgacgcgacgcccatcggcatcaacgtccgctccacggtcgcgacctacgcgggcgtgcacgatgagctgcgcaagctctacgccaagtcgcccgacgcgaaggaacacggctataaagcgagcgatttttcctacaacaccggctctctccgctgccccggctgcgacggcacgggcgttgtaagtctcgacgtgcagtttctgcccgacgtcaacattccctgccccgactgccgcggctcgcgctacgcaagagccgcctatggcgtgaagctcatgaacaaggcgggcgaaaacgcctcgcttcctgaactcatggacatggacgtcaactccgccattgaattctgcgcggaccggaagaccgtcagccagaagctcggcattttgaagcagctcggcctcggctacctgacgctcggcgaggaaacgccgagcctgtccggcggcgaggcacagcgattaaagctcgccagcgagatcggccgcacgcagaccgactctgtcttcgtcttcgatgaaccgtcgatcggcctgcatccgctggatgttcgcgtgctgctcggcgtcttccaggcgcttttggacaacggcgcaacggtcgtggtcatcgagcacgacctcgacgtcatccgcaacgcggactttctcatcgacatgggccccggcggcggtgaggccggcggcaggatcgtcgcctccggcacaccggaggaaattcaattgaaccccgacagcatcaccggtcaatatctgtaacacaaaggaggtcataccatggaattacccgcctgccccgtcgagacgacgctcatgctcatcggcgacaaatggaaggtgctcatcctgcgcgacctgatggacggcaccaagcgcttcggtgaacttaaaaagtccatcggccatgtgacgcagaaggtgctgaccgcgcagctgcgcgacatggaggccaagggcctgctcacccgcaaggtctacgccgaggtaccgccgcgcgtcgaatacacgctgaccaagaccggctacagcctaaagcccattctcgattccatggtcgtctggggcacacattacaaggaaaaagccgcggcaatggaggatgacgatgcgcccgatgaagcctgatcccggcatccgcgttcaggctgtccgcatcccgacggaaaacggcggcatgtccgcgctcctttacctgaaagcgcacgccgcggcgttcggcgtcc

SEQ ID NO: 10219 - DNA, 16835 bp, Unknown
  gut microbiota DNA sequence
caggcggcgggctgtgcgccgccgtctgcatccgcgcgcgagacgaaggtaaggtcagcgtcgcgtttcaaatgccgctctaccccatgctcgatgaccgcgatacggaatcttcgcgtgacaaccgcggcagagtgtggaatacgcgccgcaaccattttgcgtggcggctttatctgcgcggcacggaccgcgcgcagctctcgccctacgccgctccggcgcggctgacggatttttctcatctgccgcccgcctattcgttcgtcggcgacggcgagccattctacgccgaggccgtccgctatttcgagcggctgcgcgccgcaggcgttccggcagagctggacgtttatcattctgacatgtacgccttcgacatgatgcgccccgacgatgtgctcagcattcaggcggctgaggcgttcaacacgcgcttcgccgacgcgcaggcccgcttttttgctccgcagcatgagattcaggaggaacgccatgattcgtgaaatatgcaaagctgaagtcttcctcgcccaaaaggccgaagccgccacggcggacgatctcaacaccgcgcaggaccttctcgacacgctaatcgcccacaaggacggctgcgtcggcatggcggcgaacatgatcggcgtcaacaagcgcatcatcgcttttgaaaatgacggcgaatacatgctcatgttcaaccccgtcatcgtcaaaaagtccggcccctacgacaccgaggagggctgcctgtccctcaccggcacgcgcaaggcaaagcgcttccagaccgtcaaagtccagtggcagaacgaaaaattccaaacacgcctcaagaccttcaccggctggacggcggagatcatccagcacgagatcgaccactgcgaggggatcgtcatttagacatcaggaggtgcatcatgctcaagcagctcaaatactttcaatccgtcgtgcgtctcgggagcttttccgccgcggcggaggaaaatttcatctcgcagtcagccatctcccagcaggtgcagtccttggagcgtgagctgggctttgcgctgctcgtgcgcaaaaatcgctcattttcgctcacgcctgcgggcgaatacttttaccgtaagagcctgctgctcacagcggactgcgaccgcatgtgcgccgaggcggcgaagatcgccaagggcgaggcggcgaatttgaagatcggctacctgcgcacctatgcagggggagagttccaccgcgcgctcgcggccttttcggcgaggtatcccgacgtcagcgtctccatcgcgtacggcagccatggggagctgtgtgatatgctgagcgaggatcgggtcgagatcacgctcaacgatcagcgccgcttgttttccgacgcctacgaaaatctgatccttgcagcccggcccgccctgattgaagtctccgcccacagcccaatcgcgcaaatggaggcggtcgcaccggcagagctcaagaattttccctgcattctgatcgccccgccgccggagcgggaggcggagcaggaattcagccgcattgtactcggctttccaagtgaattcctgtatgccgagaatctggaggaggcgcgccttctggtcgcgggcagcaggggatttcttccgctggagggcggcgaaaggcaggcggccgaaccgcttgcccgtgtgccgctcgtgcgaaacggtgcgccgcttcttcgcacatactgcgcgttctggaaaaaggagaacgcgaacccctacgtgccggaattcgcacggctgctgaaagaacaattcgatacctgaccatgtaaggaaggcgtaaccgacggctccgccttttttcatatcagtttttcttatagaaaagccgcaaaaccggaattgatacccacggcgcggcggtttacaatggtagcatcaacaaaaaccgtgcgccgcttttggcgcaaagagataagaaaggagcgaaacaatggcagcattgatcgcattttactcccgcgcgggagagaactacttcggcggcgcgtaccgccgcatttccgtcggcaacaccgaaaaggttgctgagatgctcgcggatctgaccggcggcgagctgtacaaaattgagcaggccgagccctattcagacgactacaagacctgtgtggcgcaggcgcgtgaggactggcagaaaaacgcccgtcccgcggtgttggatctgcccgatgacctcgatgcctatgatgaaatttacctcggctaccccaactattgcagtacgatgccgatggcggtctacaccttcctcgagcactacgacttcacgggcaagaccatccaccccttctgcacgcacgagggcagcggcctttccgataccgaaaacgacatccgcaaggctgcccatggtgcggcggtcacgaagggcctcgccatccacggcagccacgttgcagaggcaaagagcgcgcttgcgcattgggtcgaggaggtaacgaaatgaaaaagcccctgatcgtttactattcctggtcgtgcgcaataccgagcgcatcgcaaagtccttgcagagcgtcaccggcggcgaccatctggaaacgccggaaagcaagatcaacgcctgggcgcagagcgtcaaggtgctgctgtaaggaggaaaacgatgaaaaacgtcatgttatgggccggtgccggacagatcggcatggccatcgcccgccgcatgggcgcgggctgaagatcgtcgtcggcgacaaaaagctcgcaaacgcgcaggcaatcgctaaggcaatgaacgaggcgggcttcgatgtcacacccgtcgagatgggcctctcgagccgctcgtccatcaaggccctcattgccgggggcagaggtacggcgagatcaagatgctcgtcaacgctgcgggtgtgtcgcccggtcaggcgcccatcgaggcgatcctgaaggtcggcctctacggtacggcggtacttttagaagaggtcggcagggtcatcgcaccgggcggcgtgggcgtgacgatctcgagccagtcccgctggcgcatgcccgccctgacggcggagcagggcgaaaagctcgccaccacgccgacggaggatctgctgtccctcgactttttgcagcccgagaacatccgtgacacgctccatgcctatcagatggcgaagtgctgcaacgagaagcgcgtcacggcgcaggcggtcggatggggcaagcgcggcgcgcgcctgaacgacatctcccccggcatcatcgtcacgccgctggcactcgacgagttcaacggcccgcgcggcggcttctacaagaacatgttcgctaagtgccccgcgggacgccccggcacggcggacgaagtcgcaaacgtcgccgagcttttgatgagcgacaagggcgcgttcatcacgggctcgaccttcctcatcgacggcggcgcgaccgcgagctacttctacggcccgctgcgccccgaaaaagcatgatttttccctctctctcaaaaaagcggcagagccgccggagcattccggtggctctgccgctttttttactcaaatctgctcctcgcattctgtcttgatcgtcttcacaccgaagaggaagtagacgaggtggcagagccacacaatagcgagaatagtgcagggaatgtagagcgcttttcgcagcatcaggaaaaagccgacggccatcagcagcgtcacggacatcaggatgccggccttggtctgcgcggtcatgccctttttcttcacgaatgagtcgaggtgtttttgatagagctctgtgccgagaaaccatgtgtgcagcttttccgacgagtttgcaaagcagaacaccgtcgcaaggaagaacggcaccgtgggcagcaccggcagcacgatgccgacgcagccgagcgcaaggcacacgcagccgaggatcaggaagaaaaggcgtttcagcttcatcggttttctctctccagtctctttttttcgcgctttgtctccaccacgtggcggattgcggcgacggggtgatagaaaatcatccgcgggccggaaaagcgcatcacggcgcggatcttttcacgcatgtcaggtttgtagcagtgcacgcggcagttgacgcagaaggtcttcgtctccatgaacgggcagtgctcggagcgggcgcgggcgtagtcgttcagcgccgcgcactcgggacagagcacgccctttgtgtggtgattgcggtggcagtagagggcgatcatctgcgagatcatcttcttttcgcgctcgcgcttggtttcgatatccttcatcagctcattctcccgtgctcgacggagtagaccgtgtcggcgatgcgcatggtcgacgcgcggtgcgacacgagcacgacggtcttgcccgcgcactgctcgtgcagcgatttcaggatgaccgcctcgttcaggctgtcgagattgctcgtcggctcgtcaaggagcatcagcggcgcgtcgtgcagaaacgcgcgggcgagtccgaggcgctggcgctcgccgcccgaaagcgtgtcgcccagctcgccgaccgacgtgtcgtagccctgcggcagcgtcatgatgaattcgtgcacggcggcctttttgcaggccgcgacgatctcgtcgtccgtcgcgtcaagctttgcgatgcggaggttatttttgatgctgtcgtggaagagatgcgtctcctgcgtgacgaagctctccatctcgcgcagattccccgtgttgatgctggaaacgtccgtgcctgacaggcggacgcggcccttctgcacatcccagaagcgcatcaggagctttaaaagcgtcgattttccgctgccactgcggcccacaatgccgacgacgctcccctccgggaagcggacggaaacgtcggagagaatgtcctccccgccgtaggagaacgtgacgtgctcggcctccgcgccggtaaattcgacctctttctgtccgctgacctcgtcgaccacgggttcttcatccagaatgtcgagtacgcggttgcccgcggcgaaggtgttttgcaacgtcgcaccgagatttgccagcgcgaccgtggggccgaacgacgaaaacagcgcaaggaccgcaatgagcgccccgtcgaacgtcagctctccgcgctgcaccagtgccgcgcaagaaaccagcattgcaaggtcgaagagcaaaatggccgtgttcgtgatgcccatgttctggcccgtgagacgcttgagcttggcttcctctttggatagcgcatcggtgcgcgcatccatctcggcgcggcgctctgcgccccgatcgtactgaatggtctcgttcaggccgcgcaggctgtcgagcacgaaggccgacagcgcgcccgactccgtgcggaatcgcatccccgtatcgcacgagcggcgggacgtgatgagcgggatgaccacgccgacgcagacgtaagccgcgagtgccagaaggccaagcaacgcgtgataatgcccgatgaacagacacatgatgagtgtgaacagcgccgcgatggccgcgggcgagatcgtgtgcgcgtagaagacctcgagcagctcaatgtccgacgtgatgacggagatgaggtcgccgcggtcgcggccctcgagcttcgcggggcagagacggcgcagtgcgcggaagaccttgtcgcggatcagcgcaagcagcttgaaggcgatgaagtggttgcaggactgctcggcgtagcgaaagacgccgcgcatgagcgcgaagagcagcacacagacgaacgtcgtcttgagcgcgacgggcgttgcgaagccgagcaggtcaagcacggcaaagccgccgaagatcgtgatgaacgcggcgcagaggtggccgacaaggcccatcaaaatggcgagcaccatgtagccgctcagtggcttcacgaggccgatgagccgcgccatgacggtaaaaccgcttctttttttcattttgccgcctcctctccgtagtgctccaacacctgctgggccgaccacagcgcggcgtaagcgccgccctgcttcagcagcgcctcgtgcgtgccgtgctgaacgatattgccgcgctccagcacgtaaatttcatccgacgctgtgacgttcgccaaacggtgcgagatcagcagcaccgtcttccggcccgccaatgcgtgaatttgcgccatgatgtcgttctcgctctcaacgtcgatgttcgacgtagcctcgtcgaagatgtacacgggactgtcgtgcagcagcgcgcgggcgagcgcaaggcgctggcgctgaccgcccgaaaggttctcaccgcgctcggaaagtaaggtgtcgagccccgcttcccctctgagaaagtccgcgagattgacctgcgtgagcgcgctccagagctcatcatcgctcgcaccaggcttgcccatcagcaaattgtcgcgtaccgtacccttgaagaggtagctctggtggctgacgtaggtgatgcgccgcatcaggctcgctttttcaatgttgcgcagctccgcgccgccgattgccacagagccggtgtagcccttgtttctacccatcaaaagcgcggagatcgtcgacttgccgcagcccgactcaccgacgagcgagacgaatttgccctgcgggatcgtcagatcaacgccgtgcagaatttcgcgctccggttcgtaggaaaagcgcaggccgcggcagacaatgtcgcccgcgggacacctgacgccgccgtgtgcgggctcggacaggtcgagcaggcggaaaatcttatcgctcgcggccatgccgttcatggcaatatggaaaaacgagccgagctggcgcatggggatgaaaaagtccgccgccagcaggatgatgagcagcgcgcccgcaaggtcgatcttccccgcgcgcagctgcgttgcggccatgatgacgccgagcgccgcgccgccgtaggcgatgaggtccatgatcgtgatggagttgagctgcatcgtaagaaccttcatcgtgatcttgcggaacttttcggcctcgacgttcatctcatcatttttgaaggcgtcagcctgatagattttcaaggtcgtcaagccctgcaaattttcaagaaacgtgtcgccgagcgccgtgtactgcccccagtatttcgagagcagcttcttcgcccatgtctgtaccgccgcgatggcgacggggatgagcggcacgcagacgagcagcacgaccgccgccggcacgctcacgaagcacagcacgacaaaaagcgtcagcggcgcgagcatcgcgtagaaaaactgcggcagatacgcgccgaagtacgtttcgagctggtcgacgccctcgaccgcgacctgcacgacctccgacgttttgacccgctcgaaatacgacgcgccgaggcacaggagcttgtcatagatcgcgccgcgcagcgtcttcttgaccgccttggacgatagataccccatgcgcgacgcgccgacggtacagccgtatcgcacggcgacagctgcaagcgcggtcacggcggtcgtgacgatcttactctgcgtcacctcgcccgcgaacagcgcggcgagcagcgccgtcacggcgctcatcatcgcgatgttcgcgcacagcgagcaccattgcagcgcgacgttgcccgcgatatattttttgctctccggcaccgcgccgatgagccgcttgttgatcatcataagaaaaagccctgcctttcggtggtcgttcagttagagagcgtgaaccgccggtcgaaaacggccgacggacacatggttcaagataccatatccgcccccattccgcaagcagaaaatgcaggaaacacaagtacacgagaggcaatatgcctctttcgcccctttcggttaaaaaagaaaagccgcggcgatttttctctcaggttcaagtccctttactccgccggttttcctacacaaagcgcttgtctgcgcgcgccacggctggtacaatagaggcaatacaatattcgggcagtgctcgagcaaagacacaggaggtcgccatggtactctatttcaccggcaccggcaacagccgccacatcgccgagcgcatcgcacacgcgctgaacgatacgctcatcagcctgaatgaccgcatcaaatcaggcgacataacaccgctcgccgtcaatggacggctcgtcctcgtcatgccgacctacgcctggcgcatcccgcgcatcgtgcgcgaccatctgctgcgaacagaactgcgcggcgcgagggaaacgtggttcgtcatggactgcggcagcgagatcggcaacgccgcgaagtacaaccgtgcgctctgccgcgaaaagagcctcgtctacatgggcacggcgcagatcgtcatgccggagaatttcatcgccatgttcaacgcaccaaccgtcgaggaggctcgccggatcgtcgccaaagccgagccgttcatcgaccgcgcgatcgccgcgatccgcgcaggacacatgttctcgccgccgcgcaaaaaactctacgaccgcatcgcgagcagcgcggtgaacccggttttctatccgctgtttgtgaaggcaaattcctttaccgcaagcgatgtctgcatcggctgcggcaaatgcgaaaagctctgcccgctgaataacatcacactgcaaaacgcccgtcccgtctggggaaccaactgcacacagtgcatggcctgcatctgctattgcccgacaagagccatcgaatatggcaagaaaagcgtcggcaagccgcgctaccattttgaagaattgtaaaatagtttcactttacagaagttcagcaagcagagcgcgtctcttacaaaagtttttctctttcgacatggtcttcccatataggcaaaaacctcgtgctttctcaaaaatgtcatccctttgccgcgcattttgatcagcggcgatacctcacaaaacttatcaaaagccacgcgcctaagggcgcgcggcttttgatgtttacataatatcatgttctgctgctttctgctttttctccatcctccatttgacaaaggtccacagcgcgttgaccagcacccagccgaggcctgttgccagcgcgacggcggggaggcccattttgccgaccagcagccacgagagaacgactcgcagcgcgatgtggctcgtcgcaccgaggaacgggacggataccttcccgatgccgttaaaatagccagcgaatgtgttgccggtgaagcagagcgtgtagaaaagcgccacgagcttcagatagtcgcgcgcattctcaaacgccgcgccgctgcgcgtcccgagcataaaaccgaccgacgtgctcgcgctaacgtacatgatgagcgacatcgcaagccccatcgcaagcatcagaaaaaggctgctgcgaaacgattccttcacgcgctcttctttccctgctccccgattctgtgccacgagcacggaggtcgcagcgctgccgctgtcgccaaacgagttggcaaagccctcgatgcgcgtcgtcgccgtgtaggccgagatcatgtccgtgccaccagtgttgaccgcgccctgcaccaggagctttccgatgtacaggctcgactggtgcagcgccgtgacgaagctgaaatgcgccgtctgcttcaatagctctccatccatacggcagtccgcgcggacaaaaatgagctccggtgccttgcgccgcaggtagaggatgcacagcaccgccgaaatagcctgcgacgccgccgtcgcccacgccgcgcccgcgatgcccaactgaaagcgcgcaacaaagcagtagtcgagcgcgacattgaccgtcaccgccgcggcgagcaccatcagcgccgcgttcgcccgcccgatggcacgcagcagcgcgccgtagaggttgtagagaaacgccgcgggcaggctcgccaaaatgatcgtcagatataccgagacaaaggtcttgagctcgcttggcgtctggatgagccgcagcagcggcgagagcagcaaaaagccgaggccgctgcacgcgagcgtcaccagcagcccgcacgagagcgagagccagtgcccgcggcggaagcgctcgcgctcgcccgcaccgtagagcttggcgaagatgacggaaatgcccgtgcacgcgcctgtgatcataaagaggaaaaggttcatcaccgagcccgcaacgccgacagcggcgaactccaaatcgcccgcaaagcgcccgaggataaaggcgtccaccgtgttgtagagctgctgcaagatactgcccatgatgagcggtgcggccaggcgcagcagatgctgcgggatgctgccgctcgttagatcgtaagagcgtgccatagtttcccccatttccaaggatttgacaacagcatacacccgcgctatactttgcgtaaaccgatgatccatcaaaccatctttgacaattttgcaaaggagaacgccatggaactcgatcgctaccgcgcgctcgtctgcgccattgagaccggaagtctgtccgccgccgcggaggcgctgcaatacacgccctccggcgtgagccgcatggtcgcggcgcttgaggaggagacgggcgttccgctcctgctgcgcgagcacagcggcgttcgcccgacaaaggagtgcgaaaagctgctgcccgccatccgcgacctactgcacgcgggcgagagctgcgcccagctctccgcgcagctgcgcgggctggatgtcggcacggttaccgtcggcacggcatacagcgcgttttattcgccgctcgcgcgcatcatatcggatttccacgcgcgctacggcggcattcaggtgcagctgcgcggtgggtacagcacagagctgatcacacagctcaacgcgcaccaactcgatctgtgcttcatctccgcgcgcgagggtgggcacgactggctccccatcggctacgatgagctgacggcctgggttcccgctgcgcatccgatggcatggctgcccgcgctgccggtcgcggcgttcgccaaagagccgtacatcgagacctatcctgacaaggacatcgacaacgcgcgcagaccgccgcttcggttatgcggccatcccgctcgccgtgctgctcgccttctctcgtctttatttatatgtgcactttccgagtgacgtgttcgccggcgcggtgctggggcttgtgatcggtgagctcgtctcccgttatgcttcaaagctctttcaaaagcgcggataatggtgcaacccccttcgcacagggcaaacttcttattatttccagataaaattagggttcttttaaggtgctgttcatactgtattcatattccctgtgtagtctaagcgccggtacaacagaaagggtgataatttgaacaaaacatttggcaaaaaggccggggtgcagattctttttctgctgcttggcctcgcattcctcgtctacggcgcatctcgcggcgaggcaggcgtcgtgctaaacaaggcgatcaaactatgtctggagtgtgtgggcattggataagaaaaaaccgttttcctttctgctcgcccgctggcgcggactggttcaggcctgcgcggcgctgctgacgaatctgcacctgccgaacttcctcaagggtacgctctatcgcggcgcgggcaagaccgtgtgcgtgccggggctgaactgctactcctgtccgggagcggcgggcgcgtgtcccatcggcgcgtttcaagccgtcgtcggctcgtccaaattcagcttctcctattacatcaccggcatcctcatcctgctcggcgtgctgctgggccgcttcatctgcggcttcctctgcccgttcggctggtttcaggagctgctgcacaagatcccgaccaaaaagttctccacaaagcgcttaaagccgctgacctaccttaaatatgtcattctggtggtgatggtctttttgctgccggtgcttgtggtgaacgaagcgggcatgggcgacccgttcttctgcaaatatctctgcccgcagggcgttctggaaggcgccatcccgctctcgcttgtcaacagcagcatccgcgccgcgctcggcaagctcttttcgtggaagctctgcgtgctcgtgacagtcgtcgtgctcagcgtcgtcttctaccgcccgttctgcaagtggctctgcccgctcggcgcgttctacgcactcttcaaccgcgtgtcgctgctgtcgatgcacgttgacgagaacaaatgcgtctcctgcggcaagtgcgcaaggacctgccccatggacgtagatgtgaccaaaacgccgaatcacagcgaatgtatccgctgcggcaaatgcgtgaccgcctgcccgacggaggccgtccgcttccgctacgccttcggtggcagcggagcatgttccaaattgtctcaaaaaccgatcattgaagaaaacaaaggagaataaaccatgaattttaagaagattattacgctgctgctcgcctttgcactgacgctttccctcgccgcctgcggcagcaagggcgacggcaagggcgacagcgatacgcagggcgcgaccgccgaggagatctacgctcagatccaggagctcgccgacaaggaaaacgccatcatggaagaaaacctcgagctgtggcagaagctcttcgccgccatgaacgaaaagcgcgacgagatccccgatgaatcgaactacggttcttacctgcttgccgccctcgacctcgtgaaggacaagttcaccgaggacgagctcaagacgctgaccgaaggttccgagaagatccgtgaccttgaagatcagatccagcccctgcaggagcagtatgccgccctccagcccgcgggcgacggtgaaaacggcggcatgaacgattccgtcccggccttccccgccttcaccggcaaggaccttgacggcaacgatgtggacaacagcctcttctccaagaacgccgtgacggtcgtgaacttctggttcagcggctgcaagccctgcgtggcggagcttggtgagctgaacgccctcaatgaaacgctcaagaagcagggcggcgcggtcgtcggcatcaacgtcgatacgctcgacggcaatgccgatgcgatcagcacggccaagaacctgcttgagtccaagggtgcaagctaccagaacatctacttcccctccgacagcgcagccggcgactttgcgggcgacatcatggccttcccgaccacctatgtcatcgaccgcagcggtgctatcgtcggtgaggcgatgctcggcggcatcgacaatgaggacaacatggcagcgctccagaagctgatcgaccaggccctcgcaaacgacagcgcaaagtaagctttccatcacagcaaaaatacgccccgcggatcatccgcggggcgcgttttgtttctctctatctttttacccgagcgatacctcgcggtagaacgcggcgtatgccgcctcctgataggggcgcagcgcaaggttgccaaggccgaacgtcagcgagctgaggagcatccagccgatgaaactgaattgcaggcaaaacagccgccagcggttgccctccatcatcgccttcgagcccttcatcacctcgcccggcgccatgtccgggtgctcggccaaaatgtagtccgtcatcgcgtaggtgtagcccataatcagtcccggaatgacgagcaggatcgtccccagcagaatatagaggcccttccaaagccgcgtcagcgtcgtcgtcttccagttcggaagataggcgaacagcgcctcaaagcccagctccgtgcggtcgacaaggccgaggttatatttggcataccccacgcccacgatgctgccgaggatgaagtacgccgccgccaacacgagcgcgatcacgatgagatagaccgcaccgccgatgagcagtccgctccacttcgggtccaaaccgtagcctgtggagtaaatcgtctgtccgccgtagccaaacgtcgtcgacacgcccgaggacacatcgtaattgaatttgacctccggaccgccgctccctgcgccgccgagcagcaccgccacaaggccgatcagaatggcgatgggccacttgccgcgcagcgcctcgcgcgccgcctgccgaaaatccgccgcaagcttcataaattctcctctccgccctccgcatgggagggtctctctcaaatcttcttgcttctgcttatttagacgcattccgcgcccgttttgtttcaccggacgccaaattttctcgcattcatgatatcatatgccgctgggaatgggaatctctcttctttcttttccttgcaagtcgtttccgcctctggtaaaataccagaaaacgacaatggaggagacgcatgagaccaagcgaactgctcgccgcgctgcacacggcggaaaaattgaaggacaccacccgccactgctacacctccggcgggcggcacgagagcgttgccgagcacagctggcgcatcgcactgatggcgtttttcctgcgcgatgaatttcccgaggccgacatggacaaggtgacgcgcatgtgcctcatccacgacctcggcgagtgcttcacgggcgatatccccgcctttgacaagaccgcacaggacgaatcgacggaggaagcgctgctctaccagtgggtcgcatcgcttccctccccctgccgcgaggagatgcgcgcactctacgacgagatggccgcgctcgaaacgcaggaggcccaaatctacaaggcgctcgacaagctcgaggccgtgatctcccacaacgagtccgacatttcgacctgggaggaccacgaatacgacctccagctcacctacggcgagcagaacgtcgccttttcgccctacctgacggcgcttcgtcaggctgtccggcaggaatcgctcgacaagatcgcacgcgagggtgaccggcgcaaataaaatctttcgcagcccatgtacagcaaaaagcacttcccgccgctggcgggaagtgcttttctatgtcttttattccacgatctccgcgtccagcaggtcaaggatcgcctggtcggcgctccagaagtaggactcctcgccgagaagctcggtgatgcccgcgcggtcaaagtaggtgcgcaccgcctcggtcatgccgcagcaggcaaccgtcttgccctgactcttgagcgcctcacacagctcgagcatcgcctgcgcgcccgaaacgtccacgctcggcataccgcgcatcgacaagatgatgtggtcgtactgcggcatctccgccatgcggtggttgaactcatccaccgcgccgaagaagagcgcgcccgtgatgtacgccacgccggaggtctcaagaatggggggcttaccctccaccgagcgcagcttgttcgcgtcgatatcggagaaattcacatggatatgactcgacttcgccatgtacaaaatggcggagtataccacgccgagcaggatcgcgaccgtcaggtcaaagacgaccgttgcgagcatcgtgatcaaaaactggctgataccggacttgaacttgtggcggaagatgtagcggatgccctcccagtcgttcatgcgccacgccgtgactatcagcacacccgcgagcgccgagagcggcaggagcgccatcacgccgccgagcaagaacatcgaggcaagcaggaacagcgaatggaacacgctcgtaaggcgcgtctgctggccggacttgaccgctacgctcgtgcgtgcgatggctgcggtcgcgggaacaccgccaaaaagcggcagcagaatattacccacgccctgtgcgatcagctcctgatcggcgttgaacgcttcgcccttcatgcgcgaggccgacgcgccgcaaagcaggctctcgatcatgccgagcgccgcgattgtcacaacaggagaagcaagatcctcgagcattgaaaggctcaggccgcgaagggacaggcggtcactgagcaggagtgttttcgggatatcacccaccatggcaagctgatccataccggcaaacgacgccacgatcgttgcaagaatgataccgacaagcgaaccgggcacacgcgcgccccattttttcggccagaagaccatcaccagcacgacgagaaggccgatgagcactgcctgcatgttcggatggaagccaagacggccataggacgcgatcttttccaaattcgagcctccctccgacaccgtgccgaagaagttgtcgatctgccccatcgcaataataatggcaatgcccgaggtgaagcccatgatgacgggcatcgggatgaagctaattaagcgacccagcttgaagacgcccgcaagcagcagcagaacgcccgcggcaaagcaggcaaaaaacacgccctgcaggccgtattccgcgacgatgccgacgagcaccgcgctcatcgcgcccgtcgggcccgagatctggtacgacgcgccgccgagaatggcgatgaccacgcccgcgatgatggccgtgacaagcccggacgccgcgctcgcgccggatgaaacgccgaacgccaatgccagcggcagcgcgacagcgcagaccgtcaggcccgccatcatgtcggcgagcagctttttcgagttgtagcctgcaaattcctgcttcagactgcgaaaaaaggcagaaaacatattgatcctcctaaaaaacacatgcctgtttactataccacctgccccgcgcccgtgccagtagtaaaagaaacggtttttaacgagattttaacactaatgcgtcggttttgcacaaacaaagtcgaaatcctgaccgaaacggcaaaaaagcgccgcgtcccgtattttcttcgggacgcggcgctttctgtttcgccggatttacttgaattttttgccgtcctcgaac

SEQ ID NO: 10220 - DNA, 445 bp, Unknown
  gut microbiota DNA sequence
cgggtgtgtttttgccattcacgcctgcggagatatctacgccacactttacgataagagtgatggtacagaattactctatgtcaaagataagagtaactctggacgttttggcgttgatgttttgccatatctgaagacggaccatgccttatatgctgccatgggtgatacgcataaacggtatcgactcgatatggaacacaacaactggtgggagtgctttgtctatacgccagagggcgaattccatgacatgatgtgggcattagatagtgaccacatcttcgagggagttgaggtagtactctccgctatggattcagtcataaaagatatcaccgaaaacaaggagcggattgaatatggaaaagactcggcattttattgttgatacgccagtaggacaactcgcgatttacgctaagcacgataagactgactg

SEQ ID NO: 10221 - DNA, 1620 bp, Unknown
  gut microbiota DNA sequence
ggtacatccagcgccttgggcgaaacgtcaagcacctgtgccagcgcagcggtcacgtccgctttaggcgttctggaaccattctcgtactgcgcaaggcggacatctgcggatttctccggaaagcccagcgccataccgagatatttctgtgtcatgccccgcatcgtgcggaaaaagtggatgcgttcaccaatcgccataatagccatctcctgtgtcggttgtctttgataacgagtatagcagatatgtttaatttcgtcaagaaaaatctaaacaaatttatttaatattttcctgcaaaccagctttacttaaactcatatgtatagtacaatagttgtaaactaagcatattggcttaattcatagaaattttacaattaggatagtcaacaaatgcagaaaaaatgtccgttgtaaagtgagaggggtgaaatccaaaaaccgcaaaactgaatgaccgtccaagggatactttctccggggaagcaggcgatgaaatgagcgtgccaaggagaaaagaaaacagcacagcgccgaaaagggttgcctgccagagtcctgcggatagaacggcagaagaaatcaacatcaaatcaggaaaggaaggtattttgcctatggcaggagaaatttttatgagagtaaatgaagttgcggaagagctcggcgtatcggttccgtatgcgtataagctcatccgtgagctgaacgaagagctgcgaaagaccggctgcatcaccattgcaggcaggatcgaccgcaagttcttccatgagaagttctacggaacgagagaaccgaaggaaagaagggaatcaaatggcagcgtttaaggacaagaagaacggctcatggtatgtgcagtttcgctataccgactggcgcggtgagcgccagcagaaattaaagcgcggctttgccacgaaaaaagaggcgcaggcatgggagcgcgagtttctgatgcagaagcaggctgacatcaatatgagcttcgagagctttgtggcgctttacgaaaaagacgtcaagcccaagctgaagctcaacacatggctcagcaaggagcatatcatccgcacaaagattctgccgtatttcaaaaaacgcaagctctcggaaatcaccgcccgtgatgtgatcgactggcagaacgagatacggcagcacaccaagtcaagcggcgaaagctattccccggactatctcaagaacgttcatacccaactgagctgtattttcaaccacgccatcaagtattacggcttgcagatcaaccccgccgcaaaggccgggaatatgggcagcgagcagccgaaggaaatgctgttctggacgaaggaagaatacctcaaatttatcgacgccatgatggacaagcccatgctgtactacgcttttgaaattctgtactggtgtggcatccgcgagggcgagctgctggcactgacgcctgcggacttcgattttgagaagaaaacgctccgcatcaataaatcctatcagcgcttacagggcaaggacgttatcaccacgccgaagacgaagaaaagcaaccgcgtgatccagatgcctgacttcctctgctacgagatgcaggactacttcaagcag

SEQ ID NO: 10222 - DNA, 3015 bp, Unknown
  gut microbiota DNA sequence
aagacggatgatgttctttccagtcgcgataggatcaatgaccggaaactgcttcatgttcatggcaatcgcctccatctaaagagtcttcccaaacgggagtcctccagaatactggaagaagctcaaaaaagcaagagcaaacgtaattttgcaaagaaactgtcacataaggaggccaatcgtgagtcgagaattgtctcttttccatctgcgatatataacgacgactgtttactgccggatcaattttaaaagctggatgaccaccatggagccgaaggcaagtcccacaatggcacccaccatcccaatggacaggggggccacggcgaacagcggttccagcgcaggaaccagcagcaccagccccagcagcagagcaccgatggtaaaggcccctaacagggcacggttgttccagaagtgccgggtaagcagcaccggatgctgggatttgcagctaaatccgtggaacagtcggctcaggcacagggtggagaaggccatggtctgtccagcagcggcaccgccggcgttcagccccagatagaaggccgtaacggtggcggcggcgatgaccagtccctcgacgcccacgctataaaggaagtgctttgtcaggatgccttcgttccggggccggggcttttccgacatgacctcgtcggtgtgtggctccatgccaagggcgatggcgggtagagagtccgtcagcaggttgatgaacagcaggtgcactgccgcgaagggcacgggcagtcccatcagagaggcgtagagcaccgtcaaaatgcccgccgtattgccggagagcagaaattgaatggcccgcttgatgttggcatacacgttccgaccgttttttacagccttcacaatggtggcgaagttgtcgtccgccagcaccataccggcggcatccttggccacctccgttcccgtgatgcccatagccacgccgatgtccgcctgcttcagggcgggagcgtcattgacgccgtcgccggtcatggctaccagattgccccgctgctgccacgcccggacgatgcggatcttatgctccggggacacacgggcgtagacgctgaccttcggcacaaactcctgcaattcctcgtcgctcatgccgtcgatgaccgcgccctccacggcctccgtgtcgtcccgcaaaatgccgatctcacgggcaatggccgccgccgtgattttgtggtcgccggtgatcataataggacggataccggcgcggatgcactccgccaccgccgccttggattcctcacggggcggatccatcatggcgataaggccgaggaaggtcaggctgttttcatccgccagagtgatggccgggccgtccacgctgcggcaggcgaaggccagcacccgcaggccctcgttggaaaactgttcgttgacctgttcgatcctcgcccgttcctccggcgtcaccacgcagcggtccagcagcacatccgtcgcgcccttggtgaccagcatcaggccacccgccagctcgtggaccgtggacatcattttccggtcggaatcgaaggggatctctgtcagacggggccagcggttccggacgagatcctcgtcaaagccgttggtctcccccagccgcaccagtgccgtttccgtggggtcgccgatctccgtatccccgctgatgaccgcatcgctgcacagcagagccgtccgcagcaacggctcctgtaacgggtcccggaagtccgcgtccttggcgtcgatcacctcgcctccggtgtagagcttgcgcaccgtcatacggttctgggtcagcgtacccgtcttatccgagcagatgaccgacacgctgccaagcccctccaccgcctgcaaatggcggatgatggcgttttccttggccattttccgggtgccgaaggacagcacgatggtcacgatggagctgagggcctccgggatagcggccaccgccagcgccacagcgaagagaaaggcgttcatcacgttttcgtgccgccacagcacactgacgccaaacagcactgcgcagatcaccagaatgatgatcgacagctttctgccgaactggtccagactgacctgaagcggcgttttccgctcctccgtgtttttcagaagctgggcgatcttgcccatttccgtgtccatgccggtggccgtcacaagaaagcggccccgcccataggtgacgaagctgccggagaacaccatgttcttcctgtcgcccaaggccgtttccccactgagcggctccgtatccttttccaccggcaggctttcgccggtgagggcactctccgcgcacttcaggctggcacattccaacaggcgtccgtcggcacagacggaatctcccgcctccaatatgaccacatcaccgggaaccacctctcgaccggggatctgtacgatctgaccgtcccgcagcaccttggcggtgggagcggacatctgcttcaggctgtccagcgatgcggaggccttgacggtctgaacggtgcccagaattgcattcatggtgatgaccgccagaatgacgatcatgctctccacgtcccccatgcaggcggagatgacggcggccaggatgaggatcaacaccagaaaatccgcaaactgccccagaaagatctgcaaaacactcttttgcttgccggcgtgcagttcattggctccgtattttgccagacgatccgccgcatcctcctgcgataggccggtctcccggcaatccagtttctggaacaactccacgcgggactgttcccaaatgttcttttcctgcttcatgtactgtgtctcctttcggcggacgcaaaaaaggcgagcccttttgcgtcaatgccttcacattgatacaaaagtctcgccatttcaatccgcagcggagccaaacgacccgtactgacgccaacggatacacaaagctgtgcaagctactcccttttaaaaacagaatacatcggtctttctgcattgtcaagtaagactcct

SEQ ID NO: 10223 - DNA, 322 bp, Unknown
  gut microbiota DNA sequence
cacccgcaactgtggattcggtcgatgtttgctgctggcttttttcatcactcattagattttgtcctttcttttgggaacaggcggcatctgagaaacgatgcgttcctcatatctaatcttgtcaccttcatcggtatagggcgttttctcaactttgggctgagcatactgccgataccacgaggcaccgtctactgtttggacggtatcatacgggccagttggggccatgtattgttctgtgctgtacatagcaaactccctatctgactgcctatcaggtgagacctcaaggcccgtgatgcgtccaccgccgatt

SEQ ID NO: 10224 - DNA, 1166 bp, Unknown
  gut microbiota DNA sequence
ttttttgttctaaaaatgcaccgctgtaaacctgctaaaaagtcaagccccaattaaaaaaagttataggcagaaaaagagtatagcaaagcagaggcggcaaaacggatcgcttggccgcctcaaataaagcattggagatctcagctcattctattgtcggcaagctgcggtagagctctgtgaccttgccataatagactcggaggaacttattcaggccagccaccatagcgagtttaccactcttcccctcgccgcgttttttctcaatgaatgtaaagatcgggtcgtttgccggtttgtgcatcacatagctctgcatgacttcgtacccggtcttacgcagatagcgatttccccgcttggagatatgccggttattcgcgcagaatttgccggactggtacggcggagcatcgatgccggcgtatgcgatgagagcccgcttgctgtgaaagcgtcggacatctccgatctccgcgatcaggcgcggagccagcgtgtccccgatgcagggcatttcgcgcacgagagaatattccagcagagtcttggcgagagcttgcatctgtgttaaaatagcgtcacgggacgcctccactgtgtggaggacccgtatcgcttccgtaatgacgatctgcgtggatggtgcattgggaagcacagggataccgttttgagctgtggcaaagatgagcactgccatacgttcgcaattgcggtatccctttttttccgcccatttgcaataatccttccgaaagcgcgtttctcccatttcgaggatgtgagtggtgtgatgatagcgcaggacaaagtccgaaagcttgtgccgccctgcatggtcgttcatgagctcctgcataccgggcaaaacctgatcacagagggcattaaaatcaacctttgccttgatcagcatggaggtcatttggtaatattgtcgcgccaggagttgaagctcccgatatgtatcctccggcagcttggtcggttgaagttcctgccaataggccagaccgtacaaagcgatctgcatagcgtcgattcgatcggtcttcaccttgcggatactttgtgagcaaaaccgcttcatccgcagcgaattgatgacggagacgaatattccgttctccaacaaagcagccaccaccgggcaatgg

SEQ ID NO: 10225 - DNA, 359 bp, Unknown
  gut microbiota DNA sequence
gtatcatacgggccagttggggccatgtattgttctgtgctgtacatagcaaactccctatctgactgcctatcaggtgagacctcaaggcccgtgatgcgtccaccgccgatttcaacattctgaaatatgggtggcgctccagaaatgcgtgcactctcaaccacagaaccgtcgtgctctctagcgccagatgggataggtgtcccatttgcagacgcagtaggagaagctgttcctgcggctgtgccgccatcaagcgtaactacgtcttctgacgtaatgggagatggagggatgaggccaccatcatctgcaagtgcgctacctgagtcaacaggcgaatagcccaaatagct

SEQ ID NO: 10226 - DNA, 931 bp, Unknown
  gut microbiota DNA sequence
agatacattctcgtcggcgttctgatctacacagctccagtcgcattcgctacaggggcatcagaaaacacatcaaatgtctttagtgcatggtgcagaatgcttggaggccagctttttttgctgatcatgaatgcatggtgcctgcgcttattcacgagtatggttggcagttttcttgccaacccgttatccgtttgaggaggtaaagatgaagagaaaagcacatatcatactgcttgtattgctgctcttatgcgtactttcgacaaccgcctttgccatcgatgagagcgaagtagaaagtgccattgcggcatcgagcaaggaagaagttgctggcaatgtttttatctggtttctatgcgccattggattccttaaagtcagccagaaaattgatagttttatggcttctttgggaatcaatgtcggcagaaccggtggaagtatgttgactgagctcatggttgccggacgcggcattgctgctgttgcgggggctgtaggtggaactgtatttaaccatcattcctcaagtaacagcactcacacaaatgcacaggccgccggcgctgcttttacaggcggaggaaacggccttgtcggcgttacgagacgtgctgctggaaacgcggcagccgcaagcgctacaggcaatgcaaaaggactcagcaatcttgtgggtggcgctatgttcgaatcaagcctacaaaatggaggcaaatttgcaatgagcgttgttggagctgtggcaaaaggcagcatatcctcagtcgggtccatcaccggtgatcaggcggctgaggcgttgacgagctatttgggctattcgcctgttgactcaggtagcgcacttgcagatgatggtggcctcatccctccatctcccattacgtcagaagacgtagttacgcttgatggcggcaca

SEQ ID NO: 10227 - DNA, 2597 bp, Unknown
  gut microbiota DNA sequence
tctcgtcgtgcgtcaactttttgcagcagccagcggtgatgttggtagaatccgccacggcgcgaaaatcggtgtcatcggggatgccaagctctgcaaagctggtcggcagaccgatttccttaatgaacgcggccagcgcgtcgataccggcggcggtttccccgtcactgcccttgggtgcgatgcccagacattctgagcaaaccgcgcaaaccgcgccgcaccagacttgtagatgtggcggtacagaacggggtggatcaccgccaggcttgctccatggttgcaattggtgtaagcgcccagctggtgttcgatctgatgcgcttgaaaatccgtgaccttgccgatcttcagcacgccgttctctgccatggcggacgcccacgccagctttgcgccctcctgcaccttggcataggtggggttggacatgatgccggagaactccacaacgcacttaccctgcgcgttcaggatacccatgatctcatcgtacacgccgttgcacttgatggaaccgccgccataggccagcatgacggtttcgccaaagtttgcgagcaggccgccgaggtactccttcacgccgcctttgccgaaatataccttggtcttgttttcaaaaataaagttattcatcataacgcatcctctctgaccgtttttcttgcggtattcgccgctgttgtgctatcattgccgatggcaacttccggttgatactgccgattataaataccggttgtaacaaccggtcaagaggtttttgaggaaaaaacacaattttttacgcagcagagagggattaccatgcgctacaccatgttgcaggtctgcaaggaaacgggcatgacctatcaggccttaaaattttactgcaacgaggggcttgtccccaacgtcaagcgcgacaaaaacaaccgccgcgtgtttgacgagcgggacgtcgcgtggatcagcagcctgacgcgcctgaaaaatgcggcatgagcattcaggagatgaaggactacctcgccctctgcctgcaaggcgagcgcaccatcccgcagcgcaaaattctgccggcgcagaagcaggaggcgctgcgcgcaggcattcgggaattgcaggacagcgtcgcctacatcgactggaagcagaatttttacgacgaagtgctctccggcaagcggccgtatgagagcaatcttattcgggtggaaaaataggcgcaaggctggcgtcagcataaaaagcaggaggcgtaccgctcggtatcgcctcctgcctgcattcctgccgtatttcatcccagcgccacgtcgagcaccatcatcaggctgaagcccacggcgaagaacaccgtgccgatgttggagtgcgcgccctgcgacatttcggggatcagctcttcgacgacgacatagagcatcgcgcccgcggcaaagctcagaagatacggcagcgccggaacgatgagcgacgcggcgagtatcgtcagcaccgcgccgatgggctcaacgatgccagagagcacgccgccccagaaagctcttgctttgcccatgccctcggcgcgcagcgggagcgaaatgatcgccccctcgggaaaattctggatcgcgatgccgagtgagagcgccagcgcgcccgccgccgtgatctgtgcgctgccggagagatagcccgcatacaccacgccgacggccatgccctcggggatgttgtgcagtgtgacggccagcaccatcatcgtcgtgcgctggagttggctcttcggcccctcgacctgcccgctcttggcgtgcaggtgcgggacgacgtggtcgagcagcagcaaaaagagaatgccgacccaaaagccgagaaacgccggcagaaacgagagtttccccatcgccgacgactgctcgatggcggggatcagcaggctccagaccgaggccgcgaccatcacgcccgcggcaaagcccgtcagcgagcgctgcacagcgtcgctgagcgactttttcatgaagaacacgcacgccgcgccgagcgacgtgccgagaaatgggatcaaaatgccgtaaaatgcttccatatcgttcaccgtcttttctgtgtgaaatatcaattctgttaaatacatctaacttctgaacatagtataccagcgaaagccgcgggatgcaagtgccgcgggacacagaatgggaacagtctgtcgcagcggacggggcgagaaagcgtatgtagcaaagaaaatatcgcgaaaaatttgaaaaccgctcttgcaatgcgaaaatcgctgtgctacaatacgcaaggtcgatcaccttcccgaaggcaagcgggaaagcaggatatattggaaagctgccctgcggcggcttttcaaaagactgcaagttagagcaaactaaccgcctgcgccgcgccggtgggaacatcatatcaataggaacagtgccgcctgatttcaggcggcactgctttttgcgttttcgtgaaaaacaaaatgttcaaactttcctttagcttttttaggttggcgggcaatcatgacctcgttccaaggggaaagcgaaaaacggcagcaccttcaccggcaccatcaacatcatcga

SEQ ID NO: 10228 - DNA, 8159 bp, Unknown
  gut microbiota DNA sequence
gcgagaacggctgcacatggaacctgaccggcaactgcacgcttacgagcctcaccaacaacggcaccatcaacttcaacggctataccatcacgctggcagacggcacggtgctgaagtgagcccgctttacccctgctgctgtatatactcctcaatggtgcgcaggaaggcctctccgtagcgggaggccttccgctcgccgacacccgagacctcgagaagctctgagagcgagtgcggcgctttctccgccatgtcggcgagcgtcgcgttcgaaaagatgacgtaggcgggaacgctctcgcgtttggcaagctccgcgcgctgggcgcgcagcgcctcgtaaaggctgttttcctcgaattcgtccgaaaacgcgccgcgcgggcgctttttctccgccttcggttccacccgcttctgcatcagcacgcattcgccgtcaaagagcacggcggatgctttttttgtgggccggagcgtcgaatagcgctggtcgacctcgagatatcccgcggattcgaggtattcgatgtaccgctcgatgacgcttggcgacgttttgtccatgagaccataggtcgacaggctcgcaaggccgagcgacaaaagccgctggtcgcggctcccgcgcaggacctgaatgacgagcgttttgccgacgtagtagcccagccgctcgcggatgcgcatgacgcacgataagatcatctgcgccgagagcgtgatgtcctcggcctggtaggtcgctttacagttggagcagtttccgcagtttgcggggtgtatctggccgaagtagtcaagcagccgcgcgcgcagacagtcgacggatttgcagtaccccgtcatcgcctgcaggcgctcatagtcgcgtttgcgcacgagcgcagcgtcctcctccgagagctggtcggccccgccgttttcgatgagaaagcgtgcggtctccacatcagcgggcgcgaagagcaggacgcagtcggcattctcgccgtcgcgtccggcgcggcccgcctcctgatagtaggcctcgaggcttttcggcatgttgtaatggatgacaaagctgacgtttgacttgtcgatgcccatgccgaaggcgttcgtcgcgaccatgacggtcttgcggtcaaactgaaaatcgtcctgattctgctgccgctcctcatctgtgaggcccgcgtggtagcgcgtggcggcgatgccgcggtcacacaggctgtcgcacacgcgctcgacggcggcgcgggtcgcgcagtagacgatgccgctcctctcccgccgctcgtcgatgagtgcggcgagggcggaaaacttgtttttcgggcggcgcacgtcgaaatagaggttcggacggtcgaagcccgtcacgatgcggtacgggctttgcagctgcaagagccgcagaatgtcggactgcacctgctttgtcgccgttgcggtgtaggccgcgacaatgggtctgcgcggcagggcattgatgaaatcgacaatgccgaggtaactcgggcggaagtcctgtccccactgcgaaatgcagtgtgcctcgtccacagcgagaaacgacacgtccatctcctgcatcagcgataaaaagctgttcgtttccaaccgctcgggcgcgacgtagatgagcttgtaggcacccttgcgcgtgcgggcgtagaccgtgcggatctgctcacctgtcagtgagctgttgatgtacgccgcgggaacgcccgcgctcttgagcgctgcgacctgatccttcatcagcgagatgagcggcgagacgacgagcgtgatgcccggcaggagcagtgcggggatctgatagcagagcgacttgcccccgcccgtcggcatgacgcacagtgcatcgcgcccggagaggatcgcgtcgatcagcgcctcctgccccgcgcgaaacgcgctgtggccgtaatattgctttaagatgctgtacttgtccatgaaaaagtgttccgtttcctgtttttctatgatgttaccccatcgggaagaaattgtccacggaaaattcagaaaggaaaaaagagggaaatcgccgcggcttgacattgccgttttcttgtgctttagtccctcttgctcgctcggagggcgcgctgttcgaaagaaacggcagccggataaggcgcaggctgaaatgcctgttccttatccggctttttttgttgacaggaggaaacgacaatggaccttttgcgtggaaatatcaaaacgctttacttcaaatacttgtcggcggcgttcggcagtgcgctgatctccagcatctacggcatcgtcgacatggcgatggtcgggcagtatcaggggcctgatggcacggcggcgctggctgtggtcgcgccggtgtggaacgtcatctacagcattggccttctcatgggcatcggcggcagtgtgatcttcagcacgaagcgcggcagcggcatgagcgctgacggtgaggacgaccagtatttcaccgcagcggtcatcggctcggtcattctggcggcgctcgcgtgggtcgggctcatcctcttcgagcgtccgcttctgatgtttttcggcacggatgagacgctgctcgccctcgcgcagcggtacatgatccccattaaagttgtattcccactgttcctcttcaatcagatgctcgcggcatttctgcgcaacgacggcgtgcccgcacttgcgacgcttggtgtgctgtcgggcggcatcttcaatgtgttcggcgactggttcttcgtcttcccatgcgatatgggcgtttacggcgcgggccttgccacggcgctgggctcggcggtgtcgttcctcgtgatgctgacgcactttgcgagcaggaagaacatgctgcgcctcgtgaaaccaaagaggcttgcgcgcaagctgtggaagatcgccgtcacgggcttttcgagcttctttgtcgacatggcgatggggattctgactgtgctcttcaaccgccagatcatgcaatacctcggctcggacgcgctcgcgatctacggccccatcatcaacgtcagcacattcgtccagtgctgcgcgtacagcgtcggacaggcatcccagcccatcatttcgacgaatttcggcgcggggaaagaggctcgcatccgcgagacgctgcgatatgcgctgtggacggtcgtatttttcgacgttttctggacggcgccgagcgtggcgtgcccgaatctctaaatccgcatttttatgagcccgacggagacgatcctggcgatggccccgtccatcatccgcacgtatgcgatctcattcctgctgctgccgttcaacatcttctcgacgtattatttccaggccatcttacagccgaaggcggcgtttatcgtgtcggtcgcgcgcggactcgtcatcagcggtgcactgatcctgatgctgccgcttcttgcgggcgcggattcgctctggttcgccatgcccatcacggagcttgtcaccgccgtttacgctgcggcgtgcatccgcagatacaccgcgcggctcgacgcaaaagtcgcttgacgaagcgcggccaccgccgtataatcatgtcggaattttaacgaacaggagccaaaatgtaaccatgcagcttgatcgaccgcgcgggcagatgtccgattcgttcctaatgtccgcgtttatcattttatccggcggattgcaggacgcctatacctattgctgccgcgacaaggtgtttgccaacgcgcagacgggcaacatcgtgctgatgagcacacacctttttgcaggcgactgggcagatgttttccgctattttgtgccggtgatctcgtttatggcgggcatttttgtggcggaatgcgtccaccgccgctataaatgcatggaaaaggtgcactggcgccagctcatcattctggccgagatcgtgctgctgttttttgtcggcttcctgccgcaggaggtcaacacctttgcaaacgcgctcgtctcgttcgtctgcgcgatgcaggtgcagaccttccgcaaggtgcgcggccacgcctacgcgagcaccatgtgcatcggcaacatgcgcagcggcaccgaggcgctgtgcgcctacttccacacgcacgaccgcgaggtgctgaaaaaggcactgacgtattttggcgtcattggtatttttgccgtcggcgcggggcttggcagcgtcctgacggcgcgctttgccgaaaagggcatctgggtgtcctgcctgctgctcgcagtcagctttttgatgatgtttgtgcgcgaggaagagaagaaataagaggctttttgaaagatggctctgtatgcagatcgctttctgcatgcttttgtaaaaaaaggagaggacgctgctgcgtgctctccttttccttttgcgttcgttacgcgagcggcttgccgctgaagacggggaagatgttgaactcgccgtagtcggcgatgcggtccgtgtgcttgagcgtctccatgtcctcactcaagatggtgaagtccacggcggcgttgctcgccatgtggtcggggttggccgtcttcggcagcgcgaccgcgccgagctcgatgacatagcggatgcacagctgcgcggcgttgacgccgtactttttcgccatctccgcgatggcggggttcttgagcgcctcgccatgggcgatgggggagtaggcctccacctggatgccctgctcgcggcagtagtcgagcagcgcgaggtcggtgttgctgatgtgcggcaggatctggttgaccatcggctttacgcggcagtcggagagcagattttcaaggtcgtcgcgcagaaagttcgacacgccgatgactctgaccttgccctcgctttgcgcatcctcgagcgcgcgccagacggctttattttcttcagaatagcgcttttccacgcgaaactggttccacggctggggagagtggatgatcatctggtcaaggtagtcaaggcccatcttctcgagcgtttcgtcgatggactttttggcctcgtcataggtcttgagctccgcggccaccttgctggcgacaaaaagctcctcgcgcggaacgccgcaggtgcgcacgccctcgcccacgccgcgctcgttgccgtaggcctgcgcggtatcgatgaggcggtagccgagcttcacggcggtgcggacggcctcggcggcctgatcgtcgtcgatgaaccgggtgccaaggccgagcttggggatgctcaggccgttttcgagcgtataagtttcgtttaagatcatggaaattgcctccgattacagcttattgtactcttcgtccgagaccggctcgcaccactcgttccggcagtttttgccggggatttcaacggcgatgtggctgaaccagctgtcctttttcgcgccgtgccagtgctttacgttcgcagggatcatgatgacgctgccctcgtgcaggctgacggcgtccttgccctcttcctgataccagccctcgtccgcggtgcagagaaggagctgtccgccaccggaagtcgcgtgatggatgtgccagttgttgcggcaggcgggctcgaaggtcacgttcgcggcgaagaggctgcctttcgggtcagtcagaggatttaagaacgaatcgccgatgaaaaacttggcgtaagcggtgttcggcgtgccggtgccgaacatgttgacctgttcaaatgcttctttattttcgtacttcatgttaaaaagcctcctctgctttacttttccacattgtagcgcagccagaccgcgccgctgccgtactgccgcacgctcgtgagcttgagcggcgtgacgccgcgctccatcggcaggccgtcgaacacgctctgcatgccgccgcggccgtcgatgccggcgccgatcagaatgctgacctcgtcgagtagccctgcggcgaggaagcctgcgttgatgtgtccgccgccgaccgcggcggctctcttgacgtcaaactccgcggcgagaagttcgcacgcgcgcttcaagtcgacgtgttccttgccgcaggcgatccacgagatgtgcttgccgttgagatacgcaagatactccttgctgacctgctcgctcgtcaggatgagcagcggacgctcgtcttcggcgctctcaccccagaggagcgtgccgtgggtgtcaacgacgatctcgtagccctcggcgtcggcggccttggaaaaggcctccttgccaagtgcttcggcggtcttggcctcaaactttccgggcagcgccatttcgagctccgcggtcacgcggccgctgatacgtgtgggcgcgtccagcgcgttgagcgtgtcgtaatattcctgcacgccgggtaggtgctcggtcatggcgcagtcgatacgtccgtcgaccgaggtcatcatgtggcatacgatataaggcttgttcatgggatattcctcctctaaaaactgttgttcttaaagttcactgatactctacaacttaaagtacactttcagtcaagagggtttcgaaaattttttcgatagtccgttacaaaagcttgcacgcttgacagaaagaaaatggcaccatataatatatagaacatacgttttagatgacgcggcggggaggaagctcaatgtattttgcctacggggaagaggagaccgactatcttaaaaagaaggataagcgcatggccgaggtcatcgaccgcatcggccatgtcgagagaaaagtggatactgacctcttttccgccgtcgtgcaccacatcatcggccagcagatctcgaccaaggcacaggagacgatctggcagcggatgctgtcggcactcggcgaggtcaacgccgagacggtcctcgccgcgggtgtttccaagctccaatcactcggcatgacgttcagaaaggcggagtacatcacggattttgccgaaaaggtccacaccggcgcattcgatttagaaggtatctggcaaaaaagcgacgaggaggctatccgggagctttcgtccctcaagggcatcggcgtgtggacggcggagatgatcctgctcttctgcatgcagcggcaggacgtgttgagctgcgacgaccttgccatccagcgggggctgcgcatggtgtaccaccaccgaaagatcgaccgagggctctttgaaaagtaccgccgccgcttttcgccctatggcagcgtggcgagtctgtacctctgggcggtgtccggcggtgcgatccccgagctgcacgattacgcgccgaaagagaagaaatgaggcgaggacgatgacctacacccagcattatgattcgccgctcggcggcatcctgcttgcggcggacgaagagggcttgacgggcctgtggttcgacgggcagagatattttgcccgcacgctgccaaaagagtatgccgagagcgagacgcctgttttgtgcgaggccaagcgctggctcgatatctacttttcgggccgcgagccggacttcacgccgccgctccaccccgtgggttcggcattccagcaggcagtatgggcgctgctgctggaaattccctacggtgaaacaacgacctacggcacgcttgcgcgaaagctggcggagaagcagggcctaacgcacatgtctgcgcaggccgtcggcggcgcggtggggcacaacgatatttcgctcatcatcccctgccaccgcgtggtcggcgcgagcggcagcctgaccggctacgcagacggcgtcgacaaaaagatcaagctgctcgagcttgaaagggcggatatgaagtcctttttcgtgccgaaaaaggggactgcgctgtaaaacaaaagaaaaggcattccacgcgatagctgggtgtacgtaagacagtattgcgccgagattgacgaagcggcacgaaaccgcatggagctgatcgtgccagagctggcaaagcagtacggcgtgacagagcaactgaaagctgaaaaccaaatggaatgagtgcggcagatgaacgcttgcaaggcgcaggcagaggagattgtgaaagcggaattgatttacgattgagcgagaaagtccgggcagaaaactgttcggacttttctcatatagtccaaagttgcggtagaattgttcacaagttttatggtataatttgaacacgaaattgagcaacaaatttataaaggagaatatggatgaagctgtt

SEQ ID NO: 10229 - DNA, 5304 bp, Unknown
  gut microbiota DNA sequence
aaatacggaaacggtgattttgccagctttcgaccgccagcgccgctgttgtagcctacttcgctacttcctgcgatggaagtattcgatgaacttctgcacggcgggtgttgggtgggcctgcttcttcatagcaaggccgattgggtggtaatagggctgctgcaggagcggatttcgattttgtacgggatgcgctgcaagatcaggcctggcaggatgctgacgccgagactcctttccaccatcgccgtgatggcaaaatccccccaggcggtgaagtggatgtccgactgcacatgagcgcgctccagcaagtcggagacctcggcttttccgctgtgctccagcagcaaaaacggcctgaccggctccccagcggaggtcaggcggacgccgcttttactgcgctccagcagcgtcatgccccatttttgctccagatcggcgagcatctttgatggaggactgcacataatctatctcccatgctgtgcgcatccaacgctcccgatgctgtaccatgcgttccctctttcatgggccgcgacgattttgctggtgaacctcggcagcttgctgattctccgttttcggagccgctgaaaaaatgacaccgcacggcagaaataactctgccgtgcggtgcgtttttactttaatttggttcgtcaggcatgggggacgagcgcgcccttccggctcgagcggatgagcatgccgatcacaaagccgacgagtgcaggcagcagccagccgaggttcttgtcgaacaacggcagatatttttccgcaaaggcgataggcacatcgaggcggagcgaagtctgcaccgacgcgggcagcgtcttcatgcagtcgaaaatagcggctgcccatgtaccgatcatcgttgcgacatacacggcacggtcatgagcgaagaacttgccgataaaggccagcaggataagcgcaatggccgggggatagatgagcatgagcatcgggacggaatactcgatgatggcactcagtccaatgttggaaacggcaaacgaaaacaccgtgaagaggatcgcccaggtgcggtaggaaattttgccgttcgtcatcttgacaaacgtttccgagcaggccgtgacaaggccgatggaggtcttgaggcaagcaaaggtgatggtgaaggcgaggataaactggcccacgccgccaaggtaatgacccgcgatctgcgtgagggcgatgccgccattttcggacagctcgaaaatgcctctcgactgcgcgccgaccagaatggacagcacgtagatcagcgccatcagcgcaccggcaagaagaccggaggagagcacgtcctcggcgatgatgtcgtcattgttgacacccatgcggcgaatgacgtcgatgaccacgatgccgaaggcgagaccggcgatggcgtccatcgtgccgtagccctcaatgagcgcgggaaagaaggaaccgttctgataggcctccgtcggttcgaccgaggagatcgctgcgccgggggagagcagcgccgcgatgatcagcactgcgaagaagaacaggaagagcggattgatgatcttgccgatccagagggtgatcttaccggggcgcagcgagaagaacagcacgaaggcgaagaacgccgccgaaaagacaagcagatacagccactccggcgaatccgcgcccagcaggggcgtgatgccggttgtgaacgaaacggtcgcgcatctcgggatggcgaagagcgggccgatggtcaggtacagaaggcaggtaaagaaaatgccgtagcccttgccgaccttgcccgagagcgtctgcaggccgtcggaatgcgtgatgccgatggcggcgacgccgaagatggggatgccaaccgccgtgatgataaagccgatcatggcgacgaccgcgttgcggccggccatctggccgagatgtacggggaagatcaggttgcccgcgccgaagaacattccaaacagcgttccggcgacgagaatcttctgccggaaggtcaattttttagtagtcatgggataatcaactcctttgtgttgaaaatattacaccctgcacttgaaaaagagaaacgctcggttataatagatatattacaaatcaaaataccctttataggagtggggatatggacagcaaaaaatttgaaattctgatgaccgccgtcaacctcggcagcttttccaaagcgtctgaggtcgtgggctacacacagtcggggctgacgcacctcatcaacggtctggagcgcgagatcggcatgaagctcatccggcgcgaccacagcggtatttcgctgacagaggacggggaggcgctgctgcccgcgatccgcgaatacctcagcgcgacggcgaagctcgaaaaccagatcgagaccatcacgcaaaagcggacggcgacgatccgaatcgccgcttatgcgagccttgccatgcactggatgccggaaattctgtaccgcttccgccgcgtgtgtccggagaccgacgtggatcttcgcatggtggaccacgagctcgaaccctttgaactgctcgaggaggggcgcacggacgtcatctttgccgcgcggcagagccacatcaactgcgactggacaccgctctactacgacgcgatgtacgccatcctgccggaggactatcccaccggcagcgaagagaccttccccatcgaggaattcgacggaaaagaattcctgatgccctacgggcgcttcgacatcgacgtgaacgctgcgctgagtcccaaaaaggtgaagccgaatatccgcccctgccatgtggacgatgaaacggtcatccgcatggtcagcaagggccttggcatcacaatgatgacggagatcatgatgcgcgggcggacgcacggtgtaaagacgctgccggtcagcccgaaaacgggacgggagctcggcatcggtatgcacctgagcaagaacacgccagaggaaattctgcgtctgcgcgagtgcgtgcttgatttcacgcgcgagctgatgtgaaaatttcccatccgcgatttagaaacggctgccccatcaaaaaagtaaagcagggcgcttgcctaaaaggcatgcgccctgctttgccgattttgggaatggtcttatccttcgatttttgccgaagccgcgccatcactcttttgcagatgcgcatagcggcgcgaggggcggaagtacagcaccgctgccagcattagaagcgccgtggtcgcaaggctgatggggaagaccagcatgatgttcataaacgtcttgtactgcgggaagacccagcgcagccagctcaggcggacgccgcagacgcccagcatcgtcaaaacggcgggcggcagtgaaatttcaaagccgcgcaggtagccggaaagcacctcgtagcaaaggctgaacaggtgcgacggcatgatcagcatgaggcgaatatagcccgtctctaccacctgcgggtcgccgttgaagatggtgagcagcgactttccgaaaaagaggatcagagcgatggcgacgccgaggctgatgatgccctcgagaagacacagcagcagcgttttcttgcagcgcttgatctcgcccgcgccgaagttctgtccgacgaatgtcgtgcaggcctgcgagaaggagttgaggatatcgtaggtgatgacctcaatgttgtaggccgcgctcgacgccgccatgacgaccgtgccgaggctgttgatcgcgccctgaatgacaatattcgcgatggagaacatcgcgctctgcacacccgcaggaacgccgatgcgcagaatttgcctgaggcacagcccgtcgatgcgcagctttttcggctcaaggcggatgaccttgtccgttttgagcaggaagacccacaagatcgccgcgctgaccgcgttcgacagcaccgttgcgatcgcgacgccgtccacgctcatgtggagcgcggccacgaaaaagaggttcaggatcacgttcagaacgccggaggccgtcagcgcgatcagcggaattttcgtctcgcccacgctgcggaagaccgccgcctcaaagttgtagagcaggatcaccggcaggcccgcaagatagatgcgcaggtatagcagcgccagcgggaacacatcgtccggcacattcagctgattcagcagcggaacggcgaacagctcaccgatgaccgccgcgatcaaaccgcccagcaccgccacaacgatggaggtgtgcaccgcgtggtgcaccatcgtgtcgttcttttcgccgatggcgtgcgcgatcgtcacgttcgcgcccagcgcgatgccgatgaacaggttgacgatcaggctgatgatcgagctgtttgtgccgacggccgcgaccgccacagtgcggagctcgccggtaaagttgccgatgacggcgatgtccgcggcgttgaacagctggctcaaaatcgccgtggccgccaccggaacggcaaagcgcgggatcttatcccagagcgtcccgtggagcatatccaatgattttttctgcgatgcagctttcaactctaccgcccctttccgcaatttgtctggcccatgatatcacgctttggcccaaatgcaagaggcagaaaagccaaaaatggagcacagcgcaaagaatgcttcgttttgctgcgaaaagcgcggatactcacaggcattcctgcaaaatttcgcaaatttcatcacgggtcagcttcttgcagcagccggcggtgacgttggtagaatccgccacggcgcggaagtcggtgtcggcgggaatgccaagctctgcaaagctggtcggcagaccgatttccttaataaacgcggccagcgcgtcgataccggcaaccgcggtctcctcgtcgctgcccttgggtgcgatgccccagacattctgagcaaaccgcgcaaaccgcgccgcaccagacttgtagatgtggcggtacagaacgggatggatcaccgccaggcccgctccatggttgcaattggtgtaagcgcccagctggtgttcgatctgatgcgcctgaaaatccgtgaccttgccgatcttcagcacgccgttctctgccatggcggacgcctgcgccagctcgcttctggcgtcgtaattttcaggatcggtcagcaaaatgcgaatgttgcggatgacgctgcgcatgacggcctcattgatatcatcggagaggttgttttcatccggcttgccgaagtaggtttccatcgcgtggctcagcgtgtcgaacgcgccggaggtgaccttgcagcagtcggacacgctgccgccgcccacgg

SEQ ID NO: 10230 - DNA, 931 bp, Unknown
  gut microbiota DNA sequence
agatacattctcgtcggcgttctgatctacacagctccagtcgcattcgctacaggggcatcagaaaacacatcaaatgtctttagtgcatggtgcagaatgcttggaggccagttttttttgctgatcatgaatgcatggtgcctgcgcttatttacgagtatggttggcagttttcttgccaacccgttatccgtttgaggaggtaaagatgaagagaaaagcccatatcatactgcttgtattgctgctcttatgcgtactttcgacaaccgcctttgccatcgatgagagcgaagtagaaagtgccattgcggcatcgagcaaggaagaagttgctggcaatgtttttatctggtttctatgcgccattggattccttaaagtcagccagaaaattgatagttttatggcttctttgggaatcaatgtcggcagaaccggtggaagtatgttgactgagctcatggttgccggacgcggcattgctgctgttgcgggggctgtaggtggaactgtatttaaccatcattcctcaagtaacagcactcacacaaatgcacaggccgccggcgctgcttttacaggtggaggaaacggccttgtcggcgttacgaaacgtgctgctggaaacgcggcagccgcaagcgctacaggcaatgcaaaaggactcagcaatcttgtgggtggcgctatgttcgaatcaagcctgcaaaatggaggcaaatttgcaatgagcgttgttggagctgtggcaaaaggcagcatatcctcagtcgggtccatcaccggtgatcaggcggctgaggcattgacaagctatttgggctattcgcctgttgactcaggtagcgcacttgcagatgatggtggcctcatccctccatctcccattacgtcagaagacgtagttacgcttgatggcggcaca

SEQ ID NO: 10231 - DNA, 3297 bp, Unknown
  gut microbiota DNA sequence
caagattatttgccgccgtgcgcggcggcgaagtctgcgacgctgtttcgcgccccaggggcgcggggttaggggagcaggactggtggatttttgaaccgaatgagtcggtgctgtttgacaactttaacgcttcgcgcctgcgggcgcgaaatgttgagggtgcgttatctattttgaggatagcgaaatgattttcttcaagtttcccgatgggaattggaaataaattgcgtgcggcgtgatcttgcgcgttcctgtatcgccgcgcttttcaatgaacgcgcgaaaaagaaaaaaattgaaaggaagtatccgaacatgaaaaagcttttgtctctgctccttgcgcttgcgctcgtgttctctctggccgcctgcagcagcaagactgacgacataaccgccgacgacacccagggcgatgcgaacgccgagagcgttgatctcgtcgtcttcgccgccgcctccatgaccgagaccctgactcagatcgccgagatgtacaaggaagttgcccccaacgtcaacatcacctacaactttgactcctcgggcaagctcctcacccagatcagcgagggtgctgactgtgacctgttcatctccgccgcccccatgcagatgaacgccatggacggcagcctcattgacgacaaggacaagaaccccgacggtcttgacctcatcgtgaccgacagtcgcatcgacctgcttgagaacaaggtcacgctcgccgttcccgagggcaaccccaagggcatcgagagcttcgaccagcttgctgaactcctcaagagcggcgacgtcatgctcgccatcggcaacagcgacgtgcccgtcggccagtacaccgagaagatcttcgcctactatggccttgacgaagcggctctcgccgactctttgacctacggcaacaacgtcaaggaagttaccactcaggtgagcgaggccagcgctgactgcggcatcatctacgccaccgacgcttgctccgccggcctcacagtcgtcgacagcgccaccaccgagatgtgcggccaggtcatctatcccgccgccgtcctgaagggcgagaaggaagaagccgcccaggccttcctcgactacctccagaccgctgacgccatgtccgtgttcgagagcgtcggcttcagcgccgctaactaaaattggctgagacttctacataccgcagactgatttgacccgataaaacgggcagcagcgacagcggagatagaagcagaccaaatcgtttagaaaaagcagtatcacactttactgaaaagtgcgatatccacggcacccttggggtcaaggggctaaaagccccttgcgcttcttgggggatacaaagggggccattcttacgctaagaatggtcccctttgcaaatctgccgccgctggcggcaaaaggcaggtgctctatggattggtaccctttatggaactcgctgcgcatcgcggcgatctctacggtcgttattttctttgccggcatttttgccgcctattatatcgcaaagcttccgcgcctggtcaaaggtgtgctcgatgtgcttctgacgctgccgctcgtgctgccgccgacggtcgtgggctatctgctgctgcgcgtgttcggccccaagcgcgtcatcggcgcgtgggtgctcgaaacgttcggcgtcaagatggtcatgacctggtggtcggccatctttgccacggtggtcgtcatcttcccgctgatgtaccgcacggtgcgcggcgcgttcgagtcttttgacgagacgctggcctattcggggcagacgctgggcctgtcgaatacctacattttctggcgtatccgcatgccgtactgccgtcagggcgtgctggccggcacagtgctggcctttgccagagcacttggcgaatacggcgcgacgagcatgatcgcgggctacacacccggcaagaccgcgacgatctccaccacggtctatcagctctggcagacgaacagcgatgtgctggcgacgaagtgggtcttggtcaatattgcgatctccgccgtcgtgctgctggcggtcaacatgctcgagcggcgtgacttcctcacggatgcgagcaaggcgaggagggcgagaagatgagtttgtctgtcgatattgaaaaaaagcttggcgcgtttcatctgcgctcacagtttgaagcgccggacgagacgatggcgctgctcggcgcctcgggctgcggcaagagcatgacgctaaagtgcatcgcaggcatcgtgacgcccgaccgcgggcgcatcgtgctcggcggccgcgtgctgtttgacagcgaaaagaagatcaatctgccgccgcagcagcgcagggtcgggtatcttttccagcagtacgcgctgttcccgaacatgagcgtggagcagaatatcctctgcggcatccgcagcggagataaggcggaaaagcgccgtgttctggcggaaaaaattcgcatgttccgccttgagggccttgagaaaaagcaccccgcgcagctctccggcggtcagcagcagcgcgtggcgctcgcgcgcattttgtgttccgagccggaggcgattttgctcgacgagccgttctccgcgctggacagctacttaaagtggaatcttgagatcgagcttgccgacctgctcgcgacgttcaacggccccatcctctgggtcagccacgaccgcgatgagtgttaccgcaactgccgcagcgtctgcgtgatggaagacggccggaccggcgaggtcacgccgatggacgagatgatccgccatccgggcagcgtcagcgcggcgcgcctcgcgggctgcaagaacttcttcgccgccgaggcgagagacggcaaagtctacctgcccgagtggaacgtggcgctgccgcttgctggcatggaaaatacctttacgacgattggcattccagacaatgccgtcaccatgagcgagaacggcgccatgagctgcaccgtctgccgcatgatcctcggcgtggaggagaacattctcctgctgcgtccggagggcagcgccgaaggcgcgccgatgctgcgtatcactgttggacatgaaagtgatctgcaagcgggggcagccgtccgcgttgcactggacgacagcaaactgttactcctgtgaattgaaaaagtgagagcagggcaatacccagctctctttttccgtcaaaatataaatacaatttgtaatattctgccgaaatataacgaaacacggcggttttgggcgtatgcccaaaaccgccgtgccatattttccttacag

SEQ ID NO: 10232 - DNA, 2160 bp, Unknown
  gut microbiota DNA sequence
agagctggacgacggctggaaggaatattatgacggcgaggaggagtacgccgacggcgcacaggagcttgccgacgcctatgttgaactgacggacggcgagcgcgactaccgcaagggcctgcgcgaatacgcggacggcaaggcggaggcggacgagaagatcgccgacgcacaggaaaagatcaccgacgcacgccgcaaggtcgcggatatcgacagctgcgagtggtacatcttcagccgcagctacaaccccggctacacgggcttcggccaggacgccgaccgcatggcaaacctcgcgagcgtgctgccgatcatctttttcctcgtcgcggcgctcgtgtgcctgacgacgatgacgcgcatggtcgaagagcagcgcgtgcagatcggcgcgctcaaggcgctcggttacagccgcctttcgatctcacggaagtacatcggctacgggctgctgccgagccttgtcggcggcgttctgggccttgtcatcggctatatcctgttcccgaagatgatcttcacggcctatcagatcatgtatcagatgccggatatcgagctgcacgcctacacggatatttcgctcttttccttgcttgcagcggtcgcctgcacaacagtcgcgacgctctgggcctgccttgccacgctgcgcgaaacgccggcgagcctgatgcgcccccgcacgccgaaagcgggcaagcgcgtgttccttgagtacatcaaacccctgtggagacgtatgtcgttcatccacaaggtcacagcgcgcaacctcttccgctatcagaagcgcttctggatgacggtcatcggcatcggcggctgcacggcgctcatcatcgcgggctttggcatgaggtcttccctgctctttacgatgtcgcgccagtatgacgagctgttccactactcggcacaggtgacgcttgccggcaacgccctgcccgaggagcgcgcggcggtggaggacttccttgcaggcgactcccgcgttgtgaactacatcccctgtgcggcctcgtccgccacggtggtcaccccctcctattcaaccaccgcctatgtcgaggtgatggcctccgacgagatcggcaaggtcgtggaccttttcgactacaagagcggagatcccatcacaatgggcgatgagggcgtatacatcgaccagaagctctccgagcttttgaaggtctcggtgggcgacaccttcttcctcgacggcgacatgcgcggcgatgtgacggtcgcgggcatctacgagcactatacgggccacttcatctatatgacgcccggctactatgaaaatgcgctccacgccgacggcgagccgaacgcctaccttctgaacttcacgagcgacgataccgacacctgcaacgccatttttgaaaagctgctcgacatgagcggcgtggcgacgacctcgcgcatgcgcgacacgcaggatacctacacgcacagcatggagcgcgtggacttcgttgtggtcatcatcattctggcggcggcagcgctggcgatggtcgtgctcttcaacctttcgaacatcaacatcactgagcgccagcgcgagctcgccacgatcaagctgctgggcttttacgacggcgaggtctcggcctatgtgtatcgcgagaacatcgtgctcacgctgttcggcatcctgctcggctgctttatgggccactggctgcacatttaccttgtgcgctcgacggaaattgacctcatgatgttcgggcggcagaccgcgccgtcggcctacgtgtacgcggcgatcctgacggcgctgttctcgctgctcgtcaacgtgctcgcgcacttcaggatgaagaagatcgacatggtcgagagtctcaagagcgcggaataaaatttcttgtttcagggcaggacagtgtgctacaataaggggcggcaaaagccgccccttactattgtcgaaaaagcggcatgccgctttttcgaggagaattcgctgcgcttcgtgccttgccacccgcagggcggctgcgacattgcaccgtcgcggcattacgattcccgcgccctttcaggcgcgccaatcgtgccgcttcctcgaaaacggcttgctgtttccgtcacagacggcgcttcaccgttttccgctccgcgcaaagt

SEQ ID NO: 10233 - DNA, 1237 bp, Unknown
  gut microbiota DNA sequence
gtgtacacatcctgcatgattgcactcgccttcgtccaaatggtgtcagcagcaaaggcgcgtgtggaaaacatggtcagcatcgtaggcacgagaaaggcagtatataggcctcggcctgcatttacatttctgaatcgctcctgcagcttcttgatgacggcaggtttgtttagattcatattgggaagtcctcctttcaaatagagccgaaaagaaaagccgggaactcgggcagtacgacctgagtccctggcttcacatgaaaaatgcctcccgatgaaaggaggcagtccatcaatgaatcttttcgacgctatcatcttaccatttaggggatacaggtgcaattaagcagaacttcaagtttcgttcgaaaacagttcaatagtggttcaaggtaaaaactgcttgataatctccatgcaatcacgcgccgtgtaaccccacagaatgcggtcaatcgctcgaattgccatgttgagatagctatgataggttaccatcgacatggggaatccttgccgatcaagttccgccaaaatcacctcacgattcgcaggcttctttcgggagaagtatgtgaggaagagaacctgatacatcagctcaccgtggtctggatccatgcgaaccgtatttagcgcgttatcaataatctggagcatgttcttgctccgaataactgtcctggcataaccctccagtttagaaccggataaatccacgccagccaattcggcattgacttcgagtgtggaaagacgggtgccatgctccatttccattcgaacattcatatctgcttccgagatttggatcgcatatgctactttccgatactgcttgagcagatgccttgtgttatgatacttatccccatccttgcgttttgcggctttgttctctaaatgatcaacgccggattggatgccggtttcgatctccgttttcaaagcttccttttctatctcaaacgcgggagtgctatctgatgtcattgtttcatctcctttcctgattgggactcagacggtggatcgcggctattcttctcctgatttgttacctcccagtctaaagcactgtagaagactaatggaatttggcgagcaaaaaaagaacttcggatcaccagaaacacttgaattttcaaggcttttcggggcttccctatagtgtgagcgggcgggacgcgagtttcaatgctgatatccatcttgccttcatcgggatc

SEQ ID NO: 10234 - DNA, 2731 bp, Unknown
  gut microbiota DNA sequence
tacatcgataagaccgtagagaagaatggcagaactttgagcctctccaatgtaacttggagcgttgagagtactgctctggtcggcgatgagctcgtcccggcaacttactctgcggtagccacctattcgggctctgccagttctaccgtcgcaactggctatattacgaccgccgaatacaaaggcactgtcgtatcctctggtatttccagcattctctataccgtaacctacctgggcaccaagattgaaccgacgaaagcggaacccaccttcaaaggtgcggtcttggtgatctccattatcggcggaaccgcccttttggccgcactgttgttcctcggtctcacgcttcgtaagaatactacagtctacaaagcaacaggcaaaggcaacgaatatgaaaaatgcggccggcttcatctgaaggccaagaatcccgagctgcgtattgaccgcttgaaggatattcctgaaggtgtgatcgcaatcgaagtggatcaggcagtcgcaaagaagctcttcggccagaccatcgccatccgttgctatgacaatactgtcgagcacaccgttggtgaggtcaacggttcgtactggttcaaagtcgatattggctctcaggaaggtgaatccaattatgaggaggaaccttaatatgaagctcaaacgacttttgaccttgtgctgtgcgctgagtatgacactcggcatggtgcctttcgttagtgccgcagactattccttcaaaacctctcctgaccctgtctattacggcagcacgaactacgaggatctctacgacgctgagtatcgttacggctcacgcaatcagatcgattacgacatccctgagatccaatacggactcagtcagaaattcctggaaagctccctcaataatccctatctgaatggcaacacacagtacggctttggcgggagcagctcgaatacgcagtacccggaggccgacttcggtagttccagcatcatctccggcggtggtacgatcgagatgccgtatgaaccctctgtcaccttgaacgatctcaagcagagcgatggcagtatcggccaagtctccattgaccgtgtcgggctgaattgcaaagtgtatgaaggcgccaccgacagttccatgtctaagggctccggtcattacagttcttccggcctctacaccgggaatgttggcttgttcggccacaacagagggaatcatccatacttcggaaagctgaagaatgtgaagattggggacattgttaagtacaagaccgcaatcggcacgaagacctacaaagtgaccttcgttggtgcgatctcctacaccgatttctcttacctcaatgagatgggagataatcgcatcaccctgatcacctgtattgctaaccagccctctctgcgtctgtgtgtgcaggctgtagagattcgataaaccattggaggaaaaccatgaacagtaaaaagtctcgcaatcgtgagaatcgcacccgatccattcccgcagaagctaccgtaaccgtccatatgcttctgccgcgctccgcttatgaggagatgcgtcagcttttgagtgaacacaaactctccaaagcggatatcctcatggcaggcatcgcagcctgctcgaatcagaaagtcggctgaagaacacgcgtagagagtggctggaaaactatcttctacgaggtgactcacatgaaaaagcgtttcatttcatttctttccggcatggttgtcggcgcagtcatgtttggcggcagcgttgcatacgcttccggcattcttgccgatctcagcaacaatcagatttttgtggatggcacacttgcccccatggaggcgtatgtgatcaacggccacaattatgtgaaattgcgtgatattggccaggctgtcggttttaacgtcttttgggatgatactgccaaatgcgtccaggtcgaatcggacaagccctatactgggattgcgcctacaaagcaagagggcgagaagacaagtggccagcttcaccagactgatgttgatgccataaagaaggatgtcgttacccgtaccaacaccctgcggcttaataagggagttgctgtattggaggttaatagccttctgatggatgcggctcaagtccgcgcggatgagatggcggcaagtggtgcctattctcacactcgccccgatggacgcagaagcaataccgttacagatagccgacgcaccggcgaaaacatccactgcatcacagaactgtacctcgaacaacagcacaagactttatctgatgccgtcgtcaatctttggtcgaattccaagggtcatgcggataacatgctgaatgctcgctacggcgagattggcgttggtttagcgcgtggtacggacagtaatggcttggcgtgttggtactgtgtgcaggtctttctcgtagacggatgcgaggtcacatgggtggacgttcccgcaataggctgatcaatgattgcctctgcggtggatcaatccattccaaaatggtcagttcgaaaagtgaatcattcaacgaagcaggttgaggaaactcaacctgcttttcttgtgttacaaatgaaggagatctcttatgaaatcaatcaaaaccagacttgtctcagcattcttgctgattatgacaattctcagcctgtttccaaccacagcattcgctgcgaccagtacgggcacaggcattaaacccacc

SEQ ID NO: 10235 - DNA, 2099 bp, Unknown
  gut microbiota DNA sequence
attctctcacgtgagagaatatcccccttatcccgtgcagcgccaccggcgctgccatccccactgcgctgtgcgcagaaagaaaaaaagagggccgcgctttcgcgcagcccccttcttatgcaggtttagcagccgcagccgttattgcagccacagccattgttgcagccgcagccgcagccaccgccgcagccgccgcaggcgaagatcaggatgatgaggatcaggatccacaggcagcagccgccgccaaaaccacagttattattgcacataaaacgaaccccctatgaagattgaaaccgcccgcgcggcggtctcaatccatagtatggtgggaacgcaaaaaggtgtcagccgatgcgcgcagaatttaccatcgcgcgggaagcgcggtaggccgcgtcggagaagacgccacgcgcgatgagcgtgtcgctcagcttgctgccgccgctgacgttcgtttcgagtgcgtagtaagagaggtatacgacgtcggcgcgcaggaatgcggaggcgcgcaaagcgctcacctcgcccgcggtcaggacacccgcaaagtacgcgcgctcgggcgcgttggagatatcagactgcgcggtggagctgtagcgcagtgcgcgcagcagaaattctgtgtacatctccgccgatgcactcatcgtcgtgccgaatgtcgttgggccgacgccgttggtgtagcctttggagtaggcgtaggccgcgtagggcagcgcccagtcgggcacgtcggtaaagggctggtaggccgtgcaggtcagcgcctcgctctcctcgccgagaagacgaatgagcataatgagcgcctccatgcgcgtgggggccttttcgaggtcaaagccctcgccgtagcccgtgtccgacccgcggaagagcgtgagcgttttgagcgaggcggccatggccggatagtcgaccgaggaagagcttgcgatggaatagaagccgcagtaattcacgaccgcggtcttgccggtgacggtgaaaagcgccgtcgtgtcctcggcgacgagatagcggtgattttccgcgagtgccgcgccgcttttgacctcgctgccggtcgtcacgtcgacgaccgcgccggaggaaaactgcacattgacgctgcccgccagcacgatgacctgaagaccggtcgtgccggagagaatgtcgccctgcttgaggcgcgactcggtgaagacgtcggcgcgctgcgcgcccacgttggcctctgccgcggcgatggtcgagcggagcgcggcctcagcctttgcatacgccgcctgatcggacttgtcgagggcggcgtcgatggacgaagtcgccttggtggtaaacgttgtttgcagatagttgagcgagatcagcgggtcgctgctgtctccccctgcggccatggccgcggtggcgagcaccgtcactgcgaggagcgatgcgagcagggcaatgggccttttcacggtttggctccttcctcctccgcctcggcggaggtcttggagatgcggtagctcagcgtgagcagactgtcggcaaagtggacgtcctcggtgaagacctcgctgccgacgtgcagctctgtgttggtgaaattccagatcccgcgcacgccgagcgcaacgagctgctcggcgacctcctgggcgatgtgcttgggcacggtcagtaccgcgacgtcgggatggcacacggcgaaatagtcgccgatctcgtcgaacgagcggataagcacgttgttgacgcgcgtgccgatgagcgtgggggaaacgtcgaacgcggtgtcaagcagaaaaccggtctgcatgaagtcaaagttgcgcagcagcgcgtggcccaggtggccggcgccgacgacgacgaggcggtgctgctcgtccacgccgagaatgtgaccgatctcggtgcgcagctccaaaatgttgtagccgtagccctgctggccgaattcgccaaagcagctcaggtcctggcgaatctgcgaggcggtgatgcccatgcgctcgccgagcgagctcgacgagatgcgcacgatgcccttggagtgcagatcgtcgagatagcggtagtaacggggaagacgccggacg

SEQ ID NO: 10236 - DNA, 3624 bp, Unknown
  gut microbiota DNA sequence
gaaacgactccgatttgtgcgtgagacaacctacggaccagaaggccgggggttcgaatccctcacggcgtaccaccgcgaacctattgatttcaatgggttcgcggtttttattttatctcaggataagcttcatacaccttttttctaacgtttttctaacatctttcattcaggcattctgtcagcttatctgcaaggctttgctttctggaggtatccaaatgcccgtagatattggcagtcgtttgaatgtcgctgtgtcccatccattcctgtacgtctttcaggccgcaaccgttattcagcaacagactggcgcaactatgacggagttcatggaatcgaatgtgtggcattccataccgttcaagcatttttgaaaaatgatgcgtcacatagtccggagcaaatgtgcgcccatcgggccatttgaaaacatagtcattcttctggtaggccttgccgaacaaacgctggttttcttcttcctcagcttttgctttcagaaaaatctcccgtgcttcttctgtcataggaaagcttcggcggctgctttgggttttcgtcttatccttttccacggtgacaatcatcttacaaaccgtgtggcgaatcagcaccataccattttcaaaatcaatactgtcccacttcaagccgagaagttcgctgcgccgcagtccataaagcgctgcgatctttacaagcggctgtatcggatcaccgttcagggctgtaataagctgctgcagctgctccgcactatagaaatgcgcttcatggcgttctctgcgcggcatttcaacatattgacaagggttcgctggaatcagcccatctttcacgcattccgctaatgcctggcccaaaatacctttatggtggcgcatggttttagaggacagtccgcccttgccatctttacggccgttccgatatttctcatcaaaataagtctgaagcacctctaccgtacaatcgcacagttttagcctgttctcgtcaaagtatggaaggatatgtgcttcagccgtgtgctgataacttctgtatgtcacctcatctactcgccgcctcatacgtgtaagccatcgccgaacacaatccgccacagtcatatctgaacacactaccggatttcgcttttcttcttccgtcagcttctcccgcagcatctgttccgccttgcgtttatttcctttttcaggcaggccggtagatatccatttttgttttctctttccgttttcggtactgttgagcaccatatagtatttgccattttttacttgcagactccctgtcataataactcctttcgacagcgaagattgtctgctattatggattggctacagtatagcgtgctgacagcacaaagtcaattaagcacgcctttggtataatgatttttgtaccaatgcgcttatagcctatctgatgcgtatggacaagttgatacacggtatttcgtccaagtcccagagcctttgcaacttgagaaaccgttaggatatcggagtattctttgaacacgtaatccccccctcaaaatatcgtgccctcactgggcaatatcttaatatgaacaatcaaataggcagggtgcaagccccgtcctctcaggctaccgcgcgcacagttctgtacacggcaattcaatcgcttaagtgcaacggctcgtatcgggtgcggatactgtagtatcctgcccgtacgagccgatcgttctttattaactatgttagcactgaatctccggccacgtcccaacaggctttcacataccaccatctgtagaaagaatatttcggtatgtccagcttcataagattccgtattcccactttcggaacttcccattgtttccagatgtaggctcggaatctccgtgctttccagacgcccttacgctgctctcgaactcttcaccagtaccacagcatattggactaatgcgttccctatcatgaaaagcgaatgctgccatcgtgcagcagaccatatgccaccttgtagcctatgccacctaacatctctctaagttgatcaacatttactacatctggatatccggcaaacactctctttcatatatttatatcacctcttctacatattcttcaggagccataataacaagaaagaaatgctccttgagcgactcaaaaagcatttctttcttcacagcataagaataccacaggatttagagataattcaatccctctgtacaggtaaatttacggtaatactttcagtaattttatgatacatcagcaaacttacttcttttgcaatctaaaaaggaataaggccggtatctagaagcgaggtcacaatacgtatctgttatcatcaaggcctctcaatggaattaacacggcccaccggagcacggcgatagtttagcagcagccaatggctctcgctcccagcactaataggtcgctacattgatttcttcttgtttgttttacatccgcacagacaggctgcttccgcggtagtcctgcattcatgccgctcacccctgcagccttgcgcggcatttcggacactatgattgccatcctgacatctccaatatgacagtaacggaacgctgtacaacgttccgttactattgtctcatgcgtgtctatgagtggttgggtttgacggttactattcatggctcagccatcacgttcgcgaagctaccgacactaaagcgggtatcatgcaatattgcgaagtgttccacaccactgcgtatcggcaatgccggtctggacatttactctgggtatgatgcgaaacagccgaaaaatgttagtggatattcttcgcctatgctgaacgattttaccggtacggataaagtctacatcgtccgcggctacacatatctacataaaggcatagatggtcccgcgtggctcacctatcagcagtttgaactggattcatttaccaacatgctgtttctattctgcggacggcggcgagaccgtatcaagggcttgtactgggaaaaagatggcttcatcctgctgtacaagcgactggagcagggcgcgtatcaatggccgcgctctgaatccgaggtaaagacgctaacgccgcagcagtaccgctggctcatggagggactgcaaatcgagcagccgaaagcccaccgtccggtgacaggattgagcgcagtctaagtaaggaaggatgtccaaaaaccattgaaaatactggctcttctctctgccttgtggtataatttccttatggaaaacagagagatgcagacaagcaacacggaagaaatggtgaccatttcccgtgcggaatatgagcgcttgcagcaggaaaaagcacggaatgcaaagctggaagcaaagcttgctgcccgtgaacaggaacaggctcaagtcattaccagcctgacgctgcaaaatgagtggctgctggagcagctgaagctgtctaaaaagaagctgtttggccgttcttcagagcaggcggagcagatggtcatggaccagttgagcctgacctacaatgagctggaggcctatgctttcggcaccaaagccgccacggagaagcagattgctgtgaaggcgcacgagcgcaaacggcagtccg

SEQ ID NO: 10237 - DNA, 496 bp, Unknown
  gut microbiota DNA sequence
tatgaggaacgcatcgtttctcagatgccgcctgttcccaaaagaaaggacaaaatctaatgagtgatgaaaaaagccagcagcaaacatcgaccgaatccacagttgcgggtgccgcaaagactggcaaagcaatttccaatattgccaagggcgcagctgcaggtggtgctcatggtgcggcaattgaagcagggaagtcttctgcgaaatggctgattccgttgctcgcggcagttttgttgcctctaattcttgtagctatgcttccttctatcatcttcggatcattattgggcgatggaacggactccccgaatggaatctcgaacgatggagtgttagtccagaatatgacagccatcaacgagggcatcagttccatcctctctgaaggattaacggatgttcttgaacgcattgattctgattttgcatcgtccggctgtgatggaaaagagatcaacaatccctttggcgctgatgtggtgtttaa

SEQ ID NO: 10238 - DNA, 624 bp, Unknown
  gut microbiota DNA sequence
catacggaaggttcagaagaatgagcttcttcatatcgggtttgttcacagctccacaccccgatccttggtcttgaccttgactttctctttgtgctgtgccttgctctgggccatctcctgatccagcttgtgccggatggacggctgttccttctgcttgacggttttggcggagaactccttgaacgcggcggtcataacatcaacatctcgtcccttgaagaagacaagatagctgggcggctcaacggaaacgtccttcttgagcgcaaagtcaagaccgtatttactggctgttcgctcaaaggacttgatgttgccgtccgtcacttcgatgttggagatggcggcgttctggctcatcagatgcttgatggactgcttgccgcgataggtttttggctgctgcatctgcttctgcgccttctcaatctcctgcacgaacttgtccagtgcctttttcagcacctcggctgagattttgccgcccttgatcatgattgcaacaactttggtgttgacttcatcctgcattgcagtgatacctcctttccttgaaatgattgagggaatgctgcctcagctaaggcggcacaatccggcgacagatgattttcattt

SEQ ID NO: 10239 - DNA, 571 bp, Unknown
  gut microbiota DNA sequence
aaagatatcaccgaaaacaaggagcggattgaatatggaaaagactcggcattttattgttgatacgccagtaggacaactcgcgatttacgctaagcacgataagactgactgtgcagcagactatccaggcgttttcatcgattatgtacgcaaggatggcgctacagcaatcctggcttgcgtagaatacgatccaaacaaggaagcacttcagactgttgtctacggcaactgtgcatctgacgagccgactgagatcgtcgagcactacaatactgattttgaagagtaaggaggatagattatgcctaattgggcgtttgggtatgtaaatgtcaccggtacacgggatggcattaagtcgttcattgaacggtttgtcagcgaagacgatccttcaaccattccaggcaagcgtttctttgcacggagcttcatccagtcgaaaagacaagcattcattgatgaggctatgaaagaattctccgagcctgccgtcgatgccaaagcaagttactcgtttgtcgcgtcgttcgcatggtcagcatacagttgcttgatcggtgga

SEQ ID NO: 10240 - DNA, 538 bp, Unknown
  gut microbiota DNA sequence
cgctgcgaggaggtgtaggctatggggctgaacctgaactacacgccaaacagattggtggacatcacaactctaacagaggatcaatggctcagttggaggcgaaaaggaattggcggcagcgatgtagctgtcgcccttaattcctccccatatcgcacggcacgagacctttattatgacaaaattggggtcgtcatgtcagatgatgggccggacaaaagcatcacattccagattgggcatttgctcgaagatgtggtagctcaaatcttcgcaaagaagaccggactatctgtgtatgaagaccactggatgtaccaacacccgttttttcccttcctgattgccgatgtggatcgttttgtaaccctgccggatggacgtaaggccatcttagagtgcaaaacggcgcactatgacctgcaattcaagtgggcgaacggcgcagtccctcgccactatgaattgcaggttcggcactacatgtcggtgatgaatatcgatgttgcattcattgcctgcctgttctcaaata

SEQ ID NO: 10241 - DNA, 612 bp, Unknown
  gut microbiota DNA sequence
ccttaaagattcttgattccgtctgatccacaaactcatcatagatatcaggatactgagctcgtagagcagataaacgatctttcgatataccttcccgatacagagggttgtaggaaactttgaagcactcgccgccctgttcacaggttcctttgcacgcagtacccatctcttcgacgatgggagcatagagggatttgatgcgagtctcaagtgcttttacctgagcatctaaagctctcttttcctctttgagggtcagaatctctttgaggttcaccacaaacttgcggtcaagatctacagtcggttcagacttgtcagcagggccgaaatagcgacgaagagactccagaaccgcatctggcttttcgaccagaggcggctccacacgagccatgacgtgattattccagaatgccgacagctccatgatcgtgttctcttcttcctcgaggtcacgctcaatcttttgccatacaaagtcattctcattatttgagaacaggcaggcaatgaatgcaacatcgatattcatcaccgacatgtagtgccgaacctgcaattcatagtggcgagggactgcgccgttcgcccacttgaattgca

SEQ ID NO: 10242 - DNA, 1384 bp, Unknown
  gut microbiota DNA sequence
tttttctgcttacatgacctgcgccatgaagctgcccattttctccgcggccttttgctgcatctgtcgtgtggcgtgggtgtaggtgcggagagtgaatccggcgtcgtagtgacccagcatcgaggatactgttttgacatccacgccgttttggagtgccagggtcgcgaaggtatgtctgaggtcgtgaaatctgatgtgcggcagcccggcgtccttcagtatcttcttgtgcaggtttacgacggagtctgggtgatacatttcaccggtcctgccggacgggaacatccacggattgctgggatgtttggcgtgctcctgcttcagcagctccacggcatcctgcgggatagacacctcgcggatggaatttccggttttaggctggcctagaatgaggttcccctctgtgtcccagctggcctgcttactgacggagatggtgcagttggtttcgtcgaggtcgctccattggagtgcgaccagctcgccctttctcagtccactgaccagttccagatagaacatcggcagggcattacgccgctcggctgcatttagatacgcgctgatgtggtctggatgaaggattttcatctcttgtttttcaattttggggatgatgcaattctccgtgggattgctgagaatgagtttttccttcaccgcccggtcaagggcgttgtgcagcatcatgtggataccgcgcacagtggaattgctcagtccgggtttttcctttttctgtacttttctcagccgcccattgctttgcagatcgttgtagagcttttgcaggtcacgggtggtgagcttattcagcgggatatccccgatagcagggatgatatgctgttcgatgttccggtggtagtagttcatggtggatgggcgaatgtgcggcttggcatacaaatcaaaccacgtccgcagccaagcggcaaccgtgtattcatcggcgcggccgacgtccaatgcatggctctcctcaatggctttctttagctttgccttgcattccgcctgcgtcttacccagcacatttttgatgatgcgctttccggtttcggggtggtagcccgctgtgtagcgaccctcccagcgaccgtctgcgcgcttgcgaatgttgccctcgccgttggcgcgttttttagccattcgtgatcatctcctttgctttttcttcctcgtcggcatcgaaggagtagggcgttcccagctctccggcgataccggccgccagcttgaagcccgccgtgaagctcatcagcttggcttcgaccagcaacgcgttctgtgcgtccagcagccgcagtagtttcttacgctccgtggcgtccatgtcccgccgcagttccacttgggcgtaatcaatctg

SEQ ID NO: 10243 - DNA, 1610 bp, Unknown
  gut microbiota DNA sequence
acgcttttgcagggctttcatgtagtcatacattgtggcacctccttttggtagccacaacacataccacaacccggcgcacaaagctactacttttgcaaatgtttctttgactattgcggcgcaaaaaatacatttccaaaccggttcacatgtgcatccacatcgagcagccttttttgtagcggggagtgtactgcgttcatccgccagcagcttcacgccgggacgggtggcaacgtagcgagtgcgctgagccagcttcgcggcgttctgtccgcccttgaggtaaggggagatcagtacgatccgggccacgtgtcatccggctctatgcgccgctggctccgcaccgcgctttcaaaactcacctgaccgttggtgcgcttcacctcatccacggcgtatgcccgcagctcccgcgtgtggatagggtcggcgcggaagtgcgcggcgatggtgtgacacagcatattcagttccaccgcgcacttgaaaagaatgcggcagagccgattgttgttgtcgtccagcgtaccctgaatggctgtcaggatggcccgagagatgtaggtcgtgttgtcctcggtgccgagataacccatgtaaaagcgcagggccttatccacgaattcgctgcggctttgacagttatctgcttccaaccagccgtccatgcggctgatcacgctggggcgcagccagatcgtggtgcttttcttgttatcatccatattttttctttcctttctgtgtcgtcggtcaaaatcgccgcaaagccctgcaaacacgggactttgccgaatgaccgactgcgattgttctgtaaaaccgccaaaccgacggtggttggcgtttctctgaaaagccccgcactgcggggctttgtgggcgggctgcgggcgcttgcgactgcggccctttatcttgtgctttaatcgaacgggtaaataaggggcgaaagcctccgaaacggggcatggccgggagggaaacacgcatcccaaaaggcttagttcctcatcgtcggagcggtattcaccggggcttttcatacatcgcccacaaccgccgcaacattcgtttcaaagggctttggcgggacacacaccaccccatccccgaaccgcgcacacagcgcctcacagggcgaaacacagggcgtttcaggtgggggtgctatctctaccctcggaccgttttgtgtgggtcggagaccctgcgcggccggatggcagaacggtgtactttgccgcttttgggccttggtcgggtgtgctcccgaagagtgcagagagcctgcgggacagcgatgtgcttatgtgtgtcgctgttccgcaggcgtcgcggccccgctgggctgcgctgtccctgccggttattgtgcaccggcgagccttaggggtttgtcatcgctgcgataaaggacagagaactttgttgccgggattgcttagcttttgcttgcgatgcaggggattcttctttggttacagcggtgcgttttttgaaccgctgttcgcgtcgatccatgcgagaaacttatcccttgggacaacgatccggctgccgattttgagcgcggggaagccgtcactgtgtgccagctc

SEQ ID NO: 10244 - DNA, 1558 bp, Unknown
  gut microbiota DNA sequence
gatgcgcatcatgaaccggcgcatgatgagcgtgaagtactcctccgggcaggcgcggcggatctcctcctggatgtgcgtgaagggcacgatctgcagcgtcatgcggccggtataggccgtgagctctttggccagcgagaggaccttctccttggcgagctccgacgtgtacgggaaggagaaaaagtgcaccgggacgaggcgcacgccgcgctttgcgatcatgtacgaggacacggggctgtcgatgccgccggacagcagcgtcacggccgcgccgttgcagccgacgggcatgccgcccgccgcctcgacggcctgcgcatggacatacgccgcctgctcgcgcacctcgaggcgcacggtcagctccggatcgtgcacgtcgacgaccgtatcgggaaacgcctcggcgagctcgccgccgacgtactgcgacagctcaatgctcgtcatgggaaagcgcttgtccgagcgcttggtctccaccttgaagctgtgcgccgccgtcatcgcgtcgtgcaggtacgtcttggcaagggccgtgatggcgtccttgtccttctcgcaggcggccgcgcgcgtgatcgtcgcgatgccgaacaccttgcgcacggcgtcatacgccgcgtcgaggtcggccgcgtcgtcggcggcctcgatgtacagcgccgactgcagatacgtcacgcggaagtggccgatgggtttgagccggcgcttgacgtttgcgaccagcctctcttcaaaatagtgcttgttgaggcccttgaggaagatctctccgggcttgcacagcagcagatcattcatagcggtttcgttccttttctttcaggatatcacaggcagcgctcgatgagcgtgatgaacacgccgaccgaccacgcgccgagccacacgagcagcaggcacacgagcacaccgaggatcagcccgatgagcgagcagacatagccgacggtgcgcggcgtgccgttgaagccgaggctcttggcacgggaggcatagatcaggccgatgatgcccgtgacgaccgagccgagcgccgtgtagccgaagatgagcagcgcgcacgagacgatgccgagcaccatggcgacggtggcctcatgcttgccgggctggggtccgggcggctggtaccagttggggttgtaattatagttattattgtacatgacgaagctcccttctgtccggccgggctcacggctcggcgacggaaaagtcatacgtgcggtactggatggcctcggccagatgcgcaaggccgatggtctccgccccgtcaagatcggcgatcgtgcgcgcgacgcgcaggatgcggtcatagctgcgggcggtgagggccatgctgtcaaacgcctggtgcatgagctgctcgcactcgggcgagagcgcgcagaactccgtgagggcgcgtgggcccatgtgggcgttcgtcgtggtggtgtcgtccccgtagcgggcgcgctgcacggcgcgggcggcgttgacgcgcgcgcggatggcgcgcgacggctccccggccgagggctcggtgagctcgtcg

SEQ ID NO: 10245 - DNA, 2871 bp, Unknown
  gut microbiota DNA sequence
cccgtttacggtgtttttggtcatgtgaatgcgagtgggctgtccgcagcacgggcatctggccggaacaactttgtctctggagtagcagtttcgatccagattctcctccacatggggaatgatctgattgcgcttgctcaccttgatgcggcaacccggcaccagctctagattctcaataaaggagaggttatggagactcgctctggataccgcgcagccgtcgatctccaccgtgtcaaagatggctaccggagcaatttcccctgtgcggctgggcgtccattcaatcgaacgtaggacggtttcataggtgtcgtcctcaaacttgaacgccaacccgtccttatagtgatgcccggtccgtccgcaggactttgcgtaggatgcatcgttgtaggtgaccacgatgccatcgataggtatgtcggtttcctgcgcgtatttccgcaggtgccggataccggcgtccatatcgaactgcgtcaacgcctgcttgctcgccagatacttgcagatgggaaagccgagctgttcgatggctcgaagccgctgcgacttccagggatattcctcaaagccctccagcacattgaaagccataaaggtcacacggcgatccttgcaggcgccgcagtccagcagtcggacagagccggcagccagattgcgcccgtttttatacggttcgccatttccgtcccgcagcttatcctttaacgcctcaaaatcgctgggacggataaatgcttcgccggtaacgaccagccgttccttgtacgggatcttatccgggatgccggagatccccagcacattgtgagtaatgttctcacctgtatctccatcgccgcgggtagcggcctccatcaaaaggccattttcataggtcagctttaccgtcaggccgtccagcttgagcatcagcatgaccatctgctctcccgcaaagcgcagcagttccgcactgctcttcgttttatccaacgacagcagcggaatcggatgcactgttttcaccaaggcgctgacagcgggatagcagcctaccgtctgcgtgggcgagttcgtcatgctgaagccggtttgcttttccaacgtactcagttcatcaaaaagcgcgtcatattcggcgtctgtcagagacggtgcgttgagattgtagtattcataccggcagcggttcagccggtcggtcaattcccgtattctctgctgcttgttctgctccattcctcacaccagcctttccttagagaatgctccgaaattcagttcatagatcatcttttcgatccgtgcgtcatcgttccatgcagcctccatcgccgcacggtttttcgcctgtaccgaggccagaccgtcccggagctgcaacagcagctccgggcgttgggcacaaataactgcgaggtttcccaactgtttcattttcacatgactccttttatacagcaatataggtttcccagtacgattcccgctgtgccgcaatcgtgagtggaacaatggtgctgccgatattggccggcgcctgcgtcagtccatagacagtctgcgtactccggatacgaaccatctcccgcttgagctgggagaggatgtactccttcagataccctttacagggatcgtagctgttgactgcccggatcaggcgtaccgccaaagactggtacacatcatcggggtctacgggttctgtctgcataaacgcggcgtactgcgccatgatcgtgtcaatgcaccaaagatgctgctccaccacagcattgcgctgcgtgatcgtaaatccgtttttcatattctctacaacttcctttccttcgttcaaatgtattgtgctgcggcttaggccgcagtttccatgagatccgacaccaaaacatccaccagccgctgaccggcaaggtcgccggtatggatacgaatgtcatcctgccgcagctgctcgaattcctgcaggcgaaggaccttgctcttttccgctttttcccggtcgctctctgtcaagcgctcggagacaaccttctgccattccttcaggaatttctccgcgtccttaaggtcatcgttctgtcggtcaaagtaggtccgtttctgtcgtatcgtgccgtttggctccacctcaagggtgtagtacggcttgtcgatctctgcggtcttgcgcaggaacaggatatatgcctcctgctgttcgatgcgctcccaatagcggtctgacttgccgacacagtgggaaagcgcatcgccctcgcgcataatatcgcgtacacctgatggaacaacgatggaatacacctcgccggtgtattcgtatttcggtttgatcaagcggcagatgcctgcaattttccgatactttcttgctgttgcggcagcttccatgtcccgttctcttttccgcagctgttccaccagttcatcatgacgctggcgcagcagcttgacacggtacacgatctcatcatgagtgttgattcccagcttgtccgccatggaaaggtaatcccgccatgtgaaaataatctgccgcagggaatcccgtgtgccgcttttctgacgctgaagatagttgcagacctgctgctccgacattcgatccagaatgaagtcgatatcggaaacatggatcttctcctgctccagccagcgcagcgcatgatccgggatgattctgccgctgcacttctcccgctgcagccagtcgagcataatggcgccgccgttgagtgtccggagccgcgaaagccggtgcgtatcaagtgccaatgccttgacgagactggtttcagactcctgccggatacagctttttacggctccgaaattttccaagcactccgtggtcagccgcggaagattggc

SEQ ID NO: 10246 - DNA, 322 bp, Unknown
  gut microbiota DNA sequence
aatcggcggtggacgcatcacgggccttgaggtctcacctgataggcagtcagatagggagtttgctatgtacagcacagaacaatacatggccccaactggcccgtatgatacagtccaaacagtagacggtgcctcgtggtatcggcagtatgctcagcccaaagttgagaaaacgccctataccgatgaaggtgacaagattaggtatgaggaacgcatcgtttctcagatgccgcctgttcccaaaagaaaggacaaaatctaatgagtgatgaaaaaagccagcagcaaacatcgaccgaatccacagttgcgggtg

SEQ ID NO: 10247 - DNA, 1383 bp, Unknown
  gut microbiota DNA sequence
cttcgctggacagccggagcttctgctccatgacggcacggaaatgatcctcataccgactgacataggaaatcacagttctcatgtgcatccagaccaattcttccagaacaacagcacggataaagtgtgccgaacaacttcccgtattgctgcggtagttggcgcatacaaaatgatcctgccgcttttcaaagtagttggtagtgcagtagcgcatttttgctccacaatcagcgcagtagaccataccggaaaacagactgctcttgcccgtctttgtcctgcggtgacgctgctggcgaatttcctgcaccttgtcaaagacctcctgctcaatgatcgccgggtgggtattgtagaaaactgcctgcttttcaacgggcgtttccctctgtttcttatcccaaatagaattggtataggtcttgaaattgacggtgcatcctgtgtattcctgccgttccagaatgtgaacgaccgtgttggtgttccaatggtacggatcagcggtttccgggctgggtgtcttgatgccctcgcgcttcttgtaggcggttgggttaagtaccttttcctcctgcaagagctttgcgatctgcatcgggcctcgcccttccatgcacagcttgaaaatgcgcttgactaccaatgccgccgcttcatccacgacccacttcatcttgtcctccgggtctttacggtagccgaacggaacattggtggtcaggggaacgccgcgttcgcccttcgccttattgacagcacgaattttgcggctggtgtccttggcaaaaaactcgttgaaccagttcttgatacccgcaatgtcgctgtcggtactgttgggatcgatggtgtcaaagtgatcgttgatggcaatataacgcacattgtacttcgggaacgtgaagttgatatacagccctgtcagcgaagaatttcgtcccagtctggataggtctttggtaatacagactgccacccgtcccgcttcgatctccgcaagcatggcttggaagccggggcggtcatagttcgtcccgctatacccatcgtccacaaaaaaggttgggttcgggaaacggtgctcctttgcgtattggagcaggatcattttctgattctggatggaatttgacacatcttctttgccgccttttttatcctctttcatatcttccacggatagacggcagtagagtgcggtgattttatcagttgcccgtaacatttctgtttcctccttcaaaggggcaactgccagtacaggattggttgcttctattgtaccaagattctgtgaatttgtcattcgctatcctccaacttttctgtaaacttttcagccataatacgctccattttcttatccagcgtttc

SEQ ID NO: 10248 - DNA, 1167 bp, Unknown
  gut microbiota DNA sequence
caagaaaagagtcgtcaaccagttgcttcccttattgtagcttaggcaagagatggaaagaagcccagccggatgctgggcttccaaccaaaacttattgtaatagaaaagaggaagaatatgagctataaagcggttctttttgatatggacgggacgctgctcgatacgctggaggacctgcgtgacagcacgaaccatgtactgcggcagatgggctatccagagcggagccttgaggagatgcggcgctttgtcggcaacggggcggaaaagcagatccgccgcgccgtgccggaggggacgagcgaggaaaagatcatggagacgctcgcggcgtaccgcgcgtactatcaggatcactgccagatcaaaacacgggtgtacgacggacttttggacatgctgagcgagctgaaggcaaagggcatcaagctggcggtcgtgtcgaacaagccggacagcgcggtgcagaagttgagccgtgagtatttcggcggccggatggactttgccgtcggcccgagcgacggcgtgcgctgcaagccgtaccccgacatggcggagacggcgctgaaagcgctgggaattgcaaaaaaggacgcagtgttcgtcggagattccgaagtggacgtgcagacggggctgaacgccggactggacgtcatcgctgtgagctggggtttccgctcgagggaagttgtgatcgaagccggcgcgaagatgatcgccgatgatgcgagtgagctggaaaagctcattctcgaatgattgtctcccatgctgggaggggattcccctgcgccgcgcaggggtgcgaataaagggggtcattctctcacgtgagagaatggccccctttaaatcccccaagagaacgcaaggggccttgccccttgaccccgcacattggcagtttagggctcgaagagctgcacgcgctgcgcagtgtgggtgcggtgtacatggcttcgccatgagcccctactactcgttaccagtagcaaccgcgccttactaccgtgaggcgcgagtgacgtttgttcggcggcagactgcctgcgaaatagcggcattgctgcgctcgccgcattgatgggtgccgcggtagacggaaattaggctgtacttctacaagatcagcagagcggcagcggatgataggag

SEQ ID NO: 10249 - DNA, 600 bp, Unknown
  gut microbiota DNA sequence
ggtttgcggtgagtgtggctccccatacaagcgggtgacctgggccagagatgggaaaaagcgtatcgtctggcggtgtgtctcccggctggagttcggtacaaaatactgccatgcctcgcctacgctggatgaaggcaagctccacaacgccatcctcagcgccatgaacgagtacgccgccatccggcaggaggtctgccccgatgtgctggccatggcggaggaagccaggcaggcgttatctcaggccggtgcacggctgctgcagctgaagaagcgtatggatgcggtgagccgggagcaaagcgatgtgctggatcggctgctcgtcaacatggccgataccgagctgaatgccagaatgaaagcgctgacggatgagaaggaatccctcaaggcgcagatcgcagacgcgcagcaggcagaggtcgatctggaggaacaggctgccagacgccggcagatgtgggacagtatcatggaatgcgccgcgggctacacggaatttgacgatgagttcatccggcagatcattcagaagatcacggtcgaggacgccgacacgatccgcatccagtttagagactccgatgtggt

SEQ ID NO: 10250 - DNA, 1846 bp, Unknown
  gut microbiota DNA sequence
ccccaatacccaaagtgaggatgaggcccgccgtgcgcacgaagcgtctgaagccaagcgcaaggcagaatgggacgccaaacaggcggaaaagcggcgggcggaacaggccgcgctggaaaggttggatgccatgggcccggcagagttgctcaaggctgccgcaaagcgtgtgtccgcagatacggagaagctgacgcggcgcaacatgaaggagagcgttgccgagtttatccagaccaagtgtattgatgacctcggctttgcccggctcaccatgcacccgcgcaaaagcatgatccactgtttccagtacatcagccggaaggcatgggattatgtgcaggacgagctaaaggcaaacggcgttcagccgggacccggtcagcaggcatacggctgcgatattcccgatgatctctgctatcagtgggcggaggactatttccgtgaccccgatgccaaggaggatcagggggatgaagagaagtttgtcccgcagccctatcgtgggaaaacagcttccaagtctgtttccaagaagaaaaaggaagaaaagaaaaaagaaccggagaaaaaggaactgccgaaaaaagcggaagccgacgacgggcagatctcgttgggcgacctctcctcctttggggaggcagcctgatgtatgcttataaaggctttgagccggatctctcctgccgtggctatcggttcgtcatgggaaagaatgtcaccccggaggcaaactgcgccagcaacggtttccattgtgcggagaacccgctggattgtctttcctactatggcgacatgaatcgctccatttactgcttggtgcagcccggcggggatattgacgaggacgatcgtgactccaaaattgcctgcacggaactgacaatcctgcggcggctgacgaggaaagaattctttcttcatgcacttgcctacatggtggatcacccaggccgcaaggtgagcgacaaggtacagcgtgagcacagcaccagccgcaacggctatgccatcgttcgaggcaagacacccgctgcgtgtggaaaactgggcgatattctcgcatttgccagagagcggcgtgaaaccgaagcaatctgtcagattgcggtcgttgaggtcgatggagaaaaaattctgcctgatgtatggtatgacattgattttgtaaaaagagaggcggtgcagaaatgaaaaaaagcagtttgctgaaaatgaagaatttgcctgcgactgaagaaatgcttgcggttgcccgcgaggatgtgccggtcaaggtcggttcgggctggaacactttctatcgatgccgatacagcggttttgtacgaagcgcggtagagggcggcattttgaaagtcaccctgtatgacccggatgcaatgcgccttggaggaacgctgccggtctatgagattttcatggagaaagaaaagcagcagtttctcacctatgaccgtacccgtaacgagtggcggacggcaaagatcgactacttggaatggcaggcgaagggatccaataacgtgtggatcagcgccgtggatgatgcacagatccggcaatatctggcgtcggatgaaaaaagcgtatatcgggctattctgaaatttcagcgcgccgttcgtgatgctgaactggaacgccggcacagaaaggaaaccgatccgtgggatgcggagctctctcagacaccgccgctgccgaaggactgggaacggtgggtcaataaggtgggtattcaggaaaactacatcttctacgattaccgcaagggcggggcaaggtacggctactgcacctattgtgaaaaggaagtcgcactgaaacagcg

SEQ ID NO: 10251 - DNA, 2390 bp, Unknown
  gut microbiota DNA sequence
aaaagcaacaccctaaaaacggaacttatgaaaagcaaaagtcctcgaaatcagacgatttcgaggacttttggtacgccgtgagggattcgaacccccggccttctggtccgtagccagacgctctatccagctgagctaacggcgcgtgtctcatatcggacaacggtgttatactaccacagctttcagggaaatgcaagaggaaatttcaaatttttagaaaaaatttgaggacaggtcaaaacaatgaatttgacaaggggcgcgtggcaagggtaaaatatcattgattttgattttttacaaggagcacactatggaaaatactttcaaaggcagcaaaaactacgttgcgagcccagagctgatgaatgcggtgaacatcgcgatggcgctcaaaaaaccgcttctcatcaagggcgagccgggcacgggaaagacgatgctcgccgaggctgtggccgaggcgctgggcaaaaagctcatcatctggagtgtcaagtccacgacgaaggcacaggacggcctgtacgtttacgatgtggtgcagcgtttatacgacagccagttcggcacatccggcgtggacgatatcgcaaagtatatcaagctcggcaagctcggcgaggcgttttccgccgacgagcaggtcgtgctgctgatcgacgaggtcgacaaagcagacctcgagttcccgaacgaccttctttgggagctcgacaagatggaattctacattcccgagacgaaggagaccatcaaggccaagcaccgtcccatcgtcatcatcacctcgaacgcggaaaaggagctgccggacgcattcctgcgccgctgcatcttccactatattgaattccccgaccagcagcagatggaaaagatcatccgcgtccactttgatcatgtcgacgagacgcttttgatgcaggcgatgcaggcgttctactatatccgctcgatcgactcggtggagaaaaaaccctcgacatccgagcttgtcgactggatccgcgcgctcgagcttaccggcgtggacacgtcccgcatcacgaaggagatcccgttcatcggggtgctcctcaaaaaggacaaggatatctccaccgtgcagcgccgactgagaagataagaacgccatgtttactggatttttctaccttctgcgcgcgcacggctttcgcgtcagcctgaatgagtggatgacgctcatcgaggggctgatgctggacctgcagcacgattcgctcacgggcttttacgagctctgtcgcgcggtgctcgtcaagtccgaggcggattacgacaagttcgaccagatcttcctggaatacttcgacggcgtgccatatcaggacgagcttcccaaggagctgatggactggctcaacaaccctgccgccgcaatggaggagttccgcaagttcctgcgcacgcagggctatgaggaaaagagcattgaggaaattctcaaaatgttcgaagagcgcctcaaggagcagaccgaggagcacaacggcggctcgtactggatcggtacgaacggctactcaaacttcggcaatagcggccacagcccgcagggcatccgtgtgggcgggaagagcatgtaccgccgcgcgtttcaggtggcgggggagcgcaggttccgcgacttccgcaaggacaatgtgctcgatatccgacagtttcagatggcgttccgcttgctgcgccagtattccgagcagacgcaggaggccaaaacggaattcgacgtggatgggaccgtgcgcgagacctgcgacaacgcgggaacgctgtcggtctgctacaagcgtccgcgcaaaaataccgtcaaggtgctgatgctgatggactccggcggctcgatggagtattattccaacctctgctccatgctcttccaggcggcgcggcagtcgaaccattttaaagagctgcacgtctactacttccacaactgcatttattcaagcgtctataccgacccgcggatgtaccgcgagcacgcggtgccgacgggctggatcctgcagaatttcggcagcgagtacaaggtcattttagtcggcgatgcgctgatggacatgtacgagctgatggaaaagcgctacgactaccgcaccggcgaggcgaaatggtcgggcctcgatcagatcaagcgcttctgcgagcactacgaccacctgatctggctcaatcccgaggagcccccgcgctggggcggctactggggcgagagctacggctatatcgcaagggcggtggacatgtacccgctgaccgtcgacggtctcgagcgcggcatgaaaaagctgctcgtgaaccggtaaaggaataaaaaagaggacgggcttttgccgtgtgccgataagacagtaatt

SEQ ID NO: 10252 - DNA, 22205 bp, Unknown
  gut microbiota DNA sequence
ggcactcagcttcggttgggtgccgcctgtttttgtacatctgagggttgaaaattgcttgttttcccctctgcgtggctttgttcaaaagtgagcatatctggcttcatttattcacatagattaagtttgaaacatgaaaaaggccacatttcaacatattgattatacggatcagagaatcactttacgatgaagtcattatacatagcagcataaatttttgcttagataagcatcactattttacatgcaggaaaagtgacccaaacggagcgaataaaccgattatactaattctctgaaatatgccacattatcttgaaaaagcagaagaaaatgagcataatataatgtgtacacactattcagggatacccaattagagctatggaggaaaaatgaagctatcatccttttttcacttcgctgcttttggcgtaaagacgattctgcttagaaagaaatcaccaatccttggaactgtaatcctaacagacaaatgcaatttgcattgcaagcactgttccgtcaacaatattacagcaatcgtccatccatatgaacagatctggcaagaaatgcagcggctatatgacatgggagttcgcattttgttcttctgcggtggcgaaacatttctttggaaagatggcgaacgcactctcagagatttggttatagaagcaaagaacatgggttttctcatcgtcaacgtagttacgaacggaacgtttcccattgatctcccagaagcagatttgattcttttgagcttggacggagataagcagcgccataatgaagttcgtggtgacacctacgacactatcatgaagaacatcagcaatgctaccgcagacaatatctgtttctatatggcaatcaatcaaatcaacaaagatcatgtacgagatgtctgtctaacggctcgtgacactaaaaatgtccgtgcagtatcattcaatttccatacaccatatcctgacacaaaaaaattagctctgactaaagaggaaaaagccaagtgctgtgatacgataactcaaatgatgaaagaaggcgcacctgtattcaacctaaaaagtgcgtttccatatcttattgaaaatcgttttcctacgccttgccatcagtgcgtagtgatggaaaacggaaagttgtctacttgcgggcgctgtatagatgttcctggcctttgcgaccaatgcggatacttttttgttgctgaatatacgcttctgttcagaggcaatcccaaaataatcattgagatgcttcatacatacttgaagtatatttaggagtaatatgagcttcattacaggtttaacgagaatgtggcttacacggacagcgaagccatttacgttcaaaaatggatatgaccagatattgccgtatgcagaatgtgaaaaccttgggctgtatgttcatatccctttttgcaaaagtatctgcaacttttgcccttattgcaaagtgcggtattctgctgaattgtgtgataggtacatagattctttgattcaagaaatacacattgtgggcagccaacatgcggagcatagaaaagcaaccagcctatacttcggtggtgggacacctgcactcgcagccaaccgtataaaagaaatcgttaatgcattgagtgagcactttattatcacagaggggattggactggaacttcatcccgataatgtgaatgtggaaacgctgcaaatgttgaaagatgcaggtgtaacaaaaatcagcatcggcattcaatcattctgcgataagtatcagaagattcttggcagaaagaaaattgataccgcagaaatgatgtctgcgttgtctgccgtttcttttgaaactgtttccatggactttatctttgcgctgcctggacaaacctacgatgatttgaagtcggatattgatactgcttttttattgggggcaaatcacgttgccatatacccattcattgatttcacttttacagaaagtcccgttactgcaatgcctaaaaaagataaacgagagttgctggatgccattactcaatactgtttaggaaaaggatactctcgaaattctatctggactttctcaagtggaacggatgcaaactactcatccatgaccagagataatttcctcggattcggttgctctgctacgagtctattcaaagagcaattcaaaatcaatacttttgatgtagattcctactgtgaaagaattcgttccgggaacctcgccacatcattgacaattcgctttaccaagcggcaacggatggtttattggctattttggacagcatacagcacgagagtaactgccgaagattttgaaaaattctttggtgtgtcattgaaaaaaatgtatggattcgagctttgggttgccaaacaattagggcttgtcaaggaacacaacggcacttatgaaatgacgctaaaaggtgccttctactatcattactatgagaatttttacacgctatcttatatcgacaagatgtggggtatcatgcgaaaagaagcatttcccgaacagattgaactgtaaaagaacggagatcgctcaatgccagacaacaggaatcgtaagcgaccgatacaggtcaaattcttcgtagatgaaaaagaactcagcttgataaaggcgaggatggcgcagcttggtatagagaatatgagcgcttaccttcggaaaatggcgatcgacggatatgcagcaaaaccggatttgcctgaacgccgtgaacccaaaaatccatgactcactttccgaagatagattgatattcagctccgcaggagcgtagccaatttcttagaaatcgttaaagggtttgggatgtttcccaacaagattttgcaaaaggtcagcaaggctgaaattttgcaaaacgcacgagtgggtaccgccgtgcattgcttgccggaacggcaagctccggtgtgggtactcaccggatttgcttgctattctgcaaggaaatcccggtcgtaccacgccggatttcgcaagtgtacatacacttgctgtgcttgctattctccgtttcccatgatagcaagcgccatttccttaaatggaaatcggcggcaaccgccgccttgtctgccaaaaagcgaaacggacgggcgctgtcaatggcggcgcagccgttcatcttgaccattgacggcgttcgtccgttttgctactccgactgaatttttacataaaatgaactgaagtgaaggaggcttgacgaagtgaatccgaaagaaaaagataatgagatcatcgaactgactgacgaagaactggacgagatttttgccgacgatgattttgataacggcgaggaggacggtgaaatccgctcgtttcatttctccaatcctgacccgtatgccaaggtcaagccgcgccccgacgatgcccccaagagggagttttctttcgacgaaaagggcaacatcgtggtgaagaatccgtccgccttttggctgcccgatgtcaaaatcgtggaggaacacggcggcacggaatacaccgtaactggcagctatgagggaacggaaaccctcgacaagaagctcagacgcattatggagcagaacgctgccgatgataaaagtagtatcacggaggacgccgatgagtaacgacgtttctcttgatataaaccaaaaatccaatcctgttcaagcagttgccccaccgaaggaggacaacaatatgttaagggcaaccgacaaaatcacagcgctttattgcagactgtccgtggaggacaccaaagaaaaaggcggcaaggatgacccgtcgaactccatacagcatcagcaggtcatgttaatggagtatgcaaaatctcagcactttccgaacccgacgttcttcattgacgacgggtacagcggcgtggatttttccaaccgccccggctttcagaagatgcttgcggaaattgaagccggtcatgtggaagcggtgattacgaaagacctcagcagactggggcgtaattcctcgttgacaggactttatatcaactacacgtttcctcagtacggcgtgcggtatattgccatcaacgaccactttgacaccattgaccccaacagcaccgacagcgacatggcaggtatcaagaattggttcaacgagtggtatgccaaggacaccagccgcaaaatccgtgccgtcaacaaggcaaagggcgagcgtggagaacgattgaccaccaatgttccctacggctacaagcgtgaccctgacgatcccaagaaatgggtgattgacgaagaagctgcacaggtagtgaagcggatctttgcgctctgcatggagggaaaaggaccgagccagattgccgccctgctggaaaaggaaaaggtgctgaatcccaccgcctacaaacagagggagggcagaaaaacaccgcatcaggctccggagaatgagtatcgctggcacgaaagcaccgttgcttatattctcgaatacatggagtacacgggctgcacggtcaacttcaagacctacaccaactccatttgggacaagaagcaacgggaaaatccaatggaaaatcgcaagattttctataacacccacccggcgatcatctctctggaagtctttgataaggtgcaggagattcggcagcagcggcaccgcagaacggcaacgggcaagagcaatatgttctccggcttggtgttctgcaacgactgcaagcagaagctctactactccaccaccagctattttgaaaagcggcaggacttcttcatctgctccacccatcgtgtcaataaggacaagtgcagcggacattatattcgtgccgttgtgctggaacaaatcgtctggaagcacattcaggaggtcatatcggtagtcacttgctatgaggcgtatttccgctctgaaatggagcaaaagctccgtatacagagcgagaaatcgctgcggctgtatcaaaagcggctggcacaggctgagaagtggatcggcgagcttgaccgccttttcatccgcatttacgaggacaatgttgccggtcggctggatgatgaacgctttgcgatgatgagcaagaactacaccgaggaacagaaagacctcaaagccgaagtcaagaatctgcaacagcaaatccatgaacaggaacagcaggcagagaatatagagcagtttgttcagcgggtaaagaggaacagcaccctcacggagctgaccccctatgccctcagagagcttgtcaaggcggtctatgtggatgcacccgacaagtccagcggcaaacgcaggcagaaggtacatatcgagtacgatcttgtgggctacattcccgtggatgagctgctaaaagcggaacaggcatgaccgagatcatgcctgttccaagaaatttgagttttactgtcttaccagcagggggccttacccgccctcttttttgacccacggcggcaaaattggtgtccaaacggaacaatttcgcccgatggggaaagacaagcggcaaaagctgttgtatactgccagacagttagagatgactaatctgaaaagacaggagcggaagagatgaccgcagagaaattattggagcatcagggcgctattttgctggcgcagagcgacggctgcgcggcctggcagtttcgaaacgagaccggcaacggcacgatgaccacctatgagatcttttcgggcgtgatgctcgcgttcaacgactttcacatggagcgctacgagtgcgattttgtggccgaccggcggatgctcgccatcgaccactgccgcgaggggggcatggattacgccgcgagcgacaacttggtcgcctacacggcggcgggggatatgcaaaagctccgcaacttctgttgcggagcttttgctgttcgtcaccggtggacgatttgagcaaaaatgtgcaatggctttcgcccttttgatggtagcggaataacagatgctatgctatattacaataaatcgcgtcgaataatgcggcttgctttgtgcaagtgtgacgaaataagagagtgaagcggtgtttttgcagatctgcctcttgcggaacgcaaaataaagcgctatattacggtagcgcgataaagtgaatgggggaatacatcaattttgcagacaaagcggtattcgttcgaacactgaaaattttaggaggaaacaacacatgaaaggaaacgtactcaaaaagtttctctgtacctgtctggtgacggccgcggccttcgccgcgacgaccatcagcgcctccgcctgcacgacgatctacgtcggcggcgacctcgtcgaagagggcacgcccttcgtcgcccgcacggaggactacggctctgactacaacaagctctggttcatcagcgagagcggcaagtggaagcagggcgaccactacgtcggctgcccggaatacggaccgttcgagtgggatttcacccacgacagctaccgtttcacctattttacgaacgatatctactatgacggcatctgccccgagtgcggcgaaaaggccgaccactactcctacaccgagttcggcacgaacgaaaagggcgtgtccgtctccgcgaccgaaacgctctacggcaacaaaaaggtgacggaagccgacccgtaccgcgacgccgaatgggcggaagcgaacaagagcgagcgcatcggcattgaagagaccgacatcccgaccatcatcctggccgaggcctcctccgcgcgcgagggtgtgaagctgctgctcgacatctacgagaattacggctgcgtggccgcctccggcgtgttcgtctgcgacaaggacgaggtctggtacgttgaaaattgcagcggcacgcagtatgtcgccatcaagctcaacgacaacatgatcttccttgagcccaacatggccgtcatcggccgcgtcgatctggacgatgagaacgtcatcgcctccaaggacctgatcgcggtggcgaagaaggccggcacgttcgtcggcgacgaggcaaagaacatcatcgacttccgtgcgtcctatgcccgcatcagcgagaagatggaccagcgcatgatcgacggcctcaactacctgaacgtggcttacaaatatgacagcgacgcgctcgtgaccgacaacacgaagttcaccatctccaaccttgacgcaagcgacaagcttgtcgcgctctacaccaacatcaaggccgaccgcaagctcgacaaggacgatgtgttcggctactacaagctctcctccatcggcaaggccagcaaccaggagatctagatcttccagctcttcaaggatcgtccggtcgagaccgcgaccgtgggctgggtcggcgtcggcaacatgtcctacaacgtgtttgtcccgtactatcccatgctgattgacagcatgtactccggctatcaggtcagcaccgcgtccgcgaagtttacgactgaaaagcccgacaccttctgcacctacggcacgagctgggcgcaggatgccgagggcaactggcagcgcgtttccggcttcaaggcgtatccgagcaactggaaggattcctattacttcacgtttgagggtctcggcggttacatcgccaacgccgacaagatcaccggcaagcccctgaaggccgaggccaaggcctacgtcgccgataaactcgccgccctccagcaggagctctacaaggacttcgtcacgaccgaccagctcgccaaggcggatgatgcccgcgcccttgccaccgagaacggcaagaccatggctgaaaaggcccacaagctgggcgttgagctcgtcgagtacatcacgaaggatgaagcgctccagccgagcgtgttcaccgatgtcaaggaaggcgcctactatgtggacgctgtgaactgggccgcggataagaaggtcacctccggtaagaccgagacgaccttcgcccccaacgactcctgcacccgcgcgcaggccgtcacgttcctgtggcgcgccgccggcagccccgagccgaccgcaagcgagatgaccttcaccgacgtgaaggcggacagctactacgataaggccgtcctgtgggccgtcgagaacaagatcacctccggcatgagcgacacgctgttcgcgcccgacgcgacctgctcgcgcagccagatcgtgacgttcctgtaccgcatgcagaacaatcctgagagcaaggcagagaatccgttcaccgatgtcaaggcggacgcctactacgcaaacgccgtcctgtgggccgtggaaaacggcgtgaccaccggtgcgagcgcgacgactttcgaccccgcgggcgactgcacgcgcggtcagatcgtcactctcctctatcgctgcctgagcaagtaagcgataaaagcaaacaggagagcccccgaagaaaaccttcgggggcctttttttgcggaacgggtgggagaaatatcaacagaagttgatgttgcgttgagaaagagttcatctgcttgcggtaaaaatataaaatctgatgttgtaagttccggcggggatgcccgtagatgaggtttttatctttcaggaaggaagaaacgaacgatgcgagtgaagattatttccgacagcacgtgcgacctgtcgcccgcgctgctcgagcgctatgatattgccgtcacgccgctgtgcgtcatcaaggacggcaaggacttccacgatggtgtggacattacgcccgccgacatttttgcccacgtggacggcggcggagacctttgcagcacgtcggcggtcagccagtacgagtacggcgagatgttcgcgcgctacgcgaacgagtatgacgcggtggtgcagatcaccatcggcgcgaatttctcctgctgctatcagaatgcctgcgccgcggcgcaggagtacgagaacgtctttgtggtcgattcggagaatctgagcaccggccagggccttctggtcgtcgcggcggcgaagctcgccgagcagggcctttccggcgcggagatcgccgagcgcgtgcgcgcgctcgcgccgaaggtcgaggcgagctttttgatcgagcgcctcgactacatgcgaaagggcggccgctgctcggctgtggccgcgctgggcgcgaatcttctgcacctgaagccctgcatcgaggtgcgaaacggcaagatggccgtgtgcaagaagtaccgcggctcgtttgaaaagtgcatccgccagtatgtaaaagagcgccttgacgggcgcgaggacatcgcgccggagctcgcgttcatcactcacgcggcggcggacgcgaacgtcgtggccgcggcgaaggaggaagcggcacagtacggatcgtttgagaccgtcgaagagacgcaggcgggctgcaccgtctcgtgccactgcggcccgaacacgctcggcatcctgtttgtgagaaagtaaaggagaaaccaccgtatggctcgccatacggtggttctttttcagcattttgcgctttttcgccaaaagatgaccgcgagcgcggtgcagaccgcgatggcggcggcgtaggggatgacgagcagaaacgcggtgctcgccggtgcgctgtaagaagcatagcggatgccccagagcatgtcgcagtagttgaatgcgacggtggcgcacatcacatcggagagcaggatcgccagcgcggcgaaggtacaggacagagctttcatggagagacctccttatttgtgtttggtgcttttgagcagcagcgccgcgcccgcggcgatggccgcgacgcagagcagcagaaaaatgccactgccgtcgatgcggatcatcgacgatccgctgatctgcgcgggaacggacgggacaaggatcgacaaaacgccatagacgatcagcgcggccgcgccgccgaagcagagaatgaggctcaaaagccgcatcgtccggtgctcctcctgcgcttcggcgggcgcggcattcggcgcaccgtcttttagaaggtagtcgagcgagacgccgaagtaattgctcagcgcgaggagcttgtcgctctcaggcatcgcgctgccgccctcccatttagagatggcctgacgcgagacgttcagcgcctccgcgagctgctcctgcgaaagaccgctctttttgcgcagtgtgtagagtttttcaggtagtgccatggttcctcctttcgcaaaaagcatagcgttagtgtgcgcaaaatgccatgtattgcagtagacaattgcgcaaccgtgggtagcaatgaagactttttgcggaaaacagtcctgattttgcccattttaccatgcggagggggaaagcgccagcggagagcaaaaaaatcgcccgaactggaatttgttcgggcaattttggttcagttctgttcctcggagggggcgttcttcttttcaagctccgcgcgcagcatgcggttttcagcctgcagggcgtcaagcttgtcgttcagcggggcgagctgctttttgagctcgcgcgcgacgatgccctgatagaatttgtaccggctcgctgtgccggctgcggcgcacacgacagtcacgccgccggcgatgaggccggcctttttccagtcgaccttgcggacgacttgcagcacggcgcgctggtcgagctttttgccgcgcagcggcgcgggcgcagcgctctccgcgcgcacggggagaatgtggatggtttcgagcattttcatcggatcgtcctccttgatccatgttatttttcgactctaaaggtatcatgccgcatgcggaatgtcaaccgcggggatgcgttgcaatggatagaaaaacgtgctatgatgaccgaagatttttgattcgaaaggaagcgaggggagcgatgctcccgcgttgacatgatcgcgattctgcttgcgccggtgtacctgctggcgaattactatttactgcgccgcgtgatgggctgggtgaaagcctggttcccttttttccgcacagcgcgccactgggcgctgcccgtggctgtgcaggcgtttctggcctgctccatcgtcatcgcgtttttcctgccggaggggcgggcgcggcgcgtgatgaagctcatcggcaactactggctcggcgtactgctgtatgtgctgctcgcggtcatcgcggcggacctgctgcggctgctgctggggtacgtgttgccgttcaagcacattttcgtcacgacacagatgcaccgcatcgcgggctgtgtgtgcgcgctggtcattttgatcgcatccatctggggcgtcgtcaacgcgcgcatcatccacgtgacgccgtatgacgtgacggtcgataagactgttgagggcatggacgagatgaaggttgtgctcgtggccgacctgcaccttggctacaacatcggcgaaaagcagatgcagcagatggtagacaggatcaacgaacaggacgccgacctcgtcgtcatcgcgggagacatcttcgataacgagtgggaggcggtggaagcccctgagaccatcgctgccacgctgcgcagcatccggtcgaaatacggcgtttacgcctgctacggcaaccacgacatcgaagagccggtgctcgcaggcttcaccttccgccagagcgagaagaaggagagcgacccgcgcatggacgaattcttgaaggacgcgaacatcacgctcctgcgtgacgagggcatgctcatcgacggaaagttctacctttatggccgccccgacgcgcaccgcccgggccgcggcatcgagacgcgcaagacgcccgatgagatcacggcaggtctggacaaggataagcccatcatcgtcctcgaccaccagcccaaggagctacaggagctcgcggatgcgggcgtcgacatagacctctgcggccacacgcacgatggacagatgttcccgggaaatctcaccatcaagctgatgtgggaaaatgcctgcgggtatcttcaaaagggaaagatgcacaacatcgtcacctccggcgtcggcctgttcggacccaacatgcgcgtggggacaaaagcagagatttgtcctattaccatctattttgcataaatgcaaagcactttgcggcacttgtgccgcggggatcgcagcgccgaaggcgctgcacgagtcaaaggggccattctctttcacgaaagagaatggcccctttggaaccccaagagaaaggcttagattggcagtcttgggcttgaatgaccttggcacctccggaatgagaatgcctgcacgcggcggagccgcattagaactgctatacgatttggtctacttctattatccgctgccgctctcgaatcttgtttcggtgcggtgtaatcacctgctatcgaaagtgcgcatatcgcggcaagccccaacaatgctgccttggcaggcagaagcaaatctgcacaaatccaaagtagacggagattgcgtaagggtagcgaattgcaggcaaagcgacagcgaagatagaagatagtcaagtcgtttagatacactgcttggtaggcacccgattcggcaagcattgcagctcttcgagctgctcgcttgcaatggggaacgcctttcttttggacgggcgacgcccgttttctttctcgggaaagaaaatgggggtcgcatcacgcggcatgtatgccgcagagcacttcgcacctgtgcgaaaaagaagagccgtctctcgagagacagctcttttcttttttacagcttgcggaagcgctccgcaatgaccgccgccgcgtcagcggtcgacagcgcaccggtgtcaaggtaaagatcatacccctccggcgcgccccaggccttgtgggtgtagctctcgtaatacttgcggcgctgcttgtccatcttgcggatcaggcggatggcttggtcgcgcgtgagcttttcctgcgccattttgcgctggatgcggtgctcgtccggcgcggcgacgaatacggtgagaagcctcacgtcctcgccgcgcagcacgtagtctgcgcagcgccccacgaacacacactcctcgtggcgggcgatgcggcggatctcgtggctttgcagggcgaagagcacttcgctcgtcggtttgccgcgcagcacatggtggttgccctcgtgcacggtctggaagaggtaggggttggtcgccttttcgtccgagggggagagcgttttttccgaaagctcgccgtactcgcacgcgaggcggatcagctcgcgctcatagacgcggatgccgaggagatccgctgttttcacggccacttcgtggccgccgctgccgaactggcggctgatgctgatgatgcgatttcccatagtatgaatctccctccgcttttctattgtttcagcgcgttgagcgccggctggggaatcgagaatgcacgatccgccggcgtgatgacggcggagagcgacaccggagcgtcggagaggatgaggtgcagcgcgccgctgcacgagatgttgacggactggagctcgccctgctcgctcacgcggacggaaatgcgtccggaggagaaggtcacatcctgtgccttgatatccggcgcgatggcggcggcgagctcgctcatcgcgtcggagtcgagcgaaagaccgtagagatagccgtcgctcaccttatcgcagcctgcgctgccgttcagaatggactggtagcagaggtcaatgagcgacgtggcatcgacgagctgctggctcgcggtgtcgatactgttgccgtccgcgtcgcagatcttgctgccggagaagtagacggcgagggcgtttttttggatgctgccgtagctctgaccgtcgatgctgctgcggtcatactggagcgtgctgttcagcacgatcgggccgcagtcggcggaaagagcaatgtcggcggacagatcgtccgcggtcagctcgccccaggcacccagcagacggagcgcgttgtccgtcagcgtggaagcgtcgtcattgctgcccgaatggatggcggtgagcacatcgtcgggaattaccggcgcgagcgcgtcggtgaagtgcgcggcggcctccacgcgaagatctccggagttttccgccgtgaagcttacgtccatcagctcgccgctctcggcggtgagatccacgcggatcgcggaaagcgatgcggcgttcgcgatctcgtccgaggtgagaagacgcagcagtgtgctcgcgtcgtctccctcggcggtgagggtgtagcgcttttcctgcccgtcaacggatttcgtcaccgtgagcgtgcggcagagctcggcggtctcatccatgagctcggcgtaatttgggaatgcgccgccgacagcgtaggacttgccgttttcaaggtagatcgcgccgtctgcgtagtagagcgccgtgccgtcgcggtcgatgcaggtgatgggagcgccgtccttcttcgtgcgggcgacggaggcatccgcgctcaggctgattttgccataggaggcgtcgaccgtgacgtccatggtcatcgggtcctctttgacacgcgcctcgacaaggcggtaggcttcgaggtccttcttaaagtcggagtggaggaagaacgccgcagccgcgccgagcaagactaaaatcgtgatgagaatagggaggaagcggcggtgcctgcgctttttcggcgcgggcggtactgcgggctgcgtgagcacgttttcgcgtgcctcgcgctcctcgcgaagaagccgaagttcctcttccgcgcgcgcaaggcgcgcctcgatggagtcgggatcggctgcgggagcgggttcggaagtgggaacgctttctgcgccctcgaccgcggcggtgacgaccggcgcagcggtcgctgctgctgccacggcggcggggactgccgtagattcagcggacacaggcgcatccgcctgagtggcatcttcgaccgctgcagacgcgggggcacccgtcttggcaggggcttcgtctgctgtggacgcattggcgtcctcgccgcggacgatctgctcggcctgcgagacggcgctcgcgctgcgcgccagcgcttcggcgcgtctgcgcgctttgcgcttgtggcggtggacgagcagaaccatgataaggatcagaacagccagcacggcgagcacgccgagccagatgccccagacgtcgagcgtccgcacggcggcaaactcaacgctgtcgccgctcgtggagaaggtgaggtagctgcccatcgtgccgcagtcggcctcctgccagctgccgccgtcttcacgggtgtagatgcgcagctccttctgcccgttgggcgggagatagcgcatggtgtgcgtgtcctgcccgtcgtcggcaagctcgatgcgccactgctcgagcacttcggcgttggcaaccatcgaaggcatttcgccgcggctgaggcaggagaagtagcccttcacgcggtcgagcacagtgccggactgcacgtcgaacgccgcgggcgtgagcggctgggcggtcacggtgatggcgtcgccgtcgttgtagttgccctcgaccaagatgacagcctgtccgctctctcgcgtctgttcagaggcaaggccgggggtgtaggcctcgtaaacagcggtgacgacggtgtcaaagtgcagattcgtgaggtcggtgcggtcccagtggacgtgacagccgctcttggcgggcggctcggggatgtcgctttcgtcgatggagtcgccgtagttgaaagcgcggctaagcaccgtcttgtcgtcggcgacgaaggtgagcgtgaagaacttcatgctctcggggagatcgggcagcgtgagaagctctgcatagctgatgggctcggcccgtccggcgtagccctgacggttgatgccggggagatcgtcggagacatagtagttatgctcaaatgtgcccgtgtcgctgccggagatcgcaccctggtactgctgacagtcggtgatatcgacgagcgagtagttccagctcacggtactgccgcttccgtcgacattttcctgtacgccggagccgacgatgccgccgacatacttcttgccgctgagcgtgcacttggaaaagctgccgtgcaccgttgcgccggtgagaccggcgatgccgccggtatagctgccgttttcgttcgtgatagagcaggaggacgtttcgcatgcggtcagatagccgaggtccatgcggccgacaatgccgccgacatagctgcgcttgccggccacatcgccggtgttgacgcacttctggatgatggagcggtactcatactgcttgcggtagatgttcgaaagatggcccgtgacatcgtcctcggggtcgagcgtgtattcaatggtcatggagcctgtgatgccgccggtattcacatcgccgtacaccgcgccgctgttgcggcaggaagagactttaccaaacgtgacggaatcgatgtcgacatcggaggtgtcgacaatgatatcgcccgtgccgccgctgagcgaggaaatggcggaaaacagcgttcctgtcagctcgttgaacttgttgttgatcgaacgaatatcatttgccaatgtgccgaccgtgccgctggcggcgttgttgagcatcgtgacctgactgctcaggccgttgatcgacgaggtcagcccgccaagatccggtgcagcgacaatctgagtcgagccggtgacggtgcccgaggcattgccctcgtggctcgcgcccgcgcctgcggcactgccgccccagatggtggtgctgtgaccgctgtcggaatgctcgtggtcgatgccgccggctgcgcccttgccgccgccgatcagagtgtcggaggaatgggagccgtcgccggtgatgacgctgtcaatactggcgttcagccggacgttgttcagctcgttggcggcgttatccacatagccggacatgctgttcaggcgcgaggcaatctcattcgagccgccttcggcatggttggttgctgtgttgacaagaccgctgagctcgttgagttgtgttttgagctgctgcagcagaccgtcggagatctccatgcggatatagggctccatttggccggcgatgccgccgacgtcctttcgcccacagatcgcgccttcattgctgcacgcgagcacttgtccgctgctgcggccgaccacgccgccaatattgtagccgatgtgctgataaccgacggcagcgtagtttgtgctcgacgcgatcgcgccggaggaatagcctgcaataccgccggtgtcggtggcggtgttgagcgtgtcggcgcgggagagcttggcgaggtcgagcgagaattcgaggttcaaattgctcaggtcgatggaggggtcggtgctctcgatgtttacataggcgcggctgcggcaggagacgatggaaccgaggttctcgcccacgatgccgccggtcatgctctggccgaagatcgcgcccgaggcgtcgcacgcgcgcacgatgcccgtggcgaggttgcggcccacgatgccgccgacgctgcgtttgccggaaacacttccgttgaatgtgcagctttcgatcgtgccgtggttttcacccacgatgccgccgatattttcgctgtcgccggacggggtgaccgtgccctcaacattcaggcttttgatgacggcgtccttttgcagcacgccgaaaagaccggcgggggagacgctctgcgtgatggaaaggccgctgatggtgtggccgttgccgttgaacgtgccgccgaacgtcgggatggggagctcgtcatcgtcggtcagctcgatatcgttgtcaagcacaacggttttaccgcgcgaccaggagtcgagcgtgcaggaatgcgcgagggatcgtaagtcttctgcgctcttgatatggatggcgccgtccccgtctgccaagacctgcgtgacagggagaagcgagatgagcagcaggcacgagagtgcaagcgcgcagaagcgatagaaatgattagtcttcttcatcgtcttgctcctcatttgcagatccggagatcagattcaggtcgatgtcgccctcgaccgtggcgtgcatgatgccatgcaccgtaccattgatgctgccgcgcaccatgccgttgacggagaccttaccgtgacccgatttcttttccgtgatggacgggacggagaacgaggtcttgtcgacgatgccgctgccgatgagcaagatctgcggcagggcgaacatgaccatgatgatggagatgaccgtgccgcggccaaggctctcgccgatgcccgcgatgacgggctcagatgtcatgctgccgatcaaaaagccgcagatcgagaggatcgagccggaggtgatgatcgtcgggaaggcaaagttcagcgtctcgacgatggcgtcgcggtggtgcattttggatttgagctcctgatagcggctggcgatgacgatggcgtagtcgatattcgcgcccatctggatggaagaaacaattagatatcctaagaagaagatgtacttgcccgtgatggtcgggaacgagaagttgagccagatgcagccctgaatcacgaggatcagcagcaccggcataccggcggagttgaacgtgaagagcagcaccagcataaccacgagcactgacacgatgctgacgaccttgttatccacggcgaaggacttttcgaattcgtattcgttcgtcgattcgcccgcgaggtagacgttttcatcggggtaatacttttcggcaatttcgagaattttgtcggtgaaggcgtaggtctcgtcgctgctttcgggcagcgtgaggtagatgagcatgcggtcgtaatccgtaccttgaagctgggccttggcgctgttcatctggacctcggcatcctggagcatctgcgtctggtcgtcactgagcgtcacgatgccggaatccacctgatcgcagacaaagagaaacatgtcgatgagcgggactttgtaggtggcgagattgcccgcaagcttgccatattctgaatgctgcgcggcgtaggcggcgtaaacgacctgcgcggcctcgtaatcgagacccgcgagctcggcgaactggcgcggcgtcagcttgtcggccagcatgtagccgtcgagcgcttcgatgttggtaagacccatcgtggagtcgacctcgtcgtactggccgagctcgtccaaaatggcggactccttgtcgtagtcgcccgtggggacgatgagcgccagcatgttcttcgaggtgaagttatcctcgatcatctgctgggcaaactgcgtctcattctgcttgggggcggagatgaggccatagccgtaggcgtaggggcagtcggacgacaggcggtagccgatgacggccagcaccacgaagacgatggggatgatgtagcgcgtggcatagtcgagcttgccgacgaacgggatcttcggcacgaagctgcggtgctgcgtgcggtcgatcagcgggccgaaaagcatcagaaggcctggcatcacgatgaacgccgcgagcagcgcgaacaaaatcgacttgatgaggcaaagcgccatatcgggaccgagcttgaaccgcatgaagagcatcgcgacaaggccgccgatggtcgtgaggctgctcgcaccgatctcggggatcgacttgctcagcgagacgatgacggcctcacgcagcggcagcagccggtgctcctctttaaatcggttgcagaagatgatggcatagtcgatggacagcgccaactgcaagatgcttgtgaccgagtttgaaatgaacgagattttgcccatcaggaagtttgtgccctgattcagtacgagcgcgaccacgaacgtcagaatgagcaccggcacctcgccgtaggtctcggacgtgaagagcagcacgatgacaatgacgatggcgacatacaccatgatgacgctgatctcgtggtcgatggtctcctgctgcgtgttgccaaggtccgtgtcgacatacagatcgtagtcggacaggtattccttcacggcttcgagcgagtcgagacaggcctcgtcatcctcactgtaggcaaaggtgatggaatagagggcggagaggttattataatgtgcggtggtctcgtcgtagtccacgctctgcacgcccttgatctccttgatcttgggctcgagcgcggcggcctgctctggtgtgatgttggccaccatgacctcggccgtgccataggtcgtgaactgctcgtccatgatgtcgagcgcctgcttcgtctcggaatcagacggcaggtagtacgtcaggtcgctctcgacctcgacccagttgcgggaaaaggcggagaatacgagcagaatgatcgtgagcagaaagatgagatttcgcttgtcgacaatgaccgtcgacagcttttccataaagctggagccggtctccttggtttcgttactcatggcggttcgcattgcctcctttctcgtgggtgggtcttcgcttcttcatgcgctcaaggccgcttttgatcggcggctcgggcggggcgagctgcaccacgtcgccgagcgaacagtcgagctggcggcagatgcgcacaagcacctcgagcgagacgagctcatttttcgagagcttggcgagcgtgttggagctgatgccgacctcgcgcgcaaattccgttttatttaagcccttgtcgatgaggagcttaaaaaggttgctgtaggtaacatacatggtggtacctcctgttcaatcgtcaacattatatgaaaatatccggaagaagcaagatttaatttgcaaaagcagatattttttaaacaaatctggcgaagtgacaaaaacaggccagtacagatgaacaatgcgcagccccttttgaagcggggatttgttgatcgagtgaaggagaagatgaaaaagggcaaggaagcaccggagagcggtaaaaagacatcttgacttttgcactgtcagttactatgttttagttagagatgactaactgacgcaaaacgaaagaaaatcggaacgagagcatagcgagacgaggcagaacgaaggaaacaggtatttttagaataagaggagacttggctatgaaaattttagtattcggcgcgggcgtgcttggctgcaatctggcgcggaatttcttccgcgcgggaaaggacgtcacgctgctggcgcggggagcatggggcgagagcatccaaaaaaaacggccttcggatcaaggataagttttcgccccgcatgtcggtcagccgcattccggtcacggcggagctgaaagcggaggacaagtacgacgtgatcttcgtcgtcctgcgctatacacagctcgacgcgatcctcgataccctgcggacgaatccgacaaagaatatcgtctttgtgggaaacgacatgcgcgcaagtgcgctgagcgcttcgctgccggagaaaaacgtgatgtttgcctttgtgtcctcggcaggccatcgggagcggaagtatgtggcgtccgtcgacctcaaaaagctcaagggcaacacggcctatttaagccgactgatcgacactaatatcgagggctaccgcgcgatcaaaaacgcgggacatgaaattttgccgaaggacaacgtggagtttgaaggcgcggcgtaccacaagacctgtctgcgcttttttaagctcatgtccgccacgagcctcggaaagatcggcgcgtccgaccacgcgatgaacgcggtcgacgaaatgagcgcgctgaaccgcgatttgaaggccttcttcgatgaaaacggcgcgaaatatcccgtgtggcaggagcttgagcaggaagtcgcaaaatacctgaagtgaacaaaggggaagcgcccgtcatttggcgagcgctcttttttgcccgctcacggaaaaatcagactccggcgaggcgtcggtgaatttttcgacagatattgccaaagcggatgatccatgactgatactgagagcgcccggacaaaaaatgtttgggcactcttactgtatgaatatattgtaattttcccatgataaagaagtaaatattgtaaaggaaacttgacaagatgggcgtgtcatgctacagtaagtttgtaaaggaaacttgtcatgcaaggaggcgtttttttgaagaataaagttgagcagttacgaaaggagcgaggattaaatcaagatgattttgcaaaaatgcttcgtgtttcaagacaaaccattagttcaatcgaaacaggaaagtataatccatcattggaattagcttttgcaatttcagacttttttgg

SEQ ID NO: 10253 - DNA, 6012 bp, Unknown
  gut microbiota DNA sequence
gcttgcttccttaccgtacatgagcattggcgcagggaatgtcccctgtgagaagcgatgccgcgttcatcgttttgccttattttgccgcgtgcttataaagtgaacggctttttgccgctgacgaggtccttccacagcggggacatgccgcgtaagtattccacgacctcgggcacggcatcgaggatacggtcgatttcctcgtcggtgttccactcgcacagactcaggcgcagcgagccgtgcgccacgtcatgcgggcggccgatggccagcagcacatggcttgggtcgagcgagccggatgtgcacgcgctgccggacgacgcgcagatgccctttgcgtcgagaagaagcagcaggcttttgccctcgacgccctcgacgcagaagcttacgttgccgggcaggcgattcacgggatcgccgttgagcgcgctgtgcgggatcttggacaggccatcgatcagacggtcgcgcagagcgctgacccttttcgcgttctcgtcgaggtgcgcgcaggcgtcttcgagcgccgcagccatgcccatgatggcggggatgttctccgtacccgcgcgcttgccgcgctcctgcgcgccgccctcgatgaggttcgtcaggaagacgccctgacgggcgtacagcacgccggtgcccttcggcccgtggaacttgtgcgcggagagtgacagcaggtcgatgttctgcgccttgacgtcaatgggcaggtgaccggcggcctgcacggcgtcggtgtggaacagcacgcccgccgcgcggcagactgcgccgatctcgctgatcggcaggatggagccgatctcgttgttggcgtacatgacggaaaccaggcacgtatcctcgcggatggcgcgcttgacctgctgcgccgtcacggtaccgatggggccgacggggagcagctcgacggtgaagccctctttttcaagctttttcagcgtgtgcagcacggcgtggtgctcgaacgcggtcgaaatgatgagctttttgcctttgcgttcgccgaggcgcgcggcggagaggatggcctgattgtcggcctcgctgccgccggaggtgaagtaaatttcgcgcggggaagcgttcaggcattttgcgatgcggtcgcgcgcgctgagcagcgccccggccgcctgctggccgacggaatgcaggcttgaggggttgccatagatcgtctccagataggggagcatggcgtcgatcgcggcacggctcatttgggtcgtcgcggcgttgtccgcgtaaatagtggccattgagataaatcctatcttataagtatgttgatatgatacacaggaacgctcgctttgtcaatggattttgagatcgcgaggggagtgcaaaaaaggaagaaccgctcttgcgagcggttcttccttttacaatagggggtggagggattttggcttacttttccagctgcgtccagtcgcgggtctcgcgcagctcgatccacttttcatacttggagttcgtcttgaacttgtagtagtggctgttcgtcgcttcctgaacggcgaggtaataccaggccttcgggttcgcgttgcccgtccagaccgtcatgttcgggaggagatcgtcctcggtctcgggctggcggttgaggacgcggttgacgagcgtcatggtctcggcacgggtgatgtcgcgctggggaccaaacgtgccgtcggggtagcccgtgatgatgcccatggagctgagggtcgagaccgcggtgttgtaccaggaggtagcggccacatcggagtagcggttggtcttggtcaggttcttgtcgcggacgtcgtcggtcagcagacggaagaagatggtcgcgacctcggcgcgggtgatgttgttctgcgggcggaccttaccgttgccgtaaccgacgatatagacgaagtgatccgtcgtgttcagaccgagcgtatcatcggggatcacgacggtgggcggcgtgtaggggcgcggggtgtagttgcgcgtccacttggcgtagagggtgatgttcccggtcacgagagcagcaaagtcgtacttgttggtgagcttctcctcggtgtaccagccagcgaaggtgtagccgctcttggtgggatcggcgggcttgttagccgtttcgttgtacttaacggtctgagaaggaaccgtgctgccgccgttggactcgtaggtgacggtgtaatctttggcagtgaaggtaacatcgaccgtgacatcgctatcgggcatgctgccggagacagtaagcttgtcagcggtgtagccggtgatcagggggctggcaacgctgtaggagctgccatacgtgagggactcggtgtgagtcggcttagcctcagtaccatcggcgtatttgtagttgatggtcagattgtacttctgcaatgtggctttaccggcggggatggggaagtcgatggtgacatcctcgtcattgctacccttgaccgtcagggtcgtgggaccgttgagggggtagtagccatcgtactgctcggcatcgactgccgtggggtcgatcttgacggtgtaggtcttggtgtaggtgtaagtggtaacgccgccctcgcccggctcgccggtagcaccggtcaaattccagtttccttcgaaatcaccgctgatgcaggtcacgccgtcaggcagcgagtcgtggaccgtgccgctggaaagaccggaggtgatgcttgagaagatcgcgtcgaaagcgtccttcaacccggagaagtcattagcagagtaggtcttgttgagggcgatataggtgttcagatattcgaagcgactgatatatgcacctgtgttaggattcttcacttcctcgttggcagcaccaaagcagatggagtagagcgtagttccacgattgcaaatagatgcagctgtattcgcggttgcctcgaagacctccttagtacatgagttgccgaaacctccaacggtggggttgccaaaaatatccttcgtcatatggtacgtcggctcaccgtcggtcaaagcgataatgttcttggagtcaatctcctgaacattagattttgcaaataacaggtttgcgttttgcagaccgtcatccagattggtgccgccgtcgggtttcaggtcgttgatggcggtcagaatagcggtatgacccgcctcggtggaaacatcctgccagcccgcgtctgctgctgttgcgtttgtattgaaatcgaccagcgcaacatagcggccggtgccgccgacctcgtcggccagcacgttcagcggcagcatcgacagggccatgatgagcatcaggacccacgaaagcagccgctttcctgttttcttcccatacataaaaaatcctccttcttctgcctgtacggcgcgaagaagggggagacgatctgcatttggcaaccggctgccgtgcggcgcgagcgccgtttagatccgtggctttgcgacacaggctttcacctgctgttcctttttctgtacagttgctcttctgcgagccgcacagatatttgcgtttgccaatattttatgttcacagtataccagatttgcccaaaacgcaaggcgattttcaaaaatatataagatattaacagaacgaataccgcgcagaaaagacggcggcagagaatatctgccgccgtctttcgacgaattgtgagggtttacgccaccgcggacacggcgagcgtgtcgctctgctgggagtaggtcaggggggagacgcagccggcgaaggtggtctcgttgatgacgcgcttggtgacggcataggtcatgtcgatctggtaccagttgccgctgacattgaccttgttccaggcgtggtagctgctgccggcgcagcccttggtgagggtgcaggggatgtcctggctgcggcacatggcggcgaagaggaacgcgaggtcgtagcagatgcccttgttgctgttcagggtggcagcggtgtcggggatgtacttgctgaccttgccggaggtgatgtcgttagcgagcttggtgtcgtagttgtagtgaccggcgatgtagttgtagatcgcggtgaccttgtccatgtcggtcttggcgtccttgcagagctcagcggccttcttgcacacatcgtcgccggaggtgaactgcacgtcggtcgtggcgatgaggtaagggacgctggcgttcacaaccgtgaacatggacatgacaagaagcactgcgagcatagcgcaggcatgacgaaacagccgtttcatacggcgatctcccttcggtaactggctgccagccctgttcccaggggtaaggccctatagctttgcgtcgccggttttcaccgggtttgctattatcgtttgagatgcggtcgaagcggctgcacctactcttttttacagctcacactatatacgcgttcttaacgtttgccaacagagaatttgaccttttttcgacaaaaaagcagacaaaaaggagcgcggaaaccgcgctccttttgatgtttttgcaattttcgggcaaaatcacacgctgagccagtcatcgaggataagaccctcgttgtgcttggtgagaaagcccacgctccactcgccgccgaaggcgatgagcttgcggcccttgaagtcctcgagcacgcgggagcccgagcagagcatcaggtccttcacgtcgcacgggcactcgcggatcaggcgcaggtgctcataggggaggccgctcatgcgcaggtcgacgccgtactcgtttttcatgcggtattcgaacacgtcgaactgcagcgtgccgaccacgccgacgaccacgtcctcaaagccgctgtcggggattttgaagatctggatggcgccctcctgcgcgatctgctccacgcccttgacgaactgcttgcgcttcatcgtgtccttgggtgagacgagcatgaagtgctcgggctcgaacgtcgggatgccggagaagcggaactttttgccgggcatcgtgatcgtgtcgccgatcgagaagataccgggatcaaacacgccgatgatgtcgcccgcgtaggcctcgtcgacgatctcgcgctcggcggccatcatcgtttgcggctgggaaaggcgcatcttgcgccccgactggacgtggaaatactccgtgtcgcgctcaaacctgcccgagcagatgcgcatgaacgccagacgatcgcggtgggccttgttcatgttggcctgaattttgaaaacaaaggcggagaactcgggggagtagacgtccacctcgcccgcgtcgcttacgcgcggcagcggcggcgtggtcatctctaaaaacgcgttcaaaaacggctcgacgccgaagttcgtgagcgcgctgccgaagaacacgggggagagcttgccgcagcgcacggcgtccaggtcaaagtcgcggcccgcgccgagcagctccacctcgtcggcgagcgtgtcgcggcgggtctgaccgatcaggtcgacaagcgcgggatcgtcgagctcgatttccgtgatgcccgcctttttggcgtgacccgcatcggtgaagtgcaggatgcagcgcttatcgcggtcgtacacgccggcaaactccttgccgcagccgatcggccagttgacgggataggtgtcgatgccgagctcgcgctcgacctcctcgcagagctcgagcgggtcgcgcgtctcgcggtccatcttattgataaaggtaaagatggggatgttgcgcagagcacagaccttgaagagcttgcgcgtctgcggctcgacgccctttgcgccgtcaatgaccatgacggcgctgtccgcggccatcagtgtgcggtacgtgtcctcggagaagtcctgatgtcccggcgtgtcgaggatgttgatgcagtagccgccgtgctggaactgcatgactgacgacgtgacggaaatgccgcgctgcttttcgatttccatccagtcggacttcgccgcgcgctcgcgcttgcccttgacctcgcccgcctgggcgatcgccccgccgtaaagcaggaacttttcc

SEQ ID NO: 10254 - DNA, 1164 bp, Unknown
  gut microbiota DNA sequence
cagaattccagcggtcgaatggggcatccagttggcaaaataagagatagggaacataatcacgcaagcaattgcgaagtaaatcccgctttgctttgcaagactccacgaatcgatctcccaaataaccgaagccattgcaaagcctgtgcccattattccgctcagaccggtttgaatgagaaccgcatttagttcgctccctattttattcacaagctccggagtgaccggatagaagaagccatccccaatgcagattgagataattaccgtaatgacatatccgattgcaatgccaacagggaaaccaattacacctcgtccaatcagttttttcttcatttctgccacctcacattcctaacagttgtttgattttggcgacggatcgccgtgaaacataagtaaccgtaccgcttgaaagcgtgatgcaaattgtcccgacaaagctcaaatcaaagctcttgacctttctcagattgataatatccgagtttgatattcggacaaaagtcttgctgtcaagccgttgttccgcctcgtatagcctcaggcggagcgcatactcgccgtgatttgtctcggcaaacaccttacctgattcagcaaaaacacggtagatttcagacggttccagaacctcgaccacatcctccctaaatccggcaatgacctgcggttgctcatctgacaatctttttatgattgcattgacttcatcggtcattttgtccgtcatcacgatgatttttggctctttgcatttttcgtctatcttgatttcaatttgcatcggttcacctcctcgcttcggttacagtataggaaaatcaagaaccgatttctaccgattctcgataggtggttgttttaggaacataggtggtaatttttacgggaatctcataccggtctgtatgggcggctgataagtatctgcggtatggggatgctcccataccgcagacggatcatccttccggctcatttttgcgctttgtacttctctgaaccggaatggagagcagctctcttgtgcgctctccaagctgcttttcaatggctgtcagccgctgctccggcaaattgagggacggatgacgggtgaacttgaagtccaccattcgccgcagctgcgctttctgctttgcacccattacc

SEQ ID NO: 10255 - DNA, 1388 bp, Unknown
  gut microbiota DNA sequence
gaatttttctggaaggagatgacgcccgatgaccaatgaaaaaatggagcagagactggctgcggcgcttgaaaagaccgcgccggacgatgtgagcggcgttctctcccgctgtgaagagcggaaaggaacggtaattcccatgacaacaaagaaaatggcaaatagaaaatggacatcgctcattgccgcctgccttgctgtaatgctgcttggcggcggaggcgtgttctaccagcgagcgaacgcggtggcgtccgtggtgtcgctggatgtgaaccccagcattgaactgaaggtgaatcgaagcgaaaaggtccttgtctgcacgccgctcaacgaggacgcgaaagctatccttgcggatatgggcaacggcgcggatctcaagggcgcgaagctggatgtggcggtgaatgctatcgtgggcagccttgtgcgaaacggctacctcaatagcatttcctccgccatcatgatctcggtggaggacaaggataccgctcgcgcggaaaaactccagcgtgagctgagcaacaccgtggacggtgttttgcagacaagcgaatcgagggcgtccgtcctgacgcagacgcttacgcaggacgcgggacttacgcagcaggcacgggaaaacaacatttcgaccggaaaggcggcgctggtgaaccacgtgctcgcactcaactccgcactcaagtttgacgcactggcaaagctctcggtcgaagagttcaaggacctcgccgaagcgggtgcgcctgccatgccgatcggtatggatgcagcccgtaccgctgcggaggagtatgccggaacaacggcggtggattccgttacagcggaggtcgatcccgaactcgacgaatcccctgcacactacgaagtagagctgcaaacggcatggggcgagttcgagtatctagtggatgcctacacagggaaggtgctcagcgggcagaaagatttattggctgccgtttccgcatcgaatgaaacgacgaagccctctggtcaaaagcccgcgccgtccggaacggtgcaggatatcggctacgccaaggcaaagtccattgccctgaaccatgcgggtgtgagtgaaaatcaggtgtatgacatggacattgagctggatgatgaggacggaaagctcgtctacgaggtcgagttcaaatccggcaatatggaatatgactacgagatcgatgcggcctccggtgcgatcctcaagcatgaaacggagttggatgactgagagaaaaggctgtgctataaatgaagcctgcggtgcggcttcgcaacagcgggttgcttgtcataccgacaactttggggtatgatgaccgcaaggtgatgatcgtatggatatggaattactttcccattgc

SEQ ID NO: 10256 - DNA, 229 bp, Unknown
  gut microbiota DNA sequence
gacagaaagataagcgcaatgagcgaaagaacatgcacctttagctcagctggtagagcacctgactcttaatcagggtgtccagggttcgagtccctgaaggtgtaccatcccgctggatgggagcaccatccagtggggaccccacgacgcaaggcatggcccgttggtcaagtggttaagacagcggcctctcacgccgttaacatcggttcgaatccggtacggg

SEQ ID NO: 10257 - DNA, 3266 bp, Unknown
  gut microbiota DNA sequence
ctgttagaattgacgcttactaaaatactaacattttacaactaaagctgtacatattaagttaagcggttgccgttctagtatttgatggggttatgatattacctcgtctggagatttataatacgcagagtgatttttgataggtaaaaatagcggagggaaattcttgcaatttccctccgctatttttatttcaatgcctgctccatatctcagtaaaaaaaattctaagttttccattaaactttgccaaaaccgcaccttccattcgggatagaagcgaaaggggaagaaagccgacctctcggtgcatgagaggaggtgaacaactcttggagctgacaccatcccaaaagaaaaccgttagacatcagttcgacagcttttgcaggaaggttctgcgtgaagaagcccgcgattacgagcgtcatatcgcgtggcgttccgaccatgaggtatccctttcggagctgtcagaggagcaggagcgccaaatgtatgtgctggacgagtatccgtccgagcagacgcattttcgtgtgcagggctatgatgtggcaatcgaaaacgaagttctcgccaatgccctgacggtgctgccggatgataagcgtgacattgttttgcttgcctttttccttgatatgaccgatcaggaaattgcggacaagctggacatggtacgccgcaccgtgcaatacaaacgcgctcagtcgctcaaggaattgaaaaaagaaatggaggttactgaagatggcgcgcaatctgagtaatgccgctgcatctctgctgccttactcgaccatcgaagcggcagcgtccggcaatgtggacgcgatcaatgctgtgctgaagcactatgagcgttatattgcggctctagcaaccagaaccctgtatgacgaaaacggtgttccgcacctttgcctcgatgaagaaaaggtatgcaggatgcgaaccaagctgattaccaagattcttgacttcaaggtaaacaaaacagcctaaaacccatagcagctcgtgcaggagcgtgtccccctttccacgcctctgcaacgggccattcgtgcatccgcgaggaaaggttcttatcacccgataggagcctttcccggctgatccacagccaaatatcacacgcgcccgaaagcgcggatctgctgtaccttgaaaatttcataggcaaccggataacgaacctgaacggagcaaagcccagcaaatggcgcgccatgatccgcacggaaaggaggatttgggcgagcgattcagccagtttgcatctgcgcatggcaccgtagtcggcaacgaccttcgttcagataatgatactcccgcgttgaacgccctcaaagcattgcgcggcgcacccatcagcatgggccggggtgagactcccgtgggcggctgccagccaccgtccggttttgccatcatttatagcgagataataacaacctataatttttactattttgggaggtatccccatgacagataaaatcggtttaacgattgaagaagccgcagactatacaggcattggcagaaacaccatgcggaagctcgtggaatgggagaagattcccgtattgcggattgggcgaagatacatcatccgcatagatgtcattcataagttcatggaagccaaccagggtgcagatcttctggtgcgggaacaggtccgtgcggtcagatgaaggacaggacagtgcggagctttttatttgccggttcatgtgaggtctgctataatagcagacaacacatcataacagctccgtttgccgctatgagaggagaagcactatggcaaaaggttctgtaagaaaaaagggaaagaagtggtactatcggttctatgtagaggatgccagcggcaacagcgttcagagggagtttcccggttctgagagcaagagcgaaacggaagccatgctccgcaaggccatggcggattatgaggaaaagcaattcgtagcaaaatccgaaaatctgacccttgcagggctgctggacaagtggattgaggaggaactgaagcccggttctctgagcaacggcacggtggccgcctacatcgacacagccagacgcatcaagaagcaccccatcgccgaccgtaagctgaagaagatctcaccggatcatctgcaaagttatctggacctgctgagccttggcggtgaatggccggacggcacggtaaggaaagcgctgagcagcggctccatgcggcaatactccgctgtgctgcaaggtgcgttccgcttcgcggtgttcccgaagcagtacctctccttcaatcccatgcagtatatcgtgtaccgcaagaggacggaggattatgacctgttttcggaggacggaacggatgaggatgttccaattatcccgacgatctcctacgaacagtttcttgaattgaatgagatgctgttcaaaaagaaaaaccccgcccttctgcctatccagatcgcgtactacaccggacttcgcattggcgaggcttgcagcctgacctggcaggacattgacctgaaggagcagcggctgacggtgagacgcagcatccgctacaactcggcgcggcacaggacggagattggcaccacgaagcgcaaaaagatccgctcagtggatttctgcaacacactggcggagattttgaaagaggcaaagaaaacgcagatgcttgaccgccttgcctgcgggccgctatacagccagaattactacctgagcattgaggaaaagaaccgcacctactatgaggtctacagcctgccggtttcagagcatcctccagagggctatcaggcgatcagccttgtctgtgtgcggcaggatggccggtatgagtctccggcaacggtttccaatgtgtgtcgggcagcaaagaaaagagtggacggtatggagagctttcatttccaccagcttcgtcacaccttcaccagcaatctgctgtcctacggcgcagcaccgaaggacgtgcaggagcttcttggtcattcggatgtgacgaccacaatgaatatttacgcacacgcaagcagagaggctaagcgcgatgccgcgaaactgttggacaaggtgcaataagactttcccttgttcttttccagcaagggaaaaaacaagggaaattgagagcagagaaacatccagatgccttgaaaagcaagcaattttagcacttttgagaaaaatgatttacaaatttcgattagtaatatataagcgagggtgttaca

SEQ ID NO: 10258 - DNA, 3208 bp, Unknown
  gut microbiota DNA sequence
tccttcttttttaggctttctcggcttcctcaacgaccttgagcagcgagccgtccttgatgacctgataggacttttcgatgtcgatgctgaggttgcggtcggcatcatagtaggggatagtcttgcggtaggcgtccttgagggggccggtgaccttgccaagcttgagcaggttgtcagcgcgctggtcgcggcgcatttcgacggcctgggccgcgtgcatgagctccatgccgagcatgtagcgcagattgtcgacgatgcggagagaacgcataccggcgagcggcaggttgctggcgtgatcctcgatgccgttggcgaaggaagtgatgtcgagcgtcgtcgtgttggcgagccagcggttctcggcatcgagcgcggcgaaggtcttctgcatcgtggagaacgcgatggtcttgacctcgtgcggcgtcaggaagcggttgagacccgtgaagccggggtcgacgatcttgtagaggcggttgacgatggcgtgggacatgtggcacagcgccgcggccagcatgtcgacgccgagagagagggtcgttacctcaaagttcgggctgacggatgtggtgccctcctcgtagaggatgcaggggttgtcgtccgtgcggttgatctggagttcgaggatcttcttgacgtactcaagagaatcgtagacagagccgttgatggccgcgccgcagcggaaggagagggggtcctgcagcgcgcgcttggagtcgggatgctcgagatagctgccttcgaggaaattgcggcactctgcggcgcagtggatctgaccgggcaggccacgcacctcgttcacgcgctcgccgagcggctggaggccgccgttgagaccttcgaggtgcaggcagtagatggcgtcgctcagcttgatgagctcttcgacctccttgacgagcaggaccaccatggattcgccctgcgcgttcgaggagacgatggaaaggccgtccttcgggccgaggatcgcgggctcgatgccctcggcgcgcatggcgtcgatcgcggggatgatctcgtcgtgatattcgacctcgccctggccgatcatggcctgaccgatcatgctcatcgtgctcacgtcaccctcgccgacggcgccgcggcgcatggcgcggggatggatgccgcgatttaagaactcctcatacattttaagaatgttcgaggcgatacccgtgcggccgcagagggcggtgttgaggcggatgcacatcatcgcgcgcacttcttcgacgctggcaaacggcgcaacgccgagggagtggctgttgatgaggttgcggttgtactgctcgaaaaagtcctggctgaattcgcggtccttgttccagcccacgccgtggttcaggccgtagacgggcttgccgtcagccgccatgtcaaaaagcacctggcgggatttgtcgacgagggggatgacctcagggtcgatctgcacggggcggcggtcataaacgacggagtaaagatcctccagcgtcaggtcttttccgtttaagatcagagtttcgctcattttgtaaaaacctccttgcggtaaataaaacaaattgttgtcactttgattgtttatattataatagtgagccgtcaaaacagcgttgaaaattatgaaagaaaaaaatttaccccgttcaaacgattcaacgtttttccaactttactgtgctatagcgtcgtaatcgcgggaaaggcaacgaattttgcggtaaggaagacgcaaaaataggcacctcgctcaaacttcgcagggaggaaggcagatccctctctgcaacgaaacaacaggaggagaaaatgcttacactgattgacaatattacaattgtcctgtgcgtggtcggcattttcgccatcagcgtcttcatgagcaagaagaacactgatatggaagcctactatcacgcaaacaaggctctgccttggtctctcgcggtcggtacgatcgctgcatcctggtacggcggcaacggtacgatcggtacggtcggctatgttaccaccatgggcctttccgcattctttatctggtccatcggcgcgcaccttgtgcgtttcccgctggctctgtgggttgctccccgcatttccgtcaaggtcaactccacgatgaccgagctgctcgaccgtttctacggccgcattgcttcctttatcggcgcgattgtcctgctggcgacctgcctctccatctctgagatcggcgcctgcggttacgtcagtgttgctgcgtggaacatgaacaagttcctcgccgcggccatcgtcattgccatttccatcggcctttcctgcgttggcggcctgctcggcgtcgccatcaccgatatgatcttcttcttcctgatgatcgtatctgtcgcttttgtcttccccagcgcgttctacggcgtgggcggcttcgctgctctcgacgagatcttcagcacggttgatcccgcgatgatgaccccgttcggcggcatccccctgggccgtgccatcgtgctgatcctcatctgcatcaacgtctataaggaccccgcgttctatcagcgcttcaccgcttccaacgggcccaagaccggtaagcgcgcgatgctgacctgcttctccatctggctgagcatggacgtttgcctgatgttcaccgctatcgtcatccgcgcaatggatcccgcgctgaccgttcagcccgaggttgcttacatgcagctcgttctcagcggtctgcctcccgttggccgcggcctgttcgtcttcgcgatgctcggcgccatcatttccacgatggatacctactatctggtcggcggcgagatcgtgtccaacgatatcatcggcgtcctgcgaaaaaagccccttaccgacaagcaatccatcttcatttcccgtattgcctgcgtggtgttcggcgtgatcggcctgagcgttgcgttcaagttcaagctggtctatgatgcgatgatccttgtcacgagtctctccatgtctgcgctgttcgttcccatgatggctgccatcatgtacgatggcaagaagaccaacatgtccggcctctgctccatgatcgttggtatcctctcttggctctggtttgactttaatcccctcagcattgaagccctcggcggtaacgtcgatccgatgctcgtgtctctgcctatgcttatcagtaagaagtcgttggcaaacc

SEQ ID NO: 10259 - DNA, 574 bp, Unknown
  gut microbiota DNA sequence
tgtggcctcggtgatggttcatgtatagaagaagtagttctgacgtatgtagcgcttgataaatatgggtgtgattatacgcctgtcgcagaagatgtttcctttcagtctgttaaccacctgacagagcagatagcagaaaagcggaatatcctgatagaagcagcccgcatcggcaggggacgcattaaagatattcgtgaggttgattttgcagaatacgatgcattgatcatacccggtggaatcggtttattgaacaattatagagcttccaatgtgataaaaacgtgcgtcacacattttattaacgaaaagaaacctgtcgctgccatgtgtgcgggaatcgactttctccgccgcttctatggaagtgatctattggcacgtaagatggaagaactaactgctgaaaaattctgctttgatgctgaaaataatgtttattacacgcccgctttcagaaaaaccaacagtagctatacgacactattaggtatcgattctatgatttatgcgttgaaacaggcacaaacattacgatgaaatctgttttgtaggtttaattattgaa

SEQ ID NO: 10260 - DNA, 29694 bp, Unknown
  gut microbiota DNA sequence
accatccagacgctgtaaacgcctgaagggtgtgccctctatttgtcgttattggcttagttcaggaagtccttgagcttcttgctgcggctggggtgacggagcttgcgcagcgccttggcttcgatctggcggatgcgctcgcgcgtgacgttgaactccttgccgacctcttcgagcgtgcggggacggccgtcctcgatgccgaagcgcagcttcaagactttctcctcacgcggggtgagggtggagagcacgtcgacgagctgctcctgcagcagcgtgaacgacgcggcctcgctcggctcgctcgcaccctcgtcggggatgaagtcgccaaggtggctgtcttcctcttcgccgatcggcgtttcgagggagacgggctcctgcgcgatcttcaggatctcgcgtaccttgtcgacgggcatgtccatctcggcggcgatctcttcgggagaggggtcgtggccgagctcctgcaagagctgacgggacacgcggatgaccttgttgatggtctcgaccatatgaacggggatacggatggtgcgcgcctggtcagcaatggcgcgagtgatggcctgacggatccaccacgtcgcgtaggtcgagaacttgtagcccttggtgtagtcaaacttttcgacggccttgatgaggccgaggttgccctcctgaatgaggtcgaggaacagcatgccgcggcccacgtagcgcttagcgatggacacgacgagacgcaggtttgcctcggccaggcgctgcttggagcgctctcccttcttgacggcagatttgagtgccttcatttcctcttcgctcagctccgtgccgttcttttcggcctcttcgagcttctgcttggcctccacgcccgcggacatcgcggtcgcgagcgaaatttcctcgtccgccgacagcagcgacaccttaccgatctccttgaggtacatgcgcacggggtcgtcagtcgagaagctgtcgaccagctcgttcgggtcgacgagctcttcctcttcgatctcggcgatctcctccatcggcggctccacatcgtcgatgctgctgtcgatggcctcggcggtgccgatgtcgatgccgagcgtttcgagcgagtcgtagatctggtcgagctgctcgctctcaaggttcatctcgtcgatggtctccatcaggtcgctggagttgagcttgcccttggctttgcccttggcaaaaatctccatgagcttttcgttgccctgcagcagcgccgccgcgggcagggaggcgaccagcttttcatccagcgggggatacttctccgcgggcttttccgcctgcgcggtatcctcgttcgctttcttggccgctgcggcctttttcgctttcttcggcagattgatctcctcaaaatccgcctcggcgagcagcgcgttggcctgttcctccagctctctgctggtcagctgtttttcttccatgtttgctttcctccgttacccttatatttattcttttccatcgcggccatcaggggatcttcgttgacggctgcgcgtttgtgagcttcgtctaaaatgatagtgcagtagtcgctgagcgcctgcgcgccgtttttgagcgactccggcttttgcaggataccgatcaagtggctgatctcctccgacgtgaaaaattccgccagcgctgggatgttcacctgcccgctctcgcgcagctgcgcgcgcagcgccgtgaagaaccggcccaggaggggggaggagaagtcctcttcccgaatcggcggattctcgccaaagagggaatcgtccagcgtcaaaagccgcagcacgccttcttcggcgagcgccgagcgaaggtctgtatagcggatcgaccgctcgcgcggctgggcggacgccgcgggattcaggtcccgccgctcctgctcgcgcttttccttgtagcgggcgcgttttcgcgcgcgctcgacctcgagcttcatcgcgtcgggcgtgatgcctgcggcctcggacgcgcgcacggtgtaaatttcgcgctcaaccgcgttcggcactgtggagagcaatcctgctgccgcttcggcaaagccgatacgtccctcgtcgcttttgaggtcgaactttgacttgagctgcgccatgcggaagtccatcccgctctcgctgccggaaagcagatgctcaaaggcgtccttaccctggaacttgatgaagtcgtccgcgtcctgtttgatgtactctccgtcgacgagccgcttgggaagctcgagcaccttgacctgaaagtcggtgttattgagaagcgtcagcgccttctgcgtcgcgaccttgcccgcgtcgtcgttgtcgtagcagagcacgatctccttcgtgtagcgactgagtaattgcagctgctccgtcgtcagcgctgtgcccatcgaggcgcaagcattgtcgaatcccgcctgatgcagcatcacgacgtcgatgttgccctcgaccaaaataatgttgctgcgcttgctctttttggccaggttcagcccgtataaaacgcgccgcttgctgtaaacgatggtctcgggcgtgttcatatacttcgcgcccggatcgtccttgctgatgatgcgcccgccaaagcccagcacatcgccgcgcacgtcgatgatggggaagatgaggcgcttgcggaatttgtcgtacagcccgccgttcttgccgcggatggcaagacccgaggcaagcagctcgccgtcgccatagccctttttccgcatcgcggtcagtaagccgtcccactcgtccgccgatgcgccgaggccgaagttcgttgcattgcgccgcgtgatcttgcggtttttcatatactcgagcaccggcgcacccttgggcgagtagagctgatcgtagtaaaagcgcgccgcgtcgcggttgagcgacaggatgcgcgaacgcagccggctctcgtcgctgtgctcttcttccggcacgggcatgttcgcgcgccgtgcgagaaagcgcaccgcatcggggaaggagagattctcctcctccatgatgaagttgatgacgccgccgccttttttgcagccgaagcagtagcacagctgcttgtccggcagcacgtggaacgaaggcgtcttttcgctgtgaaaggggcagcagccccacaggctcccgccgcgcggctggagcgagacataattgctgacaacgtcgacaatgtcgttgcgggcgatgagctcgtccaaaaactgacggtcaaaggccatggcgtcctcctttctcacttctgcgcacggaactttttgttgtcaatggatatatacgccgaaaatggttactttcctcttttttgacggaaaaatttcgaaaaaatttttctgcgcggagaaaatttgacagaccgtgccatttctcctataatttccgcaggaatcgctgcgcaaagggggcggaacatcgtgaatatccggttgtatgcggtaaaattagatcgaccgctctcagaagcggaacggtccacgctcgcgcgttttctgccacctgagcggcaagaccgcatcaaaacatcggaacgcctctgcgcctgcgcgctgctctgccgtgcactgcatgaactttacggcttggaggacttacctcagctttcctacggcgagcacggcaagccgtactttgcttcgcatccggacgttcatttcagcctgagccacacgcgcggcgctgcgctgctggctgttcacaacgagccaatcggcgcggatatcgagtgtcttcgccctgtgagcggcgcgatgcgcacgcgctttcacgcggcaaatgacaccgatttctggcgcctctgggtgcagcgggagagccgctgcaagcgcgcggggatcagcgccgtcgcattgcgggacagggaagtgccgagcttcccgaatgagcgcgttttcgtgctcgaaccgttccccgactacaccgccagcgtctgtacctgctctgacgcggacgttgacaagctgatataccttacagtaaaagagctcatataaaaggttccgaagaagtctcttcggaaccttttttgcttgatttttcctcttacagctccacgacgatgggctcgtggtgcactttcggcagcagcatatttttgacgtcgctcgttttgagcttgatggtcgaggtgcagaggcacgggtggcaggagaagtactccgcctcataggtctccttgtcgatgagcagctgcacgcggttttcatcatcgttcatcaggccgaggatcgtcgctgaacccggcgtgcagtgcagcaagtcccaaagctgctcttccggcgcgaacgacaggcgggccgagccgatctgatggctcaagtccttcgtatgaaacgccttgtgcggcggcatacataaaaggtagaaattcgtcttctgccggttgcagaggaagaggttcttgcacacgtccacgccgagcacagcggagacgtcgtcacatttttccatcgtgtcggccagctcgtgggtcacgcgctcatagtcgatgccgagggaatccagaaagtcgaacgctgccgcttcctgcgcgggcagcttaccctcggggcgggaattgtgatagatcggggagatttccatgttgctttatttctcttctttcagcagtttttcgccggccttgaatatatcgcccgcgccgacggtcaaaataaggtcgcccgggcaggcgatgcgcgcgagcgcggcagtcaccttgtcgagcgtagggcaataaacggatccggggatctcgcggctcaggtccatagacgaaatgccgatgtcattctgctcgcgcgcggcgtagatctctgccagcacgacgacatcgggtacgcgcagctctttgacaaaatcgttaaacagcgccttcgtgcgcgtgtaggtgtgcggctggaatgcgcagatgatgcgcttgtagggaagcgtcttcgccatttcgagcagcgcgtgcagctcgccggggtggtgggcgtagtcgtcgtagacgtccgcgccgtggaagcttcccttgtactcaaagcggcggcccgcgccggtgaacgttgcaaggccgagaccgacggcctcgccgctgacgccgagaagatatgcggcgctcgccgcggccagtgcgttcatcacgttgtgcttgccgcccacgcgcagggaaacatgagcgtagtaactgccgcggatatagatgtcaaagctcggaagcccgtccgtccagacgatgttttccgcgcggcactgcgcggcgggatcgtcatagctgaaccagaagatcggctgggaaatgcccctgagcgcatcgcgcgcgccctgatcgtccatattggcgaccacatgtccgccgatagggacgagctctgcaaagcggcggaacgagtgctccacatccgctaagtccttgaagaaatcgagatggtcggcctccacgttcaaaatgaccgcgacggtggggaagaagctcaaaaacgagttgcagtattcgcagctctcggcaatgatcgtatcgcccttgccgacgcgataaccggaatgaagcagctgtaacgtgccgccaatcatgacggtcgggtctttctgcgcggccatgaagatgtgcgtcgccatcgaagtggtcgtcgtcttgccgtgcgtgccggagatgcagagggcgtttttgtagcccttcataatagcgccccaagcctgcgcgcgctcgaaaacggggatgccgcgcgtcaccgcgccggagatctcgggattatcgtcgtggatggcggcggtgcggataacaaagtcgcactcgccgaggttgtccgccgcgtggccgatggccacggggatgccgagcgaacgcagatgctcgacggacgggccgtcgttcatgtcgctgccctggaccttgaggcccatgccgtgcagcacctctgccagcgggctcatcgaaacgccgccgatgccggccagatgcgcgcacttgccggggacgagataggagaaaatatccttctgattagtcattgtatcaaatcctttccttgtgcggagcacaggagatttactttttatggattttctattataatatagcggtgaacggagtgcaatgctaaaaatttgattttttgtgagggttccatgctctttttaccgaaggaagtcgaaacggtcatcaccacgctgcaaggcgcgggttattcgccgtacctggttggcggctgcgtgcgcgaaatgctgcgaggcaaagcgccgtccgactacgacatgacatccgacgccctgccgcaggaggtgctgcgcctcttcggcgagtgggcgcacccgacgggattacagcacggcacggtgacggtcgtgagcgggggactgcccattgagctcacgacgatgcgccgtgacggcgcgtacagggataaccgccacccggattccgtcacgttcggcacgagcattgaagaggaccttgcccgccgcgacttcacggtcaacgccatcgctttgccgccggacggcacgctcgtcgacccctacggcgggcaggaagacctgaaagcaggcgtcctgcgctgcgtcggcgagccgaagcggcggtttgaggaagacgcgctgcgcattttacggctcgtgcgcttctgctccgtgctcggtttttcggcggagaaggagaccgcccgcgccgcgcatgaggcgcgcggcctactcgcccacgttgcgcatgagcgcgtgtacacggagatgaacaagctcctgctcggtgagaacgtgggggaaacgcttttgacctttccagacattctgggcgtgccgattccggagattttaccctgcgtcggctttgaccagtgcaattaccaccactgcttcgacgtctggggtcacacggcacgcgctgttgccgccgtgccgccaaagcgggagctgagatggacgatgctcttccatgacctcggtaagcccctgtgccggacgtttgacgagcagggcgtcggacatttttacggtcacacggcgatttccgctcaaatggcggaggacatcatggcgcggctgcactttgaaaaggcgctgcgcgacagaatacgcgcgcagctcgcctgtttcgacgacatgttccgccccgtgcgggcggccatccataaggagatggcgcgcctcggcgcggagacggtgcagaatttgctttacaccaagcaggccgacaacgccgcgaaagcgcccgcgggattggagcgtgcgcaggcgtcgtggcacgaagcacagaaaatctacgacgagctgatctcagagggcgcgtgctgctcgatccacgagctcaagatcagcggagaagacctcgccgccctcggctaccacgggcgtgagattggcgcggtgcttgcgcggcttttagacgaggtcgcggcggaaaaactccccaacaagcccgaggcgctgcaagcgcgcgccgtgcggctgtggcgcagcggctatgcgcgccatacgatgaaagaaaacgagacccattgacggaggttaacgatatggcaaatctgatggattatctggactggcgcggggatctgacgctcgaaatttcgccgttcaacgaggtggacgcgctgattctggcagagctgagctttgtcgactttgacggcatcgtgccgcctcccgagctcgggcgcggcctgccgctgaatgaggcggcggaggcgtttttcgcccgccatggcgggaaggacgtccccatgggcgtcctcgtgccggacacgatctcgaaaatgctgcgcaagctgatgacgagcccgcgctttcgcaatatgacgcttaacggctacacagcgctgcttgacgattccatcgagcagcagtttgcggcgctgacgatcgaccttggcaacggcagcatctatatctcgttccgcggcacggacgatacgatcgtggggtggaaggaagacctcaacatgggctttttggaggagatcccctcgcagaagcaggcggtcgaatacgtcgcgcgcgtcgcgcggcagtacagcgacaagaccatccgtatcggcgggcattccaagggcggcaacctcgccgtttacagcgcggcgaagagcagcggcgagatccaagagcgcatcgtcgccgtccataataacgacggccccggcttcgcctgggacatcagcgagacgccgggccacaagcgcatcgcaaaccgcatccataccatcctgccgcagacgtctgtcgtcggcatgctgatggagcatgaaaagcgctatcaggtcgtgcattcgacctatgacggcctttaccagcatgacgggttttcctggcaggtgctgggtacgcagtttgtccacctcgacgacttctcccgcgagggaaagctcgtcgatgaaacgctctcgtcctgggccgattcgctcaacacccagcagcgcgaagcgctggccgacgcgctgtacagcgtcttcaccgcctcgggcgcaaaaacgctcagcgagctcaccgaggaaaagctcaaaagcgccgcagcgatgctcaagacctataaaaacctcgaccgcgagacccgccgcatggtcaccgaggcgttcgtgctgtttttcaaactcggcacgaagaacttcgtcctcgacacgcaggaggaaggaagccgcgagatcgaaaatattcgaaaaaagatctcggaacaataccagaaattggtggagcgcaagaagtaaatacaacattcccgctgcgcggggagcgtgtttcccctgtgccgcacaggggaacgggacaaaggggtcattctctttcgcaaaagagaatggcccctttggaaccccaagagaaaggctttgcattggcagattggcacttgaagagctgcgcggcctgcggattgcacagccgttggcagctttgctgccttacggatatggcataccccttgcgggtaatcaggtgcctgccgggtgttgtatctaaacgacttggtttgctactatcttcgctgtcgctttgcctgcgattcggtagccttacgcaatttccgcctactttggacttgtacagatttgctattgcctgccgaggcggctttgctggcgctcgccgcagtacgcactaccaagacgatatgcattgtcagatgattaggctgcaccaaaacaagatgagcagagcggcaacggatgatagaagtaggccaaatcgtatagcaatgctaacgcggcttcgccgcgcgcatggaagtgcaatcggcaagcatcgcacctcttcgagctgctcgcttgcaatgaaaattttctctgggagggtgtaagggaggggcatctctttttcaaaaagagatacccctcccttattatcgcacccctgcgcggcgcagggaacaaatgcagcgctgtcgcgctaccatattatttttttactctgcgctcggcagcttcgctgcgggcttcatcagcaacgcgcagatgacgatcgcgaggatcgtattcggcagcatgtaggtgccgttgtacagcacggagtagaacacaggagaggtcatggtcatgcccatgaattcctcgggcatatactgcgcgtagaccgtcacaccggagataaagtggatgccgaagcggccgaggcagccgacgaacgcggcgagcgggagcttggaatagtcattgtccttcacgcggaaaaggcccgcaaggccgaccgcgccgtaggcgacggaatagtcgaagatgatggacacccagctcacggcgaagccctcggcgaagaaatacttgagcgtgccgaacgcgacgcccgcgaggatgccccagggcgcgccatagcgcacggcgaagaggatgagcgggaccatcacaagggtgatcgagccgccgaagccgccaaacgacagaccgatgggaattttgagatagctcagcacaagggcgagcgcgatgcagatgccgccctcggtcaggcggcgggtgctggaatgggtggacgtgttgctcataagggattcctcctaaagatatggtccctgtccgcgccgcggcacaaaaaagcaccgcggcgtcgacgtcacggtgcaaagctcaggcaagatcatctttgcattcctacgccggcattacccggatcaggtctgagggacagcgacggcgatacgccgcatcacagccggcttgcgccagcgccccttgcaggtatggcgatatcttagtccaatgttcaaaacttgtcaaggatttgagacagaaagcgtgattccgaaaatagaatatcgaaatttagaatttgtgttgcgtctttgttgtgcctgtgttacaataaaattagttaggcaaccaaaataattgtgatatttgtgattttcttgcgaacaggagatctgaaatggctgcattcgttgtcaacggtacaccggtcacggtggagaaaaatcaaaaactcatccgctatcttcgcgacgagctgcatctgaccagcgtgaaggacggatgcagtgaaggtgcgtgcggcacgtgccatgtcctcatcgacggcaagccgacgaaagcctgcatcccgcagacagacaagctggaggggaaacatatcgtcacggtcgagggcctttccgcctttgaaaaggaggcctttacctacgctttcggcgaggccggagccgtgcagtgcggcttctgcattccaggcatggtcatctcggccaaggggcttatcgaccagaatcctgaccccacgcgcgaagaggcggcctttgccatacgcaacaatatctgccgctgcacgggctatgtcaagatcatcgacggcatcctgctcgcggcgaagattttacgcgaggggaaaattcccgaaaagaaggaagactttcaggttggctcgcgcgtgcaccgcatcgatgtcgccgaaaaggtgcagggctacggcaagtaccccgacgacgtctatattgagggcatgtgttacggcggcgcagtgcgcagccagtacccgcgcgcccgcgtgctctacatccgcacgaaagaggcggaagcgcttcccggcgtcgtatgcgtgctgacggcaaaggacatcccgggccagcagaacgtcggccacatccagaaggaccagccgacgctcatcggcgagggggagatcacgcagtatctcggcgacgcggtggcgcttgtctgtgcgcgcgacttagaaacactcgagcaggcaaaaaagcttgtacgtgtcgtctacgaagagcttcccgcggtctacgggcctgaggaggcgtccgcccccggtgcgcccgaggtcatcatgggcaaccgcggcaatttgcaggcgcaccgccacgttgtgcgcggcaacgcagacgaggccatcaaacattccaaatacgtcttacatgagaagtttgagactccgtggacggagcacgcctttttggaacccgagtgctgcgtggcgctcccgcttgaaaacggcggcgtgaagctgctgacgaccgaccagagcgcgcacaccacccagcacgagtgctcggcgatgctcggcgtcgactttgcccactgccaggtcgaaaatatgcttgtcggcggcggcttcggcgggaaagaggacatgtccgtgcagcaccacgcggcgctcatcgcatacatcgcgcgcgtgccggtcaaggtgaagctcacacggcaggaatcgctgctcgtccatcccaagcgccatccgatgtggatggacttcacgatgggctgcgacgaaaacggcattattcagggcgtaaaggcgagcgtcgtgtccgacacgggcggcttcgcctcactcggcggccccgtgctcgagcgcgcgtgcacgcacgccgcgggcccgtatcactatgagaattttgagattgagggccacgcctactatacgaacaatccgcccgcgggcgcgttccgcggcttcggcgtgacgcagacctgctttgcgactgaaacgctactcaatgagatggccgaccttgtcggcatctccccgtgggaaattcgctaccgcaacgccatccgcccgggcgaggtgctgccgaacggccagatcgtcggccccgaaacgggccttgtcgaaacgctcaaggccatcaagccctactatgacgaagcggtcaaaaacggcgagccggtcggccttgcctgcgcgatgaaaaacgcgggcgtcggcgtcggtcttcccgactatgggcgctgcaagctcgtcatcggcgatgatggcaaggtccacatccgcgcgggcgcgtcctgcatcggtcagggtctcggcacggtgctggtgcagctcgtcgtgacaaacgcaaagctcacgcgcgatcaggtcgtctacgacggcaacagcacgttcataacgcctgacagcggcgatacctccggctcgcgccagacgctcgtcaccggcgaggcctgccgccgcgcatgcctgctgctgcgcgacgcgatggagtaccgctcgctgagcgatttgaaggggcaggagttttacggcgaatactacgccaagacgaacccgctcggcgcaaatgtgccgaaccccgtcagccatgtcgcctatggctacgcaacgcagatgtgcattctcgacaaggagacgggcaaaattaaaaagatggtcgccgcgcacgatgtcggcaaggccatcaacccgctgtcctgcgaagggcagatcgagggcggcgtcgtgatgagcatgggctacgccttgacagagcagtacccgctcgaccacggcaagcccacggcaaaatacggcacgctcggcctgttccgctcgcatcagattcccgagatcaaggcgatcgtcatcgacaagccgggattaaacctcgccaacggcgccatcggcatcggtgagatcacgtccatccccacggcgccggccatcgcgcaggcgtattaccgctacgacggcgagcgccgccgcagcctgccgctcgaccatacgccgtacaaaaagtaatacgatcaggagagagctatgaaacgagttctcatcatctataccggcggcaccatcggtatgacgcgcacggaaaacggctacgcgccgcgcgcgggctacttccgcgccgcgctcgacgccatccccgatctccgcgcaccggagatgccggagtgggaattctatgaactctcgccgctgctggattcatccaacatgaccgtgcgcgaatggaactgcatcgcagagctgatcgcgcagaaatatgacgattacgacggcttcgtcgtcctgcacggcacggacacgatggcctacacggcttcggcactgtcgttcatgctcgatgggctcgacaagcccgtggtgctcacgggctcgcagatcccgctgtgcgaaattcgtagcgacgggcgcgacaacctcatcaccgcgctgctgattgcgggggaaggcatcgtgcgcgaggtgtgcctgtacttcggcggaaagctgctgcgcggcaaccgcgcgacaaaatactccgccgacggactcatcgctttcgtttcgcccaactacccgagccttgccgaggcgggcatttccatcaaatataacgaagccgccctcctgccgcggcaggaaggcgggctcaaactccagacgcttgataatattcccatcggcgtcatcaaggtatttccgggcattcagttttcgctgttcgaggccattatgaccgaaaagctccgcggtatcgtcatcgaaacgttcggcgcgggcaacatccccggcgacgggaacgcgctgctgcccatcatccgcaaggcgtttcagaacggcacggtgctcacggtctgctcgcagtgtccgcagggcgcggtgtcgctcggtacctacgaaacgtccagcgcgctcaaaaaagcgggcgcggtcagcggacttgacatgacgaccgaggccgccgtcgccaagctgtactatctcttctcctgcggctacgacaaggagaagatcaagcaggcaatggaagaagatctccgcggcgagatcagcgtttcttaagcgcttcgagcgcttccttcgtgtcaacgtcgcaaagctccgtctccggcgcttcaaagagcagcagattatctaaatgcctcttgatgaccgcgctgccgccgacatcgccctcaagcgataaaagctcaggaaagaagcgggcagggaagaggcaggggttgccccgcacgccgttgtgtcccaatccgacgatgtttttgctgtgcgcgcggaagaacttaagctcctgcgcgacggtcttgcgcttgagcatcggctggtcggccaccatgaagcagagcgcgtcacagtctgacagcgccgccgtgccgaggcggatcgtctcgctctggccgcgctcgggatgctcattccgcagagcttcaaagccaaactttttggcggccgcttctacgatttcgtgctgcgtcacgaccagcacgcgggaaaagctctcccgcgggatcgcatcgagcgcatgctcgataagcggctttccgtttaccatcgcggcgagcttgttctcgccaaagcgcgcggcactgcccgccgccatgaccacgcatcctattttcaacgtgttatccatctattaaatcaccagtcattcgtttctttttcaccaatcggcagaaaaaagcggacaaaatggtacatccgcgatcatttgtattatatcacgcatgcagcactgtacacgctgtgcgaaatgtgctaaaataatagcaaaggagttgcagatttcgagcaaaaccgacaaagcggctgctcggaacaggaggtagacagatgagcaaggtaggaaaaagcgagatccgcgtcgatgcgttcgacaaggtcaccggacgcacgaaatactatgaggatcggatgccggccggtgcgctctatgcgcgcatcaagcattccaccatcgcgcacggatttgtcaaatcagtcgacaagtccgcggcggaggccatccccggcgttgtgaaggtgctgacctgcttcgacgtgccggagcactgcttcccgacggcgggccatccctggtcgatggacccggggcatcaggacgtggccgaccgtaatcttttgaaccgccatgtgcgctactacggcgacgacgtcgcggtcgtcattgcggaggatgaggtctcggccatgcagggcgtgcgcgcgctgaaggtcgaatatgaggaactcccgtttgtgctcgacgtgcagaaggccatggagcccgacgcgccctgcatccacgaaaatttcccggggaatatcctgaagcacaccgatatccgcaagggcaattatcagcaggcgatcaaagagtccggcctcatcaaggtcgagggctggtacaacacccccaccgtgcagcacagccacattgaaaaccacggctgctacgcttacgaggaaaatggccgcatcgtcgtcgtgtcctccacgcagatcccgcacatcatccgccgcatcgtcggtcaggcgctcgggcgtccgtgggcggatatccgcgtcatcaagccctacatcggcggaggctttggcaacaagcaggatgcgctctatgagccgctgtgcgcgtggtgctctacgcaggtgcacggaaaatgcgtgcgcatcgactgctcgcgcgaggagaccttcgtcagtaaccgtgtgcgccactcgatccgcttccatatcatcacgtggctccataaggacggctcgattgccgcgcgcaaggtcgagtgcttctccaatcagggcgcgtatgcctcgcacggccattcgatcgtcgccaaggccatgggctcgttcccgcagatctatccctgcgacaatttcgagggcgacgcttacaccgtgtacacaaaccgccccgccgcgggcgcgatgcgcggctacggcatgccgcaggcgtcgttcgcggacgacgcgaacatcgacgagtgcgcgaaggccgttggcatggagccgctcgaataccgcatgaagtacatcatgcccaagggcttccacgacggcttctcaggtaacacgaactactacgattccttccgcgaatgtctggaaaaggggaaggagtacatcgaatacgacaaaaagcgcgaggagtatgccaaggacatcggccccgtccgccgcggcatcggcgtggcggccttctggtacaacacggcggtgtatcccatctcgcttgaaacgtcctcgaaccgcatgctcctgaatctcgacggcacggtgacgatgcagtgcggcgagacggagatcgggcagggcgcggacacggcctatgcgcagatgacggccgaggccgtcggcctcaagagctatcacgacgtgcgcgtcgtctcatgtcaggatacggacatcacgcccacaggcctcggcgcttacgcgagccgccagacctacgtcgcgggcttctccatccgccagacggcgacgctcctgcggcagaaaattcttcagtacgcgacaaagctcacccgtcaggcggtcgacaatatggacatcgtcgacggcaacatcatccgcaagggcgacggcatggtgctcatgtcgctgaaagaccttgcgatgaccgcgcagtacaacgccgcggactccgagcacatcaccgccgagtcgacctacaccatccgcaacaacgcctattcgtttggctgcacctttgccgacgtcgaggtggatatcccgatgtgcaaggtgacgctcaagaagatcatcaacgtccacgactgcggcaagctcatcaaccccgcgcttgccgaggcgcaggtccacggcggcatgtccatggccatcggatttggcatgagcgagcagcttttattcgatgagaagacgggccgcccactcaacaataatcttctcgactacaagctctcgacgttcatggaccacccgcatctcgaggcgcagtttatcgaaaatcccgagccgacgtcgccgttcggcacgaaggcgctcggcgaaccgcccgcgtgctcgggcgcgcccgccatccgcaacgccatctacaacgccaccggcgtcgccatcgacaccgttcccatcaccccgcacgttctgtatgccgagttcagcaaggcggggctcatccacgacagctggaaggaggagaagtgagccatgtatgacatgaaagcactctatgaggcggaaagcgtcgaaaacgccgtcgccctccgcttggagcatcccgaggcgcagatcatcgccggcggcagcgacgtgctcgtgcagatgcgcgagggtaaacgcgccggaaaggagctcatctcgatctacggcctcgacgagctgcgcggcgtgagcatcgacgaggaggaaaacatccgcatcggctcgctctcgagcttttcccacatcacgcgtgaccccatcattcagaaatatatcaacgttctcggcgaggcggtcgacatggtcggcggcccgcagatccgaaacatcggcaccatcggcggcaacacctgcaacggcgtgacgagcgcggactccgcctccacactgcatgcgtgggaggccatcgtggagctgacggggaaggacggcatccgccgcctgcccatcaaagacttttacatcaaggccggtcaggtcgacatccgcgtggaggatggcgagatccagaccgccatcctcatcccaaaggcgagctacgaaaactgctatggctactacatcaagtacgccatgagaaacgcgatggacatcgcgacgctcgggtgcagcgtgaacgtgcgcctgtcgcccgacaagcagactattgagcgcgcccgcatcgcctacggcgttgccggtcctgtgccgatgcgctgcccgagcgcggaggcagctgccaaggataaacccttgacacttacgacggcggaacagttctcactcgccgtgctcaacgatatccgcgcgcgtgacagctggcgcgcctccaaggcgttccgcgaacacatcgcggtcgaaatggccaagcgctgcctgatcgagtctatcaaacgggcgggaggtgtcatcaaatgagtcagtacaagctggtgcgattcaacttaaacggcaaggacgttgagaaaatggtcgacgtgcgtgcgtcgctgaccgatatgctgcgaaacgattaccatatgacgtccgtgaagaagggctgcgaggtcggcgagtgcggcgcctgcaacgtcatcatcgacggcgaggcattcaactcgtgcatctacctcgccgtctgggcggacggcaagcacatccgcacgctcgaaagcctgatggggcccgacggcgagctgagcgacatccagcaggcgttcattgaagagaccgctgtccagtgcggcttctgcacgccgggcttcatcatgactgcggtcgagatcttggagacgaaccgcctctacaccgatgacgagatcagaaagctcctctccggccatctgtgccgctgcacgggctatgaaaatattctgcacgcggtgaaaaagacgatgtatcgccgcctcggcctgccgcttccggaataaggccgcgcctttacaaaatcgaaacatgaaaaaatattgtcttcttacgaaatcggtgctataatccaaatagcaccgattttgtttcaaggcgcgaaaaaggaggaatctttatggtcattacggttggcagacaatacggcagcggcggacgcgagatcggcacgatgcttgccaagcagctcggcatcgcctattacgacgacatgctgctcaaggaggcggcagaggagagcggactttgcgaagagctgttccgttcctttgacgaacgcccgaagagctttctctattccatcgcgatggacccctattccttctcgatgaaccatgtgacgcccaagggctccatcgaacagcaggtgtacctggcgacctacgacacgatcaaaaagctcgccgacaagggcccctgcgtcctgatcggccgctgcgcggactacgcgctcaaggatcgcgacgacgtcatcaatctcttcatcacggctccgctcgaaaaccgcatcaagcgcgttgccgcccgcaacggcatcagcgagaacgaggcgaaagaccgcatcaagaagacggataagtcccgcgcttcctactataactactattccgccaaggactggggcgatgccaagagctacgacctctgcatcgattcgagcctgctcggcatcgatggcacggtcgagcttttgaaggaccttatccgcatcaaggacatcaagtaaacgaaaaatctaaaaaagcagccgtatgaaacggctgcttttttccgctattcacggcggttcaacttgacgaaaaaggaaagagcgaatttgtgaaaaaagtttacgctttccccctatgcaaaagagcaaaaatacgctaaaatagtagctgtgaaaatttgaacttgttcctgaaaggggagattatgagcatggctcaactcaagtataagcgcgtgctgctcaagatcagcggcgaggcgctggcgggcgacaagcacttcggcttcgacttcgacgtcgtttccaaggtgtgcgacgtcatcaaaaagtgcacggacatgggtgtgcagatgggcgtcgtcatcggcggcggcaacttctggcgcggcgtgaaaaacggcgagggctacatcgagcgcacccgtgccgaccacatgggcatgctggccacggcgatgaactgcatggcggtcgccgatgtgctcgagcagaagggcgtcgacgtgcgcgtgcagacggcgctggagatcaaagaagtcgccgaaccctacatccgcgcccgcgccatccggcatttggaaaagggccgcgtagtgctctttggctgcggcatcggctctccgttcttctcgaccgacacggcagcggtgctgcgcgcggcggagatcaatgccgacgtgatcctgctcgccaagaacatcgacggcgtttacaacgccgaccccgccaaggatgcaaacgcgatcaagtacgacgctatctcctatgaggacgtgctggcccagcaccttgcggtcatggactccacagccacgtcgctttcgatggacaaccacattcccgtgctcgtctttgcgctcaaggacccggagaacatcatccgtgcggtcgagggcgagaagatcggcaccatcgtcggcgaaaactgagcgaccccgcacttgcggctttacgataaaaatttttgaggaggtatccccatgaataaggaagattacaaggtttattccgacaaaatgagaaagagcatcgacgcggtgaacgcggactttgcctctgtgcgcgcaggccgcgccaacgcctctgtgctcgaccgcatcagcgtcgactactacggctctcccacgcccatccagcagatcgcggccatcgcttctcccgatccgcgccagctcgtcatcaccccgtgggacggcacggccctcaagcccatcgagcgcgccattcaggagtctgaccttggcatcaacccgcagaacgacggcaagtccatccgcctgaacttcccgcagctcacggaggagcgccgtaaggagctcgtcaagcagatccataagtattccgagaccggcaaggtcgccatccgcaacatccgccgcgacgcgatggaggccttcaagaagaagcagaaggccagcgagatcaccgaggacgacctgaaggtcgccgaaaaggacctgcagaagctgaccgacgacatgtgcaaagaggtcgacgcccttctcgagaagaaagagaaggagctcatggcggtctgatatggggctcttttccaaagagaacaaggcagggcaggttgatttgaacaacctgccttgtcatgttgccgtcattatggacggcaacggccgctgggcgcaaaagcgcggcctcccgcgctcggccggtcacaaggcgggggcggagacgtttcgaaagctcggcacctactgcaagaacctgggcatcgactatctgacggtctacgccttttcgaccgaaaactggaagcgcccgaaggacgaggtcgacggcatcatgcacttactcgagcaatatctgcacgagtgcatcgacacgatggaaaaggacggcaaccgtctgcgctttctgggtgatttaagcgtcctgacgccggaacttcgggaactcatcgatgagacgaatgagatctcatcccgcatcgagggctttcaggcgaatgtctgcctcaactacggcggacgcgacgagatcctgcacgccgcccgcgccttcgcgcgcgactgcgcggcaggggagcaggacgcggacgctttgaccgaggagggcttttcgcgctacctctattcatgcggacttcccgatcccgaccttctcatccgcccgggcggggagaagcgcatcagcaactaccttttgtggcagtgcgcgtacagtgagttctacttctgcgacacgctctggcccgactttacggaaagagaattcgacaaggcgctcatcgcgtatcagcatcgcgagcggcgcttcggcggactgaaacaggagaaacagaaatgaaacaaagatggttggtggtgatcgttggattgccggcgctgctcgccgtgctgcttgcctgccccgcatgggcgacgatgctcgtcgtctgcggcatcgcgggcatcgcggcctatgagctgctgcacacggcaggggagaacgtcccggcggatttctactggggacttgtcacatcggtcgtcatgcaggagatatggctcttttgggaaagggcgagcggtgtacacgctctcccgatttcgactgttacgctcttccgctggatccttgtgatgggggcgtttctctccgcggttgtctattacggcaaggaaaagcccttcacgttccacgatgtggcggtgaccatcgtcggcggcatcgtgttcccggcgatgtacagctgcattttcctgctgcgcatggacgaaaactatggcaagctctatgtgctcgcgccgttctgcgtcgcctttgtgggcgatgcgctgtcgatgtactttggcatgtggttcggcaagcgcaagatggcgccgcacgtcagcccgcacaagacctgggcgggcgcgatcggcgggcccatcggcagcgcgcttgcgctggtgctgctcggccttgtcggcaaggcatggctcggctacgcgcccaattacctcatgctgatcctcgtgggcgtggtggccaacatcttcggccagctcggcgacctctcgatgtcgctcgtcaagcgcgaggccggtatcaaggattacagccacctcttcctgacgcacggcggcatgctcgaccgctttgactccacgctcttcatcgcgccggtcgtatgggccgcggtctgcggaggcttattatgacaaggagtattgctttactcggttccaccggctccatcggccgccagacgcttgaggtggcgcgcgagctggggctttccgtcgctgcgctgacggcgaataaaagcgttgacctcatcgaacagcaggcgcgggaattttgcccgcgtcttgccgtgctttatgacgaggacgcggcgcgtgagctccgcgcgcggctttccgacacaaacacccaagtgctctccggcatggagggccttctggccgcggccacggcggacgacgctgacacggtcgtcaccgccgtgatgggcatgatcggactccagccgacgctcgcggcaatcgagaagaaaaagcgcatcgcgcttgccaacaaggaaacgctcgtctgcgcgggcgagctcgtcgtggctgcggcggagcgctgcggcgcggagatcgtccccgtcgacagcgagcacagcgcgatcttccagtgcttgcagggctgccgcgaccgcggtgagatcaagcgcctcattctgacctgctcgggcgggccgttctacggcctgagcctgcaggagcttgcgactaagacgaaggccgacgcgctcaagcacccgaactggacaatgggtgcgaagatcaccatcgactccgcgacgctgatgaacaagggccttgagatcatcgaggccatgcgcctctaccgtctgccgctgcgtcaggtcgacgcggtcatccatcgccagagcatcgtgcactcgctcgtcgagtttcacgacggggcgatgctcgcccagctcggcacaccggacatgaagctgcccatccgctacgcgatgacgtaccccaacagggccgtttcgcccgcggagccgcttgaccttctcaagtgcccgccgctgacgttcgccgagcccgatgaagaggtcttccgctgcctgaagatcgccaagcagtgcgccgccatcggcaatgtctactgcgcggcgatgaacggcgcgaacgaagaggctgtcgcggcatttctgtgcgacgagatcggcatctgtgccatccctgacctcatcgaagcggcgctcgataaaaccgagacggtatatcagccgcagctttcggatattctggaagcagaccggctcgcgcgcgaggtcgtgcgcgaaaagctcaactgaccaaatttaggagagaccatggtttatattctcattgcgatcctgattttcggcgtgctcatcgccgtgcatgagtttggccactttttggcggccaaggcctgcggcgtgcgcgtcaatgaattttccatcggcatgggcccgcagctcttccataagacgaagggggacaccgaatactctctgcggctcctgcccatcggaggctactgcgccatggagggcgaggacgaggattcggacgacgaccgcgcgctgggccgccaggtctggtggaagaagttcatcatcttcgtcgcgggcgcgttcatgaacttcctgacgggcctcatcatcgtcatctgtctgtatgcgggtgcacaggcattctacacgacggagatcgtcgagctgaaccccgatttcccgcagcagggagaggacggcctgatgcccggcgacacgatctacgccatcaacggtgagcgcatttatttaaagagcgacgtgtcgctcatcatgggccttggcgacacgggcacgatcgacatgaccgtcctgcgcgacggcaaaaagttcgaccgcacgctcaccaggcaagtctacaccgacgaaaacggtaaggagtacgaggcctacggctttacctacggcgggatcgtcgaggcgacgccgcttctgcgcctgcaatacagctggtaccagacgatggactatgtccgcatcgtgagactgagcctgcaaatgctgctttcgggtgcggcgggcgtcaacgatctgagcggcccggtcggcatcgtctcgaccatcacggaggtcggcaaggagaccgaggccgaggcgggcttcggcgcggcactcgagagcattctctacttcgccgcgatgatcgcggtgaacctcgccgtgatgaacctgctgccgctgcccgcgctcgacggcgggcacgtgctgttcctgctcgtcaacggcatcgccgtggcgcttttcaaaaaggaaattccgtccaaatatctgaacgtcatcaacggcatcggctttgcgcttttaatggcgctgatgctgtttgtcacgttccacgacattgtcaagctcctgtgaggaggatgatcttatgagcaagcaaattatcgcaggcggcgtcgctatcggcggcggcgcgccggtcacgatccagtcgatgtgcaacacgcacactgaggatgccaaggccaccatcgcgcagatccacgcgctcgaagaggcgggctgcgagatcgtgcgcgtcacggtgccgaatatggaggccgcgcacgcgctgagtgaaattaaggagaatatctccatcccgctcgtcgcggacattcatttcgactaccgtctcgccgtcgaagcggcggcgcgcggcgcggacaaaattcgcatcaaccccggcaacatcgggggagatgaccgcgtcaaggcggtcgtagacgcctgccgtgaacacaaggttcccatccgcatcggcgtgaacggcggctcgcttgaaaaggagctgctcgcaaaatatggccgcgtgacgcccgaggcgctcgtcgagagcgcgctcagacatgtgcggctgcttgaaaagttcgattttaccgagatctgcatctcggtcaagagctctgatgtaccgctcaacatggcggcctatcgccttctgcacgaaaaggtcgactatccgctccacctcggcgtgaccgaggcgggcacgcccacgatggggcttttgaagtccgccatcggcatcggcggccttctgtgcgagggcatcggcgacacgatgcgcgtctcgctcacggcggaccccgtggaagaggtctacgccgccaagcgcattttgcaggcctgcggcatccgccgcagcggtgtgaacctcgtctcctgcccgacgtgcggccgcacggcgtacgacatgatcccgatcgccgaggagctagagcgccgtcttgccgactgcaggaagaatatcacggtcgccgtgatgggctgcgtcgtcaacgggcccggtgaggcctcggccgccgatatcggcgtggccggcggtaaaggtgagggcatgattttccgaaaaggaaaaatcctttacaaagtgccgcaggaaaagcttgtcgacgctttgatggaggaaatcaaaaaactctgaccgagcggaaacgatactgagataaggttgtggctatggcacaaaagattcctttttttgaattgttcaccgacttttcgccggattttgacctgcgcgtcccgctcaacgccgcgatggtcacgaacatggtgctcgagccggaaaagcgcacgatgacgctcgacatgaccgtgcgcgcggagatgaacgactcgacgcgcgaaacggtcgagcagcttcttgcgcgcaattacgacttaaagcgcgtggacatccacgtcaaatcaacggcggaggcctttcccgacatgttgaagaacgctggccgcaaggtgagcggcagcggcagtgtcatcatgggccgcgagattgcaaaggggagagtgctccccatcagcgagctgacgccaaaggccggtcacgtcgttgttgagggcaaggtcttcaagttcgactgccacgagacgcgccgcgccggcgtctggacgatgttgctcgaaatgacggactacgaaggctcgctcttcatccgccgcagcatgcccgagcgcgaggcgacggagcttctcggcaagatcagcgtcggcatgtggctgcgcgtcagcggccgcatggagctctcctacgatggtaaggatatgcagctcaacccgcaggacatcatgcagatcgaccacgccgagcgcacggacacggcggaagaaaagcgcgtcgagctgcacttacatacccgtatgtccaacatggacgcgctgaccgacaccgccgcggtcgtcaagcgcgcgatcaagtgggggatgcccgccatcgccatcacggatcacggcgtagcgcagagcttcccggacgcctggcacaccggcgagggtaaaataaaactcctttacggctgtgagggctattttctcaacaacatcgacgaccgtatctgtgtgcacggcccgcaggacggcgatttttcgactgagatctgctgtttcgacattgaaacaacgggtctgaaggtcgcgcacgatgccatcaccgagatcggtgcggtcattctgaaagacggcgagatcgtcgacacgttccaaacctttgtcgaccccgagcgccggctttcgcctgagatcatcggcctgaccggcatcacagacgacatgctgcgcggcgcgccgaagctggaggacgcgctgcacgcgtttttggcctttgcgggcggccgcccgctcgctgcgcacaatgcggagtttgatatcagcttcatccgcgcaggctgcaaaaagtgcggcatcccgttcgagccgacgtatctcgactcgctgattttcgcgcagaatctcctgcccgagctcggcaagtacaagctcgacatcgtggccgaccacttgcagctcccgcagttcaaccaccaccgcgcgtccgacgatgcggtcccggtcgcgcagatgctggccaagttcttcgtcatgctcgaagagcgcggtgtcacgcgcctccagcagatcaacgacgagatgacgaagctccgcccgctcggcgtcaagcgcaaccgtttcccaaagcacatcattctgatcgccaagaacaaggtgggcctcaagaacctctaccagctcatctcggcgtcgaacctcaaatactttaagcgcgtgccgatcatcccgaaaagcgagcttgtcgcgcatcgcgagggcttgatcatcggctctgcctgcgaggcgggcgagctgttccgcgccatcgtcgaccacaaggactggaatgagctcaagcgcatcgcctcgttctacgactatcttgaaattcagccgctcggcaataaccgcttcatggtgcgcgacggcacggtgcgcgacgacgaagacctcaaggacttcaaccgcactgttgtcaagcttggcgaagagctcggcaagcccgtctgcgcaacgggcgacgtccacttcctcgaccccgaagacgaggtttatcgccatatcctgctcgcgtcaaagaaattcgccgacgcgaacgagcccgtcccgctctacttccgcacgacggacgaaatgctcaaggaatttgactacctcggcaaggagaaagcctacgaggtcgtcgtgacgaacacccgcgccatcgccgagcaggtggaggatatcgagcttttgcccaagggcaagctgttcccgccgcggcttgaaaattcggaagaagaccttaaccgcatggtgtgggggaaagcgcacgagctttacggcgacgatctgccgcagctgatcgtcgaccggctgaacgtcgagctcggcagcattctgggcaagtacgacgtcgtctacatgtcggcgcagaagctcgtgcagcgctcgctcgagtgcggctacctcgtcggctcgcgagggtcggtcggctcgtcgctcgtagcgtacatggccggcattaccgaggtcaacgccctgccgccgcactaccgctgcccgaagtgccgcaacgtcgagttccacgcgggcgagtatggctgtggcgcggacatgcccgataaaatgtgtcccgtctgcggcacgaagtatgccaaagacggcttcgacatcccgtttgaaactttcctcggctacggcggcggcaaggtgccggatatcgacctcaacttctcgggcgaatatcaggcgcgcgcccacgcgcacgcggtcgagatgttcggcaagacgcaggtgttccgcgcgggtacgatcggtacgctcgcggagaagacggcctacggcttcgtcaaaaaatacctcgaggaaaacggcatcgccgcgggcaacgccgagatcgaccgcctgacggcgggctgcgtcggcgtgcgacgcacgacgggccagcatcccggcggactcgtcgtcgtgccggacgacatggatatcgaggatttttgccccgtacagcaccctgcggacgaccccgacagcgacacgatcaccacgcatttcgaatatcactgcatggaggacaacctcttaaagctcgatatgctcggccacgatgacccgacgatgatccgcatgctcgaaaatctgacgggcgtgaacgcccgcgctatcccgctcgacgaccccgacacgatgtcgatcttcatctcgtccaaggtgctcggctacgagaacgacgaagtgctcggccccacgggcgccgtcgcgatccccgagtttaacacccgcttcacgcgccagatgctcgtcgacacgcagcccaaggacttcaacacgctgctgcgcctttcaggcttctcccacggcacggacgtgtggctcggcaacgcgaaggatctgatcgtcagcggcacggcgagcgttctggagaccgtcggctgccgtgacgatatcatgctctacctcatttctatggggcttgacccgaagatgagctttaagatcatggaggccgtccgaaagggcaaggtcaagggaggcaaggcgggggactggccgatgtgggtcgaagagatgcgcaagcacgacgtgccggagtggtacatcgagtcgcttgcgaagatcggttacctcttcccgaaagcgcacgcggtcgcatacgttatgatggcgttccgcatcgcgtggttcaaggtgcacgagccgctcgcgttctacgcgacgttcttctccatccgcgccaaggcattcgacgccgccgagtgctgcaaggatgccgacgcgctgcgccgccgcatccgcgagatcgaaaacaacaaggatgcgaccgccgtggaacaggacttgatgacgacgcttgaagtctgctacgaattctgcctgcgcggcttccactttgagcccatcgatatctaccgcagcgatgcgacgaagttcgtcgtcacggaaaacggcctgctgccgccgttcacgtctgtccgcggactcggcgagaccgcagcgctcgacaccgtcgagaagcgcaaggggaaggactttacatcggtggaggagttttccctctgctgcaacaagctgtcgcagacgcatatcgaccagctgcgcgcgctgggcgcgtttgcgggattgcctgaaacgagccagttaacattgttttaacacactgtgttgtattgttccctgcgtacttgcaggggggcgtttttccctgcaccgtgcaggggacgcggctaagggggccattccctcacgtgagagaatggcccccttttgatcccccaagagaacgcaaggggctctgccccttgaccccgaca

SEQ ID NO: 10261 - DNA, 14632 bp, Unknown
  gut microbiota DNA sequence
ggcttgaagaggtgcacgcgctgcgcaatcgggtgcctgccaggtgttgttgctatacgatttgtctctgcttctactacccgctgccgctctgcctgcgtgtcggtagccttacgcaactgcgtcctacttcagcttttatcaatcttgcttttgcttgccgaggcggcattgcttcgctcgccgcgaggacggacttgacggtcaattcaactgacggttgaaaaatttctcaactgattctaccggcgattgctgttgtttttgctttttgggcggtatactgtggccatggcaaaaacaaatcgccctgcatggggcgagagaggagcagtgtatggaaaatcatgtggcagatcaaattcgcttttaccgccggcaggaggggctgacgcaggagcagctggccgaggcgatgggcgtctccgttgcggcggtgagcaagtgggaacaggggcagagcctgccggagatcccgatgctgatggagctcgcggacttttttgacctctcagtcgacgcgctcttgggctatcgcctgcgctcgaacgaccgaaagagcgtcagcgagcggctgaaggtcctgcgccgcgaggacaggtacgacgagggccttgccgaggcggaaaaggccctgcaaaagttcccgaacacctttactgtcgtctacgaatgcgccaagctcttcgagatggcgggcggcacgcggaaggataaagccttgcagcgccgcgcgctcgacttactgacgcacgctatccgcctgctgccgcagaacagcgacccgcaggtgagcgaaatgtcgctccgtctcgatatggcaaacgtgctgctcgacatgaaggactgggaacgcgcgctcgcgctctacaaagagaacaactcctgcgggctgctcgacgaccagatcggctgtctgcttgcgctcgtcaaggagcggcgcgaagagagcgtgccctatctctcgatggcgctgctgcgcgcagtgacatcgctcgtgcgcgtgtgcgacggctttgccaatgtgtttgaggcaagggaagatatgacgtcggccatcgacattttgcagtggaagcattcggtgctctccggtctcaggaaagagggcgtggtcagcgagctcgacaagatcagcgcggcctcgcatgcggcgctcgcgcggcttttgtataactgcctcgattttgacggcgcgaaagacgagttgaaagccgcaaaaacgctggccacggcctacgatgaagcaccaagccacagcgcggcgaacgtccgcttctatgagggcattgagaccgtaggcatttacagcgacttcagccgtagcgcgatggacgcggcgttccatgcgttttttgatgacggcggcgcggaagagcataaaacgttttgggaaagcatcacgtaaaaaaataagacctaccttgcggcaggtcttatttttttacgattacagtcccagttcgacggcacggcgaagtctaaccttgccatcgagcgcttcgtcgatcgtgcggatcagcgcctcgcggtcgcggttgagcgtaccgccgagggggaggtagttcgacgcgtggttcgagcggaagatgctgccgtcggagtcgatgtgctccaaaaagaggcgtgtttcacgcatcagctcgggcggctccatcatcttgaactcgccgctcgcgatccagtcgtgcagcggcgtgcccgagtagacgcgaagcgtcaaaaacgcgatatagtcgggcttcatgcgggaaacggccttcgccgtgtcgatggcgtgggcctgccagtcgccgttcgcgcccgccatgccgttgatggccgtgacggaggtggcgatgcccgcctgcttgcagcggatggcgtttaagacgatctcctcggcagtaacgcccttgcagaactttttgagaagctcctcgttgccgctctcaaggccgatatacacgatgccgaggccgtgctcgcgcagcgtacgcagctcgtcgtccgtcttgcgcatgatggccttggtcgttgcgtaagccgcaacgcgcttgcaggtagggaaatggtcgcagatatagtcgagaacggtcagaaggtaatccatcggcaggatcagcgcgtcgccgtcggctaaaaagatcttctcgatatagcgcccgtaggcgcgtgcctcgtcgaggtcggagagcacctgctcaatggggttgatggagaactttttgtccttgtacatcgtgcagaacgcacatttgttgtggctgcacccgagcgtgcactgcacgatgaggctgcgcgcctcgctggggggacggtaaacggctcccgaataatgcatcagggttcctccttacaaaatcagccgagtttggcctggcacttgtccatgaagcgatccacggtgatgacggcgcgctggtgcgtgccctcgccgatgaggccggcggtgtcggtcgcggtggccttgaagtcgaccatcttgccgtttgcggaaatatccgtgacctcgacggtaacggtgatctccatgccaacgggcgagggggaaacgtgcgccatgtcgaccttcgtgccgacggtgctcttgccctcgggcagctcctgctggagataggtgaaggcggcgttttcgaccatcgcgacgagatacggcgtgccaaacaccggcagaccgccgctgccgagcgcggcagcggtcatgtcttccgtgacaactttcttgacggtaaaagtatctccgattttcatcttaaaaaactcctttacgatattatttggcagctttgaccttgatccagagcttgctcagctcgcgcatgagagtctgattgtcgtggaacatctcgtccttgtcgtagccgctgcggggaaggtaggcggcattgtccgcgtagagatcctcggacgaggtcatctcttcaaacacttccgcgttgggagaagtataacccaccgtttcagtgttgtcaaacgcggcttcataggtgagcatgtagttgatgaactcgtgggcgagcttcgggttctcggcgtttgcgggaataaccatcgcatcgcaccagatgttcgtgccctgggagggcatatagaagctcatgtcttcgttttcatcaagcaccacggctgcgtcgccggagtagacgacggcgatgtccttatagccgttcatcatgccgtcgatgacctcgtcggtcacgtagacgggggacatggtgttgttcatctgcaggagccactcataggcgtcgttaatctcgttggggtcctcggtgttcatcgagtagcccagcgccttgaacgccatcatgaacgagtcgcgctcggaatcgtagatgtagatgtgaccggcgtagtcggtgttgcgcaggacctcccagccctcgctctcgatgacggcagggtcgacgttctcgtggttgtagacgagaccgacgctgccccagaagtaggggatggagtacgtgttgtccgggtcgtagctcataccgagcacggcatcagacatgttctccatgttggggatcatgctcttgtcaagcggctggaggaagtcctcgttcatcaggcgttcgatcatgtagtcggacggaatgatgacatcgtagcggtcgccggccatgagcttggtgtacatcatctcgttggagtcgaagttctcgacgatgacgcgcacgccgtactgcttttcaaagtcggagatgacgttctcgccgaggtactcgccggggagatagagcttcaaaacgttgctgccgtacttctcgacagccgcggcgctcttgtgctgctgggaaagtctcgcgcccacggtgccgccgacaacggccagcaccagcacggcggcaacagccgccatggccttgcggctcacggcgcgggaggacttgccgtccttttcgcgcttttcgcgcacgatcggcacgatgttcacgacgccgagcaccagcgtaatgagaagaatcacaatggtagaaagggcgttgatggacgggttcacgcgcttggacatcgtgtagaccaaaatcgaaatgttgttgacgccgttgcccgttgtgaagtacgagatgacgaagtcgtcaaagctcatcgtgaacgcaatgagcgcgccggagacgatacccggcttgatctgcggcacaatgactttcgcgagcgcctggaacggcgttgcgccaaggtccatcgctgcgtcgatcaggttagggtcgagcgagcggagcttcggcgtaacggagagcatcacgtaggggatacagaacatgatatgcgcgatgagcagcgtgccgaagccttttttgaccgtgaggacgctgaaaaacatcagaagtgagatggccgtgacgatatcggggttcatcacgggcaggtcgttgatgcgctcgaccatcttctgcacaaccttgcgggatttagaaaggccgatggccgtgatcgtgccgacgactgtcgcgacgaccgtcgcgatgatggcgatgatgaccgtgtagagcacagcctccatcatcgtcgaatcggcgaacatcttttcataccagcggagcgagaagccgccgaacttcgtcagcgagcgggaatcgttgaacgaaaagataatgatatagaggatggggaggtagaagaagagcatcgtgagcgtcaggatgatcttcgagccgacagaggttttctttttcatgcgcttctcactcctttccctgcgaggcgacctgaacgtccgccttgcgcgtcagccacatcgagatcatgatgatgaccgccatgatgagcgagatggccgagccgaagttccagtcgccagtggtgaggaactgcgtttcaatgatgttgccgacgaggacgtactgtccgccgccgagaagcttcggaatgaagaagctcgacaccgcgggcaggaacacgagcgtgatgccggagatcacgccgggaagcgagagcggcagcgtcacgcgcaggaatgcctgcaccggcgttgcaccgaggtcgttggcggcttccaaaaggctcttgtccatcttggcaagggacgtgtggatctgcaggatcataaagggaatgaagttatagaccatgccaaggatgacggcaaagctcgtgtggattatcgacacggggccgatgccgaaccacgaaaggatcgtgttgaagatgccctcgtcctgcaaaatgcccatccaagcataggtgcgcaccagcatgttgacccaggtcggcatggtgatgagcagaatcaagatcgtgttgctgcggccgccgcgctgcgcgatgacgtaggcgatggggtagccgagcacgacgcagatgagcgttgtgatgagcgcgatatagagcgagcgcagcaacacatccataaagaccttgtccgtgacgaagcgggcaaagttctcaaaggtgaactggaatgtcagcaccgagttgccggaggtcgtgaaggcatagagcacgatcagaagcatcggcaccacgatgatcgcgatgatccacgcgatatacgggtaagtcatggaacgaaagcgcttcaccactggccctccttcttcatcacgtggatgtcctcgggacggaagacaaggccgacctgctcgccctcttcaaaggcgtgggtggtggagaccttgtactcatagccctcggtggagaaggtcacatcgtaaacgcccggggtgatggtctcggggtcgaagtcgtacttgacatccgtgatctcgacctgctcgccgtcttcgagggaccacgccgacgcgctggcccaggtctcaaggtcggtgtcgagcgcgatgctctcctgaatgtcctcgacctttttgaagaagttcatcgcgtaaatttcttcctgatagaccttgctctcgacgcggttctgcgctacgacgagcaccttgacggtgatagacgtatcattcgcggtggcaaaggtcacggtgtagttgccggtctcgggcttgatgtcgtattcgacggtcttgatggagatgggctcctcggtctcggcgtcccacgcctcggcagaggcgagggcgacgaccttggcgtcgtcgagctcttcgacgtcctccacgtccagaaggaaggcgttcgcactgatcttctcgcccttttcctcgttgtagacagggcggtcctgcgagacctgcatcttcacggtgatggacgtaccgacgcgcgtttcgaccacggtttcatagtgcatgcccttgaaaagctgagacttgaccgtgcccttgagcataccctcggcacgcgggacaatgtcgaggtgctcggggcggatgacgacgtcgaccttttcgttcttattgtagccgcgggcacggcaggcgtacttcttgtcctcgaacatgacgaggtcgtcctcaagcatgacgccgtcgatgatgttcgtctcgccgatgaacttggcgacgaattcgttgacgggggtgcggtagatttcggtcggcgtaccgatctgctgaatttcacccgcattcatgacgacgatcttgtcggacatcgtcagcgcctcttcctgatcgtgcgtgacgaagatgaacgtgatgccgacctcctgctggatgtatttgagctcctgctgcatctccttgcggagctttaagtcgagcgcgccgagcggctcgtcgagcagcagcacgcttggctcgttaacgagcgcgcgggcgatggcgatgcgctgctgctggccgccggagagctcggtcacgttgcggtgggcatagtcctcaaggctaacaaggcgcagcatacgcatgactttctgctcgatgacgtccttcggctcctttttgagcgtcaagccaaaggcgatgttgtcgtacacgtccatgtgggggaagagggcatacttctggaagacggtgttgatctcgcgcttgtagggcgggacgctgacgatgtcctcaccgtcgaagagcaccttgccctcgctcggctgcaaaaagccgccgaggatgcgcagcagtgtcgtcttgccgcagccagaggggccaagcagcgtgacgaactcattttcgtaaatgtcaagagagacgcccttgagaacgacctgtccgtcctcaaagctcttgacgatgttcttgaattgaatgatctttttcttttcttcggccatttccgatatcctcacaattttatagaatagtagttaaaaaagcgggggcgtgcagacccagaggatgcgcgcggtggttttgcgttcatttttgaggtagtggaacgttctgccgtggagatagaacgtttcgccgcagcacacgacgctgcgttcgccgtcgcactctaaaatgacgctgccgtcaagcacgtagccgaactcctcgccgttgtgcggctcgatctcgaacgattcgccgccggcgggaagttccaataaaatgggctccatctggtttttctgcgtgttgggaacgatccagttgacggtgcagttctcgcgctcgtcgacgaaaaagtcttcggagcggaagacaaactggtcgtttttatcctcctgaaagaattccgagaggttggtgccgagggcctcgagaatatcgctgagcgagtcgatcgagggggaggtgaggtcgcgctctaactgggacaagaaccccttcgtgagctcgcttcggctggcaagctcctccagagtcagtccctgtcgcgttcgcagctgcttgatcttattgccaatgtccatacacacgcctcctcgttcgatatactaaacttttggtcagtttttgctaaaccgagactattatacacagcgcgtgcaaaattgcaagagtatatttaacaaaaagttcaatattttgaacttttgaaaaataaaacagcgaagagccgattgcagctctccgcttgtgggatttaaccaaagtacttcttttgaaacgggacctcatccacctgaaactcgcgtccgtgcagatattcgaggatgcccgcgtcgctgggaaagtcgaagcgcaggcggtaggagtagagcgcctgatgcgtttcgccgtatttgcggttcacgctgccgacgccgtacttgccgtcgccgagcaggggatggccgaggtcggccatgctcgcgcgaatctgatgcgtacggcccgtgagcagctcgacctccagaagcgacagctcgccgcgcgtctggagcgtttggtataaggtgatcgcgctgcggccgtccggcacagggcggtggtaaacgcggacggtgttgctcttctcgtccttgcgcagaaagcactcgatgcggcccttcggcggctcgacgcggccgagggcgatacataaatagtatttggcgatctcgcggtcgcgaatcttgtcgttcaggatgcgcagcgcttcagcgtttttcgccgcaacgacaatgccgccagtgttgcggtcgatgcggttgcagagggcgggggtgaaggcgttctcctcgcgtggccgccactcgcgcttttgatagaggtaggcgagcatgtggttgacgagcgtattgactttctcgtgctcgtcggcgtgggcaagcattcccgcgggcttgtcgagcagcatgatgttctcgtcctcgtagacgatcttgagccgcggcgtcgtgatcgtgaggtagacgttttcctcgctcggcgactcgaaaaactcatcgttgatgtagcactgtaaaatatcgcccgcgacgagcttctggtcgcgctgggcgcgcgcgccgttgaccttgatgcgctttaggcggatgtacttctgcgcgagcgacgcggggagcagggggacggccttgccgagaaagcggtcaagccgctgattttcgtcattttttccgatgtgaaactcccgcatgggcggcacctccgcttgcgcagcgcgcgattttctgctattgtacgatagcgggcaaaaaaagtaaagaaatcctgtcaaaatttttgccgcaaccgtgaaaaaagtatttgacaatcgagaaaacgtcctctataatatcactcgtgtcattgcgaggtgtagcatggttttagatgtaaaacgtatcattaacacccccggaggcagaattccctttgactttacagaggacttttctgatgtggacttcggcggcgtgtgtcctgcggttcggccggtctcagtggtagggcaggcagagaacattgcggggatgctgcggttgcagtttgacctgactacaacgctttccgccgtgtgcgatcgctgcggagcgccgtttgatcttccgtacaaggtcccgtttgagtgtctgctcgctgaggatctggaggaagacgacaacgacgatatcctgctgctggacaacggaaccgttgatctcagtgagttggcgcgggagacgttcatcctcaatatgccaagcaagaccctttgccgcgaggattgcaggggcttgtgttccggctgcggcgtcaacctcaactatgagaagtgccgctgcaaaaaggaagtcgaccccaggttagcagccctcgcaaagcttttggaacaataaattcgctgttcattcagcttaactttaaggaggtgtcaacatggcagtccccaaggggaaagtatcccgtcagagacgtgataagagacgttcttctcactggaagctcaccgctcccgcgcttgtcgcgtgcccgaagtgcggcgctctgcaccagcctcacagaatgtgcccggaatgcggtacctacaacggccgtcaggtcaaggtcatcgagtccaaggtcgcagccgaataattgattcggaacgaaaatcgttaagaaaagctgagtggaactccactcagctttttcttatgccgcaagagaaggttagccttgcgtaacctcgaaaattcggttatactgtatttgtaatattttgctttgcgataaagagcggtgcgatcgcgcgccgctttggaataaaggaggcagagagatgaaacctttggttgcgatcgttggacggccgaatgtcggcaagtccatgctgtttaataagctcatcggccagcggctctccatcgtcgaggatacgccgggcgtcacgcgcgaccgcatctacggcgagagcgagtggtgcggccgcaaattccgtctggtggacaccggcggtatcgaaccgtgcacggacgatcagatcttgttgttcatgcgcgaacaggcggagatcgccattcagcacgcggacgtcatcattttcctgacggatgtgaagaccggcctgacggcttccgatcaggaggtcgcgaatatgctgctgcgatcccgcaagcccatcgtgctggcggtcaacaagatggactcgaccggacgggtcgaccctgatttttatgagttctacaatttaggcctcggcgatcccatcgccgtttccgccgtgcacggccacggcacgggcgacctgctcgacgcgtgcttacagtatttcccgcccgaggatgacgaggaagaggatgaggacgtcatcaaggtcgccatcatcggaaaacccaacgtcggcaagtcatcgctgacgaaccgcattctcggcaccgagcgcatgatcgtcagcaatgttgcgggcacgacgcgcgacgccatcgactcgtactttgaaaacgagcagggcaagtatgtcttcatcgacaccgccggcatgcgcaaaaagtcgaaggtcgacgacgtgatcgagcgctacagcgtgctgcgcgccacgatggccatcgaccgtgcggacgtgtgcctcatcatgatcgacgcgcaggagggcgtgaccgagcaggatacgaaggtcgcgggtctcgcgcacgaggcaggcaaggcctgcatcatcgtcgtgaacaagtgggatcttgtcgaaaaggacggcaagaccatggacaaaatgagcgacgacatccgccgcgacctctcctacatgacctatgcgccgatcctcttcatctcggcggcgacgggccagcgcgtgccgcgcctttttgagatgatcaactacgtgcacaaccagtcctgcatgcgcatttcgaccggcatgctcaacaacattctggccgacgcgcagacgcgcgtgcagccgccgacggaccgtggccgcagactgaagatctattacatgacgcaggtcggcgtctgcccgccgcactttgtcgtgttctgcaacgagcgcaagctcttccatttctcctaccagcgctaccttgaaaactgcatccgcaacgtcttcggactggagggtacgccagtcatcatgtctattcgcgagaagggggataaggaagactgatgggaatttatcctgatgaggtcactacgttcgcagcagtagtgctgtatggcgcaccggtcgccgttgcggtgctgtcgtatcttttgggttgcatcaacggcgcgatcgcaacgtcgcacattttctaccatgacgacgtgcgccgccatggcagcggcaacgcggggctgacgaatttctaccgcaactacggcgcgagatgcgcgcccatggtcatcgcgttcgacatgctcaaggccgtcggcgcggtgctgctgggcaattatttcctgggctatcttctcggctggggcgccgcaggcaagtatttcggcgcactgttctgcgtcatcggccatatgtttccggtgttttacggcttcaagggcggcaagggcattttgtgcagcggcacgctgctgctgcttctcgactggcgcatcgcgctcgtcggctggggcgcgttcgtcgtgctgtggctcacgacgcgctatgtgtcgctcggctcggtcgccgcggcggtcagcctgccgtttaccacgtatttcgtgttccataacacggcctgcacagtgctcggcacgtgcatttcgcttcttgtgctgtgggcgcaccgcagcaacatcaaaagactcttaaacggtacggagagcaagttccatttccatgtgaacgcgcccaagccgggggaggacgaatgaacattgtagtgcttggctcgggcggctggggcaccgccgccgcgatgctgttatcggacaacggccataccgtcgcgctctggtcgcacgacccgaaaaaggcggaattgctggataagacaagggaaaatcctttactcaaaggcgtgcgcattcccgagcgcatcgccgtcacgagcgacttagcggtgctccaaaatgcggagatggccgtcttcgcgtcgccgtcgtttgcactgcgctccgttgcgcatgaggctgcgccgcacctgaaaaaaggcacgctgctcgtctcgctcacgaagggcattgagcgcggaacgcacctgcgcatgagcgagatcatcgcacaggaatgcggcgagggctatcgtatcgcagtgctctccggcccctcgcacgccgaggaggtcgcgcgccgtctgccgacgggctgtgtggcggcgtccgccgatcaggcgagcgccgaggccgtgcagcgcgcgttcatgaacgaggtcttccgcgtctacacgcacgacgacgtcgtcggcgtggagcttgcgggcgcgctcaagaacgtcgcggcgctgtgctgcggcatcagcgacggctgcggcatgggcgacaacacccgtgcgctgctcatcacccgcgcgctgagtgagatctcgcgcctggccgagtgcatgggcgggcgcaaggagacgctcgccggtcttgccggcatgggcgatcttatcgtcacgtgtacgtcgatgcactcacgcaaccatcgcgcgggcatcctgatcggtcagggcaagagcgcgcaggaagccatggacgaggtcggcgcggtcgtcgagggctattacgccgcgcgcagcgcgcacgagctcgcgcagcgctatggcgtagagatgccgatctcgacggcagtgtacgaggtcctctacgagggcaagagcgccgcgccgctcatcggcgttctgatgagccgcacgccgaagaaggaaagcgattgcagctggttatgattatttcaaaaaagcggcccttgggccgcttttttgagtaagattgcagcccgcggcagcgcacgcgccgtaggcgcgtacgtttgcgggctgagaagtgttttccgccacgcgcatgtcgcggcggaaaacgattaagattatttgcgccgtgcgcggcgcaaattttgcgaggcttttgcgcctgtgggcgcgaaaaaatatattgagggtaacgatggatattttgacgcaaattgagaattaccggccttacaatgagcaggaggagcgggataagggattgatcctcgactgtctgcgcgcatttgaggatgtgtttacgcgggaaaatgcactggcgcacatgacggcgtcggcctgggtggtgaacgagcgcttcgaccgcgtgctgatggcgtatcacaacatctacgattcgtggtcgtggctcggcgggcacgccgacggggaagaggacctgctcgccgtcgcgctcagggaagtccgcgaggagagcggcgtcaaaaacgtccgtccggcaagcgaggacattttctcgcttgaggtgctgactgtagacggccacatgaagcgcgggaagtacgtctcctcgcacctgcatctgaacgtcacgtatcttctcatcgcggacgacacgaacgtgctcacggtcaagcccgacgagaacagcggcgtgaagtggttcacgccggacggcgcggtggaagccagcagcgagccctggttccgcgagcatatctacaataaactcaacgagaagatgcggcagttccgcagggaaaacgaacgaaaggggagatcagaggaatgaagcttcgagatgccacaaccgcagacgcagcccgcttggatacgcttttgacaaggctcatccatgatgaggtgcagtatgactccaatttgaacggctcgtatgttgtcaccgataattaccgcgaccgcatcggtctggagggccataagctgctactgattgaggatggaggagagatcgtcgcttttttatatggctttctctacgaaattcccggcatgcttgcaaaaccgattgcgattctcgatgcgttgtacgttgagaaagaacaccgccggaagggctatgcatcgcagctcatttctgcctttaagcccttcgcagaggaaaacggcgcctgccgcatcgagctgaaggtgctatcacgcaatgaagccgctctgcgcctttatgagaaactctccttcaaagaaatcaaaaagtacatgacaatggatttgcaggtgcaatagtccctgaaatcaaaaggccgcccatcgggcggccttttgatatacaaaaaaagaagcactgctttcgcagtgcttctaatctgtttggtcgcttagatcgcgcgggtaaccttaccggaacgcagacagcgggtacaaacatagacatggcggggcgtaccgttgacgatagccttcacgcgcttgacgttgggcttccagggacgattggaacgacggtgagagtgggaaactctgataccgaacgcaacacccttgtcgcaaaactcgcactttgccatccgttgcacctccttgctgtaatcaaatcaaggcttggtcattcacaagcagttgatactataacagattgcatcacaaaatgcaagtactattttcaaaaaagatgaaaaaatctgtaatttttccgctcgcggcgcaaatgagaaaaaagcgtggcgcggcagggcgttttcgcttgtaaaaaaggggggcagcgattataat

SEQ ID NO: 10262 - DNA, 7219 bp, Unknown
  gut microbiota DNA sequence
ggcacggattacgacaccgagatcttgaccatcacggacgtcaaccgccccggcctccagttcatcggctttttcgattattttgatccgagaagattacagatcatcggcaagagcgaggtgacgttcctgcgcggctactcggccgaggagcggcgcaagcgcttcgaggacctgttctgctatgagatcccggcactggtcatctcgcgcaatttagatgttttccctgagtgcctcgagatggcgcaaaagcacggccgcacgctgcttcgcacgaagtacacgtccgtcgagttcaccgccatgaccatcgactacctgaatcacgcgctcgcgcccgtcatcacacgccacggcgtgctcgtcgacgtgtacggcgagggcgtgctgatcttcggcgacagcggcatcggcaagagtgagacggccatcgagctcatcaagcgcggccaccgcctcgtcgccgacgacgcggtcgagattacgcgcatcggctcaacgctctcgggcacggcgcctgagctcatccgcaactaccttgaggtgcgcggcgttggcgtcatcgacgtggaaaagctcttcggcgtgggtgcagtgcaggattcgacgcagatcgaccttgtcatccagtttgaaaagtgggaggatgacaaattctatgaccgtctgggtctcgacgaaaacgacacgaccatccttgatgtgcccgtgccgcagatcaccattcccgtcagtgcgggccgtaacctcgccgcgatcgtggagctggcagcgatgaacaaccgccagaagaagcacggcttcaactccgcgcgcgaattcgccgcgcagatcgacggccacattgaccgcgtgacccgcgaaaatgagctgaaaaaccagaatccgtgaacggaggagcatctatgtcttgggaaaccgcactcgaccgccagatccatgactatctgcccgacctcaaatgggccgcagatgagccgatggcaaagcatacgtcgttccgcatcggggggccggccaaacgcatggcctttccgaaaacgcgcgagcagctcgttgtgctgatgggctttttgcaggacgcgggcgtcaagccgctgctgatcggcaacggcacgaacctgctcgtcgccgacaagggccttgacactgtggtcatcgacacgtccgccgagctttctcatattgagctgacggacgagggcgagatcgcagcggacgcaggcgtgtcgctcgcgaagctcgcgctgttcgcatggaaaaacggcctgacggggctggaatttgcccacggcatccccggcacgctcggcggcggcgtcgtgatgaacgcaggcgcctacggcggcgagctcaaggacgttgtcaccgaagtgacggcgctgtatcccgacggcgtgaaggttttaacacctgcggagctggatttttcttatcgccacagcgtgttttccgcgggcgagggcatcgtcctcggcgcgaaggtcaagctcgaatcgggtgctccggacgccatcaaggcaaagatggacgatctgatggcgcggcgcaaggcaagccagccgctcgagctgccgagcgcgggcagcacgttcaagcgcccgaccggctactacgcgggcccgctgatcgagggctgcggcctcaaaggctgccgcgtcggcggggcagaggtatcaagcaagcacgcgggcttcgtcgtgaacgtcggcggcgcgacctgcgccgatgtgctcgccctcatcgaaaaggtacagaagaccgtttacgacgcgcacggcgtgatgctggagccggaggtcaagatcatccggtaaatagaaagagagacaacgatggaaattctgatcatatccggtctgtccggcgcgggcaagtccagcgccgccacctatctggaggacatgggctactatacggtggacaacgtaccggcggacatcattttgaaatttgccgaattctgcgcgcagagcgacggccgctatgaccgcgtcgcgctcgtgagcgacatccgctcgggcaacggcaactttcaggggattttagacgcaatggagcggctcaagcagggcggcgatatctgccggctgctgttcgtcacggcggaccttgagaccatcatcaagcgctacaaggagacgcgccgccgccatccgctgatgtctgacggcatgaccatcgagcaggcgatgcaccgcgagcaggagctgctgcgcccgctgcgcgagcacgccgactttgtcatcgacacgacgctcatgcccgcagccaagctcagaaatgagctctacggtctctttggcgacaagagcgcgcgcggcaagctgagcgtgaacgtcgtctcattcggcttcaaatacggcatcccgctggaagccgacctggtattcgacgtgcgcttcctgcccaatcccttttacgtgccggagctcaagcacaagactggcatggacagtgaggtctatgactacgtgttctcgttcccgcagacgaagacgtttatcgacaaactcgagggaatgctctcattcctgcttccgctctacgcagaggaagggaagagcacgctcgtcatcgccgtcggctgcacgggcgggcaccaccgcagcgtgtccgtcgcgcgctgcatggcgtcctacctcacggccctgggctatcccgcgtttgaaaatcaccgcgacatcacgcgcggctgaagcaagtttttgaaacgaaagaaggtggcggcatgtcgttcgcctatgacgtaaaagcggagctctgcaaggttccgatcaaccggagctgctgcgccgtggccgagggctgcggcgtgctgctgtacgccagcgcattcaccgcaaacgaggtgcgcatcgtcacggaaaatgacgaattcgccgcgcgtctcccgaagctcttccaaaaggcattttccctgcgctttgacgaactccctgacaaatcgaaggacggcggcaagctcgtcttccgcatcacgcaggaggacaagctcgacacgatctggcgcgcgctcggctacgatcgccgggcgcattttgcgctgcacctgaactttgcgctgcttgaagaagagtgctgtcgggcgtcgttcctgcgcggggcgtttttgtccggcggcagcgtgaccgacccgcaaaagcggtatcacttagagcttgcgacctcgcacgtgcaggcggggcgcgaggtcgaggcgctgctgcgcgacatgggctttgagccgaaaaatgtcatgcggcagaataacctcattacatattttaagagcagcacccatatcgaagacctgctgacgctcatcggcgcgccggggcgcgcgcttgagatcatgtcggccaaaatcgaaaaggaaatgcgaaataccgtgaaccggcgcgtaaactgcgacgcggccaaccttgacaaagcagtgctggcctcacgtgaacaggtggaagcctttactcgcttgaccgagtccggtgcgatcaacgacctgcccgtcaaattgcaggaggtcgctgtcgcgcggttacttcagccagagctgacgctttcagaattggcggcgacatttgacccgccgctgacgaagtcgtgtttgaatcaccgcatccgaaagctcatggagatcgcaaaaaaagaagagaacgaataggagggagcgcgccatgtcgtttgcccatttacatgtccataccgaatacagcctgctcgacggcgcgtgccgtatccgcgacctccccaagctcgtcaagtcgatggggcagaccgcctgcgccatcaccgaccacggcgtgatgtacggcgtggtcgacttttaccgcgcctgcaaggccgagggtatcaagcccatcatcggctgcgaggtgtacgtcgccccgcgcacgcgctttgacaagcagcacgaattcgacagcgaggcccgccatctcgtgctgctgtgcgagaatgaggagggctatcggaatctttcctacctcgtctcaatggcgcacgtcgagggcttttacatcaagccgcgcatcgacctggatcttctgcgcgagcactccaagggcctcatcgcgctctcggcgtgtctcgccggtgagatcccgagaaggctccgcaatggcgactacaacggtgccaaggaatatgccttaacactatctgaaatctttggccccgagcacttctacctcgaattgcaggaccacggcatccgcgatcaggccatcgtgaacaagggcatcctgcgcctgcacgaggagacgggtctcccgctcgtcgtgacaaatgacgcgcactatcttcgaaaagaagatgcctacgcgcacgatgttttgctctgcatccagacgggcaagaccgtggacgacgaaaaccgcatgcgctatgagccgcagcgcttctatcttcgttcgaccgaggagatggcggcgctgtttcccgactatcccgaggcgatcgagaacaccggcaagatcgccgagcgctgcaatttggagtttacgttcggcaagtaccatctgccggaattcaaggtgccggagggctacacctcgctcacatacttcaaaaagctctgcgccgacggcttcgcccagcgctatggcgaagggacggacaagcagcgcgcgcagctcgaatacgagcagaacatgatcgagcgcatgggctttgtcgactactttttgatcgtctccgactttgtgcgctacgccaagagcgtcggtatccccgtcggtccgggccgcggcagcgcggcgggcagtatcgtttcgtactgcctgtcgatcacagacatcgagccgatgaaatacggcctctttttcgagcgctttctgaatcccgagcgcgtgtccatgcctgatatcgacatggacttcggcgatacgcgccgcggcgaggtcgtggagtatgtgcgccgcaagtacggcgacgatcacgtggcgcagatcgtgaccttcggcacgatggccgcgcgcggcgtcattcgcgatgtgggacgcgcactcaatatgagctatgccgactgtgacgtcatcgccaagctcatccccgcaggaccgcacgtcacgctcgacgacgcgctgcgcatctcgcgcgagctgcgcgaaaagtacgagggcgacgagcaggtgaaaaagctcatcgacacggcacgcgcccttgaaggcatgccgcgccacgcctcgacgcacgccgccggcgtggttatcacgaagcgccccgttgtcgactatgtcccgctcgcgcgcaacgacgacacgatcgtctgccagtacgtgatgacgacgctcgaagagctcggcttgctcaaaatggacttccttggtctgcgcaacctcacgattctggatgacgcagtcaagacgatccgtgaaaaggataaaaactttactcttgccggtattcctgaaaatgacgccgcgacctacgaaatgctggccgcggggcggacgtcgggcgtcttccagctcgaatcgagcggcatgacgggcgtgtgcgtcagcctgaagccgcagaacatcgaagacatcacggctttgattgcgctctaccgtccggggccgatggagtccattccgaaattcattgcctgcaaacacgacccgaaaaaggtcacatacctcattccgcagcttgagccgatcctgtcgatcacctatggctgcatcgtgtatcaggagcaggtcatccagatcttccagcagctcgcgggctactcgctcggccaggcagacatgctgcgccgcgcgatgagcaagaagaaggtcaaggacatcgagcgcgagcgcgaggcgtttctgcacggcgatcccgcgcgcaatatctccggctgcgtggcaaacggcatcgacgagaaggccgcgcaggaaatttacgaggaaatttacgccttcgcgaactacgcgttcaacaaggcgcacgccgcggcctatgcggtcgtcgcatatcagacggcatacttcaagtgccactatacgaaagaatacatggcggcgctgctctcgagcgtgctcgactcgtccgacaaggtgggcgagtacttcgccgagtgccgcgagtgcggcatcaagctcctgccgccggacgtcaaccattccgccgaccgtttcacggtcgagcccgagggcatccgcttcggcctcgtcgccatcaagaacatcggccgcgggctcattttgcgcatgatgcaggagcgtgagctcaacggcccgttcgtcgactttcaggatttctgccgccgcatggacggcatggagatcaataagcgtgcggtcgagaacctgatccgcgcaggcgcgttcgattcgacgggcgcgaagcgctcgcagctcatcgctgtctacgaaaaggtgatggacggcatcgccgagggcaaccgcacgaacgtggaggggcagatcgactttttcggcatgggcgcggagaccgcgcagcaggccgcgctcgtcctgcccgacattcccgagttcacgccgcaggagctcatggcgatggaaaaggccacgacagggctttacctcaccggccatccgatggacgcctaccgctcgctcgtccgctcgtccggtgcggctgccatcggccgcgtgatggaggactttgcgcaggaggcagggccgacgacattctccgacgggcaaaaaatttcgctcgcgggcgtcgtgaccgcgagcaagacgaagatgacaaagaaaaataccctcatggcctacgtgacgctcgaagacggcacgggagccatcgaaatgctctgcttcacgcgcgcgcttgaacagtacggcagctatttgcaggaggggcaggtcatttacgtcacgggtacgctgtccgtgcgcgatgaaaaggcaccgcagctcatgtgcgacttcgcccgtccgctgaatgccaatttttcgacgggaacggcagcgcctgcgcaggcgccgcagcagcggacggggcagacgctctatctgcgcctgccgtcggttgacgggccggagatggcgatcctccgcaaaatcctctatatgttcgagggaaaagagaacaacgtccgcatccgcgtgcttgataccggcaagctcatcggcacgacctgcgacctgcacacctcgcttgtgtgcgacttggaagagcgcttcggcaaggaaaacgttgtggtaaagtgagagaagggagtggcggtgatgagattgcgtttgaccatgatctgaaaatatttcgatcatggaggaatttatggagatcatcg

SEQ ID NO: 10263 - DNA, 510 bp, Unknown
  gut microbiota DNA sequence
aggatgcttgccatgttccgctatcagcagatcgacagcctcctgtggaatactgacttttctgaccgaagtctccgttttgggacgggagagcgtcagttcaccattgggattctttatatactgtttgctgacggagatggttttgttttgggtgtcgaggtcactccagagaagcgctgtgatctcgcccttccgcaagcccgtgaccagctccagatagaacatggggagcagtcctctcctgtcagcggcttccagataatccttaatatgctccggtggaagaatctgcatttcgattttttgcactttcggtgcgatgcagtcctcggtcgggttccgcaggatcaggcgctccttgaccgcccgttccaaggcgctatgcagcatgagatgcaggctccgaactgtggtgctgctgagaccgggattgccgtgaccgctcttgcgggcgatgcgtccgttttccatcagatctttgtagagcttttgtaagtcatgggcagt

SEQ ID NO: 10264 - DNA, 445 bp, Unknown
  gut microbiota DNA sequence
cttcaaatgctcggcgatggcgagcgcgcctaagttgatggtctcctcgtcgtcgccgaaggcgagatacgccgtgcgggcaaaggacttgccgcgggcgagcagatattccgcagcctccagcacgccgaagacctgctctttgatgtcaagcgtgccgcggccccaaatatagccgtccgcgatgtcgccggaaaaggcgggatgcgtccagtcctgctctgtgccctcaacaacgggaacgacgtcctgatgcgacatgtagaggcagggacgcagagaagcgtcgctgccggggatggtgatgagcacggcgtggtggccgatgcgctcaaacgtgcccacgcgcatgatgttggggtagcttgccttgatgtgcgcgtgcagcttgtcgaactccgtgtagtccgtccggctgtggtcaaagtagttgatggtcttgcac

SEQ ID NO: 10265 - DNA, 432 bp, Unknown
  gut microbiota DNA sequence
ggagccgcccaccaccagcacgtttttgttccgcgccgtcttggggtctttgggacggttggacatcatgagccgctcagtctgggtgagaatgacgttgttctcaaacttcggatcgacgtaaggggcgatatcctcgggcttgccccaacgggcagagccgtattccagattcttgcggaatttcttggcgtttttgcccttgacgtacacgataagacggatgagcagagcggcggcaacgcccgcgcacaggtcgatggggtggaagctgggcagcgccgattggaacgcggcggcaaagccctccacgaggtgcagcgcctttcccgagaaatccgtgccgggcgcaagccgccacgcctgtcccagcttggtggcaaagagggcgataaagacatacgggatattgggaagcagtaacttcttgat

SEQ ID NO: 10266 - DNA, 1209 bp, Unknown
  gut microbiota DNA sequence
gaacgttgaaacgacgaagtacttgttcccaaatggctttgctccatgacagaggcgctgtgccacactcatggtggatccgatgacgatctggtggattgacgtgataccgaaccctcttgcgagcagaaggcttttcacagcggcagcatagttctcctcgctattcttcatccagtacattcttgtactccctgtgaagtaaagaaagaagcaacaccgccctttgacgataataccgatcgtgcgtgagctcttggatactgactccggggagtactcctcgatggcgacacgcaactcgtgtgcggcgtagtaatagattttgtcgggatccggcacgaccgcattcgttgctcttttggcaggcgacatgagagatggcttttgagagatgaggagcatcgctccggccgcgttagacataaccgtcccaatagcaattgcgtgaagccgcaggattttgtcgatccaaccagggtaaatgcgctcagagctattgactcttgaatagatcatggacaccgcttctggatccctctgtgcaacatactcgaaccccttctgcgtcaagctcattgaacgaatcacatggcgcttgtgcttcttccgatatagccgcacatagccttcccgaatcgcacgatacatgaccctgcgattccattcagcgccgccaccgatccgcaccgccagctgcgtcggaaactcgatacagtatccaacaaaccagagcaattcgagtaagcgatcattcttacatgtaatcatagacactccaatcaaatcagcagcaaggctgccaacaggctgccagaggctgcatcataaagctactcacaaaagagcaaaactgaccaagcaaaaaacacccagacagaatttgtattgcctaacactacctatttctgcgctccctgagtggggacagctcgtatgcacgatatcactaccaatttctgcccattactcagagcaggttttggtagttgttttaatgtgatttttggtccaggatgaaagcgtttcaggtctcatcaggtagaactctgcgctgtcccgatcagacatcctcgtagcctggaggaccgtgcataggagaccgctatcattggtcagtagcatcgattcaatgacatccaaataccgcttggtttcaatgttgtcatagtcacgaatgcgcctttttccaagagcagcatcatagtt

SEQ ID NO: 10267 - DNA, 822 bp, Unknown
  gut microbiota DNA sequence
atgaccaatgaatgaacgggtcatagtgatcggtgccagcggtcacggtaaagttgttgcagatatcgttcgaagaagcggcgatacgctgctgggctttttggacgacaatgaggcgctcccgtctgagatcgcaggcattcccgtgcttggaaaggttgcggattacgcaagatacccggaagcgtcctttgtggtggggattggaaattctggcattcgtgaaaaggttgcgcgtcagcttgacggtgtacgctggtacacggcaatccacccgtctgcggtcatttctgcattggatacaaaaatcggcgtgggcagcgtcattatggcaaatgctgcaatcaatccgtctgcctatgtcggagagcatagcatcgtcaacacggcggcagtcgtggagcacgacaaccacatcggtagctttgcccacatttccgtcggcgcgaggcttggcggaacggtgtcggtcggaaaccacacttgggtcggtatcggagcggccatcagcaataacataagcatttgtgaccactgcacgatcggcgcgggtgcggtggtggttcgtgatatcaaggagagcggaacctatgtcggaatccctgcgagaaaaatcaaataagcggattctggtgcttgccaacaacgatgttggcctgtatcgctttcggaaggacttgcttgcagcgcttttgggtgcaggacacgaggtgtatatctctttgccggacggcggtttcatttcggagcttgtgcagcttggctgccgctttattgatacgcccatcgaccggcgcggcatgaaccctgcgcgcgatgcaa

SEQ ID NO: 10268 - DNA, 302 bp, Unknown
  gut microbiota DNA sequence
cgcgagaagatcgaatctctcatcaacgagcacacgcgcgccatcatggtcacgaatcccggcaacccgaccggcgttgtgctgagccacgaggagatggagatgctcgtcgatgtcgcacagaaacacgacctcttcctcatcggcgacgaggcgtaccgcgaattcgtctacggcggggagaagctccagtcgtttggcgagtttgccgacagggcgggtgacaacatcatcgtcatcgacacggtctccaagcgcttttccgcctgcggcgcgcgtatcggctgcctgatctccaagaa

SEQ ID NO: 10269 - DNA, 694 bp, Unknown
  gut microbiota DNA sequence
ctgatcgagatcatcggtaatctgaatctgcgtccctacgagacggatgagggcatccgtcagatctctgcggatgtcagtgtcctcgagtggcactttactggttcaaagccgaaaggcgatgaggcggactcttcgcagggtacgacaaaaaccgcacagaagagcaccggtaaggtacgcccggagcagacgattccaagtggcgatgacgatgacgacctccccctctgatctggacatacatatatgggctgtaagtgttgtgaatgcttgcagcccattttgttttgtccattccaaaatctacatacgaaaggactgactatttgtggctgtcaaaagccgaattgacgcatggaccctgctgagggttcttgttgtaccctgtctgtttctctgcgcgatcttcaagcgccccatattccaatggatcgcttgcgctgcgctttttgtctgggtgtgtttcgtgatctcgaagctattccgctcgcatagaaaacgctgcaaaaagatgcccgcagagcaaaaggcctttcctgcgaagcaggagaccaaaccgcttacggagactccgcaagaagcagatgatgacacccgactgagcttgctcagacaggtcaattatcgaatcatggagcagctgaagcagagctatcccacagtatcatggctttgggatacgcgtccttca

SEQ ID NO: 10270 - DNA, 281 bp, Unknown
  gut microbiota DNA sequence
agcaggtcgtgtatcgaaaagtctgcattgagctgctgcaggaactatttgatgctctcccgaagaaggacagggacatcctcggaaaattctacggcgtattcggatttgaaagaacttcgctgaaggaaatcggcatgtaccacatgatgaaggagtccgccgtggaaaaggcaaaggagcgtgctgtcacaaagctgaaaaaagcctatccgggtagcaggctgcagatctggaggaatgttcatcgtatgatacgcagaccgatcctgccagcgaag

SEQ ID NO: 10271 - DNA, 787 bp, Unknown
  gut microbiota DNA sequence
cgacagcaatctggcgtctggatgggcaggcagacaagcttctcgatacatatcatagggagattgctgccaaaggcttgcaaactgagaaaatggttcctgcgctgcgcttttccacctccgatgtgggcatgagcggtgcaaatctctatccgatctttctggttggtgccgagagtcgtattgttccattgggatactccattcgcaccgaacacaagaatggcgtggatatgcagtattttgaggaacagctcggattggtctatgcgcaatttgaaaaggcactggacaagcaagtgcagcttatgaacatcgagatccgctatcccgtcacaacactcatgcgtgttctgaaaagaatcaaggccccgaagaaagcctcctatgaagctatggactatttcgtagcaattcatggagacagtccttgcacggcctatgaactcttcatgcagatgagcgatgtgatcttctctgcgcagtgtgacggtgcctctgggctgaggattgctcagttggaggagattgtatctcgtgccttgaatgtgaattggcatgagtatgatcatcccggcgactttaagtggtaagaggtggtgatctcacatgaagaatataaccttcgaaggcatcagcaccttacaacgtctacacctttgctggcagatcagaaagcagattggaaagatacatcaacctatcaaagttgaattccatcagccgatttgccgcaagcagtattcttccctctggtacggcggcctggtggtatctatcaaggtgc

SEQ ID NO: 10272 - DNA, 3475 bp, Unknown
  gut microbiota DNA sequence
agctggcctttttgaatgcggtaggaaaagccggccggttttcctctgtatacagtaaaaggcccggagttccaggtgttgtttgcgagattccccagcgtttggctcatcatgccgctcatatccaccgtctcaacgccctcaggctttgtggcagaggcggaataccgcaagctgatgccctgcagctccagctgctccatcaggctgttgagattctccagtgcttccccggcaaactccctgccggagaaataggtgtccttgatccgctgcagctcctgttcgatttggatcatggtcttcaaatcgcccagcgccaccggagtcccatccacgtcggcgatgcgggtgagatccgtggcgggattttccagcagctccatgacagccgccagtgtcaacacctggccgtccagcgtgatggtttgatccaccttgaaattgccgtcttcatccagcagccccaaagcgttcagcatggaaagcacctggtcgctgctgccgccggtcagggcggagagctgctccaaaatcgcctgattttccttgggcgtgttgcccagcgaatcgctcaccgctgcaaacgccgctgtcggcagcatggtcagcaccatgcagcagacgagcaggatgctaagtattcgttttttcattggcttttctcctcctgttcgtgtcggttcggtttgtccgccccgccttttttctggttttctctgtttctgagccggaagcacagcgcggtgaacgctgccgccgcggcaaaggagacaacgcctaccagcacataaccgcccgcgtcctcccgcagcagcatcgcgccgaacacgccccatgcttccggttgccccggcccgacgaccgtgcccgccgcctgcatcagtgccgcgaacagcagcatacacatagcgctcagtccatagatgccgcgccgctgcctccggcgggtgttttcccgcacccgctgcttgacgagtgcgacccgtcttgcggtatcgtacatttcgtttgaatcccctttccggtttgtctgaaactgtggcctaaaaaccctttcacttatataggtacaaaaaatcgaaaaaactctcacccaaaacgcaaaatttttcaaaaaatttgagagccgccaaaaagcagctctcaaggagggaatgttcggttattttctccgcgataagcggaaagcggacagctttcccgccgccaccagcagcaccggcagggcgtaggccacatactgcgccgcgccgccgtaggcgatgagcagattgtagatggcgtggagggtgatggccgcgcccagcagcccacaggtgcctgcgatcttcagccacgtccgctgccacgtgtatgcaaggccaccgccgacgatcaagccgcagaggacgtgcatcgcgcccgtgccgaagccacggaagaagatgaaggagaagcggtccgcgccgttttggatcagatagcacacattttcgaaggtggcgaaggcgagggcgaccgtgatggcggcgggcttgatcttatccccctccggctcgaataccagaagatagaacaccagcggcagcagcttcatcatttcctccaccaccggcgcaatctccgccgtggcggcaagggcgtccgcctgacataccgccgcgaggaaggtgttgatataggccgaaagcaggcacacccccatcccggcaatgcagaacaggaagaagcggagctgccgcctgcccatgcacaaagcggccaccagcagcggggacaccatgcagataaaaatattctcgatgtaggtcatgcagccaccgcctttctcgtggcgggcagcagccccagaatcgcaagcgtcagcagcatatcacaccagaaggtggggcttgccggtgaggtttccggccagaagcagcccaccgtccagagcagatactccgcgaacgcaaagcacagcacgccgatgtggaagtaccgcatattctgcgccgcgcccgtctgcgttttcacatagacaagcccacgaatggcgcagaaggagagccatatcatcatgccgcaccagatcaggttggagagaatatccccgaagatgcagtagaacgccagcagcggcacaccgaacgcaggcgcgagccacgccctgcggcagcggaagccccgctcatctgctcccgccagagtggcctgcaaaatgcgcaggaagatgaggcttgccacccagccgaactccgagacataaaagacccgcggtgtggtatcgaacagcagcagatacagcgtccagtagagcgcgccaagggcaaagcagccgtagaagcacagcagcaggaaatatgcctgtcgtccgcttttccggtaggatatgcccgaaagcagcgcgccgacgaacgtggtcagcaattgcagcaggttctcaatcagctccatgaatcccctcgcgttctttgttctgatcgtcctcccggttcatctgccgcagccggaagcacagaacggtcacacacacgccgagtaaaaacgccaaaagcccgatgacgatgtatcccaaagccgcgccgccgtgaaagatgcttgccgccgtttcaaagccggaatagtcgcctgtctggatatttgcggcgatgccgggcatggcgagggacgcgccgatgagcagcgcgaggcacgccgccacggcggaagccatggtgatcgtattgcgccgccgccgtttctcccgctcaatttgggcgatgcgccgcttcgtctcagcgacccgttcctcatgactccgcatttgtgatcccctcccgttccagcagccttcgcaggctctcttttccgcgatacaccaggttggtgatctgttttaccgtttttcccgtgacctccgccgcctgcgcgtagctcatatcctcaaaataggtgagatagaggacttcccgatagtccgggttcatttcatccatgcagaaatgcaggatgcggtttcgttcctccgtccggatgacctccaccgccagcagctgcccgtccggctcgccggtcagctcgtccagactgaacaggggctttcgtttgctcttatggcgcagtgccatgtggcgcgcggccttatagagatacgccttgaagccgccgtcccgtatcttcggcttttttgtgaacagataggcgaaaacatccagcatcagctcctccgcctcgtgaacgtcgtgcagatagccgtcaatatacagggtcagggggtcaccgtattttttcatcagggcattaagcccttcgtcatcgccgctcagatattggcgatacaagctctcatcgcaggtcatagcgttcacttcctttttgcggatgctaaaatgcagaggggtatccgtcagatgcttgtcctgtcgggatcgcggtgctgttcctgaaagcgcgggtcggacggcttttccgcattttccgggatcgcccatgagcgcccgaaccgggacgcgccggggatccgcccctcggc

SEQ ID NO: 10273 - DNA, 465 bp, Unknown
  gut microbiota DNA sequence
agtaagtcgattgaaaatgaaatatcagacagatgacccgtatgagatctgcgagtatttggatatccaggtgatggaacgtccaatgggaaagagtccccgttcctgcaagggttttttcctggtttcttctcggtgcaaactgattgtaatcaacagtgatttgcccgacagcattcaacggatcatcattgcgcacgagctggggcatgcagtcctccacagcgattctgccattaacaccttccatgagtttgcgatgtttgaggatacaaatcgaatggagtatgaggcaaatgtgtttgctgcggagttcatgctcagcgatgacaccgtcttagaagcgctggagatgcaaatggacttttatcagacagcgaagtgtttgtatgtgccacctgagttactggacttcaagctccggattctacaatgccaaggtgtaagaatcatagctccgtatat

SEQ ID NO: 10274 - DNA, 567 bp, Unknown
  gut microbiota DNA sequence
gagcataaaaggtgtatggcaaatgctcgtgctcgttatagtacctctgtaatgcagcgctatacattttttccctcctcacaagtttctccaatgtcatgggctctaaagtagatccctcaatggcacctttcgttccacaaaccaacggcctatcgtattacccgttagattggtggatcgttcaaaatagagatatgttcttgcaccattgacttggatggtgtaacgatcgccttgcccgccggcttttgcagcataggctgggcgaatatcgatcacgcggtctatttcatatttctggccatcctcccagatgatttccctaggcagcattgtcccatccgaacgatgctctacaaaaacgctcacatagaccttataagcctcacctggcagcatacttaactcaacggctgctccagatctcgcttgaggaaatccccatgcgcaatatacggagctatgattcttacaccttggcattgtagaatccggagcttgaagtccagtaactcaggtggcacatacaaacacttcgctgtctgataaaagtccatttgcatc
